(19) United States
(12) Patent Application Publication
(10) Pub. No.: US 2026/0028677 A1
(43) Pub. Date: Jan. 29, 2026

(54) Compositions and Methods for Modulating Genetic Drivers

(71) Applicant: Flagship Pioneering Innovations VII, LLC, Cambridge, MA (US)

(72) Inventors: Vinidhra Mani, Brookline, MA (US); Erica Gabrielle Weinstein, Newton, MA (US); Yann Paul Guy Régis Echelard, Jamaica Plain, MA (US); Avak Kahvejian, Lexington, MA (US); Patrick Shannon Pendergrast, Cambridge, MA (US); Tamara Ouspenskaia, Belmont, MA (US); Gabriel Humphrey Billings, Somerville, MA (US); Maxim Gerashchenko, Boston, MA (US)

(21) Appl. No.: 18/868,986

(22) PCT Filed: May 25, 2023
(86) PCT No.: PCT/US2023/067491

§ 371 Date: Nov. 25, 2024

Related U.S. Application Data
(60) Provisional application No. 63/345,787, filed on May 25, 2022.

(51) Int. Cl. C12Q 1/6886; G01N 33/574

(52) U.S. Cl. CPC C12Q 1/6886; G01N 33/574; C12Q 2600/156; C12Q 2600/158

(57) ABSTRACT

The disclosure provides, in various embodiments, compositions, such as polypeptides, polynucleotides, gene editing systems, small molecules, vectors or host cells, that comprise and/or modulate expression or activity of immune regulation-associated proteins, such as cytokines. The disclosure also provides, in various embodiments, methods of treating a disease or condition (e.g., a disease or condition associated with the Genome-Wide Association Study (GWAS), the Cancer Genome Atlas (TCGA), whole genome sequencing, phenome-wide association study (PheWAS), expression quantitative trait locus (cQTL) studies, or a combination thereof) using an agent that comprises and/or modulates expression or activity of an immune regulation-associated protein, and methods of identifying said agent.

### INCORPORATION BY REFERENCE OF MATERIAL

[0001] This application claims the benefit of U.S. Provisional Application No. 63/345,787, filed on May 25, 2022. The entire teachings of the above application are incorporated herein by reference.

### INCORPORATION BY REFERENCE OF MATERIAL IN XML

[0002] This application incorporates by reference the Sequence Listing contained in the following extensible Markup Language (XML) file being submitted concurrently herewith:
[0003] a) File name: 57081058002.xml; created May 24, 2023, 8,059,812 Bytes in size.

### BACKGROUND

[0004] A lack of effective therapeutic agents and methods for diagnosis, prevention and/or treatment underlie persistently unmet medical needs across many diseases and conditions. Many diseases and conditions have a genetic component that can influence or directly cause dysfunction. A genetic predisposition for developing a disease or condition can result from a change at a single genetic locus or can be a consequence of changes at many genetic loci collectively. Identification of novel genetic drivers of diseases and conditions provide opportunities for developing and/or improving diagnosis, prevention and/or treatment options for various diseases and conditions.

### SUMMARY

[0005] The disclosure provided herein is based, in part, on the identification of non-canonical protein targets (e.g., proteins encoded by non-canonical open reading frames (ORFs)) that are altered (e.g., mutated) in various diseases, conditions, or pre-diseases.

[0006] In one aspect, the present disclosure relates to an agent that comprises and/or modulates (e.g., increases or decreases) the expression and/or activity of a target protein identified herein (e.g., a target protein in the Sequence Listing, in Table A, or a variant of the foregoing). In some embodiments, the agent comprises a target protein identified herein (e.g., a target protein in the Sequence Listing, in Table A, or a variant of the foregoing). In certain embodiments, the agent modulates (e.g., increases or decreases) the expression and/or activity of a target protein identified herein (e.g., a target protein in the Sequence Listing, in Table A, or a variant of the foregoing). In some embodiments, the agent comprises, consists essentially of, or consists of a polypeptide, a polynucleotide, a gene editing system, a small molecule, or a cell (e.g., a cell therapy). The agent can be an inhibitor or an activator of a target protein identified herein. In some embodiments, the agent modulates the expression of a target protein identified herein. In some embodiments, the agent modulates the activity of a target protein identified herein.

[0007] In another aspect, the disclosure provides a pharmaceutical composition comprising a target protein identified herein, and a pharmaceutically acceptable carrier.

[0008] In another aspect, the disclosure provides a pharmaceutical composition comprising an agent that modulates the expression or activity of a target protein identified herein, and a pharmaceutically acceptable carrier.

[0009] In other aspects, the disclosure relates to a polynucleotide encoding a polypeptide described herein, an expression vector comprising a polynucleotide encoding a polypeptide described herein, and a host cell comprising a polynucleotide encoding a polypeptide described herein.

[0010] In another aspect, the disclosure provides a method of detecting a disease or condition, or determining a likelihood of developing the disease or condition in a subject, comprising quantifying an expression or activity of a target protein in a sample from the subject, wherein the level of expression or activity of the target protein in the sample is indicative of the likelihood of developing the disease or condition in the subject. In particular embodiments, the disease or condition is associated with the Genome-Wide Association Study (GWAS, see, e.g., www.genome.gov/about-genomics/fact-sheets/Genome-Wide-Association-Studies-Fact-Sheet), the Cancer Genome Atlas (TCGA, see, e.g., www.cancer.gov/about-nci/organization/ccg/research/structural-genomics/tcga), whole genome sequencing, phenome-wide association study (PheWAS, see, e.g., https://phewascatalog.org/), expression quantitative trait locus (eQTL) studies (see, e.g., Nica & Dermitzakis, Expression quantitative trait loci: present and future, Philos Trans R Soc Lond B Biol Sci. 368 (1620): 20120362 (2013) and www.ebi.ac.uk/eqtl/), or a combination thereof (e.g., a disease listed in paragraphs [0219] and [0220]).

[0011] In another aspect, the disclosure provides a method of preparing a sample that is useful for determining a likelihood of developing a disease or condition in a subject, comprising:
[0012] a) obtaining or having obtained a sample from the subject;
[0013] b) adding a protease inhibitor, a control peptide, a standard peptide, or a combination thereof to the sample to prepare a sample that is useful for detecting a likelihood of developing cancer; and
[0014] c) quantifying an expression or activity of a target protein in the sample prepared in step b).

[0015] In some embodiments, the method further comprises treating a subject who is predicted to have a likelihood of developing the disease or condition, comprising administering to the subject an effective amount of an agent that comprises and/or modulates the expression or activity of the target protein identified herein, or a pharmaceutical composition comprising the agent.

[0016] In another aspect, the disclosure provides a method of treating a disease or condition in a subject in need thereof (e.g., a human subject having a cancer), comprising administering to the subject an effective amount of an agent that comprises and/or modulates the expression or activity of a target protein identified herein, or a pharmaceutical composition comprising the agent.

[0017] In another aspect, the disclosure provides a method of selecting a subject suitable for treatment of a disease or condition, comprising quantifying an expression or activity of a target protein in a sample from the subject, and selecting the subject suitable for treatment of the disease or condition according to the level of expression or activity of the target protein in the sample.

[0018] In another aspect, the disclosure provides a method of modulating the expression or activity of a target protein identified in the Sequence Listing, in Table A, or a variant of the foregoing in a cell (e.g., a cancer cell, such as a cancer cell in a subject), comprising contacting the cell (e.g., in vitro, ex vivo, or in vivo) with an agent that comprises and/or modulates the expression or activity of a target protein identified herein, or a pharmaceutical composition comprising the agent.

[0019] In another aspect, the disclosure provides a method of identifying an agent that modulates the expression or activity of a target protein identified herein, comprising:
[0020] a) contacting the target protein with an agent; and
[0021] b) determining whether the agent modulates the expression or activity of the target protein, wherein a difference in the expression or activity of the target protein that has been contacted with the agent compared to a reference for the expression or activity of the target protein indicates that the agent modulates the expression or activity of the target protein.

### BRIEF DESCRIPTION OF THE DRAWINGS

[0022] The foregoing will be apparent from the following more particular description of example embodiments, as illustrated in the accompanying drawings in which like reference characters refer to the same parts throughout the different views. The drawings are not necessarily to scale, emphasis instead being placed upon illustrating embodiments.

[0023] FIG. 1 shows effects of SEQ ID NO: 5391 on cell proliferation of colon cancer cell line (HCT-116). WST-1 assay on HCT-116 to examine their cell viability and growth when transiently over-expressed SEQ ID NO: 5391 using Lipofectamine 3000. After plasmid transfection, cell proliferation was measured 48 hours later using WST-1 assay. Data are presented as the mean±SD of three independent experiments performed in triplicate.

[0024] FIGS. 2A-2C show analysis of cell viability using the WST-1 assay on lung cancer (A549), liver cancer (HepG2), and colon cancer (HCT-116). Cells were transfected with SEQ ID NO: 4538, SEQ ID NO: 5392, and SEQ ID NO: 4335 individually. pcDNA3.1-Myc tagged was used for negative control. After plasmid transfection, cell proliferation was measured 48 hours later using WST-1 assay. Data are presented as the mean±SD of three independent experiments performed in triplicate. FIG. 2A) WST-1 results in HCT-116 cells. Top: low serum, Bottom: High serum. FIG. 2B) WST-1 results in HepG2 cells. Top: low serum, Bottom: High serum. FIG. 2C) WST-1 results in A549 cells. Top: low serum, Bottom: High serum.

[0025] FIG. 3 shows relative level of secretion of 4 different versions of SEQ ID NO: 4371 that differ in one amino acid at a human GWAS location for type 2 diabetes.

[0026] FIG. 4 shows effects of SEQ ID NO: 5404 on cell proliferation of breast cancer cell line (MCF-1). WST-1 assay on MCF-7 to examine their cell viability and growth when stably over-expressed. Cell proliferation was measured using WST-1 assay. Data are presented as the mean±SD of three independent experiments performed in triplicate.

### DETAILED DESCRIPTION

[0027] A description of example embodiments follows.

### Target Proteins

[0028] In one aspect, the disclosure provides a target protein identified herein. As used herein, the expressions “target protein identified herein” and “target protein of the disclosure” include both the polypeptides disclosed in the Sequence Listing (e.g., a target protein comprising an amino acid sequence selected from SEQ ID NO: 5391, SEQ ID NO: 5392, SEQ ID NO: 4335, SEQ ID NO: 4538, SEQ ID NO: 4371, SEQ ID NO: 5404, a SEQ ID NO in Table C herein), a variant thereof (e.g., a target protein comprising an amino acid sequence selected from SEQ ID NO: 4335_64NS, SEQ ID NO: 4335_P43A, SEQ ID NO: 5391_P31L, SEQ ID NO: 4371 rs221797 V-to-A, V-to-G, or V-to-D), and the peptides disclosed in Table A herein. The target protein can be produced recombinantly (e.g., via DNA or mRNA) or synthetically.

[0029] In some embodiments, the target protein is an intracellular protein. In some embodiments, the target protein is an extracellular protein (e.g., a secreted protein). In certain embodiments, the target protein is a transmembrane protein. In particular embodiments, the target protein is membrane bound and extracellular, but is not transmembrane. In more particular embodiments, the target protein is embedded in a membrane, but is not transmembrane.

[0030] In various embodiments, the target protein is a protein comprising an amino acid sequence set forth in the Sequence Listing or Table A. In some embodiments, the target protein consists of an amino acid sequence set forth in the Sequence Listing or Table A. In some embodiments, the target protein comprises an amino acid sequence having one amino acid substitution relative to an amino acid sequence set forth in the Sequence Listing or Table A, wherein the substitution is substitution of an N-terminal residue in an amino acid sequence in the Sequence Listing or Table A with a methionine (Met) residue. In some embodiments, the target protein consists of an amino acid sequence having one amino acid substitution relative to an amino acid sequence set forth in the Sequence Listing or Table A, wherein the substitution is substitution of an N-terminal residue in an amino acid sequence in the Sequence Listing or Table A with a methionine (Met) residue. In some embodiments, the target protein comprises an amino acid sequence set forth in the Sequence Listing or Table A and further comprises a methionine (Met) residue at its N-terminus. In some embodiments, the target protein consists of an amino acid sequence set forth in the Sequence Listing or Table A and a methionine (Met) residue at its N-terminus.

TABLE A
Target Peptides of the Disclosure

| SEQ ID NO: | Sequence |
|---|---|
| 5139 | MP |
| 5203 | VAV |

[0031] Without wishing to be bound by theory, it is believed that mutation of certain target proteins disclosed herein is associated with, contributes to, or results in a disease, condition, and/or pre-disease, where the mutation results in a loss or a gain of a biological function contributing to or alleviating the disease, condition, and/or pre-disease. In some embodiments, the mutation and/or target protein is used as a biomarker or surrogate for the disease, condition, and/or pre-disease.

[0032] Certain of the target proteins in the Sequence Listing and Table A have been identified as being differentially expressed (e.g., upregulated or downregulated) in a disease, condition and/or pre-disease state associated with the GWAS, TCGA, whole genome sequencing, PheWAS, eQTL studies, or a combination thereof (e.g., a disease listed in paragraphs [0219] and [0220]) compared to a reference state (e.g., normal state) such that modulation of the level and/or activity of the target protein acts to treat, ameliorate, and/or prevent the development of the disease or condition.

[0033] As used herein, the term “differential expression,” refers to at least one recognizable difference in protein expression. It may be a quantitatively measurable, semi-quantitatively estimable or qualitatively detectable difference in protein expression. Thus, a differentially expressed protein, or “DEP,” may have a higher expression level in a reference state (e.g., normal state) than in a disease state, in which the DEP has a lower expression level or is not expressed at all. Conversely, a DEP may have a higher expression level in a disease state than in a reference state (e.g., normal state), in which the DEP has a lower expression level or is not expressed at all. Further, expression may be regarded as differential if the DEP is recognizably changed (e.g., mutated) between two states under comparison. Recognizable changes can include amino acid substitutions, insertions, and/or deletions, including N- and C-terminal truncations, as well as modifications (e.g., post-translational modifications).

[0034] As used herein, the term “reference” refers to a standard used for comparison purpose(s). A person skilled in the art can select an appropriate reference for a particular comparison purpose(s). Thus, for example, a reference for a disease state may be a normal, healthy state; a reference for a mutated protein may be the non-mutated protein; a reference for a disease treatment may be no treatment or may be a standard of care treatment. In some embodiments, particularly embodiments involving methods of identifying an agent that modulates the expression and/or activity of a target protein, the reference is the activity and/or expression of the target protein in the absence of the agent. In some embodiments, a reference is based on a predetermined level, e.g., based on functional expression or empirical assays. In some embodiments, a reference obtained from one cell, sample or subject (e.g., a cell or sample from a healthy subject, a subject that does not have a particular disease; a healthy subject, a subject who does not have the particular disease). In some embodiments, a reference is obtained from more than one (e.g., a population of) cell, sample or subject (e.g., a cell or sample from a healthy subject, a subject that does not have a particular disease; a healthy subject, a subject who does not have a particular disease), such as 2, 3, 4, 5, 10, 20, 30, 50, 100 or more, or a statistically significant number of cells, samples or healthy subjects. A reference obtained from more than one cell, sample or subject can be represented as a statistic (e.g., an average or median).

[0035] In some embodiments, the target protein has an expression level in a disease or condition (e.g., a disease or condition associated with GWAS, TCGA, whole genome sequencing, PheWAS, eQTL studies, or a combination thereof) (e.g., as determined from a sample from a cell or tissue of a subject having the disease or condition) that is at least about 0.5-fold higher, e.g., at least about: 0.6-, 0.7-, 0.8-, 0.9-, 1.0-, 1.1-, 1.2-, 1.3-, 1.4-, 1.5-, 1.6-, 1.7-, 1.8-, 1.9-, 2.0-, 2.5-, 3-, 3.5-, 4-, 5-, 6-, 7-, 8-, 9- or 10-fold higher (e.g., 50 fold higher, 100-fold higher) than the target protein expression level in a reference (e.g., a sample from a cell or tissue of a subject who does not have the disease or condition).

[0036] In some embodiments, the target protein has an expression level in a disease or condition (e.g., a disease or condition associated with GWAS, TCGA, whole genome sequencing, PheWAS, eQTL studies, or a combination thereof, such as a disease listed in paragraphs [0219] and [0220]) (e.g., as determined from a sample comprising or obtained from a cell or tissue of a subject having the disease or condition) that is at least about 0.5-fold lower, e.g. at least about: 0.6-, 0.7-, 0.8-, 0.9-, 1.0-, 1.1-, 1.2-, 1.3-, 1.4-, 1.5-, 1.6-, 1.7-, 1.8-, 1.9-, 2.0-, 2.5-, 3-, 3.5-, 4-, 5-, 6-, 7-, 8-, 9- or 10-fold lower (e.g., 50-fold lower, 100-fold lower) than the target protein expression level in a reference (e.g., a sample from a cell or tissue of a subject who does not have the disease or condition). In some embodiments, the target protein is not expressed, or is expressed at an undetectable level, in a disease or condition (e.g., a disease or condition associated with GWAS, TCGA, whole genome sequencing, PheWAS, eQTL studies, or a combination thereof, such as a disease listed in paragraphs [0219] and [0220]) (e.g., as determined from a sample comprising or obtained from a cell or tissue of a subject having the disease or condition).

[0037] In some embodiments, the target protein has a transcript level in a disease or condition (e.g., a disease or condition associated with GWAS, TCGA, whole genome sequencing, PheWAS, eQTL studies, or a combination thereof, such as a disease listed in paragraphs [0219] and [0220]) (e.g., as determined from a sample from a cell or tissue of a subject having the disease or condition) that is at least about 0.5-fold higher, e.g., at least about: 0.6-, 0.7-, 0.8-, 0.9-, 1.0-, 1.1-, 1.2-, 1.3-, 1.4-, 1.5-, 1.6-, 1.7-, 1.8-, 1.9-, 2.0-, 2.5-, 3-, 3.5-, 4-, 5-, 6-, 7-, 8-, 9- or 10-fold higher (e.g., 50 fold higher, 100-fold higher) than the target protein transcript level in a reference (e.g., a sample from a cell or tissue of a subject who does not have the disease or condition). In particular embodiments, an increase in the transcript level of a target protein contributes to (e.g., results in) a disease or condition described herein.

[0038] In some embodiments, the target protein has a transcript level in a disease or condition (e.g., a disease or condition associated with GWAS, TCGA, whole genome sequencing, PheWAS, eQTL studies, or a combination thereof, such as a disease listed in paragraphs [0219] and [0220]) (e.g., as determined from a sample comprising or obtained from a cell or tissue of a subject having the disease or condition) that is at least about 0.5-fold lower, e.g. at least about: 0.6-, 0.7-, 0.8-, 0.9-, 1.0-, 1.1-, 1.2-, 1.3-, 1.4-, 1.5-, 1.6-, 1.7-, 1.8-, 1.9-, 2.0-, 2.5-, 3-, 3.5-, 4-, 5-, 6-, 7-, 8-, 9- or 10-fold lower (e.g., 50-fold lower, 100-fold lower) than the target protein transcript level in a reference (e.g., a sample from a cell or tissue of a subject who does not have the disease or condition). In some embodiments, the transcript of the target protein is not expressed, or is expressed at an undetectable level, in a disease or condition (e.g., as determined from a sample comprising or obtained from a cell or tissue of a subject having the disease or condition). In particular embodiments, a decrease in the transcript level of a target protein contributes to (e.g., results in) a disease or condition described herein.

[0039] In particular embodiments, the gene encoding the target protein comprises at least one mutation (e.g., a fusion, a deletion, an insertion, a point mutation, and/or an expansion of amino-acid repeats) in a disease described herein.

[0040] In some embodiments, the mutation and/or target protein is used as a marker of a disease or condition (e.g., a disease or condition associated with GWAS, TCGA, whole genome sequencing, PheWAS, eQTL studies, or a combination thereof, such as a disease listed in paragraphs [0219] and [0220]).

[0041] In certain embodiments, the target protein has a higher expression level in a cell and/or tissue implicated in a disease or condition described herein. In some embodiments, the target protein has an expression level in the cell and/or tissue that is at least about 0.5-fold higher, e.g., at least about: 0.6-, 0.7-, 0.8-, 0.9-, 1.0-, 1.1-, 1.2-, 1.3-, 1.4-, 1.5-, 1.6-, 1.7-, 1.8-, 1.9-, 2.0-, 2.5-, 3-, 3.5-, 4-, 5-, 6-, 7-, 8-, 9- or 10-fold higher (e.g., 50-fold higher, 100-fold higher) than the target protein expression level in a reference (e.g., a different cell/tissue type).

[0042] In certain embodiments, the target protein has a lower expression level in a cell and/or tissue implicated in a disease or condition described herein. In some embodiments, the target protein has an expression level in the cell and/or tissue that is at least about 0.5-fold lower, e.g., at least about: 0.6-, 0.7-, 0.8-, 0.9-, 1.0-, 1.1-, 1.2-, 1.3-, 1.4-, 1.5-, 1.6-, 1.7-, 1.8-, 1.9-, 2.0-, 2.5-, 3-, 3.5-, 4-, 5-, 6-, 7-, 8-, 9- or 10-fold lower (e.g., 50-fold lower, 100-fold lower) than the target protein expression level in a reference (e.g., a different cell/tissue type).

[0043] Non-limiting examples of (biological) samples include blood, blood components (e.g., serum or plasma), urine, saliva, amniotic fluid, cerebrospinal fluid, tissue (e.g., a biopsy or microbiopsy), pancreatic fluid, chorionic villus sample, and cells, etc., isolated from a subject.

[0044] In some embodiments, the target protein is translated from a non-coding RNA. In some embodiments, the non-coding RNA is a long intergenic non-coding RNA (lincRNA). In certain embodiments, the non-coding RNA is a long noncoding RNA (lncRNA). In some embodiments, the non-coding RNA is a microRNA (miRNA or miR).

[0045] In some embodiments, the target protein is translated from a non-exonic element in an unprocessed precursor mRNA (pre-mRNA). In some embodiments, the non-exonic element is an intron in a pre-mRNA. In some embodiments, the non-exonic element is a 5′-untranslated region (5′-UTR) in a pre-mRNA. In some embodiments, the non-exonic element is a 3′-untranslated region (3′-UTR) in a pre-mRNA.

[0046] In some embodiments, the target protein has a length of 2,000 amino acids or less, e.g., 1000 amino acids or less, 750 amino acids or less, 500 amino acids or less, 250 amino acids or less, 150 amino acids or less or 100 amino acids or less. In some embodiments, the target protein has a length of 7 amino acids or more, e.g., 8, 9, 10, 15, 18, 25, 50, 75 or 100 amino acids or more. In certain embodiments, the target protein has a length of from about 50 to about 200 amino acids, e.g., from about 100 to about 150 amino acids. In particular embodiments, the target protein has a length of 7 amino acids or more. In more particular embodiments, the target protein has a length of about 18 amino acids.

[0047] In some embodiments, a target protein of the disclosure is a modulator of one or more GPCRs. In some embodiments, a target protein is an agonist of one or more GPCRs. In some embodiments, a target protein is an antagonist of one or more GPCRs. In some embodiments, a target protein is a direct modulator of one or more GPCRs, such as a ligand for one or more GPCRs. In some embodiments, a target protein is an indirect modulator of one or more GPCRs.

[0048] The expression and/or activity of various GPCRs have been linked to different diseases/disorders, conditions and indications, including those set forth in Table B (see, e.g., Kenakin, T., Biased Receptor Signaling in Drug Discovery, Pharmacol Rev 71:267-315, April 2019; Harmar, A. J., et al., IUPHAR-DB: the IUPHAR database of G protein-coupled receptors and ion channels, Nucleic Acids Research, 2009, Vol. 37; and Davenport A P, Scully C C G, de Graaf C, Brown A J H, and Maguire J J. Advances in therapeutic peptides targeting G protein-coupled receptors. Nat Rev Drug Discov. 2020 Jun. 19 (6): 389-413; the contents of each are incorporated herein by reference in their entirety). Accordingly, in some embodiments, a target protein disclosed herein, which is a modulator of a GPCR, is useful for treating and/or diagnosing one or more diseases/disorders, conditions and/or indications, such as cancer or a pre-cancerous condition, or any of the diseases/disorders, conditions and indications listed in Table B, which are known to be associated with GPCR expression and/or activity.

TABLE B
GPCRs Associated with Disease

| Disease group | GPCRs Associated with Disease Group |
|---|---|
| acute disease | ADRB1, P2RY12, AGTR1 |
| breast disease | GNRHR |
| cancer or benign | ADRB2, ADRA1A, TSHR, SSTR3, SSTR1, GNRHR, CXCR4, CASR, |
| tumor | GCGR, ADRA1D, SSTR4, ADRA1B, OPRM1, SMO, TACR1, |
| | OPRK1, SSTR2, ADRB1, MC1R, SSTR5 |
| cardiovascular | ADRB3, OPRD1, ADRB2, ADRA1A, AGTR1, ADORA1, TSHR, |
| disease | HTR1D, PTGIR, HTR4, DRD2, F2R, HTR1B, FZD4, EDNRB, |
| | ADRA1D, ADORA2A, HTR1F, ADORA3, ADORA2B, CELSR1, |
| | CALCRL, ADRA1B, BDKRB2, OPRM1, ADRA2B, GLP1R, |
| | AVPR1A, P2RY12, OPRK1, PTGFR, ADRB1, ADRA2A, AVPR2, |
| | ADRA2C, EDNRA |
| chronic disease | ADORA3, ADORA2B, ADGRG6, ADRB2, CASR, GABBR1, |
| | AGTR1, GABBR2, ADORA1, CHRM3, CHRM1, ADORA2A |
| connective tissue | ADRB3, OPRD1, MC2R, OPRK1, CASR, PTGER3, OPRM1, |
| disease | ADRA2A, ADRA2B, ADRA2C, GNRHR |
| digestive system | CALCR, AGTR1, MTNR1B, GIPR, CHRM3, SSTR3, SSTR1, HTR4, |
| disease | PTGER3, GCGR, CHRM1, EDNRB, HRH2, DRD3, OPRM1, GLP1R, |
| | P2RY12, S1PR1, SSTR2, HTR1A, DRD4, MC1R, EDNRA, GLP2R, |
| | SSTR5 |
| disorder of | CALCR, S1PR4, AGTR1, GABBR2, CHRM3, GNRHR, KISS1R, |
| development or | S1PR3, FZD2, PTH1R, HRH1, S1PR2, EDNRB, LHCGR, ADGRG2, |
| morphogenesis | ADGRG6, CELSR1, GABBR1, SMO, S1PR1, MC2R, S1PR5, MC1R, |
| | EDNRA |
| disorder of | ADRB3, ADRB2, GPR179, GPR143, P2RY2, OPN1LW, CHRM3, |
| visual system | P2RY4, OPN1SW, GRM6, CASR, HRH1, CHRM1, FZD4, EDNRB, |
| | RHO, ADRA2B, ADGRV1, FZD5, CHRM2, P2RY1, PTGFR, |
| | ADRB1, ADRA2A, ADRA2C, P2RY6, OPN1MW |
| endocrine | CALCR, AGTR1, MTNR1B, MC4R, GIPR, TSHR, SSTR3, SSTR1, |
| system disease | TACR3, GNRHR, FSHR, KISS1R, PTH1R, CASR, GCGR, GHRHR, |
| | LHCGR, DRD3, SSTR4, GHSR, GLP1R, TACR1, P2RY12, MC2R, |
| | SSTR2, PROKR2, DRD4, MC1R, EDNRA, CHRM1, SSTR5 |
| genetic disorder | CNR1, GABBR2, MC4R, SSTR3, SSTR1, KISS1R, PTH1R, GHRHR, |
| | ADRA2B, GRM1, AVPR1A, P2RY12, HTR1A, PROKR2, OPN1MW, |
| | TBXA2R, ADRA1A, AGTR1, MTNR1B, OPN1LW, CHRM3, GRM7, |
| | HTR1D, GPR68, S1PR2, RHO, LHCGR, ADORA2A, ADORA3, |
| | ADORA2B, SSTR4, BDKRB2, LPAR6, ADGRV1, S1PR1, SSTR2, |
| | CHRM2, PTGFR, HRH3, CALCR, HTR2A, GPR143, MTNR1A, |
| | TACR3, HTR4, GNRHR, FSHR, GRM6, FZD2, CASR, EDNRB, |
| | ADRA1D, ADGRG2, ADGRG6, GABBR1, ADRA1B, OPRM1, |
| | SMO, FZD6, MC2R, ADRA2A, AVPR2, ADRA2C, CHRM1, SSTR5, |
| | ADRB3, GPR179, ADORA1, TSHR, OPN1SW, DRD2, CXCR4, |
| | FZD4, AVPR1B, HRH2, DRD3, CELSR1, CCR5, HTR2C, DRD4, |
| | MC1R, EDNRA |
| head and neck | ADRB3, ADRB2, GPR179, ADRA1A, GPR143, P2RY2, OPN1LW, |
| disorder | CHRM3, P2RY4, OPN1SW, GRM6, CASR, HRH1, FZD4, EDNRB, |
| | ADRA1D, RHO, OPN1MW, ADRA1B, ADRA2B, ADGRV1, FZD5, |
| | CHRM2, P2RY1, PTGFR, ADRB1, ADRA2A, ADRA2C, P2RY6, |
| | CHRM1 |
| hematologic | P2RY12, MC2R, CXCR4, TBXA2R, OPRM1, DRD4, AVPR2, |
| disease | AVPR1B, AVPR1A, SMO, DRD3 |
| idiopathic | HTR2A, CASR, HRH1, CNR1, GABBR2, EDNRB, EDNRA, HTR2C |
| disease | |
| immune system | ADRB3, CALCR, ADRA1A, S1PR4, GABBR2, TSHR, CHRM3, |
| disease | S1PR3, CXCR4, HRH1, S1PR2, GCGR, ADRA1D, CYSLTR1, |
| | CELSR1, GABBR1, ADRA1B, ADRA2B, GLP1R, CCR5, S1PR1, |
| | MC2R, CHRM2, S1PR5, PTGFR, ADRA2A, ADRA2C, CHRM1 |
| inflammatory | ADRB3, OPRD1, ADRB2, ADRA1A, AGTR1, P2RY2, TSHR, |
| disease | CHRM3, P2RY4, HRH1, PTGER3, ADRA1D, CYSLTR1, ADRA1B, |
| | BDKRB2, OPRM1, ADRA2B, S1PR1, MC2R, OPRK1, CHRM2, |
| | P2RY1, ADGRE2, PTGFR, ADRB1, ADRA2A, ADRA2C, P2RY6, |
| | CHRM1 |
| injury | PTH1R, HRH1, GABBR1, PTGER3, GABBR2, AVPR2, AVPR1B, |
| | AVPR1A, HRH2, CHRM1 |
| integumentary | ADRB3, HRH1, ADRA1A, GNRHR, ADRA1B, BDKRB2, ADGRE2, |
| system disease | LPAR6, EDNRA, ADRA2A, ADRA2B, EDNRB, MC1R, PTGFR, |
| | ADRA1D, ADRA2C, SMO, FZD6 |
| metabolic | ADRB3, OPRD1, CALCR, HTR2A, OXTR, CNR1, GPR143, AGTR1, |
| disease | GABBR2, MC4R, MTNR1A, GIPR, CHRM3, TSHR, MTNR1B, |
| | SSTR3, SSTR1, DRD2, CASR, GCGR, DRD3, ADORA2A, SSTR4, |
| | OPRM1, GRM1, GLP1R, HTR2C, P2RY12, OPRK1, SSTR2, |
| | CHRM2, DRD4, ADRA2A, MC1R, EDNRA, CHRM1, SSTR5 |
| musculoskeletal | ADRB3, OPRD1, ADRB2, CALCR, HTR2A, ADRA1A, AGTR1, |
| system disease | GABBR2, FZD2, PTH1R, CASR, PTGER3, EDNRB, ADRA1D, |
| | GABBR1, ADRA1B, OPRM1, ADRA2B, SMO, HTR2C, MC2R, |
| | OPRK1, ADRB1, ADRA2A, ADRA2C, EDNRA |
| nervous system | OPRD1, HCRTR1, DRD1, GRM3, CNR1, GABBR2, SSTR3, ADGRG1, |
| disease | SSTR1, GHRHR, HTR1F, HTR7, ADRA2B, GRM1, HCRTR2, P2RY12, |
| | HTR1A, S1PR5, OPN1MW, ADRB2, HTR2B, ADRA1A, AGTR1, MTNR1B, |
| | OPN1LW, HTR6, CHRM3, GRM7, HTR1D, S1PR3, S1PR2, RHO, ADORA2A, |
| | ADORA3, ADORA2B, SSTR4, DRD5, CALCRL, ADGRV1, HTR1E, |
| | S1PR1, SSTR2, CHRM2, HTR5A, HRH3, HTR2A, OXTR, GPR143, |
| | MTNR1A, HTR4, GRM6, CASR, HRH1, HTR1B, ADRA1D, GABBR1, |
| | ADRA1B, OPRM1, SMO, MC2R, OPRK1, ADRA2A, ADRA2C, CHRM1, |
| | SSTR5, GPR179, S1PR4, ADORA1, OPN1SW, DRD2, FZD4, DRD3, |
| | CYSLTR1, CELSR1, HTR2C, DRD4, ADRB1 |
| obstetric | ADRB3, OXTR, ADRA1A, PTGER3, ADRA1B, TSHR, ADRA2A, |
| disorder | ADRA2B, GLP1R, ADRA1D, ADRA2C |
| otorhinolaryngologic | ADRB3, ADRB2, CYSLTR1, HRH1, ADRA1A, CHRM2, ADRA1B, |
| disease | CHRM3, ADRA2A, ADRA2B, ADRB1, ADRA1D, ADRA2C, EDNRA, CHRM1 |
| psychiatric | OPRD1, HCRTR1, HTR2A, DRD1, OXTR, HTR2B, ADRA1A, |
| disorder | HRH3, GRM3, GABBR2, MTNR1A, HTR6, MTNR1B, HTR1D, |
| | HTR4, DRD2, HRH1, HTR1B, AVPR1B, DRD3, HTR1F, CYSLTR1, |
| | DRD5, GABBR1, OPRM1, HTR7, ADRA2B, GRM1, HCRTR2, |
| | AVPR1A, HTR2C, HTR1E, OPRK1, HTR1A, DRD4, ADRA2A, |
| | AVPR2, HTR5A, ADRA2C, CHRM1 |
| reproductive | ADRA1A, SSTR3, SSTR1, TACR3, GNRHR, FSHR, KISS1R, ADRA1D, |
| system disease | LHCGR, ADGRG2, DRD3, SSTR4, PTGER2, ADRA1B, PTGER1, CCR5, |
| | TACR1, SSTR2, PROKR2, DRD4, AVPR2, SSTR5 |
| respiratory | ADRB3, ADRB2, ADRA1A, AGTR1, ADORA1, CHRM3, PTGIR, CASR, |
| system disease | HRH1, EDNRB, ADRA1D, ADORA2A, ADORA3, ADORA2B, ADGRG6, |
| | CYSLTR1, ADRA1B, ADRA2B, CHRM2, ADRB1, ADRA2A, ADRA2C, |
| | EDNRA, CHRM1 |
| syndromic | HTR2A, P2RY2, GABBR2, CHRM3, SSTR3, P2RY4, SSTR1, HTR4, |
| disease | GNRHR, FSHR, KISS1R, DRD2, FZD2, CASR, EDNRB, LHCGR, DRD3, |
| | CYSLTR1, SSTR4, GABBR1, OPRM1, ADGRV1, HTR2C, P2RY12, MC2R, |
| | SSTR2, HTR1A, PROKR2, P2RY1, DRD4, P2RY6, CHRM1, SSTR5 |
| upper digestive | HTR4, HRH2 |
| tract disorder | |
| urinary system | ADRB3, ADRA1A, AGTR1, TSHR, CHRM3, CASR, EDNRB, AVPR1B, |
| disease | ADRA1D, ADORA2A, ADORA2B, ADRA1B, OPRM1, ADRA2B, AVPR1A, |
| | MC2R, CHRM2, ADRA2A, AVPR2, ADRA2C, EDNRA |

Agents that Modulate Target Proteins

[0049] Provided herein are agents that modulate the expression of a target protein disclosed herein, such as a target protein in the Sequence Listing or Table A, or a variant of the foregoing, or a fragment of the foregoing (e.g., a biologically active fragment of a target protein). The expression of the target protein or variant or fragment thereof can be modulated by a wide range of processes, directly or indirectly, leading to an increase or a decrease of the target protein level. Non-limiting examples include altering: the copy number of the gene encoding the target protein, transcriptional initiation, elongation or termination, RNA processing, RNA stability (e.g., mRNA stability), RNA degradation, translation initiation, post-translational modification of a protein, protein stability, protein degradation (e.g., cleavage, such as protease cleavage), or a combination of the foregoing.

[0050] In some embodiments, the agent modulates (e.g., increases or decreases) the expression of a gene or gene transcript encoding the target protein. In some embodiments, the agent modulates the expression or activity of the target protein. In some embodiments, the agent decreases (e.g., inhibits, reduces or neutralizes) the activity of the target protein. In some embodiments, the agent increases (e.g., activates) the activity of the target protein. In some embodiments, the agent decreases (e.g., inhibits or downregulates) the expression of the target protein. In other embodiments, the agent increases (e.g., activates or upregulates) the expression of the target protein.

[0051] As used herein, the term “increasing” or “increase” refers to modulation that results in a higher level of expression, activity, function or a combination thereof of the target protein, or a metric (e.g., cancer cell death or DNA methylation of a target site), relative to a reference (e.g., the level prior to or in an absence of modulation by the agent). In some embodiments, the agent increases the expression or activity of the target protein, or the metric, by at least about 5% relative to the reference, e.g., by at least about: 10%, 15%, 20%, 25%, 30%, 35%, 40%, 45%, 50%, 55%, 60%, 65%, 70%, 75%, 80%, 85%, 90%, 95% or 98% relative to the reference.

[0052] As used herein, the term “decreasing” or “decrease” refers to modulation that results in a lower level of expression, activity, function or a combination thereof of the target protein, or a metric (e.g., cancer cell death or DNA methylation of a target site), relative to a reference (e.g., the level prior to or in an absence of modulation by the agent). In some embodiments, the agent decreases the expression or activity of the target protein, or the metric, by at least about 5% relative to the reference, e.g., by at least about: 10%, 15%, 20%, 25%, 30%, 35%, 40%, 45%, 50%, 55%, 60%, 65%, 70%, 75%, 80%, 85%, 90%, 95% or 98% relative to the reference.

[0053] Non-limiting examples of the metric include energy production or energy conversion in the liver (e.g., modulating ATP synthesis, B-oxidation, oxidation of metabolites derived from glycolysis, oxidation of metabolites derived from amino acids), mitochondrial transcription, mitochondrial ribosome assembly, mitochondrial translation, mitochondrial thermogenesis, hormonal signaling (e.g., mitochondrial estrogen receptor (mtER) signaling), redox maintenance (e.g., NADH and/or FADH₂), cell cycle regulation, cell migration, cell morphology, apoptosis, necrosis, membrane potential, ion (e.g., calcium or zinc) storage, ion (e.g., calcium or zinc) homeostasis, metabolite synthesis (e.g., heme biosynthesis or steroid biosynthesis), nutrient sensing, unfolded protein stress response pathway, signaling processes (e.g., calcium signaling).

[0054] In some embodiments, the level of expression, activity, function or a combination thereof of the target protein, or the metric, is measured after the agent is contacted with (e.g., a cell) or administered (e.g., to a subject) for at least about 1 day, e.g., at least about: 2 days, 3 days, 4 days, 5 days, 6 days, 8 days, 9 days, 10 days, 1 week, 2 weeks, 3 weeks, 1 month, 2 months, 3 months, 4 months, 5 months or 6 months, e.g., after a treatment regimen has begun.

[0055] In some embodiments, the agent comprises, consists essentially of or consists of a polypeptide, a polynucleotide, a gene editing system, a small molecule, or a cell (e.g., a cell therapy).

[0056] In some embodiments, the target protein activates an immune cell, and the agent modulates (e.g., increases or decreases) the level of expression, activity, function or a combination thereof, of the target protein. In some embodiments, the target protein inhibits an immune cell (e.g., inhibits activation of an immune cell, induces immune cell death (e.g., apoptosis), or a combination thereof), and the agent modulates (e.g., increases or decreases) the level of expression, activity, function or a combination thereof of the target protein.

[0057] In certain embodiments, the agent modulates (e.g., increases or decreases) the level of expression, activity, function, or a combination thereof, of the target protein in a cell and/or tissue implicated in a disease or condition described herein, or a combination of the foregoing.

[0058] In some embodiments, the agent modulates (e.g., increases or decreases) a protein function and/or a signaling pathway implicated in a disease or condition described herein, or a combination of the foregoing.

[0059] In some embodiments, the agent induces downregulation of the target protein (e.g., increases target-protein degradation); prevents multimerization (e.g., dimerization) of the target protein; sequesters a target protein (e.g., a secreted target protein); modulates (e.g., agonizes, antagonizes or disrupts) a known function of the target protein; decreases binding between the target protein and a binding partner (e.g., via steric hinderance); induces antibody-dependent cell killing, phagocytosis, and/or opsonization of a cell expressing the target protein; or a combination of the foregoing. In certain embodiments, the agent lacks agonistic activity toward the target protein. In certain embodiments, the agent has agonistic activity toward the target protein. In some embodiments, the agent lacks antagonistic activity toward the target protein. In some embodiments, the agent has antagonistic activity toward the target protein. In particular embodiments, the agent binds to at least one residue of the target protein that is involved in binding to a binding partner. In some embodiments, the agent binds to one or more binding sites and/or domains of the target protein involved in binding of the target protein to the binding partner.

[0060] A binding partner of a target protein of the disclosure can be any known protein in the mammalian (e.g., human) genome.

[0061] In some embodiments, the agent induces downregulation of a binding partner of the target protein; sequesters a binding partner (e.g., a secreted binding partner) of the target protein; prevents multimerization (e.g., dimerization) of a binding partner of the target protein; sequesters a binding partner of the target protein (e.g., a secreted binding partner); induces antibody-dependent cell killing, phagocytosis, and/or opsonization of a cell expressing the binding partner of the target protein; modulates (e.g., agonizes, antagonizes or disrupts) a known function of a binding partner of the target protein; decreases binding between the target protein and a binding partner (e.g., via steric hinderance); or a combination of the foregoing. In certain embodiments, the agent lacks agonistic activity toward a binding partner of the target protein. In certain embodiments, the agent has agonistic activity toward a binding partner of the target protein. In some embodiments, the agent lacks antagonistic activity toward a binding partner of the target protein. In some embodiments, the agent has antagonistic activity toward a binding partner of the target protein. In some embodiments, the agent binds to the target-binding site of the binding partner. In particular embodiments, the agent further binds to at least one residue of a binding partner of the target protein that is involved in binding between the target protein and the binding partner. In more particular embodiments, the agent further binds to one or more binding sites and/or domains of a binding partner of the target protein involved in binding between the target protein and the binding partner.

[0062] In some embodiments, the agent modulates (e.g., activates or inhibits) immune signaling, cytokine signaling, inflammatory signaling, or a combination of the foregoing.

[0063] In some embodiments, the agent enhances a signal involved in T cell activation and/or survival. In certain embodiments, the agent activates a stimulatory checkpoint molecule. Non-limiting examples of stimulatory checkpoint molecules include CD27, CD28, CD40, CD122, CD137, OX40, GITR, inducible T-cell costimulator (ICOS). In particular embodiments, the agent is an agonist to CD28.

[0064] In some embodiments, the agent reduces a signal involved in T cell anergy and/or exhaustion. In certain embodiments, the agent inhibits an inhibitory checkpoint molecule. Non-limiting examples of inhibitory checkpoint molecules include PD-1, PD-L1, PD-L2, TIM-3, LAG-3, CTLA-4, A2AR, CD276, B7-H4, BTLA, IDO, KIR, NOX2, VISTA, SIGLECs 7 and SIGLECs 9.

[0065] In particular embodiments, the agent reduces the function of (e.g., a blocking antibody) to TNFα.

[0066] In certain embodiments, the agent modulates (e.g., increases or decreases) the level of expression, activity, function, or a combination thereof, of a variant of a target protein disclosed herein. In some embodiments, the variant comprises an amino acid sequence that is at least 70% identical to the amino acid sequence of a target protein disclosed herein. For example, the sequence identity to the variant can be at least about: 75%, 80%, 85%, 90%, 91%, 92%, 93%, 94%, 95%, 96%, 97%, 98% or 99%. In some embodiments, the sequence identity is about: 70%, 75%, 80%, 85%, 90%, 91%, 92%, 93%, 94%, 95%, 96%, 97%, 98% or 99%. In some embodiments, the sequence identity is about: 70-99%, 75-99%, 75-95%, 80-99%, 80-98%, 80-95%, 80-90%, 85-98%, 85-97%, 85-90%, 90-97%, 90-96%, 90-85%, 90-80% or 95-99%. In some embodiments, a variant comprises an amino acid sequence that is at least about 75%, at least about 80%, at least about 85%, at least about 90%, at least about 95%, or at least about 98% identical to the amino acid sequence of a target protein disclosed herein.

[0067] As used herein, the term “sequence identity,” refers to the extent to which two nucleotide sequences, or two amino acid sequences, have the same residues at the same positions when the sequences are aligned to achieve a maximal level of identity, expressed as a percentage. For sequence alignment and comparison, typically one sequence is designated as a reference sequence, to which a test sequences are compared. The sequence identity between reference and test sequences is expressed as the percentage of positions across the entire length of the reference sequence where the reference and test sequences share the same nucleotide or amino acid upon alignment of the reference and test sequences to achieve a maximal level of identity. As an example, two sequences are considered to have 70% sequence identity when, upon alignment to achieve a maximal level of identity, the test sequence has the same nucleotide or amino acid residue at 70% of the same positions over the entire length of the reference sequence.

[0068] Alignment of sequences for comparison to achieve maximal levels of identity can be readily performed by a person of ordinary skill in the art using an appropriate alignment method or algorithm. In some instances, the alignment can include introduced gaps to provide for the maximal level of identity. Examples include the local homology algorithm of Smith & Waterman, Adv. Appl. Math. 2:482 (1981), the homology alignment algorithm of Needleman & Wunsch, J. Mol. Biol. 48:443 (1970), the search for similarity method of Pearson & Lipman, Proc. Nat'l. Acad. Sci. USA 85:2444 (1988), computerized implementations of these algorithms (GAP, BESTFIT, FASTA, and TFASTA in the Wisconsin Genetics Software Package, Genetics Computer Group, 575 Science Dr., Madison, Wis.), and visual inspection (see generally Ausubel et al., Current Protocols in Molecular Biology).

[0069] When using a sequence comparison algorithm, test and reference sequences are input into a computer, subsequent coordinates are designated, if necessary, and sequence algorithm program parameters are designated. The sequence comparison algorithm then calculates the percent sequence identity for the test sequence(s) relative to the reference sequence, based on the designated program parameters. A commonly used tool for determining percent sequence identity is Protein Basic Local Alignment Search Tool (BLASTP) available through National Center for Biotechnology Information, National Library of Medicine, of the United States National Institutes of Health. (Altschul et al., 1990).

[0070] In some embodiments, the amino acid sequence of a variant of a target polypeptide disclosed herein comprises at least one amino acid substitution relative to the amino acid sequence of the target protein. In some embodiments, the number of amino acid substitutions in a variant relative to the amino acid sequence of a target protein disclosed herein is at least about: 2, 3, 4, 5, 6, 7, 8, 9, 10, 11, 12, 13, 14, 15, 16, 17, 18, 19, 20, 21, 22, 23, 24, 25, 26, 27, 28, 29, 30, 31, 32, 33, 34, 35, 36, 37, 38, 39, 40, 41, 42, 43, 44, 45, 46, 47, 48, 49, 50, 51, 52, 53, 54, 55, 56, 57, 58, 59 or 60. In some embodiments, the number of amino acid substitutions is at least about: 5, 6, 10, 15, 20, 25, 30, 35, 40, 45, 50, 55 or 60. In some embodiments, the number of amino acid substitutions is up to about: 60, 55, 50, 45, 40, 35, 30, 25, 20, 15, 10, 6 or 5. In some embodiments, the number of amino acid substitutions is about: 1-60, 1-55, 2-55, 2-50, 3-50, 3-45, 4-45, 4-40, 5-40, 5-35, 6-35, 6-30, 7-30, 7-25, 8-25, 8-20, 9-20, 9-15, 10-15, 5-60, 10-60, 10-55, 15-55, 15-50, 20-50, 20-45, 25-45, 25-40 or 30-40. In some embodiments, the number of amino acid substitutions is about: 10-35, 10-33, 11-33, 11-31, 12-31, 12-29, 13-29, 13-27, 14-27 or 14-25.

[0071] The amino acid substitution(s) in a variant can be substitutions with a canonical amino acid or a non-canonical amino acid. Non-canonical amino acids include, but are not limited to D amino acids, such as D versions of the canonical L-amino acids.

[0072] In some embodiments, an amino acid substitution is a conservative substitution. The term “conservative amino acid substitution(s)” or “conservative substitution(s)” refers to an amino acid substitution having a value of 0 or greater in BLOSUM62.

[0073] In some embodiments, an amino acid substitution is a highly conservative substitution. The term “highly conservative amino acid substitution(s)” or “highly conservative substitution(s)” refers to an amino acid substitution having a value of at least 1 (e.g., at least 2) in BLOSUM62.

[0074] In some embodiments, a variant of a target protein of the disclosure comprises about 5-60 amino acid substitutions, relative to the amino acid sequence of a target protein disclosed herein. In some embodiments, the amino acid substitutions include at least one conservative substitution. In some embodiments, the amino acid substitutions include at least one highly conservative substitution.

### A. Polypeptide Agents

[0075] The term “polypeptide” “peptide” or “protein” denotes a polymer of at least two amino acids covalently linked by an amide bond, regardless of length or post-translational modification (e.g., glycosylation or phosphorylation). A protein, peptide or polypeptide can comprise any suitable L- and/or D-amino acid, for example, common α-amino acids (e.g., alanine, glycine, valine), non-α-amino acids (e.g., β-alanine, 4-aminobutyric acid, 6-aminocaproic acid, sarcosine, statine), and unusual amino acids (e.g., citrulline, homocitruline, homoserine, norleucine, norvaline, ornithine). The amino, carboxyl and/or other functional groups on a peptide can be free (e.g., unmodified) or protected with a suitable protecting group. Suitable protecting groups for amino and carboxyl groups, and methods for adding or removing protecting groups are known in the art and are disclosed in, for example, Green and Wuts, “Protecting Groups in Organic Synthesis,” John Wiley and Sons, 1991. The functional groups of a protein, peptide or polypeptide can also be derivatized (e.g., alkylated) or labeled (e.g., with a detectable label, such as a fluorogen or a hapten) using methods known in the art. A protein, peptide or polypeptide can comprise one or more modifications (e.g., amino acid linkers, acylation, acetylation, amidation, methylation, terminal modifiers (e.g., cyclizing modifications), N-methyl-«-amino group substitution), if desired. In addition, a protein, peptide or polypeptide can be an analog of a known and/or naturally-occurring peptide, for example, a peptide analog having conservative amino acid residue substitution(s).

[0076] In some embodiments, the agent comprises a polypeptide. In some embodiments, the polypeptide is an isolated polypeptide (e.g., isolated or extracted from a biological sample or source). In some embodiments, the polypeptide is a recombinant polypeptide. In some embodiments, the polypeptide is an inhibitor (e.g., a direct inhibitor or an indirect inhibitor) of the expression and/or activity of a target protein disclosed herein. In some embodiments, the polypeptide is an activator (e.g., a direct activator or an indirect activator) of the expression and/or activity of a target protein disclosed herein. In some embodiments, the polypeptide decreases the expression or activity of the target protein disclosed herein. In other embodiments, the polypeptide increases the expression or activity of the target protein disclosed herein. In some embodiments, the polypeptide is a target protein disclosed herein, or a portion thereof (e.g., a biologically active portion thereof, such as a biologically active fragment of the target protein).

[0077] In some embodiments, the polypeptide is an immunoglobulin molecule, such as an antibody (e.g., a whole antibody, an intact antibody) or an antigen-binding fragment of an antibody. In some embodiments, the antibody or antigen-binding fragment thereof binds to the target protein. In some embodiments, the antibody or antigen-binding fragment thereof binds to a protein capable of modulating the expression or activity of the target protein.

[0078] In some embodiments, the polypeptide is an antibody. As used herein, the term “antibody” refers to an immunoglobulin molecule capable of specific binding to a target, such as a carbohydrate, polynucleotide, lipid, polypeptide, etc., through at least one antigen recognition site, located in the variable region of the immunoglobulin molecule. As used herein, the term “antibody” refers to a full-length antibody comprising two heavy (H) chains and two light (L) chains inter-connected by disulfide bonds or multimers thereof (for example, IgM). Each heavy chain comprises a heavy chain variable region (V_{H}) and a heavy chain constant region (comprising domains CH1, hinge CH2 and CH3). Each light chain comprises a light chain variable region (V_{L}) and a light chain constant region (CL). The V_{H} and the V_{L} regions may be further subdivided into regions of hypervariability, termed complementarity determining regions (CDR), interspersed within framework regions (FR). V_{H} and V_{L} each comprises three CDRs and four FR segments, arranged from the amino-terminus to the carboxy-terminus in the following order: FR1, CDR1, FR2, CDR2, FR3, CDR3, and FR4. The antibody can be of any species, such as a rodent (e.g., murine, rat, guinea pig) antibody, a human antibody, or the antibody can be a humanized antibody or chimeric antibody.

[0079] In some embodiments, the antibody comprises an IgA (e.g., IgAQ1 or IgA2) heavy chain constant region, an IgD heavy chain constant region, an IgE heavy chain constant region, an IgG (e.g., IgG1, IgG2 (e.g., IgG2a, IgG2b or lgG2c), IgG3 or IgG4) heavy chain constant region or an IgM heavy chain constant region. In some embodiments, the antibody comprises an IgG heavy chain constant region. In some embodiments, the antibody comprises a κ light chain constant region. In some embodiments, the antibody comprises a λ light chain constant region.

[0080] In some embodiments, the antibody is a polyclonal antibody. In some embodiments, the antibody is a monoclonal antibody. In some embodiments, the antibody is human or chimeric. In some embodiments, the antibody is primatized (e.g., humanized). In some embodiments, the antibody is multispecific, e.g., bi-, tri-, or quad-specific. In some embodiments, the antibody is a heteroconjugate antibody.

[0081] In some embodiments, the polypeptide agent is an antigen-binding fragment of an immunoglobulin molecule (e.g., antibody). The term “antigen-binding fragment” refers to a portion of an immunoglobulin molecule (e.g., antibody) that retains the antigen binding properties of the parental full-length antibody. Non-limiting examples of antigen-binding fragments include a V_{H} region, a V_{L} region, an Fab fragment, an F(ab′)₂ fragment, an Fd fragment, an Fv fragment, and a domain antibody (dAb) consisting of one V_{H} domain or one V_{L} domain, etc. V_{H} and V_{L} domains may be linked together via a synthetic linker to form various types of single-chain antibody designs in which the V_{H}/V_{L} domains pair intramolecularly, or intermolecularly in those cases when the V_{H} and V_{L} domains are expressed by separate chains, to form a monovalent antigen binding site, such as single chain Fv (scFv) or diabody. In some embodiments, the polypeptide disclosed herein is an antigen binding fragment selected from Fab, Fab′, F(ab′)₂, Fd, Fv, disulfide-linked Fvs (sdFv, e.g., diabody, triabody or tetrabody), scFv, SMIP or rlgG. In some embodiments, the polypeptide is a scFv. Antigen-binding fragments can be produced by recombinant DNA techniques, enzymatic or chemical cleavage of intact immunoglobulins, or, in certain cases, by chemical peptide synthesis procedures known in the art.

[0082] Polypeptide agents (e.g., monoclonal antibodies) can be monovalent, bivalent or multivalent. A monoclonal antibody can be monospecific or multispecific (e.g., bispecific). Monospecific antibodies bind one antigenic epitope. A multispecific antibody, such as a bispecific antibody or a trispecific antibody, is included in the term monoclonal antibody.

[0083] “Multispecific” refers to an antibody that specifically binds at least two distinct antigens or at least two distinct epitopes within the antigens, for example three, four or five distinct antigens or epitopes. “Bispecific” refers to an antibody that specifically binds two distinct antigens or two distinct epitopes within the same antigen.

[0084] “Isolated antibody” refers to an antibody or an antigen-binding fragment thereof that is substantially free of other antibodies having different antigenic specificities (e.g., an isolated anti-target protein antibody is substantially free of antibodies that specifically bind antigens other than the target protein). In the case of a bispecific antibody, the bispecific antibody specifically binds two antigens of interest, and is substantially free of antibodies that specifically bind antigens other than the two antigens of interest. In some embodiments, the polypeptide agent (e.g., monoclonal antibody) is at least 80% pure, e.g., about: 80%, 81%, 82%, 83%, 84%, 85%, 86%, 87%, 88%, 89%, 90%, 91%, 92%, 93%, 94%, 95%, 96%, 97%, 98%, 99% or 100% pure.

[0085] In some embodiments, the polypeptide is an antagonist antibody that binds to the target protein (e.g., a target protein whose expression or activity is increased in a cancer state relative to a reference state). In some embodiments, the antibody described herein is an antagonist antibody that binds to a protein capable of modulating the expression or activity of the target protein. As used herein, the term “antagonist antibody” refers to an antibody that, upon binding to an antigen (e.g., the target protein or a protein capable of modulating the expression or activity of the target protein), reduces (e.g., inhibits) the function of the antigen. In some embodiments, the antigen is a receptor, and the antagonist antibody binds to the ligand-binding domain of the receptor. In some embodiments, the antigen is a transmembrane protein, and the antagonist antibody binds to the extracellular region of the transmembrane protein. In some embodiments, the antigen is an enzyme or a signaling molecule, and the antagonist antibody reduces the activity of the enzyme or attenuate a signal transduction pathway mediated by the signaling molecule. In some embodiments, the antagonist antibody reduces antigen function by at least about 10%, e.g., by at least about: 15%, 20%, 25%, 30%, 35%, 40%, 45%, 50%, 55%, 60%, 65%, 70%, 75%, 80%, 90%, 95%, 98% or 99%.

[0086] In some embodiments, the polypeptide is an agonist antibody that binds to the target protein (e.g., a target protein whose expression or activity is decreased in a cancer state relative to a reference state). In some embodiments, the antibody is an agonist antibody that binds to a protein capable of modulating the expression or activity of the target protein. As used herein, the term “agonist antibody” refers to an antibody that, upon binding to an antigen (e.g., the target protein or a protein capable of modulating the expression or activity of the target protein), increases the function of the antigen. In some embodiments, the antigen is a receptor, and the agonist antibody binds to the ligand-binding domain of the receptor. In some embodiments, the antigen is a transmembrane protein, and the agonist antibody binds to the extracellular region of the transmembrane protein. In some embodiments, the antigen is an enzyme or a signaling molecule, and the agonist antibody increases the activity of the enzyme or activates a signal transduction pathway mediated by the signaling molecule. In some embodiments, the agonist antibody increases antigen function by at least about 10%, e.g., by at least about: 15%, 20%, 25%, 30%, 35%, 40%, 45%, 50%, 55%, 60%, 65%, 70%, 75%, 80%, 90%, 95%, 100%, 200%, 300%, 400%, 500%, 600%, 700%, 800%, 900% or 1,000%.

[0087] In some embodiments, the agonist antibody does not exert at least one of the following functional properties: reducing (e.g., inhibiting) the activity of the antigen; inducing antibody-dependent cell killing of a cell expressing the antigen (e.g., by natural killer (NK) cells, monocytes, macrophages, neutrophils, dendritic cells, or eosinophils); inducing phagocytosis of a cell expressing the antigen (e.g., by macrophage); inducing opsonization of a cell expressing the antigen; and inducing downregulation of the antigen on a cell surface (e.g., by hyper-crosslinking or clustering the antigen to induce internalization and degradation).

[0088] Suitable techniques, assays and reagents for making and using therapeutic antibodies against an antigen are known in the art. See, for example, Therapeutic Monoclonal Antibodies: From Bench to Clinic (Zhiqiang An eds., 1st ed. 2009); Antibodies: A Laboratory Manual (Edward A. Greenfield eds., 2d ed. 2013); Ferrara et al., Using Phage and Yeast Display to Select Hundreds of Monoclonal Antibodies: Application to Antigen 85, a Tuberculosis Biomarker, PLOS ONE 7 (11): e49535 (2012), for methods of making recombinant antibodies, including antibody engineering, use of degenerate oligonucleotides, 5′-RACE, phage display, and mutagenesis; antibody testing and characterization; antibody pharmacokinetics and pharmacodynamics; antibody purification and storage; and screening and labeling techniques.

[0089] In some embodiments, the polypeptide is an antibody mimetic that binds a target protein disclosed herein. The term “antibody mimetic” refers to polypeptides capable of mimicking an antibody's ability to bind an antigen, but structurally differ from native antibody structures. Non-limiting examples of antibody mimetics include Adnectins, Affibodies, Affilins, Affimers, Affitins, Alphabodies, Anticalins, Avimers, DARPins, Fynomers, Kunitz domain peptides, monobodies, nanobodies, nanoCLAMPs, and Versabodies.

[0090] In some embodiments (e.g., when the expression or activity of the target protein is decreased in a disease state relative to a reference state), the agent is a polypeptide (e.g., isolated polypeptide) that comprises an amino acid sequence that is at least 70% identical to at least a portion (e.g., a biologically active portion or fragment) of the target protein. For example, the percent identity can be at least about: 70%, 71%, 72%, 73%, 74%, 75%, 76%, 77%, 78%, 79%, 80%, 81%, 82%, 83%, 84%, 85%, 86%, 87%, 88%, 89%, 90%, 91%, 92%, 93%, 94%, 95%, 96%, 97%, 98% or 99% to the full-length target protein or a biologically active portion or fragment thereof. In some embodiments, the polypeptide comprises the amino acid sequence of a full-length target protein. In some embodiments, the polypeptide comprising the amino acid sequence of a full-length target protein is a recombinant polypeptide. In some embodiments, the polypeptide comprising the amino acid sequence of a full-length target protein is a synthetic polypeptide.

[0091] In some embodiments, the polypeptide (e.g., isolated polypeptide) comprises an amino acid sequence having at least 1 amino acid substitution relative to the target protein. For example, the number of amino acid substitutions can be at least about: 2, 3, 4, 5, 6, 7, 8, 9, 10, 11, 12, 13, 14, 15, 16, 17, 18, 19 or 20, or about: 1-20, 1-19, 2-19, 2-18, 2-17, 3-17, 3-16, 4-16, 4-15, 5-15, 5-14, 6-14, 6-13, 7-13, 7-12, 8-12, 8-11 or 9-11. In some embodiments, the amino acid substitutions are conservative substitutions. In some embodiments, the amino acid substitutions are highly conservative substitutions.

[0092] In some embodiments, the polypeptide (e.g., isolated polypeptide) comprises an amino acid sequence that is at least 70% identical to at least a portion of a protein capable of modulating the expression or activity of the target protein. For example, the percent identity can be at least about: 71%, 72%, 73%, 74%, 75%, 76%, 77%, 78%, 79%, 80%, 81%, 82%, 83%, 84%, 85%, 86%, 87%, 88%, 89%, 90%, 91%, 92%, 93%, 94%, 95%, 96%, 97%, 98% or 99%. In some embodiments, the polypeptide comprises the amino acid sequence of a protein capable of modulating the expression or activity of the target protein.

[0093] In some embodiments, the polypeptide (e.g., isolated polypeptide) comprises an amino acid sequence having at least 1 amino acid substitution relative to a protein capable of modulating the expression or activity of the target protein. For example, the number of amino acid substitutions can be at least about: 2, 3, 4, 5, 6, 7, 8, 9, 10, 11, 12, 13, 14, 15, 16, 17, 18, 19 or 20, or about: 1-20, 1-19, 2-19, 2-18, 2-17, 3-17, 3-16, 4-16, 4-15, 5-15, 5-14, 6-14, 6-13, 7-13, 7-12, 8-12, 8-11 or 9-11. In some embodiments, the amino acid substitutions are conservative substitutions. In some embodiments, the amino acid substitutions are highly conservative substitutions.

[0094] In some embodiments, the polypeptide is a cell-penetrating peptide. In certain embodiments, the polypeptide is linked to a cell-penetrating peptide. Suitable cell-penetrating peptide sequences can be protein-derived, designed or, chimeric (modified). See, e.g., Regberg, et al., Applications of cell-penetrating peptides for tumor targeting and future cancer therapies, Pharmaceuticals 5 (9): 991-1007 (2012). Non-limiting examples of cell-penetrating peptides include TAT (48-60), Penetratin, pVEC, MPG8, Transportan, Transportan 10, PepFect3, PepFect 6, PepFect 14, Polyarginine, Stearyl-polyarginine, Pep-1, Pep-3, CADY, YTA2, YTA4, SynB1, SynB3, Maurocalcine and PTD4.

[0095] In some embodiments, the polypeptide is a circulating factor (e.g., a cytokine).

[0096] In some embodiments, the biological properties (e.g., biological activities or half-life) of the polypeptide (e.g., isolated polypeptide) and the target protein are similar. Non-limiting examples of biological activities include enzymatic activities or properties (e.g., selectivity, steady-state or kinetics), binding activities (e.g., nucleic acid (DNA, RNA) binding protein binding) or properties (e.g., specificity, affinity or kinetics), cell signaling activities, immunological activities, and structural activity (e.g., cell adhesion), among others. Non-limiting examples of enzyme activities include transferase activity (e.g., transfers functional groups from one molecule to another), oxioreductase activity (e.g., catalyzes oxidation-reduction reactions), hydrolase activity (e.g., cleaves chemical bonds via hydrolysis), lyase activity (e.g., generate a double bond), ligase activity (e.g., joining two molecules via a covalent bond), and isomerase activity (e.g., catalyzes structural changes within a molecule from one isomer to another).

[0097] In some embodiments, the polypeptide (e.g., isolated polypeptide) is a recombinant protein. In other embodiments, the polypeptide (e.g., isolated polypeptide) is a synthetic protein. Methods of producing therapeutic polypeptides are known in the art. See, e.g., Therapeutic Proteins: Methods and Protocols (Mark C. Smales & David C James eds., 2005); Pharmaceutical Biotechnology: Fundamentals and Applications (Daan J. A. Crommelin, Robert D. Sindelar & Bernd Meibohm eds., 2013). Polypeptides can be expressed recombinantly using mammalian cells, insect cells, yeast or bacteria etc., under the control of appropriate promoters.

[0098] In some embodiments, the polypeptide includes a post-translational modification or other chemical modification. Non-limiting examples of post-translational modifications include acetylation, amidation, formylation, glycosylation, hydroxylation, methylation, myristoylation, phosphorylation, deamidation, prenylation (e.g., farnesylation, geranylation, etc.), ubiquitylation, ribosylation and sulphation. Phosphorylation can occur on an amino acid such as tyrosine, serine, threonine, or histidine.

[0099] In some embodiments, the polypeptides described herein (e.g., target proteins, or a portion thereof, polypeptide agents that modulate target proteins) are modified, for example, by cleavage (e.g., protease cleavage) or post-translational modification. In certain embodiments, the modification(s) will affect the activity of the polypeptide, for example, by making an inactive polypeptide active or by altering (e.g., increasing, decreasing) the level of activity of a polypeptide. In particular embodiments, a polypeptide described herein is provided as a prodrug, e.g., that can be converted (e.g., by proteolytic cleavage, post-translational modification) to an active polypeptide in vivo. In some embodiments, the polypeptide includes a post-translational modification or other chemical modification. Non-limiting examples of post-translational modifications include acetylation, amidation, formylation, glycosylation, hydroxylation, methylation, myristoylation, phosphorylation, deamidation, prenylation (e.g., farnesylation, geranylation, etc.), ubiquitylation, ribosylation and sulphation. Phosphorylation can occur on an amino acid such as tyrosine, serine, threonine, or histidine.

[0100] In some embodiments, the polypeptide comprises one or more neoantigens selected from the Sequence Listing, in Table A, or a variant of the foregoing. As used herein, the term “neoantigen” refers to a tumor antigen that arises from a target protein described herein. In some embodiments, the neoantigen is a cancer-specific neoantigen. There are a variety of ways to produce a neoantigen. For example, a neoantigen may be produced in vitro as a polypeptide before being formulated into a neoplasia vaccine or immunogenic pharmaceutical composition. In some embodiments, the immunogenic pharmaceutical composition comprises an effective amount of one or more neoantigens or pharmaceutically acceptable salt(s) thereof. In some embodiments, the immunogenic pharmaceutical composition further comprises a pharmaceutically acceptable carrier, excipient, adjuvant or additive.

[0101] Alternatively, a neoantigen may be produced in vivo by introducing a polynucleotide or an expression vector (e.g., a viral expression vector) encoding the neoantigen into a cell or tissue (e.g., of a subject in need). In certain embodiments, the polypeptide comprises at least two neoantigens. In some embodiments, the polypeptide comprises a T cell enhancer amino acid sequence. In some embodiments, the T cell enhancer is selected from the group consisting of an invariant chain, a leader sequence of tissue-type plasminogen activator, a PEST sequence, a cyclin destruction box, a ubiquitination signal, and a SUMOylation signal.

### B. Polynucleotide Agents

[0102] In some embodiments, the agent comprises a polynucleotide, or an analog or derivative thereof. In some embodiments, the polynucleotide, or the analog or derivative thereof, is an inhibitor of the target protein. In some embodiments, the polynucleotide, or the analog or derivative thereof, is an activator of the target protein. In some embodiments, the polynucleotide, or the analog or derivative thereof, decreases (e.g., reduces or neutralizes) the expression or activity of the target protein. In other embodiments, the polynucleotide, or the analog or derivative thereof, increases the expression or activity of the target protein.

[0103] The polynucleotides can have sequences containing naturally occurring ribonucleotide or deoxyribonucleotide monomers, non-naturally occurring nucleotides, or combinations thereof. Accordingly, polynucleotides can include, for example, nucleotides comprising naturally occurring bases (e.g., A, G, C, or T) and nucleotides comprising modified bases (e.g., 7-deazaguanosine, inosine, or methylated nucleotides, such as 5-methyl dCTP and 5-hydroxymethyl cytosine). In some embodiments, the polynucleotide comprises at least one modified nucleotide. Non-limiting examples of modified nucleotides include 2′-fluoro, 2′-o-methyl, 2′-deoxy, unlocked nucleic acid, 2′-hydroxy, phosphorothioate, 2′-thiouridine, 4′-thiouridine and 2′-deoxyuridine. In some embodiments, the modification increases nuclease resistance, increases serum stability, decrease immunogenicity, or a combination of the foregoing.

[0104] In some embodiments, the polynucleotide is a DNA molecule. In some embodiments, the polynucleotide is an RNA molecule. In some embodiments, the polynucleotide is a vector (e.g., expression vector, plasmid).

[0105] In some embodiments, the polynucleotide comprises an analog or a derivative of a polynucleotide. In some embodiments, the analog or derivative is a peptide nucleic acid (PNA). In some embodiments, the analog or derivative is a locked nucleic acid (LNA). In some embodiments, the analog or derivative is a morpholino oligonucleotide. In some embodiments, the analog or derivative comprises one or more phosphorothioate-linkages. In some embodiments, the agent comprises a deoxyribonucleic guanidine (DNG) nucleotide. In some embodiments, the agent comprises ribonucleic guanidine (RNG) nucleotide.

[0106] In some embodiments, the polynucleotide modulates the expression and/or activity of a nucleic acid encoding a target protein disclosed herein (e.g., a target protein in the Sequence Listing), in Table A, or a portion thereof (e.g., a biologically active portion or fragment thereof).

[0107] In some embodiments, the polynucleotide comprises a nucleotide sequence that is complementary (e.g., fully complementary or partially complementary) to at least a portion of a gene or gene transcript encoding a target protein disclosed herein, such that the polynucleotide sequence is capable of hybridizing or annealing to the gene or gene transcript (e.g., under physiological conditions). In other embodiments, the polynucleotide comprises a nucleotide sequence that is complementary to at least a portion of a gene or gene transcript encoding a protein that is capable of modulating the expression or activity of a target protein disclosed herein.

[0108] In some embodiments, the polynucleotide encodes a target protein disclosed herein, or a variant thereof (e.g., a biologically active variant thereof), or a portion thereof (e.g., a biologically active portion or fragment thereof).

[0109] In some embodiments, the nucleic acid that encodes the target protein, or variant thereof, or portion (e.g., fragment) thereof, is a gene sequence or a portion thereof. In some embodiments, the encoding nucleic acid is an unprocessed RNA transcript (e.g., pre-mRNA) or a portion thereof (e.g., a 5′-UTR, a 3′-UTR, an intron). In some embodiments the encoding nucleic acid is a mRNA molecule or a portion thereof. In some embodiments the encoding nucleic acid is present in a non-coding RNA (e.g., a long intergenic non-coding RNA (lincRNA), long noncoding RNA (lncRNA), or miRNA).

[0110] The encoding nucleic acid can comprise a canonical open reading frame (ORF) or a non-canonical ORF. In certain embodiments, the encoding nucleic acid comprises a non-canonical ORF.

[0111] The polynucleotides can be single stranded (ss) or double stranded (ds). In some embodiments, the polynucleotide is double stranded (ds). In some embodiments, the length of the ds polynucleotide is about 15-50 base pairs, e.g., about: 15-45, 15-40, 15-35, 15-30, 15-25, 18-50, 18-45, 18-40, 18-35, 18-30, 18-25, 20-50, 20-45, 20-40, 20-35, 20-30, 20-25, 25-50, 25-45, 25-40, 25-35, 25-30, 30-50, 30-45, 30-40, 30-35, 35-50, 35-45, 35-40 or 40-50 base pairs. In some embodiments, the length of the polynucleotide is about 19-23 base pairs. In some embodiments, the length of the polynucleotide is about 21 base pairs.

[0112] In some embodiments, the polynucleotide is single stranded (ss). In some embodiments, the length of the ss polynucleotide is about 15-50 nucleotides, e.g., about: 15-45, 15-40, 15-35, 15-30, 15-25, 18-50, 18-45, 18-40, 18-35, 18-30, 18-25, 20-50, 20-45, 20-40, 20-35, 20-30, 20-25, 25-50, 25-45, 25-40, 25-35, 25-30, 30-50, 30-45, 30-40, 30-35, 35-50, 35-45, 35-40 or 40-50 nucleotides.

[0113] In some embodiments, the polynucleotide prevents the maturation of a newly-generated nuclear RNA transcript into an mRNA for transcription. In some embodiments, the polynucleotide comprises a nucleotide sequence that is complementary to a sequence at the boundary of an intron and an exon.

[0114] In some embodiments, the polynucleotide (e.g., an antisense oligonucleotide) can hybridize to an mRNA encoding the target protein (e.g., under physiological conditions). In some embodiments, the length of the polynucleotide is at least about 10 nucleotides, e.g., at least about: 15, 16, 17, 18, 19, 20, 21, 22, 23, 24, 25, 26, 27, 28, 29 or 30 nucleotides or about: 10-30, 15-30, 15-25, 20-25 nucleotides. In some embodiments, the polynucleotide is at least 75% identical to an antisense sequence of identical the targeted transcript, e.g., at least about: 80%, 85%, 90%, 95%, 96%, 97%, 98% or 99%.

[0115] In some embodiments, the polynucleotide further comprises an overhang sequence (e.g., unpaired, overhanging nucleotides which are not directly involved in the formation of the double helical structure by the core sequences). In some embodiments, the polynucleotide comprises a 3′ overhang, a 5′ overhang, or both. In some embodiments, the overhang is about 1-5 nucleotides. In some embodiments, the overhang comprises a modified ribonucleotide or deoxynucleotide, e.g., a thiophosphate, phosphorothioate or deoxynucleotide inverted (3′ to 3′ linked) nucleotide.

[0116] Non-limiting examples of polynucleotide agents suitable for use in the compositions, kits and methods described herein include a small interfering RNA (siRNA), a short hairpin RNA (shRNA), a microRNA (miRNA), an antagomir, an antisense DNA, an antisense RNA, a morpholino nucleic acid (MNA), a locked nucleic acid (LNA), a peptide nucleic acid (PNA), an aptamer and a guide RNA (gRNA).

[0117] In some embodiments, the polynucleotide inhibits gene expression (e.g., through the biological process of RNA interference (RNAi)). Polynucleotides appropriate for RNA interference can be readily designed and produced by a person of ordinary skill using techniques, assays and reagents known in the art, including computational tools. See, e.g., Pei et al. 2006, Reynolds et al. 2004, Khvorova et al. 2003, Schwarz et al. 2003, Ui-Tei et al. 2004, Heale et al. 2005, Chalk et al. 2004, Amarzguioui et al. 2004.

[0118] In some embodiments, the polynucleotide is a miRNA. In some embodiments, the miRNA is about 22 nucleotides in length. miRNAs bind to target sites on mRNA molecules and silence the mRNA, e.g., by causing cleavage of the mRNA, destabilization of the mRNA, or inhibition of translation of the mRNA.

[0119] In some embodiments, the polynucleotide is a siRNA. In some embodiments, the siRNA comprises a nucleotide sequence that is identical to about a 15-25 contiguous mRNA sequence encoding the target protein. In some embodiments, the siRNA is a double-stranded RNA molecule having about 19-25 base pairs. In some embodiments, the siRNA commences with the dinucleotide AA. In some embodiments, the siRNA has a GC-content of about 30-70%, e.g., about: 30-65%, 30-60%, 30-55%, 30-50%, 40-70%, 40-65%, 40-60%, 40-55%, 45-70%, 45-65%, 45-60% or 45%-55%.

[0120] In some embodiments, the polynucleotide is a shRNA. A shRNA is an RNA molecule including a hairpin turn that decreases expression of target genes via RNAi. shRNAs can be delivered to cells in the form of plasmids, e.g., viral or bacterial vectors, e.g., by transfection, electroporation, or transduction.

[0121] siRNAs and shRNAs resemble intermediates in the processing pathway of the endogenous microRNA (miRNA) genes (see, e.g., Bartel, Cell 116:281-97 (2004)). In some embodiments, the siRNA functions as an miRNA; in other embodiments, the miRNA functions as an siRNA (see, e.g., Zeng et al., Mol Cell 9:1327-33 (2002); Doench et al., and Genes Dev 17:438-42 (2003)). MicroRNAs, like siRNAs, use RISC to downregulate target genes, but unlike siRNAs, most animal miRNAs do not cleave the mRNA. Instead, miRNAs reduce protein output through translational suppression or poly A removal and mRNA degradation (see, e.g., Wu et al., Proc Natl Acad Sci USA 103:4034-39 (2006)). Known miRNA binding sites are within mRNA 3′ UTRs; miRNAs seem to target sites with near-perfect complementarity to nucleotides 2-8 from the miRNA's 5′ end (see, e.g., Rajewsky, Nat Genet 38 Suppl: S8-13 (2006) and Lim et al., Nature 433:769-73 (2005)). This region is known as the seed region. Because siRNAs and miRNAs are interchangeable, exogenous siRNAs downregulate mRNAs with seed complementarity to the siRNA (see, e.g., Birmingham et al., Nat Methods 3:199-204 (2006)). Multiple target sites within a 3′ UTR give stronger downregulation (see, e.g., Doench et al., Genes Dev 17:438-42 (2003)).

[0122] In some embodiments, the polynucleotide is a messenger RNA (mRNA) or a circular RNA (circRNA) encoding a target protein disclosed herein or a variant thereof (e.g., a variant that is at least about 70% identical (e.g., at least about: 75%, 80%, 85%, 90%, 95%, 98% or 99% identical to the wild-type protein). In some embodiments, the mRNA is codon optimized (e.g., to improve efficacy of protein synthesis and limit mRNA destabilization by rare codons (see, e.g., Presnyak et al., Cell. 160 (6): 1111-24 (2015) and Thess et al., Mol Ther. 23 (9): 1456-64 (2015)).

[0123] In some embodiments, a polynucleotide comprising RNA is chemically synthesized. In some embodiments, a polynucleotide comprising RNA is expressed recombinantly. In some embodiments, the RNA is transcribed in vitro. The making and using of RNA therapeutics are known in the art. See, for example, RNA Therapeutics: Function, Design, and Delivery (Mouldy Sioud eds., 2010) and Kaczmarek et al., Advances in the delivery of RNA therapeutics: from concept to clinical reality, Genome Medicine 9:60 (2017).

[0124] In some embodiments, the mRNA is produced by in vitro transcription. In some embodiments, the mRNA is modified to optimize its activity. In some embodiments, the mRNA comprises a modified base, a 5′ cap, a 5′ cap analogue, an anti-reverse cap analog (ARCA), or a combination thereof.

[0125] In some embodiments, the mRNA comprises a poly(A) tail. In some embodiments, the poly(A) tail is about 100-200 nucleotides. In some embodiments, the poly(A) tail improves the expression and/or stability of the mRNA (see, e.g., Kaczmarek et al., Genome Medicine 9:60 (2017)).

[0126] In some embodiments, the mRNA comprises 5′ cap. In some embodiments, the mRNA comprises a 5′ cap analogue. In some embodiments, the 5′ cap analogue is a 1,2-dithiodiphosphate-modified cap (see, e.g., Strenkowska et al., Nucleic Acids Res. 44:9578-90 (2016)).

[0127] In some embodiments, the mRNA comprises a modified 3′ untranslated region (UTR), a 5′ UTR, or both. In some embodiments, the modified UTR comprises sequences responsible for recruiting RNA-binding proteins (RBPs) and miRNAs (e.g., to enhance the level of protein product (see, e.g., Kaczmarek et al., Genome Medicine 9:60 (2017)). In some embodiments, the 3′ UTR, 5′ UTR, or both are modified to encode a regulatory element. In some embodiments, the regulatory element comprises a K-turn motif, a miRNA binding site, or a combination thereof to control RNA expression in a cell-specific manner (see, e.g., Wroblewska et al., Nat Biotechnol. 33:839-41 (2015)).

[0128] In some embodiments, the mRNA comprises an RNA base modification. In some embodiments, the mRNA comprises a pseudouridine. In some embodiments, the mRNA comprises a N1-methyl-pseudouridine (e.g., to mask immune-stimulatory activity and enhance translation initiation (see, e.g., Andries et al., J Control Release 217:337-44 (2015) and Svitkin et al., Nucleic Acids Res. 45:6023-36 (2017)).

[0129] In some embodiments, the RNA (e.g., mRNA) is a circular RNA.

[0130] Compositions and methods for producing mRNA are disclosed, see, e.g., in WO2016011306, WO2016014846, WO2016022914, WO2016077123, WO2016164762, WO2016201377, WO2017049275, U.S. Pat. Nos. 9,937,233, 8,710,200, 10,022,425, 9,878,056, 9,572,897, WO2010084371, U.S. Pat. No. 9,353,153, WO2015034925 and WO2019236673. Also see, e.g., Jemielity et al., RNA 9 (9): 1108-22 (2003); Mockey et al., Biochem Biophys Res Commun. 340:1062-88 (2006); Strenkowska et al. Nucleic Acids Res. 44:9578-90 (2016); Presnyak et al., Cell 160:1111-24 (2015) and Kaczmarek et al., Genome Medicine 9:60 (2017)). In some embodiments, the mRNA is prepared in a lipid nanoparticle (LNP) formulation (e.g., for in vivo delivery, see, e.g., U.S. Pat. Nos. 9,764,036, 9,682,139, Kauffman et al., Nano Lett. 15:7300-6 (2015) and Fenton et al., Adv Mater. 28:2939-43 (2016)).

[0131] In some embodiments, the polynucleotide is an aptamer. In certain embodiments, the aptamer binds to a target protein disclosed herein. In particular embodiments, the aptamer binds to a binding partner of a target protein disclosed herein.

[0132] In some embodiments, the polynucleotide is linked (e.g., covalently) to a delivery polymer. In some embodiments, the link between the polynucleotide and the delivery polymer is reversible. In some embodiments, the polynucleotide is linked to the delivery polymer via a physiologically labile linker. In some embodiments, the physiologically labile linker is a disulfide bond.

[0133] In some embodiments, the polynucleotide is conjugated to the polymer in the presence of an excess of polymer. In some embodiments, the excess polymer is removed prior to administration (e.g., to a cell or a subject).

[0134] A person of ordinary skill in the art can readily make suitable polynucleotide agents for use in the compositions, kits and methods described herein using the gene locus information of the protein sequences contained in the Sequence Listing incorporated herein, and Table A, such as the chromosomal location, starting and ending nucleotide positions, and polymorphism identifications.

### C. Agents Comprising Gene Editing Systems

[0135] In some embodiments, the agent comprises a gene editing system. In some embodiments, the gene editing system produces a deletion of nucleotides, a substitution of nucleotides, an addition of nucleotides or a combination of the foregoing, in a gene encoding a target protein.

[0136] In some embodiments, the gene editing system is a CRISPR/Cas system, a transposon-based gene editing system, or a transcription activator-like effector nuclease (TALEN) system. In some embodiments, the gene editing system is a CRISPR/Cas system. In some embodiments, the gene editing system is a class II CRISPR/Cas system.

[0137] In some embodiments, the gene editing system (e.g., the CRISPR/Cas system) reduces (e.g., decreases, inhibits) or eliminates (e.g., via gene knockout) the expression of the target protein. In some embodiments, the gene editing system (e.g., the CRISPR/Cas system) reduces (e.g., decreases, inhibits) or eliminates (e.g., via gene knockout) the expression of a protein capable of modulating the expression or activity of the target protein. In some embodiments, the gene editing system (e.g., the CRISPR/Cas system) increases (e.g., via gene knock-in or gene replacement) the expression of the target protein. In some embodiments, the gene editing system (e.g., the CRISPR/Cas system) increases (e.g., via gene knock-in or gene replacement) the expression of a protein capable of modulating the expression or activity of the target protein.

[0138] In some embodiments, the CRISPR system specifically catalyzes cleavage in a gene encoding the target protein, thereby inactivating said gene. Repairing nucleic acid strand breaks through non-homologous end joining (NHEJ) often results in changes to the DNA sequence at the site of the cleavage, resulting in small insertions or deletions (Indels). In some embodiments, NHEJ is used to knock out the gene encoding the target protein. In some embodiments, homology directed repair (HDR) is used to concurrently inactivate a gene encoding the target protein and insert a heterologous sequence into the inactivated locus. Cells in which a knockout and/or knockin event has occurred can be identified and/or selected by well-known methods in the art.

[0139] In some embodiments, the gene editing system comprises a single Cas endonuclease or a polynucleotide encoding the single Cas endonuclease. In some embodiments, the single Cas endonuclease is Cas9, Cpf1, C2C1 or C2C3. In some embodiments, the single Cas endonuclease is Cas9 (e.g., of Streptococcus Pyogenes). In some embodiments, the single Cas endonuclease is Cpf1. In some embodiments, the Cpf1 is AsCpf1 (from Acidaminococcus sp.) or LbCpf1 (from Lachnospiraceae sp.). The choice of nuclease and gRNA(s) will typically be determined according to whether a deletion, a substitution, or an addition of nucleotide(s) to a targeted sequence is desired.

[0140] In some embodiments, the type II Cas endonuclease is Cas 9 (e.g., of Streptococcuspyogenes). In some embodiments, the modified Cas 9 is nickase Cas9, dead Cas9 (dCas9) or eSpCas9. In some embodiments, the nickase Cas9 is Cas9 D10A. In some embodiments, the dCas9 is D10A or H840A. In some embodiments, the gene editing system comprises a double nickase Cas9 (e.g., to achieve more accurate genome editing, see, e.g., Ran et al., Cell 154:1380-89 (2013). Wild-type Cas9 generates double-strand breaks (DSBs) at specific DNA sequences targeted by a gRNA. Nickase Cas9 generates only a single-strand break. dCas9 is catalytically inactive. In some embodiments, dCas9 is fused to a nuclease (e.g., a FokI to generate DSBs at target sequences homologous to two gRNAs). Various CRISPR/Cas9 plasmids are publicly available from the Addgene repository (Addgene, Cambridge, MA: addgene.org/crispr/).

[0141] In some embodiments, the gene editing system comprises:
[0142] a) a wild-type or modified type II Cas endonuclease or a polynucleotide encoding the wild-type or modified type II Cas endonuclease;
[0143] b) a CRISPR RNA (“crRNA”); and
[0144] c) a trans-activating crRNA (“tracrRNA”).

[0145] In some embodiments, the crRNA comprises at least 1 “guide RNA” (sgRNA), e.g., at least: 2, 3 or 4 gRNAs. In some embodiments, the gRNA comprises a sequence that is identical to a portion of the gene sequence of the target protein. In some embodiments, the gRNA comprises a sequence that is identical to a portion of the gene sequence of a protein capable of modulating the expression or activity of the target protein. In some embodiments, the gRNA is at least about 16 nucleotides, e.g., at least about: 17, 18, 19, 20, 21, 22, 23, 24 or 25 nucleotides; or about: 16, 17, 18, 19, 20, 21, 22, 23, 24 or 25 nucleotides; or about: 16-24, 17-24, 17-23, 18-23, 18-22, 19-22 or 19-21 or 19, 20 or 21 nucleotides. In some embodiments, the sgRNA is chemically modified.

[0146] Design of gRNA sequences for gene editing are known in the art. See, for example, Cong et al., Science, 339:819-23 (2013) and Ran et al., Nature Protocols 8:2281-308 (2013). Cas9 requires at least about 16 or 17 nucleotides of gRNA sequence to cleave DNA, and Cpf1 requires at least about 16 nucleotides of gRNA sequence to cleave DNA. In practice, a gRNA sequence has a length of about 17-24 nucleotides (e.g., about: 19, 20 or 21 nucleotides) and is complementary to a target gene. Custom gRNA generators and algorithms are commercially available. Chemically modified sgRNAs have also been demonstrated to be effective in genome editing (see, e.g., Hendel et al., Nature Biotechnol., 985-91 (2015)).

[0147] In some embodiments, the crRNA further comprises a sequence capable of binding to the tracrRNA. Upon binding, the partially double-stranded structure is cleaved by RNase III, the resulting crRNA/tracrRNA hybrid directs the Cas9 endonuclease to recognize and cleave a target DNA sequence.

[0148] In some embodiments, the target DNA sequence is approximate to a “protospacer adjacent motif” (“PAM”) that is specific for a Cas endonuclease. PAM sequences appear throughout a given genome. CRISPR endonucleases of various prokaryotic species have unique PAM sequence requirements. Non-limiting examples of PAM sequences include: 5′-NGG (Streptococcus pyogenes), 5′-NNAGAA (Streptococcus thermophilus CRISPR1), 5′-NGGNG (Streptococcus thermophilus CRISPR3) and 5′-NNNGATT (Neisseria meningiditis). Some endonucleases, e.g., Cas9 endonucleases, are associated with G-rich PAM sites, e.g., 5′-NGG, and perform blunt-end cleaving of the target DNA at a location that is 3 nucleotides upstream (5′) of the PAM site.

[0149] In some embodiments, the gene editing system comprises:
[0150] a) a wild-type or modified type II Cas endonuclease or a polynucleotide encoding the wild-type or modified type II Cas endonuclease; and
[0151] b) a crRNA.

[0152] Cpf1-associated CRISPR arrays are processed into mature crRNAs without the requirement of a tracrRNA. Cpf1 endonucleases, are associated with T-rich PAM sites, e.g., 5′-TTN. Cpf1 can also recognize a 5′-CTA PAM motif. Cpf1 cleaves the target DNA by introducing an offset or staggered double-strand break with a 4- or 5-nucleotide 5′ overhang, for example, cleaving a target DNA with a 5-nucleotide offset or staggered cut located 18 nucleotides downstream (3′) of the PAM site on the coding strand and 23 nucleotides downstream from the PAM site on the complimentary strand. The 5-nucleotide overhang that results from such offset cleavage allows more precise genome editing by DNA insertion by homologous recombination than by insertion at blunt-end cleaved DNA. See, e.g., Zetsche et al., Cell 163:759-71 (2015).

[0153] In some embodiments, the gene editing system activates or represses transcription of a target gene. In some embodiments, the gene editing system comprises:
[0154] a) a chimeric protein comprising dCas9 and one or more effector domains; and
[0155] b) one or more sgRNAs.

[0156] In some embodiments, the chimeric protein represses the expression of the target protein (CRISPRi). In some embodiments, the chimeric protein activates the expression of the target protein (CRISPRa). In some embodiments, the chimeric protein methylates a DNA sequence recognized by the sgRNA. In some embodiments, the chimeric protein demethylates a DNA sequence recognized by the sgRNA.

[0157] An effector domain comprises a biologically active portion of an effector protein (e.g., transcriptional activator or repressor). In some embodiments, the gene editing system comprises 1 effector domain. In some embodiments, the gene editing system comprises at least 2 effector domains, e.g., 2, 3 or 4 effector domains. In some embodiments, the effector domain comprises KRAB. In some embodiments, the effector domain comprises VP64. In some embodiments, the effector domain comprises VP64, p65 and Rta. In some embodiments, the dCas9 is D10A. In some embodiments, the dCas9 is H840A.

[0158] Because dCas9 is catalytically inactive, dCas9 does not cut the target DNA but interferes with transcription by steric hindrance. The dCas9 chimeric protein (e.g., dCas9-VPR), guided by the one or more gRNAs to the upstream sequence of a transcriptional start site (TSS) of the target gene, modulates transcription of the target gene. See, e.g., Gilbert et al., CRISPR-Mediated Modular RNA-Guided Regulation of Transcription in Eukaryotes, Cell 154, 442-51 (2013); Cheng et al., Multiplexed activation of endogenous genes by CRISPR-on, an RNA-guided transcriptional activator system, Cell Res. 23:1163-71 (2013); Gilbert et al., Genome-Scale CRISPR-Mediated Control of Gene Repression and Activation, Cell 159:647-61 (2014); Tanenbaum et al., A protein-tagging system for signal amplification in gene expression and fluorescence imaging, Cell 159:635-46 (2014); Konermann et al., Genome-scale transcriptional activation by an engineered CRISPR-Cas9 complex, Nature 517:583-88 (2015); Chavez et al., Highly efficient Cas9-mediated transcriptional programming, Nat. Methods. 12:326-28 (2015); Zalatan et al., Engineering complex synthetic transcriptional programs with CRISPR RNA scaffolds, Cell 160:339-50 (2015); Horlbeck et al., Compact and highly active next-generation libraries for CRISPR-mediated gene repression and activation, eLife. 5: e19760 (2016); Chavez et al., Comparison of Cas9 activators in multiple species, Nat Methods. 7:563-67 (2016).

[0159] CRISPR technology for editing the genes of eukaryotes is disclosed in US Patent Application Publications 2016/0138008A1 and US2015/0344912A1, and in U.S. Pat. Nos. 8,697,359, 8,771,945, 8,945,839, 8,999,641, 8,993,233, 8,895,308, 8,865,406, 8,889,418, 8,871,445, 8,889,356, 8,932,814, 8,795,965, and 8,906,616. Cpf1 endonuclease and corresponding guide RNAs and PAM sites are disclosed in US Patent Application Publication 2016/0208243 A1. CRISPR technology for generating mtDNA dysfunction in the mitochondrial genome is disclosed in Jo et al., BioMed Res. Int. 2015:305716 (2015). Co-delivery of Cas9 and sgRNA with nanoparticles is disclosed in Mout et al., ACS Nano 11 (3): 2452-58 (2017).

[0160] In some embodiments, the agent comprises a transposon-based gene editing system. An example of a suitable transposon-based gene editing system for use in the disclosure provided herein is the Gene Writer system described in International Publication Number WO 2020/047124, published on Mar. 5, 2020, the contents of which are incorporated herein by referenced in their entirety.

[0161] In some embodiments, the agent comprises a transcription activator-like effector nuclease (TALEN) system. TALEN-based systems comprise a protein comprising a TAL effector DNA binding domain and an enzymatic domain. They are made by fusing a TAL effector DNA-binding domain to a DNA cleavage domain (a nuclease which cuts DNA strands). The FokI restriction enzyme described above is an exemplary enzymatic domain suitable for use in TALEN-based gene-regulating systems.

[0162] TAL effectors are proteins that are secreted by Xanthomonas bacteria via their type III secretion system when they infect plants. The DNA binding domain contains a repeated, highly conserved, 33-34 amino acid sequence with divergent 12th and 13th amino acids. These two positions, referred to as the Repeat Variable Diresidue (RVD), are highly variable and strongly correlated with specific nucleotide recognition. Therefore, the TAL effector domains can be engineered to bind specific target DNA sequences by selecting a combination of repeat segments containing the appropriate RVDs. The nucleic acid specificity for RVD combinations is as follows: HD targets cytosine, NI targets adenine, NG targets thymine, and NN targets guanine (though, in some embodiments, NN can also bind adenine with lower specificity)

[0163] In some embodiments, the TAL effector domains bind to a target DNA sequence that is at least 90%, 95%, 96%, 97%, 98%, or 99% identical, or is 100% identical to a target DNA sequence of the target protein. In some embodiments, the TAL effector domains bind to a target DNA sequence that is at least 90%, 95%, 96%, 97%, 98%, or 99% identical, or is 100% identical to a target DNA sequence defined by a set of genomic coordinates.

[0164] In some embodiments, the gene-regulating system comprises two or more TAL effector-fusion proteins each comprising a TAL effector domain, wherein at least one of the TAL effector domains binds to a target DNA sequence of the target protein. In some embodiments, at least one of the two or more TAL effector domains binds to a target DNA sequence that is at least 90%, 95%, 96%, 97%, 98%, or 99% identical, or is 100% identical to a target DNA sequence defined by a set of genomic coordinates.

[0165] Methods and compositions for assembling the TAL-effector repeats are known in the art. See e.g., Cermak et al, Efficient design and assembly of custom TALEN and other TAL effector-based constructs for DNA targeting, Nucleic Acids Res 39(12): e82 (2011). Plasmids for constructions of the TAL-effector repeats are commercially available from e.g., Addgene.

[0166] In some embodiments, the agent comprises a zinc finger nuclease (ZFN) system. ZFN domains can be generated using commercially available plasmids, such as, for example, plasmid pairs (CSTZFN-1KT COMPOZR® Custom Zinc Finger Nuclease (ZFN) R-3257609) from Sigma Aldrich (St. Louis, MO). Plasmids can be prepared using the commercial system following manufacturer's protocol (e.g., NEB Monarch Miniprep (Cat #T1010), New England Biolabs, Ipswich, MA).

[0167] In some embodiments, the agent comprises a vector designed for delivering conventional gene therapy (e.g., gene knockout or knock-in via homologous recombination). Non-limiting examples of said vectors include retrovirus (e.g., Lentivirus 5), adenovirus, adeno-associated virus, Herpes Simplex Virus, nanoparticles and DNA Transposons.

### D. Small Molecule Agents

[0168] In some embodiments, the agent comprises a small molecule. In some embodiments, the small molecule binds to the target protein. In some embodiments, the small molecule binds to a protein capable of modulating the expression or activity of the target protein. In some embodiments, the small molecule is an inhibitor of the target protein (e.g., a direct inhibitor, an indirect inhibitor). In some embodiments, the small molecule is an activator of the target protein (e.g., a direct activator, and indirect activator).

[0169] Examples of small molecules include organic compounds, organometallic compounds, inorganic compounds, and salts of organic, organometallic or inorganic compounds. Atoms in a small molecule are typically linked together via covalent and/or ionic bonds. In certain embodiments, the small molecule is a small organic molecule. The arrangement of atoms in a small organic molecule may represent a chain (e.g. a carbon-carbon chain or a carbon-heteroatom chain), or may represent a ring containing carbon atoms, e.g. benzene or a polycyclic system, or a combination of carbon and heteroatoms, i.e., heterocycles such as a pyrimidine or quinazoline. Although small molecules can have a wide range of molecular weights, they generally include molecules that are less than about 5,000 daltons. For example, such small molecules can be less than about 1000 daltons and, preferably, are less than about 750 daltons or, more preferably, are less than about 500 daltons. Small molecules can be found in nature (e.g., identified, isolated, purified) and/or produced synthetically (e.g., by traditional organic synthesis, bio-mediated synthesis, or a combination thereof). See e.g. Ganesan, Drug Discov. Today 7 (1): 47-55 (January 2002); Lou, Drug Discov. Today, 6 (24): 1288-1294 (December 2001). Examples of naturally occurring small molecules include, but are not limited to, hormones, neurotransmitters, nucleotides, amino acids, sugars, lipids, and their derivatives.

[0170] In particular embodiments, the agent comprises a proteolysis targeting chimera (PROTAC).

[0171] A small molecule suitable for use in the compositions, kits and methods of this disclosure can be identified by a person of ordinary skill in the art using any of the screening methods disclosed herein.

### E. Therapeutic Cells and Cell-Based Therapies

[0172] In some embodiments, the agent comprises a therapeutic cell. In certain embodiments, the therapeutic cell expresses and/or is engineered to express a target protein (e.g., a target protein in the Sequence Listing, in Table A, or a variant of the foregoing), a polypeptide (e.g., an antibody, an antigen-binding fragment or a polypeptide that comprises an amino acid sequence that is at least 70% identical to at least a portion of the target protein), a polynucleotide (e.g., a recombinant DNA, an RNA such as mRNA or siRNA), and/or a gene editing system (e.g., a CRISPR/Cas system) described herein.

[0173] In some embodiments, a polypeptide disclosed herein (e.g., an antibody or antigen-binding fragment) is incorporated into a cell-based therapy. In some embodiments, the polypeptide is an engineered T cell receptor. In some embodiments, the polypeptide is a chimeric antigen receptor (CAR) (e.g., expressed on a T (CAR-T) cell, natural killer (CAR-NK) cell, or macrophage (CAR-M) cell). In some embodiments, the CAR comprises a transmembrane domain and an antigen-recognition moiety, wherein the antigen-recognition moiety binds the target protein.

[0174] A therapeutic cell suitable for use in the compositions, kits and methods of this disclosure can be generated, identified and/or enriched with methods known to a person of ordinary skill in the art. Non-limiting examples of said methods include purifying, propagating and/or differentiating cells from a subject (e.g., a human) to a specific cell product; engineering a somatic cell for gene therapy; cell immortalization; ex vivo gene modification of a cell (e.g., using viral vector and/or lipid nanoparticle delivery technologies); in vivo gene modification of a cell (e.g., using viral vector and/or lipid nanoparticle delivery technologies); genome editing; cell plasticity technologies; gene modifications; and flow cytometry. In some embodiments, the therapeutic cell is autologous or syngeneic. In other embodiments, the therapeutic cell is allogeneic.

### Expression Vectors and Hosts

[0175] In another aspect, the disclosure provides an expression vector comprising a polynucleotide described herein.

[0176] The term “expression vector” refers to a replicable nucleic acid from which one or more proteins can be expressed when the expression vector is transformed into a suitable expression host cell.

[0177] In some embodiments, the expression vector comprises an expression control polynucleotide sequence operably linked to the polynucleotide, a polynucleotide sequence encoding a selectable marker, or both. In some embodiments, the expression control polynucleotide sequence comprises a promoter sequence, an enhancer sequence, or both. In some embodiments, the expression control polynucleotide sequence comprises an inducible promoter sequence. The term “promoter” refers to a region of DNA to which RNA polymerase binds and initiates the transcription of a gene. The term “operably linked” means that the nucleic acid is positioned in the recombinant polynucleotide, e.g., vector, in such a way that enables expression of the nucleic acid under control of the element (e.g., promoter) to which it is linked. The term “selectable marker element” is an element that confers a trait suitable for artificial selection. Selectable marker elements can be negative or positive selection markers. Non-limiting examples of expression vectors for use with bacterial, fungal, yeast, and mammalian cellular hosts are described in Molecular Cloning: A Laboratory Manual (Michael R. Green & Joseph Sambrook eds., 4th ed. 2012).

[0178] In another aspect, the disclosure provides an expression host cell comprising any one or more of the polynucleotides or expression vectors described herein.

[0179] The term “expression host cell” refers to a cell useful for receiving, maintaining, reproducing and/or amplifying a vector.

[0180] Non-limiting examples of expression host cells include mammalian cells such as hybridoma cells, Baby Hamster Kidney fibroblasts (BHK cells), Chinese hamster ovary (CHO) cells, COS cells, HeLa cells, and human embryonic kidney (HEK), yeast cells such as Pichia pastoris cells, or bacterial cells such as DH5a, etc. See, e.g., Mammalian Cell Cultures for Biologics Manufacturing (Weichang Zhou & Anne Kantardjieff eds., 2014) for processes of host cell culture for production of protein therapeutics; Protein Biotechnology: Isolation, Characterization, and Stabilization (Felix Franks eds., 2013) and Protein Purification Protocols (Paul Cutler eds., 2010) for purification of protein therapeutics; and Therapeutic Protein Drug Products: Practical Approaches to formulation in the Laboratory, Manufacturing, and the Clinic (Brian K Meyer eds., 2012) for formulation of protein therapeutics.

[0181] A polynucleotide or expression vector described herein can be introduced into a suitable or desired host cell using techniques known in the art, including transformation, electroporation, and transduction. The introduced nucleic acid can be extrachromosomal in the host cell, or integrated into the host cell's genome.

### Pharmaceutical Compositions

[0182] In another aspect, the disclosure provides a pharmaceutical composition, wherein the pharmaceutical composition comprises an agent disclosed herein, and a pharmaceutically acceptable carrier. As used herein, the term “pharmaceutical composition” refers to a composition having pharmacological activity or other direct effect in mitigating, treating, or preventing cancer, or a finished dosage form or formulation thereof.

[0183] In some embodiments, the composition (e.g., pharmaceutical composition) comprises pharmaceutically acceptable carriers, excipients, stabilizers, diluents or tonifiers (Remington's Pharmaceutical Sciences 16th edition, Osol, A. Ed. (1980)). Suitable pharmaceutically acceptable carriers, excipients, or stabilizers are nontoxic to recipients at the dosages and concentrations employed. Non-limiting examples of pharmaceutically acceptable carriers, excipients, stabilizers, diluents or tonifiers include buffers (e.g., phosphate, citrate, histidine), antioxidants (e.g., ascorbic acid or methionine), preservatives, proteins (e.g., serum albumin, gelatin or immunoglobulins); hydrophilic polymers, amino acids, carbohydrates (e.g., monosaccharides, disaccharides, glucose, mannose or dextrins); chelating agents (e.g., EDTA), sugars (e.g., sucrose, mannitol, trehalose or sorbitol), salt-forming counter-ions (e.g., sodium), metal complexes (e.g., Zn-protein complexes); non-ionic surfactants (e.g., Tween), PLURONICS™ and polyethylene glycol (PEG).

[0184] In some embodiments, the agent of the pharmaceutical compositions (e.g., polypeptide, polynucleotide, or small molecule) is modified, e.g., conjugated to a heterologous moiety. The term “conjugated” refers to attached, via a covalent or noncovalent interaction. Conjugation can employ any of suitable linking agents; non-limiting examples include peptide linkers, compound linkers, and chemical cross-linking agents.

[0185] In some embodiments, the heterologous moiety is a marker (e.g., a fluorescent or radioactive marker), a molecule that stabilizes the agent, a molecule that targets the agent (e.g., to a particular cell or tissue, to facilitate or prevent from crossing the blood brain barrier), or a combination thereof.

[0186] In some embodiments, the heterologous moiety is polyethylene glycol (PEG), hexadecanoic acid, hydrogels, nanoparticles, multimerization domains and carrier peptides. In some embodiments, the nanoparticle is a lipid nanoparticle. In some embodiments, the nanoparticle is a polymer nanoparticle. In some embodiments, the polymer is an amphiphilic polymer. In other embodiments, the polymer is a hydrophobic or hydrophilic polymer. Non-limiting examples of polymers include poly(lactic acid)-poly(ethylene glycol), poly(lactic-co-glycolic acid)-poly(ethylene glycol), poly(lactic-co-glycolic) acid (PLGA), poly(lactic-co-glycolic acid)-d-α-tocopheryl polyethylene glycol succinate, poly(lactic-co-glycolic acid)-ethylene oxide fumarate, poly(glycolic acid)-poly(ethylene glycol), polycaprolactone-poly(ethylene glycol), or any salts thereof. In some embodiments, the polymer nanoparticle comprises poly(lactic-co-glycolic) acid (PLGA).

[0187] In some embodiments, the composition (e.g., pharmaceutical composition) is formulated for a suitable administration schedule and route. Non-limiting examples of administration routes include oral, rectal, mucosal, intravenous, intramuscular, subcutaneous and topical, etc. In some embodiments, the composition (e.g., pharmaceutical composition) is stored in the form of an aqueous solution or a dried formulation (e.g., lyophilized). In some embodiments, the composition is formulated to be administered by infusion (e.g., intravenous infusion).

[0188] In some embodiments, the composition is formulated to be administered with one or more additional therapeutic agents (e.g., with a second therapeutic agent) as a combination therapy. As used herein, a “combination therapy” or “administered in combination” means that two (or more) different agents or treatments are administered to a subject as part of a defined treatment regimen for a particular disease or condition. Non-limiting examples of additional agents or treatments include biologics (e.g., antibodies, peptides), cell therapies, gene therapies, immunotherapies, and small molecules impacting a disease or condition described herein (e.g., cancer).

[0189] The treatment regimen defines the doses and periodicity of administration of each agent such that the effects of the separate agents on the subject overlap. In some embodiments, the two or more agents are administered in a sequential manner as part of a prescribed regimen. In other embodiments, the delivery of the two or more agents is simultaneous or concurrent. In some embodiments, the two or more agents are co-formulated. In some embodiments, administration of two or more agents or treatments in combination is such that the reduction in a symptom, or other parameter related to the disorder is greater than what would be observed with one agent or treatment delivered alone or in the absence of the other. The effect of the two treatments can be partially additive, wholly additive, or greater than additive (e.g., synergistic). Each of the two or more therapeutic agents can be administered by any appropriate route including, but not limited to, oral routes, intravenous routes, intramuscular routes, and direct absorption through mucous membrane tissues. The two or more therapeutic agents can be administered by the same route or by different routes.

[0190] In some embodiments, the agent or pharmaceutical composition of the disclosure is delivered by a viral vector, e.g., by contacting a cell with a viral vector, locally administered (e.g., injected) to a tumor, or systemically (e.g., intravenously or orally) administered to a subject (e.g., a human patient).

[0191] Viral genomes provide a rich source of vectors that can be used for the efficient delivery of exogenous genes into a mammalian cell. Viral genomes are particularly useful vectors for gene delivery because the polynucleotides contained within such genomes are typically incorporated into the nuclear genome of a mammalian cell by generalized or specialized transduction. These processes occur as part of the natural viral replication cycle, and do not require added proteins or reagents to induce gene integration. Non-limiting examples of viral vectors include retrovirus (e.g., Retroviridae family viral vector), adenovirus (e.g., Ad5, Ad26, Ad34, Ad35, and Ad48), parvovirus (e.g., adeno-associated viruses), coronavirus, negative strand RNA viruses such as orthomyxovirus (e.g., influenza virus), rhabdovirus (e.g., rabies and vesicular stomatitis virus), paramyxovirus (e.g., measles and Sendai), positive strand RNA viruses, such as picornavirus and alphavirus, and double stranded DNA viruses including adenovirus, herpesvirus (e.g., Herpes Simplex virus types 1 and 2, Epstein-Barr virus, cytomegalovirus, replication deficient herpes virus), and poxvirus (e.g., vaccinia, modified vaccinia Ankara (MVA), fowlpox and canarypox). Additional non-limiting examples include Norwalk virus, togavirus, flavivirus, reoviruses, papovavirus, hepadnavirus, human papilloma virus, human foamy virus, and hepatitis virus, for example. Non-limiting examples of retroviruses include: avian leukosis-sarcoma, avian C-type viruses, mammalian C-type, B-type viruses, D-type viruses, oncoretroviruses, HTLV-BLV group, lentivirus, alpharetrovirus, gammaretrovirus, spumavirus (see, e.g., Coffin J M. Retroviridae: The viruses and their replication. In: Fields B N, Knipe D M, Howley P M et al, eds. Fundamental Virology. 3rd ed. Philadelphia: Lippincott-Raven Publishers, 1996:763-843). Additional non-limiting examples include murine leukemia viruses, murine sarcoma viruses, mouse mammary tumor virus, bovine leukemia virus, feline leukemia virus, feline sarcoma virus, avian leukemia virus, human T-cell leukemia virus, baboon endogenous virus, Gibbon ape leukemia virus, Mason Pfizer monkey virus, simian immunodeficiency virus, simian sarcoma virus, Rous sarcoma virus and lentiviruses. Additional non-limiting examples of vectors are described, for example, in U.S. Pat. No. 5,801,030, the teachings of which are incorporated herein by reference.

[0192] In some embodiments, the agent or pharmaceutical composition of the disclosure is formulated to be delivered by a membrane-based carrier in vivo, in vitro, ex vivo, or in situ. In some embodiments, the membrane-based carrier is a cell-based carrier (e.g., mammalian such as human cells). In some embodiments, the membrane-based carrier is a vesicle-based carrier. In some embodiments, the membrane-based carrier comprises one or more vectors described herein (e.g., a plasmid, virus, viral-like particle or a virosome).

[0193] In some embodiments, the agent or pharmaceutical composition of the disclosure is formulated to be delivered by one or more liposomes. Liposomes are spherical vesicle structures composed of a uni- or multilamellar lipid bilayer surrounding internal aqueous compartments and a relatively impermeable outer lipophilic phospholipid bilayer. Liposomes may be anionic, neutral or cationic. Liposomes are biocompatible, nontoxic, can deliver both hydrophilic and lipophilic drug molecules, protect their cargo from degradation by plasma enzymes, and transport their load across biological membranes and the blood brain barrier (BBB) (see, e.g., Spuch and Navarro, J Drug Deliv. 2011:469679 (2011)).

[0194] Vesicles can be made from several different types of lipids; however, phospholipids are most commonly used to generate liposomes as drug carriers. Methods for preparation of multilamellar vesicle lipids are known in the art (see for example U.S. Pat. No. 6,693,086, the teachings of which relating to multilamellar vesicle lipid preparation are incorporated herein by reference). Although vesicle formation can be spontaneous when a lipid film is mixed with an aqueous solution, it can also be expedited by applying force in the form of shaking by using a homogenizer, sonicator, or an extrusion apparatus (see, e.g., Spuch and Navarro, J Drug Deliv. 2011:469679 (2011)). Extruded lipids can be prepared by extruding through filters of decreasing size, as described in Templeton et al., Nature Biotech, 15:647-52 (1997), the teachings of which relating to extruded lipid preparation are incorporated herein by reference.

[0195] In some embodiments, the agent or pharmaceutical composition of the disclosure is formulated to be delivered by lipid nanoparticles (LNPs). In one embodiment, the LNP preparation comprising the agent or pharmaceutical composition of the disclosure has one or more of the following characteristics: (a) the LNP preparation comprises a cationic lipid, a neutral lipid, a cholesterol, and a PEG lipid, (b) the LNP preparation has a mean particle size of between 80 nm and 160 nm.

[0196] Nanostructured lipid carriers (NLCs) are modified solid lipid nanoparticles (SLNs) that retain the characteristics of the SLN, improve drug stability and loading capacity, and prevent drug leakage. Polymer nanoparticles (PNPs) are an important component of drug delivery. These nanoparticles can effectively direct drug delivery to specific targets and improve drug stability and controlled drug release. Lipid-polymer nanoparticles (PLNs), a new type of carrier that combines liposomes and polymers, may also be employed. These nanoparticles possess the complementary advantages of PNPs and liposomes. A PLN is composed of a core-shell structure; the polymer core provides a stable structure, and the phospholipid shell offers good biocompatibility. As such, the two components increase the drug encapsulation efficiency rate, facilitate surface modification, and prevent leakage of water-soluble drugs. See, e.g., Li et al., Nanomaterials 7 (6): 122 (2017).

[0197] In some embodiments, the agent or pharmaceutical composition of the disclosure is formulated to be delivered by a carbohydrate carrier (e.g., an anhydride-modified phytoglycogen or glycogen-type material). Non-limiting examples of carbohydrate carriers include phytoglycogen octenyl succinate, phytoglycogen beta-dextrin and anhydride-modified phytoglycogen beta-dextrin.

[0198] In some embodiments, the agent or pharmaceutical composition of the disclosure is formulated to be delivered by a protein carrier (e.g., a protein covalently linked to the circular polyribonucleotide). Non-limiting examples of protein carriers include human serum albumin (HSA), low-density lipoprotein (LDL), high-density lipoprotein (HDL) and globulin.

[0199] In some embodiments, the agent or pharmaceutical composition of the disclosure is formulated to be delivered by a cationic carrier (e.g., a cationic lipopolymer or transfection reagent). Non-limiting examples of cationic carriers include lipofectamine, polyethylenimine, poly(trimethylenimine), poly(tetramethylenimine), polypropylenimine, aminoglycoside-polyamine, dideoxy-diamino-b-cyclodextrin, spermine, spermidine, poly(2-dimethylamino)ethyl methacrylate, poly(lysine), poly(histidine), poly(arginine), cationized gelatin, dendrimers, chitosan, 1,2-Dioleoyl-3-Trimethylammonium-Propane(DOTAP), N-[1-(2,3-dioleoyloxy) propyl]-N,N,N-trimethylammonium chloride (DOTMA), 1-[2-(oleoyloxy)ethyl]-2-oleyl-3-(2-hydroxyethyl)imidazolinium chloride (DOTIM), 2,3-dioleyloxy-N-[2 (sperminecarboxamido)ethyl]-N,N-dimethyl-1-propanaminium trifluoroacetate (DOSPA), 3B-[N-(N\N′-Dimethylaminoethane)-carbamoyl]Cholesterol Hydrochloride (DC-Cholesterol HCl), diheptadecylamidoglycyl spermidine (DOGS), N,N-distearyl-N,N-dimethylammonium bromide (DDAB), N-(1,2-dimyristyloxyprop-3-yl)-N,N-dimethyl-N-hydroxyethyl ammonium bromide (DMRIE) and N,N-dioleyl-N,N-dimethylammonium chloride (DODAC).

[0200] In some embodiments, the agent or pharmaceutical composition of the disclosure is formulated to be delivered by exosomes, adipocytes and/or red blood cells. See, e.g., Ha et al., Acta Pharm Sin B. 6(4): 287-96 (2016).

[0201] In some embodiments, the agent or pharmaceutical composition of the disclosure is formulated to be delivered by one or more Fusosomes. Fusosomes have been engineered to confer target cell specificity for the fusion and payload delivery, allowing the creation of delivery vehicles with programmable cell specificity. See, e.g., Patent Application WO2020014209, the teachings of which relating to fusosome design, preparation, and usage are incorporated herein by reference.

[0202] In some embodiments, the agent or pharmaceutical composition of the disclosure is formulated to be delivered by ex vivo differentiated red blood cells. See, e.g., WO2015073587; WO2017123646; WO2017123644; WO2018102740; WO2016183482; WO2015153102; WO2018151829; WO2018009838; Shi et al., PNAS, 111 (28): 10131-36 (2014); U.S. Pat. No. 9,644,180; Huang et al., Nature Communications 8:423 (2017).

[0203] In some embodiments, the agent or pharmaceutical composition of the disclosure is formulated to be delivered by one or more microsomes, virus-like particles (VLPs) or plant nanovesicles and plant messenger packs (PMPs). See, e.g., WO2011097480, WO2013070324, WO2017004526 and WO2020041784.

[0204] In some embodiments, the agent or pharmaceutical composition of the disclosure is formulated to be delivered by one or more anellosomes. The making and use of anellosomes used for delivery of therapeutic products is described in U.S. Pat. No. 11,166,996, the teachings of which relating to anellosome design, preparation, and usage are incorporated herein by reference.

### Methods of Modulating Target Proteins

[0205] In another aspect, the disclosure provides a method of modulating the expression or activity of a target protein identified in the Sequence Listing, in Table A, or a variant thereof in a cell (a target cell, a cell of a target tissue), comprising contacting the cell (e.g., in vitro, ex vivo, or in vivo) with an agent that comprises and/or modulates the expression or activity of a target protein identified herein, or a pharmaceutical composition comprising the agent.

[0206] The target cell may be any mammalian (e.g., human) cell.

[0207] In some embodiments, the target cell is a cell implicated in a disease or condition described herein.

[0208] In some embodiments, the target cell is a cancer cell (e.g., a metastatic cancer cell), a cell (e.g., stromal cell) in a tumor micro-environment, or a combination thereof. In particular embodiments, the target cell is a metastatic cancer cell.

[0209] In some embodiments, the target cell is implicated and/or involved in inflammation. In certain embodiments, the target cell is an epithelial cell, an endothelial cell, a stem cell, a non-immune cell, or a combination thereof.

[0210] In some embodiments, the target cell is implicated and/or involved in fibrosis, aging, and/or senescence. In certain embodiments, the target cell is an epithelial cell, an endothelial cell, a stem cell, a non-immune cell, or a combination thereof.

[0211] In some embodiments, the target cell is an immune cell. In certain embodiments, the target cell is an effector T cell, a helper T cell, a Th1 cell, a Th2 cell, a Th17 cell, a B cell, a natural killer (NK) cell, an innate lymphoid cell (e.g., an ILC1 cell, an ILC2 cell, an ILC3 cell), a macrophage (e.g., an M1 macrophage, an M2 macrophage), a monocyte, and/or an antigen presenting cell (e.g., a dendritic cell), or a combination of the foregoing.

[0212] In some embodiments, a target protein of the disclosure is used to mediate depletion of a cell population (e.g., a population of cancer cells, such as tumor cells; a population of immune cells). In some embodiments, a target protein of the disclosure facilitates cell targeting (e.g., delivering a therapeutic in a cell type-specific manner), for example, as a binder of a surface marker.

[0213] The target tissue may be any tissue of the body.

[0214] In some embodiments, the target tissue is a tissue implicated in a disease or condition described herein.

[0215] In certain embodiments, the target tissue comprises a tumor, a tumor microenvironment, a site of metastasis, or a combination thereof.

[0216] In some embodiments, the target tissue is an immune tissue. In some embodiments, the target cell is a non-immune tissue. In some embodiments, the target tissue comprises a lymph node, a spleen, a secondary lymphoid organ, a tertiary lymphoid organ, a barrier tissue, skin, gut, an airway, a wound, an immune tissue, a non-immune tissue, or a combination of the foregoing.

[0217] In certain embodiments, the effective amount is sufficient to reduce expression of the target protein in the target cell and/or target tissue. In some embodiments, said reduction is by at least about 10%, e.g., by at least about: 15%, 20%, 25%, 30%, 35%, 40%, 45%, 50%, 55%, 60%, 65%, 70%, 75%, 80%, 85%, 90%, 91%, 92%, 93%, 94%, 95%, 96%, 97%, 98% or 99%. In particular embodiments, said reduction is about 10-99%, e.g., about: 10-98%, 15-98%, 15-97%, 20-97%, 20-96%, 25-96%, 25-95%, 30-95%, 30-94%, 35-94%, 35-93%, 40-93%, 40-92%, 45-92%, 45-91%, 50-91%, 50-90%, 55-90%, 55-85%, 60-85%, 60-80%, 65-80%, 65-75%, or 70-75%.

[0218] In certain embodiments, the effective amount is sufficient to increase expression of the target protein in the target cell and/or target tissue. In some embodiments, said increase is by at least about 10%, e.g., by at least about: 15%, 20%, 25%, 30%, 35%, 40%, 45%, 50%, 55%, 60%, 65%, 70%, 75%, 80%, 85%, 90%, 91%, 92%, 93%, 94%, 95%, 96%, 97%, 98% or 99%. In particular embodiments, said increase is about 10-99%, e.g., about: 10-98%, 15-98%, 15-97%, 20-97%, 20-96%, 25-96%, 25-95%, 30-95%, 30-94%, 35-94%, 35-93%, 40-93%, 40-92%, 45-92%, 45-91%, 50-91%, 50-90%, 55-90%, 55-85%, 60-85%, 60-80%, 65-80%, 65-75%, or 70-75%. In some embodiments, said increase is by about 1-100 fold, e.g., by about: 1-75, 1-50, 1-25, 1-20, 1-15, 1-10, 1-8, 1-6, 1-5, 1-4, 1-3 or 1-2 fold.

[0219] In some embodiments, the effective amount is sufficient to modulate nuclear factor kappa B (NF-κB) signaling, growth-factor signaling, cell death (e.g., apoptosis), cell cycle (e.g., mitosis), cell migration, inflammation, or a combination of the foregoing.

### Methods of Diagnosis and Treatment

[0220] In another aspect, the disclosure provides a method of detecting a disease or condition, or predicting a likelihood of (or risk level for) developing a disease or condition in a subject, comprising quantifying an expression or activity of a target protein in a sample from the subject, wherein the level of expression or activity of the target protein in the sample is indicative of the likelihood of developing the disease or condition in the subject.

[0221] In some embodiments, the disease or condition is a disease targeted by a drug and/or a diagnostic test approved by The United States Food and Drug Administration (the FDA). In certain embodiments, the disease or condition is a disease targeted by a drug and/or a diagnostic test under clinical study. In some embodiments, the disease is an immune mediated disease, an idiopathic disease, a genetic disease, a cancer (e.g., a tumor), a metabolic disease, or a combination thereof. In particular embodiments, the disease or condition is associated with the GWAS, the TCGA, whole genome sequencing, PheWAS, eQTL studies, or a combination thereof (e.g., a disease, condition or pre-disease listed in paragraphs [0219] and [0220]).

[0222] In another aspect, the disclosure provides a method of classifying a subject based on a predicted likelihood of developing a disease or condition, comprising quantifying an expression or activity of a target protein in a sample from the subject; predicting the likelihood of developing the disease or condition based on the expression or activity of the target protein in the sample; and classifying the patient based on the predicted likelihood.

[0223] In another aspect, the disclosure provides a method of stratifying a set of subjects having a disease or condition, comprising: quantifying an expression and/or activity of a target protein in samples from individual subjects in the set; and stratifying the set of subjects for treatment according to the individual subjects' levels of the expression and/or activity of the target protein in the samples.

[0224] In some embodiments, a higher expression or activity level of a target protein in a sample from the subject, relative to an appropriate control (e.g., reference standard) is indicative of the disease or condition or a likelihood of developing the disease or condition. In some embodiments, a lower expression or activity level of a target protein in a sample from the subject, relative to an appropriate control (e.g., reference standard) is indicative of the disease or condition or a likelihood of developing the disease or condition.

[0225] In some embodiments, the method further comprises administering to a subject who is determined to have or predicted to have a likelihood (or be at risk) of developing the disease or condition, an effective amount of an agent disclosed herein or a pharmaceutical composition disclosed herein.

[0226] In some embodiments, the method further comprises administering to a subject who is determined to have or predicted to have a likelihood of developing the disease or condition, an effective amount of an agent disclosed herein or a pharmaceutical composition disclosed herein.

[0227] In another aspect, the disclosure provides a method of preparing a sample that is useful for detecting a likelihood of developing the disease or condition in a subject, comprising:
[0228] a) obtaining or having obtained a sample from the subject;
[0229] b) adding a protease inhibitor, a control peptide, a standard peptide, or a combination thereof to the sample to prepare a sample that is useful for detecting a likelihood of developing cancer; and
[0230] c) quantifying an expression or activity of a target protein in the sample prepared in step b).

[0231] In another aspect, the disclosure provides a method of treating a disease or condition in a subject in need thereof, comprising administering to the subject an effective amount of an agent disclosed herein or a pharmaceutical composition disclosed herein.

[0232] In another aspect, the disclosure provides a method of treating a disease or condition in a subject in need thereof, comprising administering to the subject an effective amount of an agent disclosed herein or a pharmaceutical composition disclosed herein, wherein the subject has an altered level of expression and/or activity of a target protein disclosed herein.

[0233] “Treatment” and “treating,” as used herein, refer to the medical management of a subject with the intent to improve, ameliorate, stabilize (i.e., not worsen), prevent or cure a disease, pathological condition, or disorder. “Treatment” includes active treatment (treatment directed to improve the disease, pathological condition, or disorder), causal treatment (treatment directed to the cause of the associated disease, pathological condition, or disorder), palliative treatment (treatment designed for the relief of symptoms), preventative treatment (treatment directed to minimizing or partially or completely inhibiting the development of the associated disease, pathological condition, or disorder); and supportive treatment (treatment employed to supplement another therapy). Treatment also includes diminishing the extent of the disease or condition; preventing spread of the disease or condition; delaying or slowing the progress of the disease or condition; ameliorating or palliating the disease or condition; and remission (whether partial or total), whether detectable or undetectable. “Ameliorating” or “palliating” a disease or condition means that the extent and/or undesirable clinical manifestations of the disease, disorder, or condition are lessened and/or time course of the progression is slowed or lengthened, as compared to the extent or time course in the absence of treatment. “Treatment” also includes prolonging survival as compared to expected survival if not receiving treatment. Those in need of treatment include those already with the condition or disorder, as well as those prone to have the condition or disorder or those in which the condition or disorder is to be prevented.

[0234] In some embodiments, the subject is an animal. In other embodiments the subject is a bird, e.g., a hen, rooster, turkey or parrot. In some embodiments, the subject is a mammal. In some embodiments the subject is a non-human mammal. Non-limiting examples of a non-human mammal include cattle (e.g., dairy or beef cattle), sheep, goat, pig, horse, dog, cat, mouse, rat, etc. In some embodiments, the subject is a human. In some embodiments, the human is a neonate. In some embodiments, the human is a pediatric patient. In some embodiments, the human is a juvenile. In some embodiments, the human is an adult. In some embodiments, the human is less than 18 years old. In some embodiments, the human is at least 18 years old. In some embodiments, the human is between 18 and 25 years old. In some embodiments, the human is at least 25 years old, e.g., at least 30, 35, 40, 45, 50, 55, 60, 65, 70, 75, or 80 years old.

[0235] As used herein, the term “effective amount,” “therapeutically effective amount,” or “sufficient amount” refers to a quantity sufficient to, when administered to a subject (e.g., a mammal such as a human cancer patient), effect treatment (e.g., produce beneficial or desired results), including effects at cellular, tissue or clinical levels, etc. As such, the term depends upon the context in which it is being applied. For example, in the context of treating cancer, it is an amount of an agent sufficient to achieve a response as compared to the response obtained without administration of the agent. The amount of a given composition described herein that will correspond to such an amount will vary depending upon various factors, such as the given agent, the pharmaceutical formulation, the route of administration, the type of disease or disorder, the identity of the subject (e.g., age, sex, weight) or host being treated, and the like, but can nevertheless be routinely determined by one skilled in the art. In some embodiments, a “therapeutically effective amount” of a composition of the present disclosure is an amount that results in a beneficial or desired result in a subject (e.g., as compared to a control). A therapeutically effective amount of a composition of the present disclosure may be readily determined by one of ordinary skill by routine methods known in the art. Dosage regimen may be adjusted to provide the optimum therapeutic response.

[0236] A therapeutic agent described herein can be administered via a variety of routes of administration, including, for example, oral, dietary, topical, transdermal, rectal, parenteral (e.g., intra-arterial, intravenous, intramuscular, subcutaneous injection, intradermal injection), intravenous infusion and inhalation (e.g., intrabronchial, intranasal or oral inhalation, intranasal drops) routes of administration, depending on the compound and the particular disease or condition to be treated. Administration can be local or systemic as indicated. The preferred mode of administration can vary depending on the particular compound chosen.

[0237] In some embodiments, the method further comprises administering a therapeutically effective amount of one or more additional therapeutic agents (e.g., a second therapeutic agent) to the subject.

[0238] Administration of two or more therapeutic agents encompasses co-administration of the therapeutic agents in a substantially simultaneous manner, such as in a pharmaceutical combination. Alternatively, such administration encompasses co-administration in multiple containers, or separate containers (e.g., capsules, powders, and liquids) for each therapeutic agent. Such administration also encompasses use of the therapeutic agents in a sequential manner, either at approximately the same time or at different times. When two or more therapeutic agents are administered, the therapeutic agents can be administered via the same administration route or via different administration routes.

[0239] In another aspect, the disclosure provides a method of modulating the expression or activity of a target protein identified in the Sequence Listing, in Table A, or a variant thereof in a cell, comprising contacting the cell with an agent disclosed herein or a pharmaceutical composition disclosed herein. In some embodiments, the cell is in a subject.

[0240] In another aspect, the disclosure provides a method of identifying an agent that modulates the expression and/or activity of a target protein (e.g., a target protein in the Sequence Listing), comprising:
[0241] a) contacting a sample (e.g., a biological sample, such as cells or a tissue) comprising the target protein with an agent (e.g., a candidate agent to be tested for its ability to modulate expression and/or activity of the target); and
[0242] b) determining whether the agent modulates the expression or activity of the target protein,
[0243] wherein a difference in the expression or activity of the target protein that has been contacted with the agent compared to a reference indicates that the agent modulates the expression or activity of the target protein.

[0244] In some embodiments, a difference of at least about 10% in the expression or activity of the protein that has been contacted with the agent compared to the reference indicates that the agent modulates the expression or activity of the protein. In some embodiments, the difference is at least about: 15%, 20%, 25%, 30%, 35%, 40%, 45% or 50% or more.

[0245] In some embodiments, a decrease in the expression or activity of the target protein that has been contacted with the agent compared to the reference indicates the agent inhibits the expression or activity of the target protein. In some embodiments, an increase in the expression or activity of the protein compared to the reference indicates the agent activates the expression or activity of the protein.

### Non-limiting Examples of Indications

### GWAS-Associated Diseases or Conditions

[0246] In some embodiments, a GWAS-associated disease or condition is a (n): abdominal aortic aneurysm, abnormality of chromosome segregation, achalasia, acne, acute lymphoblastic leukemia, acute myeloid leukemia, Addison disease, adolescent idiopathic scoliosis, adult onset asthma, age-related hearing impairment, age-related macular degeneration, age-related nuclear cataract, AIDS, alcohol abuse, alcohol dependence, alcoholic liver cirrhosis, alcoholic pancreatitis, allergic rhinitis, allergy, alopecia, alopecia areata, Alzheimer's disease, amblyopia, amyotrophic lateral sclerosis, androgenetic alopecia, anemia, angina pectoris, ankle injury, ankylosing spondylitis, anorectal malformation, anorexia nervosa, anterior uveitis, anti-neutrophil antibody associated vasculitis, anti-topoisomerase-I-antibody-positive systemic scleroderma, anxiety, asparaginase-induced acute pancreatitis, Asperger syndrome, aspirin-induced asthma, asthma, atopic asthma, atopic eczema, atrial fibrillation, atrophic gastritis, atrophic macular degeneration, attention deficit hyperactivity disorder, atypical femoral fracture, autism spectrum disorder, autoimmune disease, autoimmune hepatitis, autoimmune thyroid disease, azoospermia, back pain, bacterial meningitis, balding, basal cell carcinoma, B-cell acute lymphoblastic leukemia, Behcet's syndrome, bell's palsy, benign prostatic hyperplasia, biliary liver cirrhosis, bipolar disorder, bladder carcinoma, bone fracture, brain aneurysm, brain infarction, breast carcinoma, bulimia nervosa, bullous pemphigoid, cancer, cardiac arrhythmia, cardiac hypertrophy, cardiotoxicity, cardiovascular disease, cardiovascular diseasemyocardial infarction, carpal tunnel syndrome, cataract, celiac disease, central nervous system cancer, central nervous system non-Hodgkin lymphoma, cerebral amyloid angiopathy, cervical carcinoma, cervical intraepithelial neoplasia grade 2/3, Chagas cardiomyopathy, childhood onset asthma, cholecystitis, cholelithiasis, choroidal melanoma, chronic central serous retinopathy, chronic hepatitis B virus infection, chronic hepatitis C virus infection, chronic kidney disease, chronic lymphocytic leukemia, chronic obstructive pulmonary disease, chronic rhinosinusitis, cigarette smoking addiction, cirrhosis of liver, cleft lip, cleft palate, clonal hematopoiesis, Clostridium difficile infection, cocaine dependence, colon polyps, colorectal adenoma, colorectal cancer, conduct disorder, congenital left-sided heart lesions, conotruncal heart malformations, coronary aneurysm, coronary artery disease, corticobasal degeneration, COVID-19, Creutzfeldt Jacob Disease, Crohn's disease, cutaneous mastocytosis, cutaneous melanoma, cutaneous squamous cell carcinoma, dementia, dengue hemorrhagic fever, dental caries, depression, dermatomyositis, developmental dysplasia of the hip, diabetes mellitus, diabetic nephropathy, diabetic retinopathy, diffuse large B-cell lymphoma, digestive system infectious disease, dilated cardiomyopathy, diverticular disease, diverticulitis, drug-induced agranulocytosis, drug-induced liver injury, duodenal ulcer, Dupuytren contracture, eating disorder, eczema, endometrial carcinoma, endometrial neoplasm, endometriosis, eosinophilic esophagitis, epithelioid cell uveal melanoma, Epstein-Barr virus infection, esophageal adenocarcinoma, esophageal varices, essential tremor, estrogen-receptor negative breast cancer, Ewing sarcoma, exfoliation syndrome, exploratory eye movement measurement, extrahepatic bile duct carcinoma, facial wrinkling, familial long QT syndrome, familial sick sinus syndrome, febrile seizure (within the age range of 3 months to 6 years), female reproductive system disease, focal segmental glomerulosclerosis, frontal fibrosing alopecia, frozen shoulder, gallstones, gastric adenocarcinoma, gastric carcinoma, gastric ulcer, gastroesophageal reflux disease, glaucoma, glioma, glycosuria, Graves' disease, Hashimoto's thyroiditis, head and neck malignant neoplasia, head and neck squamous cell carcinoma, hearing loss, heart failure, hematuria, hemorrhoid, Henoch-Schoenlein purpura, hepatitis B virus infection, hepatitis C virus infection, heroin dependence, herpes zoster, hippocampal atrophy, Hirschsprung disease, HIV-1 infection, Hodgkin's lymphoma, human papilloma virus infection, Huntington disease, hypermetropia, hyperopia, hypertension, hyperthyroidism, hypertriglyceridemia, hypertrophic cardiomyopathy, hyperuricemia, hypoalbuminemia, hypospadias, hypothyroidism, idiopathic pulmonary fibrosis, IGA glomerulonephritis, immune system disease, infantile hypertrophic pyloric stenosis, inflammatory bowel disease, influenza A (H1N1) infection, inguinal hernia, insomnia, interstitial lung disease, intracerebral hemorrhage, irritable bowel syndrome, ischemic stroke, juvenile idiopathic arthritis, keratinocyte carcinoma, keratoconus, knee pain, language impairment, large artery stroke, latent autoimmune diabetes in adults, late-onset Alzheimer's disease, late-onset myasthenia gravis, leprosy, leukopenia, Lewy body dementia, limited scleroderma, liver disease, liver neoplasm, lumbar disc degeneration, lung adenocarcinoma, lung carcinoma, lupus nephritis, macrovascular complications of diabetes, macular telangiectasia type 2, major depressive disorder, malaria, male infertility, marginal zone B-cell lymphoma, mastocytosis, melanoma, membranous glomerulonephritis, menorrhagia, mental deterioration, metabolic rate measurement, metabolic syndrome, metastasis measurement, metastatic colorectal cancer, migraine disorder, moderate albuminuria, molar-incisor hypomineralization, monoclonal gammopathy, mood disorder, moyamoya disease, mucocutaneous lymph node syndrome, multiple myeloma, multiple sclerosis, multiple system atrophy, myeloproliferative disorder, myocardial infarction, myopia, myositis, narcolepsy with cataplexy, nasal cavity polyps, nasopharyngeal neoplasm, neonatal systemic lupus erythematosus, nephrotic syndrome, neuroblastoma, neurotic disorder, nicotine dependence, nodular sclerosis Hodgkin lymphoma, non-alcoholic fatty liver disease, non-alcoholic steatohepatitis, non-lobar intracerebral hemorrhage, non-melanoma skin carcinoma, non-obstructive coronary artery disease, non-small cell lung carcinoma, obesity, obesityesophageal carcinoma, obsessive-compulsive disorder, ocular sarcoidosis, oligoarticular juvenile idiopathic arthritis, open-angle glaucoma, opioid use disorder, oral cavity cancer, oral ulcer, oropharynx cancer, osteitis deformans, osteoarthritis, osteoarthritis of the hip, osteoarthritis of the knee, osteonecrosis, osteoporosis, osteosarcoma, ovarian carcinoma, ovarian endometrioid carcinoma, ovarian serous carcinoma, pain, pancreatic carcinoma, panic disorder, Parkinson's disease, pathological myopia, pemphigus vulgaris, peptic ulcer disease, periodontitis, peripheral arterial disease, peripheral neuropathy, periprosthetic osteolysis, pneumonia, polymyositis, polyp of gallbladder, post-operative sensory disturbance, preeclampsia, primary angle closure glaucoma, primary biliary cirrhosis, prion disease, progressive supranuclear palsy, proliferative diabetic retinopathy, prostate carcinoma, proteinuria, pseudotumor cerebri, psoriasis, psoriasis vulgaris, pulmonary non-tuberculous mycobacterial infection, recalcitrant atopic dermatitis, renal cell carcinoma, respiratory system disease, rhegmatogenous retinal detachment, rheumatic heart disease, rheumatoid arthritis, rotator cuff tear, SAPHO syndrome (synovitis, acne, pustulosis, hyperostosis, osteitis syndrome), sarcoidosis, scarlet fever, schizophrenia, sclerosing cholangitis, seasonal allergic rhinitis, selective IgA deficiency disease, sepsis, shoulder impingement syndrome, Sjogren syndrome, skin cancer, skin neoplasm, skin sensitivity to sun, small cell lung carcinoma, small vessel stroke, spontaneous preterm birth, sporadic amyotrophic lateral sclerosis, sporadic Creutzfeld Jacob disease, sporadic Creutzfeldt Jacob disease, squamous cell carcinoma, squamous cell lung carcinoma, stenosing tenosynovitis, Stevens-Johnson syndrome, stomach polyp, stress-related disorder, stroke, substance abuse, sudden cardiac arrest, sunburn, systemic juvenile idiopathic arthritis, systemic lupus erythematosus, systemic mastocytosis, systemic scleroderma, Takayasu arteritis, testicular carcinoma, testicular germ cell tumor, thyroid carcinoma, thyrotoxic periodic paralysis, tinnitus, tooth agenesis, tooth decay, Tourette syndrome, triple-negative breast cancer, tropical spastic paraparesis, tuberculosis, type I diabetes mellitus, type II diabetes mellitus, ulcerative colitis, unipolar depression, upper aerodigestive tract neoplasm, urolithiasis, uterine fibroid, uveal melanoma, varicose veins, vascular dementia, venous thromboembolism, vitamin D deficiency, vitiligo, or wet macular degeneration, or a combination thereof.

### TCGA-Associated Diseases or Conditions

[0247] In some embodiments, a TCGA-associated disease or condition is a: biliary tract cancer, bladder urothelial cancer, bone cancer, brain glioblastoma multiforme, brain lower grade glioma, breast cancer, cervical squamous cell carcinoma, chronic lymphocytic leukemia, chronic myeloid disorders, colon adenocarcinoma, early onset prostate cancer, esophageal adenocarcinoma, gastric adenocarcinoma, gastric cancer, head and neck squamous cell carcinoma, kidney chromophobe, kidney renal clear cell carcinoma, kidney renal papillary cell carcinoma, liver cancer, lung adenocarcinoma, lung squamous cell carcinoma, lymphoid neoplasm diffuse large B-cell lymphoma, malignant lymphoma, oral cancer, ovarian cancer, pancreatic cancer, prostate adenocarcinoma, rectum adenocarcinoma, sarcoma, skin cutaneous melanoma, or uterine corpus endometrial carcinoma, or a combination thereof.

[0248] In some embodiments, the treatment slows (e.g., inhibits) the development of a disease or condition described herein (e.g., inhibits cancer cell growth, proliferation, metastasis, invasion and/or migration).

[0249] In some embodiments, the effective amount is sufficient to slow (e.g., inhibit) the development of a disease or condition described herein.

[0250] In some embodiments, the effective amount is sufficient to slow the development of the disease or condition, by at least about 10%, e.g., by at least about: 15%, 20%, 25%, 30%, 35%, 40%, 45%, 50%, 55%, 60%, 65%, 70%, 75%, 80%, 85%, 90%, 91%, 92%, 93%, 94%, 95%, 96%, 97%, 98% or 99%. In particular embodiments, the effective amount is sufficient to slow the development of the disease or condition by about 10-99%, e.g., about: 10-98%, 15-98%, 15-97%, 20-97%, 20-96%, 25-96%, 25-95%, 30-95%, 30-94%, 35-94%, 35-93%, 40-93%, 40-92%, 45-92%, 45-91%, 50-91%, 50-90%, 55-90%, 55-85%, 60-85%, 60-80%, 65-80%, 65-75%, or 70-75%.

[0251] In some embodiments, the treatment reduces a symptom of a disease or condition described herein.

[0252] In some embodiments, the effective amount is sufficient to reduce the symptom of a disease or condition described herein. In some embodiments, the reduction is by at least about 10%, e.g., by at least about: 15%, 20%, 25%, 30%, 35%, 40%, 45%, 50%, 55%, 60%, 65%, 70%, 75%, 80%, 85%, 90%, 91%, 92%, 93%, 94%, 95%, 96%, 97%, 98% or 99%. In some embodiments, the reduction is about 10-99%, e.g., about: 10-98%, 15-98%, 15-97%, 20-97%, 20-96%, 25-96%, 25-95%, 30-95%, 30-94%, 35-94%, 35-93%, 40-93%, 40-92%, 45-92%, 45-91%, 50-91%, 50-90%, 55-90%, 55-85%, 60-85%, 60-80%, 65-80%, 65-75%, or 70-75%.

[0253] In some embodiments, the effective amount is sufficient to prevent death of a subject thereby reducing the death rate. In certain embodiments, the reduction in death rate is by at least about 10%, e.g., by at least about: 15%, 20%, 25%, 30%, 35%, 40%, 45%, 50%, 55%, 60%, 65%, 70%, 75%, 80%, 85%, 90%, 91%, 92%, 93%, 94%, 95%, 96%, 97%, 98% or 99%. In particular embodiments, the reduction in death rate is about 10-99%, e.g., about: 10-98%, 15-98%, 15-97%, 20-97%, 20-96%, 25-96%, 25-95%, 30-95%, 30-94%, 35-94%, 35-93%, 40-93%, 40-92%, 45-92%, 45-91%, 50-91%, 50-90%, 55-90%, 55-85%, 60-85%, 60-80%, 65-80%, 65-75%, or 70-75%.

[0254] In some embodiments, the effective amount is sufficient to modulate (e.g., increases or reduce) expression of the target protein in a cell implicated in a disease or condition described herein.

[0255] In some embodiments, the effective amount is sufficient to modulate the body's response to a disease or condition described herein.

[0256] In some embodiments, the disclosure provides for treatments that leverage the immune system (e.g., immuno-oncology). In still further embodiments, the immune system is the innate immune system. In some embodiments, the immune system is the adaptive immune system. In still further embodiments, the treatment relates to humoral immunity or antibody-mediated immunity. In some embodiments, the treatment relates to cell-mediated immunity, such as cancer. In some embodiments, the methods relate to treatment at or before early-stage disease progression, while in other embodiments, the methods relate to treatment at or prevention of late-stage disease progression.

[0257] In some embodiments (e.g., immuno-oncology specific treatment), the effective amount is sufficient to modulate (e.g., increase or decrease) an immune cell-related readout, migration of an immune cell (e.g., an antigen presenting cell (such as a dendritic cell and/or a macrophage) and/or a T cell), proliferation of an immune cell, recruitment of an immune cell (e.g., an antigen presenting cell (such as a dendritic cell and/or a macrophage), a monocyte, a T cell, and/or a B cell), lymph node innervation, lymph node homing of an immune cell (e.g., a dendritic cell and/or a T cell), lymph node egress of an immune cell (e.g., a dendritic cell and/or a T cell), differentiation of an immune cell, activation of an immune cell, polarization of an immune cell, cytokine production (e.g., increase pro-inflammatory cytokine production, decrease pro-inflammatory cytokine production, increase anti-inflammatory cytokine production, decrease anti-inflammatory cytokine production), degranulation of an immune cell, maturation of an immune cell, ADCC of an immune cell, ADCP of an immune cell, antigen presentation, target protein expression, or a combination of the foregoing.

[0258] Unless otherwise defined, all terms of art, notations and other scientific terms or terminology used herein are intended to have the meanings commonly understood by those of skill in the art to which this disclosure pertains. In some cases, terms with commonly understood meanings are defined herein for clarity and/or for ready reference, and the inclusion of such definitions herein should not necessarily be construed to represent a substantial difference over what is generally understood in the art. It will be further understood that terms, such as those defined in commonly-used dictionaries, should be interpreted as having a meaning that is consistent with their meaning in the context of the relevant art and/or as otherwise defined herein.

[0259] The terminology used herein is for the purpose of describing particular embodiments only and is not intended to be limiting.

[0260] As used herein, the indefinite articles “a,” “an” and “the” should be understood to include plural reference unless the context clearly indicates otherwise.

[0261] Throughout this specification and the claims which follow, unless the context requires otherwise, the word “comprise,” and variations such as “comprises” and “comprising”, will be understood to imply the inclusion of, e.g., a stated integer or step or group of integers or steps, but not the exclusion of any other integer or step or group of integer or step. When used herein, the term “comprising” can be substituted with the term “containing” or “including.”

[0262] As used herein, “consisting of” excludes any element, step, or ingredient not specified in the claim element. When used herein, “consisting essentially of” does not exclude materials or steps that do not materially affect the basic and novel characteristics of the claim. Any of the terms “comprising,” “containing,” “including,” and “having,” whenever used herein in the context of an aspect or embodiment of the disclosure, can in some embodiments, be replaced with the term “consisting of,” or “consisting essentially of” to vary scopes of the disclosure.

[0263] As used herein, the conjunctive term “and/or” between multiple recited elements is understood as encompassing both individual and combined options. For instance, where two elements are conjoined by “and/or,” a first option refers to the applicability of the first element without the second. A second option refers to the applicability of the second element without the first. A third option refers to the applicability of the first and second elements together. Any one of these options is understood to fall within the meaning, and, therefore, satisfy the requirement of the term “and/or” as used herein. Concurrent applicability of more than one of the options is also understood to fall within the meaning, and, therefore, satisfy the requirement of the term “and/or.”

[0264] When a list is presented, unless stated otherwise, it is to be understood that each individual element of that list, and every combination of that list, is a separate embodiment. For example, a list of embodiments presented as “A, B, or C” is to be interpreted as including the embodiments, “A,” “B,” “C,” “A or B,” “A or C,” “B or C,” or “A, B, or C.”

### EXEMPLIFICATION

[0265] Example 1: Validation of a Target Protein as a Genetic Driver of Disease

[0266] This example demonstrates the validation of a target protein of the disclosure that contains mutation(s) (determined by Genome Wide Association Studies (GWAS)) linked to disease that have heretofore unknown mechanism of action. Specifically, a GWAS linked to Th17 autoimmune disease is mapped to an intergenic locus with no annotated protein but with a target protein identified by the methods of disclosure.

[0267] Transient knock-out and knock-in cell lines are generated by CRISPR-Cas9 in primary PHA blast T-cells where the target protein is knocked out or the alternate SNP allele target protein replaces the wild type. STAT3, STAT1, and IL-6 activation levels are assessed before and after a brief stimulation with IL-23, IL-12 and IL-6. IL-23 and IL-17 are Th17 pathway-inducing cytokines that stimulate STAT3 activation (doi: 10.1038/cmi.2017.128). Hypothesis: the SNP allele of the target protein induces STAT3 at a significantly higher level than the wild-type allele and not STAT1 or NF-kb. Knock-out of the target protein reduces STAT3 activity.

### Materials and Methods:

[0268] PHA Blast generation: Fresh or frozen primary human PBMCs are placed in PBMax Karyotyping media with 10 ng/ml of rhIL-2 added for 3-4 days.

[0269] Knock-out and Knock-in of target protein is accomplished with CRISPR-Cas9Alt-R knock-out via RNP particle transfected via electroporation (Idtdna.com) with guides specific for the target protein.

[0270] STAT3, STAT1, and NF-kB activation assays: PHA Blast cells are placed in 96 well plates 80 μl at ˜10 million cells per/ml. The cells are serum starved for 3-4 hours, then IL-23, IL-12 or IL-6 are added for 30 minutes. The cells are harvested, and the cell extract assayed by phospho-STAT3, STAT1, or NF-kB ELISA.

[0271] Taken together these experiments demonstrate that the target protein containing the GWAS allele linked to autoimmune disease has a more pronounced activation effect on STAT3 but not STAT1 or NF-kB strongly suggests that the target protein is a potential target for amelioration of the autoimmune disease.

[0272] Example 2: Validation of a target protein as a genetic driver of disease. Over-expression of predicted TM protein leads to increased proliferation of tumor cells. A known TCGA mutant of that protein has a stronger effect.

[0273] This example demonstrates the validation of a Target Protein, SEQ ID NO: 5391, as a genetic driver of disease. Specifically, SEQ ID NO: 5391 is a target protein that contains a known TCGA mutant that occurs in a significant portion of patients suffering from Colon Adenocarcinoma. We demonstrate that SEQ ID NO: 5391 over-expressed in the colon cancer cell line HCT116 cells significantly increases the proliferation of those cells. Importantly, a mutant version of SEQ ID NO: 5391, that contains the TCGA P31L mutation has a significantly stronger effect then wild-type SEQ ID NO: 5391-consistent with the TCGA mutant being a genetic driver for the cancerous phenotype.

### Experimental Design:

[0274] Protein overexpression plasmids encoding Target Proteins or controls were transiently transfected into multiple cell lines. 24 hours later proliferation was measured using WST-1 assay.

### Materials and Methods:

[0275] Seed the cells of interest into 96-well plate at a density of 4,000 cells per well in 100 μL of cell culture medium. Incubate the cells in a humidified incubator at 37° C. with 5% CO2 for 24 hours. Dilute the Lipofectamine 3000 (Thermo Fisher) in Opti-MEM medium (Thermo Fisher) to a final concentration of 30 μL/mL. Dilute the DNA (pcDNA3.1 over-expression plasmid encoding the relevant control or target protein (Thermo Fisher) and P3000 in Opti-MEM medium to a final concentration of 10 μg/mL (DNA) and 20 μL/mL (P3000). Mix the diluted DNA with the diluted Lipofectamine 3000 reagent and incubate the mixture at room temperature for 10 minutes. Add the mixture to the cells dropwise and swirl the plate gently to distribute the mixture evenly. Incubate the cells at 37° C. in a CO2 incubator for 48 hours. Add 10 μL of WST-1 reagent (Abcam) directly to the well and incubate the plate for 45 minutes at 37° C. in a humidified incubator with 5% CO2, protected from light. Measure the absorbance at 450 nm using a microplate reader. A reference wavelength of 650 nm can be used to correct for background absorbance. Calculate the percentage of viable cells in each well by subtracting the absorbance of the blank (medium only) from the absorbance of each well and expressing the results as a percentage of the control group.

### Conclusion:

[0276] SEQ ID NO: 5391 is novel, un-annotated protein that under high serum conditions increases the proliferation of colon cancer cells (HCT116 cell line). Interestingly, SEQ ID NO: 5391 contains a TCGA mutation (P31L) known to occur in a number of cancer patients, but whose significance to the oncogenic process and mechanism was previously unknown. We show that when the P31L mutation is included in the overexpressed Target Protein, its effect on proliferation is significantly more pronounced. Thus, SEQ ID NO: 5391 and SEQ ID NO: 5391_P31L are both genetic drivers of cancer and Target Proteins for anti-cancer therapies (FIG. 1).

[0277] Example 3: Validation of a target protein as a genetic driver of disease. Over-expression of predicted TM protein leads to increased proliferation of tumor cells.

[0278] This example demonstrates the validation of multiple Target Proteins, SEQ ID NO: 4538, SEQ ID NO: 5392, SEQ ID NO: 4335, as genetic drivers of disease. We demonstrate that the genetic overexpression of these transmembrane proteins in multiple cell lines significantly increases the proliferation of those cells. These extracellular transmembrane proteins thus make attractive targets for anti-proliferative cancer drugs.

[0279] Experimental Design: Protein overexpression plasmids encoding Target Proteins or controls were transiently transfected into multiple cell lines. 24 hours later proliferation was measured using WST-1 assay.

[0280] Materials and Methods: Seed the cells of interest into 96-well plate at a density of 4,000 cells per well in 100 μL of cell culture medium. Incubate the cells in a humidified incubator at 37° C. with 5% CO2 for 24 hours. Dilute the Lipofectamine 3000 (Thermo Fisher) in Opti-MEM medium (Thermo Fisher) to a final concentration of 30 μL/mL. Dilute the DNA (pcDNA3.1 over-expression plasmid encoding the relevant control or target protein (Thermo Fisher) and P3000 in Opti-MEM medium to a final concentration of 10 μg/mL (DNA) and 20 μL/mL (P3000). Mix the diluted DNA with the diluted Lipofectamine 3000 reagent and incubate the mixture at room temperature for 10 minutes. Add the mixture to the cells dropwise and swirl the plate gently to distribute the mixture evenly. Incubate the cells at 37° C. in a CO2 incubator for 48 hours. Add 10 μL of WST-1 reagent (Abcam) directly to the well and incubate the plate for 45 minutes at 37° C. in a humidified incubator with 5% CO2, protected from light. Measure the absorbance at 450 nm using a microplate reader. A reference wavelength of 650 nm can be used to correct for background absorbance. Calculate the percentage of viable cells in each well by subtracting the absorbance of the blank (medium only) from the absorbance of each well and expressing the results as a percentage of the control group.

[0281] SEQ ID NO: 5391 is novel, un-annotated protein that under high serum conditions increases the proliferation of colon cancer cells (HCT116 cell line) (FIG. 2, see also Table C).

TABLE C

| A549 (Lung cancer) | HCT-116 (Colon cancer) | HepG2 (Liver cancer) |
|---|---|---|
| SEQ ID NO: 5393 | SEQ ID NO: 5393 | SEQ ID NO: 5394 |
| SEQ ID NO: 5394 | SEQ ID NO: 5394 | SEQ ID NO: 4335 |
| SEQ ID NO: 4335 | SEQ ID NO: 5395 | SEQ ID NO: 5396 |
| SEQ ID NO: 5392 | SEQ ID NO: 4335 | SEQ ID NO: 5397 |
| SEQ ID NO: 4699 | SEQ ID NO: 5398 | SEQ ID NO: 4484 |
| SEQ ID NO: 5399 | SEQ ID NO: 5392 | |
| SEQ ID NO: 5400 | SEQ ID NO: 5396 | |
| SEQ ID NO: 5401 | SEQ ID NO: 5402 | |
| | SEQ ID NO: 5403 | |
| | SEQ ID NO: 5400 | |
| | SEQ ID NO: 5400 | |

[0282] Example 4. Validation of a target protein as a genetic driver of disease.

[0283] Purpose: The example listed validates the modulation of circulating factors by genetic variants that alter amino acid sequences of novel ORFs. SEQ ID NO: 4371 contains human genetic variants (rs221797) associated with metabolic diseases, namely type 2 diabetes. 4 genetic versions (V, A, G, D) of SEQ ID NO: 4371 are novel peptides that show variant-dependent differences in secretion using a HiBiT assay. This demonstrated how disease-associated versions of novel peptides modulate level of secretion which has potential therapeutic relevance in identifying secreted versions of genetic disease modulators.

[0284] Experimental Design: The effect of GWAS variants on modulating secretion was assessed using the Nano-Glo® HiBiT Lytic Detection System from Promega (Cat No N3030). HiBiT expression vectors containing the different versions of the sequence were transfected into HEK293T cells and secretion determined by measuring luminescence of HiBiT-tagged protein in the cell lysate.

[0285] Methods and Materials: Each of the genetic versions of SEQ ID NO: 4371 were cloned into a HiBiT expression vectors. HEK293T cells were plated into 96-well plates at 50k per well and transfected with Lipofectamin 3000 and DNA (HiBiT expression vectors containing the sequences). Secretion was measured using the Nano-Glo® HiBiT Lytic Detection System from Promega (Cat No N3030). The Nano-Glo® HiBiT Lytic Detection System sensitively quantifies HiBiT-tagged proteins in cell lysates using a simple add-mix-read assay protocol. HiBiT is an 11-amino-acid peptide tag that is fused to the N or C terminus of the protein of interest or inserted into an accessible location within the protein structure. The amount of a HiBiT-tagged protein expressed in a cell is determined by adding a lytic detection reagent containing the substrate furimazine and Large BiT (LgBiT), the large subunit used in NanoLuc® Binary Technology (NanoBiT®; 1). HiBiT binds tightly to LgBiT (KD=0.7 nM), promoting complex formation in the cell lysate to generate a bright, luminescent enzyme. The amount of luminescence is proportional to the amount of HiBiT-tagged protein in the cell lysate. Proteins of interest can be tagged with HiBiT at the N or C terminus using HiBiT expression vectors.

[0286] Conclusion: As seen in FIG. 3, human genetic variants in SEQ ID NO: 4371 change the level of secretion of these peptides. rs221797 V-to-A has no effect on secretion (One hydrophobic amino acid is replaced with another hydrophobic), whereas rs221797 V-to-G and V-to-D decrease secretion significantly, with substitution of a charged amino acid (D) having the greatest effect. This demonstrated how disease-associated genetic variation could modulate the relative level of these peptides in the circulation.

[0287] Example 5. Validation of a target protein as a genetic driver of disease. Stable over-expression of novel ORF leads to increased proliferation of tumor cells.

[0288] Purpose: This example demonstrates the validation of a Target Protein, SEQ ID NO: 5404, as a genetic driver of disease. Specifically, SEQ ID NO: 5404 is a target protein that when over-expressed in the breast cancer cell line MCF-7 significantly increases the proliferation of those cells.

[0289] Experimental Design: Protein overexpression plasmids encoding the Target Proteins or controls were transfected into multiple cell lines. After selection for stably expressing cells, proliferation was measured using WST-1 assay.

[0290] Materials and Methods: STABLE CELL LINE: Seed the MCF-7 cell line into 6-well plate at a density of 500,000 cells per well in 2 mL of cell culture medium without antibiotics. Incubate the cells in a humidified incubator at 37° C. with 5% CO2. Dilute the Lipofectamine 3000 (Thermo Fisher) in Opti-MEM medium (Thermo Fisher) to a final concentration of 30 μL/mL. Dilute the DNA (pcDNA3.1 over-expression plasmid encoding SEQ ID NO: 5404) and P3000 (Thermo Fisher) in Opti-MEM medium to a final concentration of 10 μg/mL (DNA) and 20 μL/mL (P3000). Mix the diluted DNA with the diluted Lipofectamine 3000 reagent and incubate the mixture at room temperature for 10 minutes. Add the mixture to the cells dropwise and swirl the plate gently to distribute the mixture evenly. Incubate the cells at 37° C. in a CO2 incubator for 48 hours. Cells were selected with Puromycin (2 μg/mL) for 10 days.

[0291] WST-1 ASSAY: Seed the cells of interest into 96-well plate at a density of 4,000 cells per well in 100 μL of cell culture medium. Incubate the cells in a humidified incubator at 37° C. with 5% CO2 for 24 hours. Add 10 μL of WST-1 reagent (Abcam) directly to the well and incubate the plate for 45 minutes at 37° C. in a humidified incubator with 5% CO2, protected from light. Measure the absorbance at 450 nm using a microplate reader. A reference wavelength of 650 nm can be used to correct for background absorbance. Calculate the percentage of viable cells in each well by subtracting the absorbance of the blank (medium only) from the absorbance of each well and expressing the results as a percentage of the control group.

[0292] Conclusion: As seen in FIG. 4, SEQ ID NO: 5404 is novel, un-annotated protein that under low and high serum conditions increases the proliferation of breast cancer cells (MCF-7 cell line). Thus, SEQ ID NO: 5404 is a genetic driver of cancer and Target Proteins for anti-cancer therapies.

[0293] The teachings of all patents, published applications and references cited herein are incorporated by reference in their entirety.

[0294] While example embodiments have been particularly shown and described, it will be understood by those skilled in the art that various changes in form and details may be made therein without departing from the scope of the embodiments encompassed by the appended claims.

The application's sequence listing, which the Patent Office published only in electronic form, follows.

SEQUENCE LISTING (5404 sequences)

SEQ ID NO: 1 - protein, 277 aa, Homo sapiens
MFPFYSCWRTGLLLLLLAVAVRESWQTEEKTCDLVGEKGKESEKELALVKRLKPLFNKSFESTVGQGSDTYIYIFRVCREAGNHTSGAGLVQINKSNGKETVVGRLNETHIFNGSNWIMLIYKGGDEYDNHCGKEQRRAVVMISCNRHTLADNFNPVSEERGKVQDCFYLFEMDSSLACSPEISHLSVGSILLVTFASLVAVYVVGGFLYQRLVVGAKGMEQFPHLAFWQDLGNLVADGCDFVCRSKPRNVPAAYRGVGDDQLGEESEERDDHLLPM

SEQ ID NO: 2 - protein, 467 aa, Homo sapiens
MRPQELPRLAFPLLLLLLLLLPPPPCPAHSATRFDPTWESLDARQLPAWFDQAKFGIFIHWGVFSVPSFGSEWFWWYWQKEKIPKYVEFMKDNYPPSFKYEDFGPLFTAKFFNANQWADIFQASGAKYIVLTSKHHEGFTLWGSEYSWNWNAIDEGPKRDIVKELEVAIRNRTDLRFGLYYSLFEWFHPLFLEDESSSFHKRQFPVSKTLPELYELVNNYQPEVLWSDGDGGAPDQYWNSTGFLAWLYNESPVRGTVVTNDRWGAGSICKHGGFYTCSDRYNPGHLLPHKWENCMTIDKLSWGYRREAGISDYLTIEELVKQLVETVSCGGNLLMNIGPTLDGTISVVFEERLRQMGSWLKVNGEAIYETHTWRSQNDTVTPDVWYTSKPKEKLVYAIFLKWPTSGQLFLGHPKAILGATEVKLLGHGQPLNWISLEQNGIMVELPQLTIHQMPCKWGWALALTNVI

SEQ ID NO: 3 - protein, 785 aa, Homo sapiens
MLVAGLLLWASLLTGAWPSFPTQDHLPATPRVRLSFKELKATGTAHFFNFLLNTTDYRILLKDEDHDRMYVGSKDYVLSLDLHDINREPLIIHWAASPQRIEECVLSGKDVNGECGNFVRLIQPWNRTHLYVCGTGAYNPMCTYVNRGRRAQATPWTQTQAVRGRGSRATDGALRPMPTAPRQDYIFYLEPERLESGKGKCPYDPKLDTASALINEELYAGVYIDFMGTDAAIFRTLGKQTAMRTDQYNSRWLNDPSFIHAELIPDSAERNDDKLYFFFRERSAEAPQSPAVYARIGRICLNDDGGHCCLVNKWSTFLKARLVCSVPGEDGIETHFDELQDVFVQQTQDVRNPVIYAVFTSSGSVFRGSAVCVYSMADIRMVFNGPFAHKEGPNYQWMPFSGKMPYPRPGTCPGGTFTPSMKSTKDYPDEVINFMRSHPLMYQAVYPLQRRPLVVRTGAPYRLTTIAVDQVDAADGRYEVLFLGTDRGTVQKVIVLPKDDQELEELMLEEVEVFKDPAPVKTMTISSKRQQLYVASAVGVTHLSLHRCQAYGAACADCCLARDPYCAWDGQACSRYTASSKRRSRRQDVRHGNPIRQCRGFNSNANKNAVESVQYGVAGSAAFLECQPRSPQATVKWLFQRDPGDRRREIRAEDRFLRTEQGLLLRALQLSDRGLYSCTATENNFKHVVTRVQLHVLGRDAVHAALFPPLSMSAPPPPGAGPPTPPYQELAQLLAQPEVGLIHQYCQGYWRHVPPSPREAPGAPRSPEPQDQKKPRNRRHHPPDT

SEQ ID NO: 4 - protein, 452 aa, Homo sapiens
MSTTFPGLVHDAEIRHDGSNSYRLMQLGCLESVANSTVAYSSSSPLTYSTTGTEFASPYFSTNHQYTPLHHQSFHYEFQHSHPAVTPDAYSLNSLHHSQQYYQQIHHGEPTDFINLHNARALKSSCLDEQRRELGCLDAYRRHDLSLMSHGSQYGMHPDQRLLPGPSLGLAAAGADDLQGSVEAQCGLVLNGQGGVIRRGGTCVVNPTDLFCSVPGRLSLLSSTSKYKVTIAEVKRRLSPPECLNASLLGGILRRAKSKNGGRCLREKLDRLGLNLPAGRRKAANVTLLTSLVEGEALHLARDFGYTCETEFPAKAVGEHLARQHMEQKEQTARKKMILATKQICKEFQDLLSQDRSPLGSSRPTPILDLDIQRHLTHFSLITHGFGTPAICAALSTFQTVLSEMLNYLEKHTTHKNGGAADSGQGHANSEKAPLRKTSEAAVKEGKTEKTD

SEQ ID NO: 5 - protein, 419 aa, Homo sapiens
MRGLLVLSVLLGAVFGKEDFVGHQVLRISVADEAQVQKVKELEDLEHLQLDFWRGPAHPGSPIDVRVPFPSIQAVKIFLESHGISYETMIEDVQSLLDEEQEQMFAFRSRARSTDTFNYATYHTLEEIYDFLDLLVAENPHLVSKIQIGNTYEGRPIYVLKFSTGGSKRPAIWIDTGIHSREWVTQASGVWFAKKITQDYGQDAAFTAILDTLDIFLEIVTNPDGFAFTHSTNRMWRKTRSHTAGSLCIGVDPNRNWDAGFGLSGASSNPCSETYHGKFANSEVEVKSIVDFVKDHGNIKAFISIHSYSQLLMYPYGYKTEPVPDQDELDQLSKAAVTALASLYGTKFNYGSIIKAIYQASGSTIDWTYSQGIKYSFTFELRDTGRYGFLLPASQIIPTAKETWLALLTIMEHTLNHPY

SEQ ID NO: 6 - protein, 440 aa, Homo sapiens
MRPHLSPPLQQLLLPVLLACAAHSTGALPRLCDVLQVLWEEQDQCLQELSREQTGDLGTEQPVPGCEGMWDNISCWPSSVPGRMVEVECPRFLRMLTSRNGSLFRNCTQDGWSETFPRPNLACGVNVNDSSNEKRHSYLLKLKVMYTVGYSSSLVMLLVALGILCAFRRLHCTRNYIHMHLFVSFILRALSNFIKDAVLFSSDDVTYCDAHRAGCKLVMVLFQYCIMANYSWLLVEGLYLHTLLAISFFSERKYLQGFVAFGWGSPAIFVALWAIARHFLEDVGCWDINANASIWWIIRGPVILSILINFILFINILRILMRKLRTQETRGNEVSHYKRLARSTLLLIPLFGIHYIVFAFSPEDAMEIQLFFELALGSFQGLVVAVLYCFLNGEVQLEVQKKWQQWHLREFPLHPVASFSNSTKASHLEQSQGTCRTSII

SEQ ID NO: 7 - protein, 504 aa, Homo sapiens
MRFFCARCCSFGPEMPAVQLLLLACLVWDVGARTAQLRKANDQSGRCQYTFSVASPNESSCPEQSQAMSVIHNLQRDSSTQRLDLEATKARLSSLESLLHQLTLDQAARPQETQEGLQRELGTLRRERDQLETQTRELETAYSNLLRDKSVLEEEKKRLRQENENLARRLESSSQEVARLRRGQCPQTRDTARAVPPGSREVSTWNLDTLAFQELKSELTEVPASRILKESPSGYLRSGEGDTGCGELVWVGEPLTLRTAETITGKYGVWMRDPKPTYPYTQETTWRIDTVGTDVRQVFEYDLISQFMQGYPSKVHILPRPLESTGAVVYSGSLYFQGAESRTVIRYELNTETVKAEKEIPGAGYHGQFPYSWGGYTDIDLAVDEAGLWVIYSTDEAKGAIVLSKLNPENLELEQTWETNIRKQSVANAFIICGTLYTVSSYTSADATVNFAYDTGTGISKTLTIPFKNRYKYSSMIDYNPLEKKLFAWDNLNMVTYDIKLSKM

SEQ ID NO: 8 - protein, 323 aa, Homo sapiens
MAAAALPAWLSLQSRARTLRAFSTAVYSATPVPTPSLPERTPGNERPPRRKALPPRTEKMAVDQDWPSVYPVAAPFKPSAVPLPVRMGYPVKKGVPMAKEGNLELLKIPNFLHLTPVAIKKHCEALKDFCTEWPAALDSDEKCEKHFPIEIDSTDYVSSGPSVRNPRARVVVLRVKLSSLNLDDHAKKKLIKLVGERYCKTTDVLTIKTDRCPLRRQNYDYAVYLLTVLYHESWNTEEWEKSKTEADMEEYIWENSSSERNILETLLQMKAAEKNMEINKEELLGTKEIEEYKKSVVSLKNEEENENSISQYKESVKRLLNVT

SEQ ID NO: 9 - protein, 676 aa, Homo sapiens [sequence omitted]

SEQ ID NO: 10 - protein, 520 aa, Homo sapiens
MEGGPAVCCQDPRAELVERVAAIDVTHLEEADGGPEPTRNGVDPPPRARAASVIPGSTSRLLPARPSLSARKLSLQERPAGSYLEAQAGPYATGPASHISPRAWRRPTIESHHVAISDAEDCVQLNQYKLQSEIGKGAYGVVRLAYNESEDRHYAMKVLSKKKLLKQYGFPRRPPPRGSQAAQGGPAKQLLPLERVYQEIAILKKLDHVNVVKLIEVLDDPAEDNLYLALQNQAQNIQLDSTNIAKPHSLLPSEQQDSGSTWAARSVFDLLRKGPVMEVPCDKPFSEEQARLYLRDVILGLEYLHCQKIVHRDIKPSNLLLGDDGHVKIADFGVSNQFEGNDAQLSSTAGTPAFMAPEAISDSGQSFSGKALDVWATGVTLYCFVYGKCPFIDDFILALHRKIKNEPVVFPEEPEISEELKDLILKMLDKNPETRIGVPDIKLHPWVTKNGEEPLPSEEEHCSVVEVTEEEVKNSVRLIPSWTTVILVKSMLRKRSFGNPFEPQARREERSMSAPGNLLV

SEQ ID NO: 11 - protein, 1232 aa, Homo sapiens
MAEAASGAGGTSLEGERGKRPPPEGEPAAPASGVLDKLFGKRLLQAGRYLVSHKAWMKTVPTENCDVLMTFPDTTDDHTLLWLLNHIRVGIPELIVQVRHHRHTRAYAFFVTATYESLLRGADELGLRKAVKAEFGGGTRGFSCEEDFIYENVESELRFFTSQERQSIIRFWLQNLRAKQGEALHNVRFLEDQPIIPELAARGIIQQVFPVHEQRILNRLMKSWVQAVCENQPLDDICDYFGVKIAMYFAWLGFYTSAMVYPAVFGSVLYTFTEADQTSRDVSCVVFALFNVIWSTLFLEEWKRRGAELAYKWGTLDSPGEAVEEPRPQFRGVRRISPITRAEEFYYPPWKRLLFQLLVSLPLCLACLVCVFLLMLGCFQLQELVLSVKGLPRLARFLPKVMLALLVSVSAEGYKKLAIWLNDMENYRLESAYEKHLIIKVVLFQFVNSYLSLFYIGFYLKDMERLKEMLATLLITRQFLQNVREVLQPHLYRRLGRGELGLRAVWELARALLGLLSLRRPAPRRLEPQADEGGGGGSGGGGRRCLSGGCGAPEEEEEAALVERRRAGEGGEEGDGPPGGKEEDEDDEEEEDEEEEEDEEEGEEGGLLDCGLRLKKVSFAERGAGRRRPGPSPEALLEEGSPTMVEKGLEPGVFTLAEEDDEAEGAPGSPEREPPAILFRRAGGEGRDQGPDGGPDPEPGSNSDSTRRQRRQNRSSWIDPPEEEHSPQLTQAELESCMKKYEDTFQDYQEMFVQFGYVVLFSSAFPLAALCALVNNLIEIRSDAFKLCTGLQRPFGQRVESIGQWQKVMEAMGVLAIVVNCYLIGQCGQLQRLFPWLSPEAAIVSVVVLEHFALLLKYLIHVAIPDIPGWVAEEMAKLEYQRREAFKRHERQAQHRYQQQQRRRREEEERQRHAEHHARREHDSGGREEARAEGSGLDPATSSEKASAKAKGSTAGGHGPERPKRPGSLLAPNNVMKLKQIIPLQGKFLSSGATSSLAAAGAGATTRPPPAQSPTGSDTRLPAFLSFKFLKSPETRRDSERSHSPPKAFHAGKLFPFGGTRAEPGSNGAGGQARPDGTPSSGSSRVQRSGPVDEALAEELEAPRPEEEGSGTALAPVGAPALRTRRSRSPAPPPPMPLPRPPTPPAGCWQWDGPWGCGGEGAAPRQALAAAECPPCAMAGPPPAPQPLPGDASFYSLPPPPLPPTSDPLETPAPSPSPSPSPQAVCWPSGWH

SEQ ID NO: 12 - protein, 547 aa, Homo sapiens
MATMVPSVLWPRACWTLLVCCLLTPGVQGQEFLLRVEPQNPVLSAGGSLFVNCSTDCPSSEKIALETSLSKELVASGMGWAAFNLSNVTGNSRILCSVYCNGSQITGSSNITVYRLPERVELAPLPPWQPVGQNFTLRCQVEDGSPRTSLTVVLLRWEEELSRQPAVEEPAEVTATVLASRDDHGAPFSCRTELDMQPQGLGLFVNTSAPRQLRTFVLPVTPPRLVAPRFLEVETSWPVDCTLDGLFPASEAQVYLALGDQMLNATVMNHGDTLTATATATARADQEGAREIVCNVTLGGERREARENLTVFSFLGPIVNLSEPTAHEGSTVTVSCMAGARVQVTLDGVPAAAPGQPAQLQLNATESDDGRSFFCSATLEVDGEFLHRNSSVQLRVLYGPKIDRATCPQHLKWKDKTRHVLQCQARGNPYPELRCLKEGSSREVPVGIPFFVNVTHNGTYQCQASSSRGKYTLVVVMDIEAGSSHFVPVFVAVLLTLGVVTIVLALMYVFREHQRSGSYHVREESTYLPLTSMQPTEAMGEEPSRAE

SEQ ID NO: 13 - protein, 870 aa, Homo sapiens
MNHLNVLAKALYDNVAESPDELSFRKGDIMTVLEQDTQGLDGWWLCSLHGRQGIVPGNRLKILVGMYDKKPAGPGPGPPATPAQPQPGLHAPAPPASQYTPMLPNTYQPQPDSVYLVPTPSKAQQGLYQVPGPSPQFQSPPAKQTSTFSKQTPHHPFPSPATDLYQVPPGPGGPAQDIYQVPPSAGMGHDIYQVPPSMDTRSWEGTKPPAKVVVPTRVGQGYVYEAAQPEQDEYDIPRHLLAPGPQDIYDVPPVRGLLPSQYGQEVYDTPPMAVKGPNGRDPLLEVYDVPPSVEKGLPPSNHHAVYDVPPSVSKDVPDGPLLREETYDVPPAFAKAKPFDPARTPLVLAAPPPDSPPAEDVYDVPPPAPDLYDVPPGLRRPGPGTLYDVPRERVLPPEVADGGVVDSGVYAVPPPAEREAPAEGKRLSASSTGSTRSSQSASSLEVAGPGREPLELEVAVEALARLQQGVSATVAHLLDLAGSAGATGSWRSPSEPQEPLVQDLQAAVAAVQSAVHELLEFARSAVGNAAHTSDRALHAKLSRQLQKMEDVHQTLVAHGQALDAGRGGSGATLEDLDRLVACSRAVPEDAKQLASFLHGNASLLFRRTKATAPGPEGGGTLHPNPTDKTSSIQSRPLPSPPKFTSQDSPDGQYENSEGGWMEDYDYVHLQGKEEFEKTQKELLEKGSITRQGKSQLELQQLKQFERLEQEVSRPIDHDLANWTPAQPLAPGRTGGLGPSDRQLLLFYLEQCEANLTTLTNAVDAFFTAVATNQPPKIFVAHSKFVILSAHKLVFIGDTLSRQAKAADVRSQVTHYSNLLCDLLRGIVATTKAAALQYPSPSAAQDMVERVKELGHSTQQFRRVLGQLAAA

SEQ ID NO: 14 - protein, 455 aa, Homo sapiens
MGLSTVPDLLLPLVLLELLVGIYPSGVIGLVPHLGDREKRDSVCPQGKYIHPQNNSICCTKCHKGTYLYNDCPGPGQDTDCRECESGSFTASENHLRHCLSCSKCRKEMGQVEISSCTVDRDTVCGCRKNQYRHYWSENLFQCFNCSLCLNGTVHLSCQEKQNTVCTCHAGFFLRENECVSCSNCKKSLECTKLCLPQIENVKGTEDSGTTVLLPLVIFFGLCLLSLLFIGLMYRYQRWKSKLYSIVCGKSTPEKEGELEGTTTKPLAPNPSFSPTPGFTPTLGFSPVPSSTFTSSSTYTPGDCPNFAAPRREVAPPYQGADPILATALASDPIPNPLQKWEDSAHKPQSLDTDDPATLYAVVENVPPLRWKEFVRRLGLSDHEIDRLELQNGRCLREAQYSMLATWRRRTPRREATLELLGRVLRDMDLLGCLEDIEEALCGPAALPPAPSLLR

SEQ ID NO: 15 - protein, 454 aa, Homo sapiens
MPRCPAGAMDEGPVDLRTRPKAAGLPGAALPLRKRPLRAPSPEPAAPRGAAGLVVPLDPLRGGCDLPAVPGPPHGLARPEALYYPGALLPLYPTRAMGSPFPLVNLPTPLYPMMCPMEHPLSADIAMATRADEDGDTPLHIAVVQGNLPAVHRLVNLFQQGGRELDIYNNLRQTPLHLAVITTLPSVVRLLVTAGASPMALDRHGQTAAHLACEHRSPTCLRALLDSAAPGTLDLEARNYDGLTALHVAVNTECQETVQLLLERGADIDAVDIKSGRSPLIHAVENNSLSMVQLLLQHGANVNAQMYSGSSALHSASGRGLLPLVRTLVRSGADSSLKNCHNDTPLMVARSRRVIDILRGKATRPASTSQPDPSPDRSANTSPESSSRLSSNGLLSASPSSSPSQSPPRDPPGFPMAPPNFFLPSPSPPAFLPFAGVLRGPGRPVPPSPAPGGS

SEQ ID NO: 16 - protein, 458 aa, Homo sapiens
MAWASRLGLLLALLLPVVGASTPGTVVRLNKAALSYVSEIGKAPLQRALQVTVPHFLDWSGEALQPTRIRILNVHVPRLHLKFIAGFGVRLLAAANFTFKVFRAPEPLELTLPVELLADTRVTQSSIRTPVVSISACSLFSGHANEFDGSNSTSHALLVLVQKHIKAVLSNKLCLSISNLVQGVNVHLGTLIGLNPVGPESQIRYSMVSVPTVTSDYISLEVNAVLFLLGKPIILPTDATPFVLPRHVGTEGSMATVGLSQQLFDSALLLLQKAGALNLDITGQLRSDDNLLNTSALGRLIPEVARQFPEPMPVVLKVRLGATPVAMLHTNNATLRLQPFVEVLATASNSAFQSLFSLDVVVNLRLQLSVSKVKLQGTTSVLGDVQLTVASSNVGFIDTDQVRTLMGTVFEKPLLDHLNALLAMGIALPGVVNLHYVAPEIFVYEGYVVISSGLFYQS

SEQ ID NO: 17 - protein, 1221 aa, Homo sapiens
MLRSTGFFRAIDCPYWSGAPGGPCRRPYCHFRHRGARGSGAPGDGGEAPPAAGLGYDPYNPELPKPPAQRENGTLGLGEEPRPDVLELELVNQAIEAVRSEVELEQRRYRELLETTREHRSAEAPALAPRGPNASPTVGPDEDAFPLAFDYSPGSHGLLSPDAGYQPTPLAAPAEPGSKYSLASLDRGQGRGGGGGGALEYVPKAVSQPRRHSRPVPSGKYVVDNSRPPTDLEYDPLSNYSARHLSRASSRDERAAKRPRGSRGSEPYTPAPKKLCDPFGSCDARFSDSEDEAATVPGNEPTTASTPKARADPEIKATGQPPSKEGLEAEGGGLRETKETAVQCDVGDLQPPPAKPASPAQVQSSQDGGCPKEGKPKKKKTGAPPAPSCKDGAQGKDKTKDKGRGRPVEKPRADKKGPQASSPRRKAERPEGTKKKPSSATPVATSGKGRPDRPARRPSPTSGDSRPAAGRGPPRPLQLPDRKSTKAPSGKLVERKARSLDEGASQDAPKLKKRALSHADLFGDESEDEAAGPGVPSVWPSALPSLSSDSDSDSDSSLGFPEAQGPPKRLKASPPPSPAPSSSSSSSSSTSSAGADVDYSALEKEVDFDSDPMEECLRIFNESTSVKTEDRGRLARQPPKEEKSEEKGLSGLTTLFPGQKRRISHLSKQGQEVEPPRRGPAVPPARPPTAQEVCYLRAQQAQRASASLLQAPARLAEKSPSVHISAPGEKRRIAHIPNPRLAAAPTGAKRTLAASGSQSSNGPEPGGQQLKTRTLSGMASKTTTTIIPKRIAHSPSLQSLKKPIIPKEFGGKVPTVIRQRYLNLFIEECLKFCTSNQEAIEKALNEEKVAYDRSPSKNIYLNVAVNTLKKLRGLAPSAVPGLSKTSGRRVVSHEVVLGGRLAAKTSFSLSRPSSPRVEDLKGAALYSRLREYLLTQDQLKENGYPFPHPERPGGAIIFTAEEKRPKDSSCRTCCRCGTEYLVSSSGRCIRDEECYYHWGRLRRNRVAGGWETQYMCCSAAAGSVGCQVAKQHVQDGRKERLEGFVKTFEKELSGDTHPGIYALDCEMSYTTYGLELTRVTVVDTDVHVVYDTFVKPDNEIVDYNTRFSGVTEADLADTSVTLRDVQAVLLSMFSADTILIGHSLESDLLALKVIHSTVVDTSVLFPHRLGLPYKRSLRNLMADYLRQIIQDNVDGHSSSEDAGACMHLVIWKVREDAKTKR

SEQ ID NO: 18 - protein, 931 aa, Homo sapiens
MAARDSDSEEDLVSYGTGLEPLEEGERPKKPIPLQDQTVRDEKGRYKRFHGAFSGGFSAGYFNTVGSKEGWTPSTFVSSRQNRADKSVLGPEDFMDEEDLSEFGIAPKAIVTTDDFASKTKDRIREKARQLAAATAPIPGATLLDDLITPAKLSVGFELLRKMGWKEGQGVGPRVKRRPRRQKPDPGVKIYGCALPPGSSEGSEGEDDDYLPDNVTFAPKDVTPVDFTPKDNVHGLAYKGLDPHQALFGTSGEHFNLFSGGSERAGDLGEIGLNKGRKLGISGQAFGVGALEEEDDDIYATETLSKYDTVLKDEEPGDGLYGWTAPRQYKNQKESEKDLRYVGKILDGFSLASKPLSSKKIYPPPELPRDYRPVHYFRPMVAATSENSHLLQVLSESAGKATPDPGTHSKHQLNASKRAELLGETPIQGSATSVLEFLSQKDKERIKEMKQATDLKAAQLKARSLAQNAQSSRAQLSPAAAAGHCSWNMALGGGTATLKASNFKPFAKDPEKQKRYDEFLVHMKQGQKDALERCLDPSMTEWERGRERDEFARAALLYASSHSTLSSRFTHAKEEDDSDQVEVPRDQENDVGDKQSAVKMKMFGKLTRDTFEWHPDKLLCKRFNVPDPYPDSTLVGLPRVKRDKYSVFNFLTLPETASLPTTQASSEKVSQHRGPDKSRKPSRWDTSKHEKKEDSISEFLSLARSKAEPPKQQSSPLVNKEEEHAPELSANQTVNKDVDAQAEGEGSRPSMDLFRAIFASSSDEKSSSSEDEQGDSEDDQAGSGEANFQSSQDTDLGETSSVAHALVPAPQEPPPSFPIQKMQIDEREEFGPRLPPVFCPNARQTLEVPQKEKHKKNKDKHKAKKEHRRKKEKKKKHRKHKHKGKQKNKKPEKSSSSESSDSSDSQSDEETADVSPQELLRRLKSLPLRRQ

SEQ ID NO: 19 - protein, 810 aa, Homo sapiens
MQKDARREGNMKVLQEPTCVSDYMSISTCEWKMNGPTNCSTELRLLYQLVFLLSEAHTCIPENNGGAGCVCHLLMDDVVSADNYTLDLWAGQQLLWKGSFKPSEHVKPRAPGNLTVHTNVSDTLLLTWSNPYPPDNYLYNHLTYAVNIWSENDPADFRIYNVTYLEPSLRIAASTLKSGISYRARVRAWAQCYNTTWSEWSPSTKWHNSYREPFEQHLLLGVSVSCIVILAVCLLCYVSITKIKKEWWDQIPNPARSRLVAIIIQDAQGSQWEKRSRGQEPAKCPHWKNCLTKLLPCFLEHNMKRDEDPHKAAKEMPFQGSGKSAWCPVEISKTVLWPESISVVRCVELFEAPVECEEEEEVEEEKGSFCASPESSRDDFQEGREGIVARLTESLFLDLLGEENGGFCQQDMGESCLLPPSGSTSAHMPWDEFPSAGPKEAPPWGKEQPLHLEPSPPASPTQSPDNLTCTETPLVIAGNPAYRSFSNSLSQSPCPRELGPDPLLARHLEEVEPEMPCVPQLSEPTTVPQPEPETWEQILRRNVLQHGAAAAPVSAPTSGYQEFVHAVEQGGTQASAVVGLGPPGEAGYKAFSSLLASSAVSPEKCGFGASSGEEGYKPFQDLIPGCPGDPAPVPVPLFTFGLDREPPRSPQSSHLPSSSPEHLGLEPGEKVEDMPKPPLPQEQATDPLVDSLGSGIVYSALTCHLCGHLKQCHGQEDGGQTPVMASPCCGCCCGDRSSPPTTPLRAPDPSPGGVPLEASLCPASLAPSGISEKSKSSSSFHPAPGNAQSSSQTPKIVNFVSVGPTYMRVS

SEQ ID NO: 20 - protein, 1735 aa, Homo sapiens
MSVSRTMEDSCELDLVYVTERIIAVSFPSTANEENFRSNLREVAQMLKSKHGGNYLLFNLSERRPDITKLHAKVLEFGWPDLHTPALEKICSICKAMDTWLNADPHNVVVLHNKGNRGRIGVVIAAYMHYSNISASADQALDRFAMKRFYEDKIVPIGQPSQRRYVHYFSGLLSGSIKMNNKPLFLHHVIMHGIPNFESKGGCRPFLRIYQAMQPVYTSGIYNIPGDSQTSVCITIEPGLLLKGDILLKCYHKKFRSPARDVIFRVQFHTCAIHDLGVVFGKEDLDDAFKDDRFPEYGKVEFVFSYGPEKIQGMEHLENGPSVSVDYNTSDPLIRWDSYDNFSGHRDDGMEEVVGHTQGPLDGSLYAKVKKKDSLHGSTGAVNATRPTLSATPNHVEHTLSVSSDSGNSTASTKTDKTDEPVPGASSATAALSPQEKRELDRLLSGFGLEREKQGAMYHTQHLRSRPAGGSAVPSSGRHVVPAQVHVNGGALASERETDILDDELPNQDGHSAGSMGTLSSLDGVTNTSEGGYPEALSPLTNGLDKSYPMEPMVNGGGYPYESASRAGPAHAGHTAPMRPSYSAQEGLAGYQREGPHPAWPQPVTTSHYAHDPSGMFRSQSFSEAEPQLPPAPVRGGSSREAVQRGLNSWQQQQQQQQQPRPPPRQQERAHLESLVASRPSPQPLAETPIPSLPEFPRAASQQEIEQSIETLNMLMLDLEPASAAAPLHKSQSVPGAWPGASPLSSQPLSGSSRQSHPLTQSRSGYIPSGHSLGTPEPAPRASLESVPPGRSYSPYDYQPCLAGPNQDFHSKSPASSSLPAFLPTTHSPPGPQQPPASLPGLTAQPLLSPKEATSDPSRTPEEEPLNLEGLVAHRVAGVQAREKQPAEPPAPLRRRAASDGQYENQSPEATSPRSPGVRSPVQCVSPELALTIALNPGGRPKEPHLHSYKEAFEEMEGTSPSSPPPSGVRSPPGLAKTPLSALGLKPHNPADILLHPTGVTRRRIQPEEDEGKVVVRLSEEPRSYVESVARTAVAGPRAQDSEPKSFSAPATQAYGHEIPLRNGTLGGSFVSPSPLSTSSPILSADSTSVGSFPSGESSDQGPRTPTQPLLESGFRSGSLGQPSPSAQRNYQSSSPLPTVGSSYSSPDYSLQHFSSSPESQARAQFSVAGVHTVPGSPQARHRTVGTNTPPSPGFGWRAINPSMAAPSSPSLSHHQMMGPPGTGFHGSTVSSPQSSAATTPGSPSLCRHPAGVYQVSGLHNKVATTPGSPSLGRHPGAHQGNLASGLHSNAIASPGSPSLGRHLGGSGSVVPGSPCLDRHVAYGGYSTPEDRRPTLSRQSSASGYQAPSTPSFPVSPAYYPGLSSPATSPSPDSAAFRQGSPTPALPEKRRMSVGDRAGSLPNYATINGKVSSPVASGMSSPSGGSTVSFSHTLPDFSKYSMPDNSPETRAKVKFVQDTSKYWYKPEISREQAIALLKDQEPGAFIIRDSHSFRGAYGLAMKVSSPPPTIMQQNKKGDMTHELVRHFLIETGPRGVKLKGCPNEPNFGSLSALVYQHSIIPLALPCKLVIPNRDPTDESKDSSGPANSTADLLKQGAACNVLFVNSVDMESLTGPQAISKATSETLAADPTPAATIVHFKVSAQGITLTDNQRKLFFRRHYPLNTVTFCDLDPQERKWMKTEGGAPAKLFGFVARKQGSTTDNACHLFAELDPNQPASAIVNFVSKVMLNAGQKR

SEQ ID NO: 21 - protein, 6669 aa, Homo sapiens
MADDEDYEEVVEYYTEEVVYEEVPGETITKIYETTTTRTSDYEQSETSKPALAQPALAQPASAKPVERRKVIRKKVDPSKFMTPYIAHSQKMQDLFSPNKYKEKFEKTKGQPYASTTDTPELRRIKKVQDQLSEVKYRMDGDVAKTICHVDEKAKDIEHAKKVSQQVSKVLYKQNWEDTKDKYLLPPDAPELVQAVKNTAMFSKKLYTEDWEADKSLFYPYNDSPELRRVAQAQKALSDVAYKKGLAEQQAQFTPLADPPDIEFAKKVTNQVSKQKYKEDYENKIKGKWSETPCFEVANARMNADNISTRKYQEDFENMKDQIYFMQTETPEYKMNKKAGVAASKVKYKEDYEKNKGKADYNVLPASENPQLRQLKAAGDALSDKLYKENYEKTKAKSINYCETPKFKLDTVLQNFSSDKKYKDSYLKDILGHYVGSFEDPYHSHCMKVTAQNSDKNYKAEYEEDRGKGFFPQTITQEYEAIKKLDQCKDHTYKVHPDKTKFTQVTDSPVLLQAQVNSKQLSDLNYKAKHESEKFKCHIPPDTPAFIQHKVNAYNLSDNLYKQDWEKSKAKKFDIKVDAIPLLAAKANTKNTSDVMYKKDYEKNKGKMIGVLSINDDPKMLHSLKVAKNQSDRLYKENYEKTKAKSMNYCETPKYQLDTQLKNFSEARYKDLYVKDVLGHYVGSMEDPYHTHCMKVAAQNSDKSYKAEYEEDKGKCYFPQTITQEYEAIKKLDQCKDHTYKVHPDKTKFTAVTDSPVLLQAQLNTKQLSDLNYKAKHEGEKFKCHIPADAPQFIQHRVNAYNLSDNVYKQDWEKSKAKKFDIKVDAIPLLAAKANTKNTSDVMYKKDYEKSKGKMIGALSINDDPKMLHSLKTAKNQSDREYRKDYEKSKTIYTAPLDMLQVTQAKKSQAIASDVDYKHILHSYSYPPDSINVDLAKKAYALQSDVEYKADYNSWMKGCGWVPFGSLEMEKAKRASDILNEKKYRQHPDTLKFTSIEDAPITVQSKINQAQRSDIAYKAKGEEIIHKYNLPPDLPQFIQAKVNAYNISENMYKADLKDLSKKGYDLRTDAIPIRAAKAARQAASDVQYKKDYEKAKGKMVGFQSLQDDPKLVHYMNVAKIQSDREYKKDYEKTKSKYNTPHDMFNVVAAKKAQDVVSNVNYKHSLHHYTYLPDAMDLELSKNMMQIQSDNVYKEDYNNWMKGIGWIPIGSLDVEKVKKAGDALNEKKYRQHPDTLKFTSIVDSPVMVQAKQNTKQVSDILYKAKGEDVKHKYTMSPDLPQFLQAKCNAYNISDVCYKRDWYDLIAKGNNVLGDAIPITAAKASRNIASDYKYKEAYEKSKGKHVGFRSLQDDPKLVHYMNVAKLQSDREYKKNYENTKTSYHTPGDMVSITAAKMAQDVATNVNYKQPLHHYTYLPDAMSLEHTRNVNQIQSDNVYKDEYNSFLKGIGWIPIGSLEVEKVKKAGDALNERKYRQHPDTVKFTSVPDSMGMVLAQHNTKQLSDLNYKVEGEKLKHKYTIDPELPQFIQAKVNALNMSDAHYKADWKKTIAKGYDLRPDAIPIVAAKSSRNIASDCKYKEAYEKAKGKQVGFLSLQDDPKLVHYMNVAKIQSDREYKKGYEASKTKYHTPLDMVSVTAAKKSQEVATNANYRQSYHHYTLLPDALNVEHSRNAMQIQSDNLYKSDFTNWMKGIGWVPIESLEVEKAKKAGEILSEKKYRQHPEKLKFTYAMDTMEQALNKSNKLNMDKRLYTEKWNKDKTTIHVMPDTPDILLSRVNQITMSDKLYKAGWEEEKKKGYDLRPDAIAIKAARASRDIASDYKYKKAYEQAKGKHIGFRSLEDDPKLVHFMQVAKMQSDREYKKGYEKSKTSFHTPVDMLSVVAAKKSQEVATNANYRNVIHTYNMLPDAMSFELAKNMMQIQSDNQYKADYADFMKGIGWLPLGSLEAEKNKKAMEIISEKKYRQHPDTLKYSTLMDSMNMVLAQNNAKIMNEHLYKQAWEADKTKVHIMPDIPQIILAKANAINMSDKLYKLSLEESKKKGYDLRPDAIPIKAAKASRDIASDYKYKYNYEKGKGKMVGFRSLEDDPKLVHSMQVAKMQSDREYKKNYENTKTSYHTPADMLSVTAAKDAQANITNTNYKHLIHKYILLPDAMNIELTRNMNRIQSDNEYKQDYNEWYKGLGWSPAGSLEVEKAKKATEYASDQKYRQHPSNFQFKKLTDSMDMVLAKQNAHTMNKHLYTIDWNKDKTKIHVMPDTPDILQAKQNQTLYSQKLYKLGWEEALKKGYDLPVDAISVQLAKASRDIASDYKYKQGYRKQLGHHVGFRSLQDDPKLVLSMNVAKMQSEREYKKDFEKWKTKFSSPVDMLGVVLAKKCQELVSDVDYKNYLHQWTCLPDQNDVVQAKKVYELQSENLYKSDLEWLRGIGWSPLGSLEAEKNKRASEIISEKKYRQPPDRNKFTSIPDAMDIVLAKTNAKNRSDRLYREAWDKDKTQIHIMPDTPDIVLAKANLINTSDKLYRMGYEELKRKGYDLPVDAIPIKAAKASREIASEYKYKEGFRKQLGHHIGARNIEDDPKMMWSMHVAKIQSDREYKKDFEKWKTKFSSPVDMLGVVLAKKCQTLVSDVDYKNYLHQWTCLPDQSDVIHARQAYDLQSDNLYKSDLQWLKGIGWMTSGSLEDEKNKRATQILSDHVYRQHPDQFKFSSLMDSIPMVLAKNNAITMNHRLYTEAWDKDKTTVHIMPDTPEVLLAKQNKVNYSEKLYKLGLEEAKRKGYDMRVDAIPIKAAKASRDIASEFKYKEGYRKQLGHHIGARAIRDDPKMMWSMHVAKIQSDREYKKDFEKWKTKFSSPVDMLGVVLAKKCQTLVSDVDYKNYLHQWTCLPDQSDVIHARQAYDLQSDNMYKSDLQWMRGIGWVSIGSLDVEKCKRATEILSDKIYRQPPDRFKFTSVTDSLEQVLAKNNAITMNKRLYTEAWDKDKTQIHIMPDTPEIMLARQNKINYSETLYKLANEEAKKKGYDLRSDAIPIVAAKASRDVISDYKYKDGYRKQLGHHIGARNIEDDPKMMWSMHVAKIQSDREYKKDFEKWKTKFSSPVDMLGVVLAKKCQTLVSDVDYKNYLHEWTCLPDQNDVIHARQAYDLQSDNIYKSDLQWLRGIGWVPIGSMDVVKCKRAAEILSDNIYRQPPDKLKFTSVTDSLEQVLAKNNALNMNKRLYTEAWDKDKTQVHIMPDTPEIMLARQNKINYSESLYRQAMEEAKKEGYDLRSDAIPIVAAKASRDIASDYKYKEAYRKQLGHHIGARAVHDDPKIMWSLHIAKVQSDREYKKDFEKYKTRYSSPVDMLGIVLAKKCQTLVSDVDYKHPLHEWICLPDQNDIIHARKAYDLQSDNLYKSDLEWMKGIGWVPIDSLEVVRAKRAGELLSDTIYRQRPETLKFTSITDTPEQVLAKNNALNMNKRLYTEAWDNDKKTIHVMPDTPEIMLAKLNRINYSDKLYKLALEESKKEGYDLRLDAIPIQAAKASRDIASDYKYKEGYRKQLGHHIGARNIKDDPKMMWSIHVAKIQSDREYKKEFEKWKTKFSSPVDMLGVVLAKKCQILVSDIDYKHPLHEWTCLPDQNDVIQARKAYDLQSDAIYKSDLEWLRGIGWVPIGSVEVEKVKRAGEILSDRKYRQPADQLKFTCITDTPEIVLAKNNALTMSKHLYTEAWDADKTSIHVMPDTPDILLAKSNSANISQKLYTKGWDESKMKDYDLRADAISIKSAKASRDIASDYKYKEAYEKQKGHHIGAQSIEDDPKIMCAIHAGKIQSEREYKKEFQKWKTKFSSPVDMLSILLAKKCQTLVTDIDYRNYLHEWTCMPDQNDIIQAKKAYDLQSDALYKADLEWLRGIGWMPQGSPEVLRVKNAQNIFCDSVYRTPVVNLKYTSIVDTPEVVLAKSNAENISIPKYREVWDKDKTSIHIMPDTPEINLARANALNVSNKLYREGWDEMKAGCDVRLDAIPIQAAKASREIASDYKYKLDHEKQKGHYVGTLTARDDNKIRWALIADKLQNEREYRLDWAKWKAKIQSPVDMLSILHSKNSQALVSDMDYRNYLHQWTCMPDQNDVIQAKKAYELQSDNVYKADLEWLRGIGWMPNDSVSVNHAKHAADIFSEKKYRTKIETLNFTPVDDRVDYVTAKQSGEILDDIKYRKDWNATKSKYTLTETPLLHTAQEAARILDQYLYKEGWERQKATGYILPPDAVPFVHAHHCNDVQSELKYKAEHVKQKGHYVGVPTMRDDPKLVWFEHAGQIQNERLYKEDYHKTKAKINIPADMVSVLAAKQGQTLVSDIDYRNYLHQWMCHPDQNDVIQARKAYDLQSDNVYRADLEWLRGIGWIPLDSVDHVRVTKNQEMMSQIKYKKNALENYPNFRSVVDPPEIVLAKINSVNQSDVKYKETFNKAKGKYTFSPDTPHISHSKDMGKLYSTILYKGAWEGTKAYGYTLDERYIPIVGAKHADLVNSELKYKETYEKQKGHYLAGKVIGEFPGVVHCLDFQKMRSALNYRKHYEDTKANVHIPNDMMNHVLAKRCQYILSDLEYRHYFHQWTSLLEEPNVIRVRNAQEILSDNVYKDDLNWLKGIGCYVWDTPQILHAKKSYDLQSQLQYTAAGKENLQNYNLVTDTPLYVTAVQSGINASEVKYKENYHQIKDKYTTVLETVDYDRTRNLKNLYSSNLYKEAWDRVKATSYILPSSTLSLTHAKNQKHLASHIKYREEYEKFKALYTLPRSVDDDPNTARCLRVGKLNIDRLYRSVYEKNKMKIHIVPDMVEMVTAKDSQKKVSEIDYRLRLHEWICHPDLQVNDHVRKVTDQISDIVYKDDLNWLKGIGCYVWDTPEILHAKHAYDLRDDIKYKAHMLKTRNDYKLVTDTPVYVQAVKSGKQLSDAVYHYDYVHSVRGKVAPTTKTVDLDRALHAYKLQSSNLYKTSLRTLPTGYRLPGDTPHFKHIKDTRYMSSYFKYKEAYEHTKAYGYTLGPKDVPFVHVRRVNNVTSERLYRELYHKLKDKIHTTPDTPEIRQVKKTQEAVSELIYKSDFFKMQGHMISLPYTPQVIHCRYVGDITSDIKYKEDLQVLKGFGCFLYDTPDMVRSRHLRKLWSNYLYTDKARKMRDKYKVVLDTPEYRKVQELKTHLSELVYRAAGKKQKSIFTSVPDTPDLLRAKRGQKLQSQYLYVELATKERPHHHAGNQTTALKHAKDVKDMVSEKKYKIQYEKMKDKYTPVPDTPILIRAKRAYWNASDLRYKETFQKTKGKYHTVKDALDIVYHRKVTDDISKIKYKENYMSQLGIWRSIPDRPEHFHHRAVTDTVSDVKYKEDLTWLKGIGCYAYDTPDFTLAEKNKTLYSKYKYKEVFERTKSDFKYVADSPINRHFKYATQLMNEKKYRADYEQRKDKYHLVVDEPRHLLAKTAGDQISQIKYRKNYEKSKDKFTSIVDTPEHLRTTKVNKQISDILYKLEYNKAKPRGYTTIHDTPMLLHVRKVKDEVSDLKYKEVYQRNKSNCTIEPDAVHIKAAKDAYKVNTNLDYKKQYEANKAHWKWTPDRPDFLQAAKSSLQQSDFEYKLDREFLKGCKLSVTDDKNTVLALRNTLIESDLKYKEKHVKERGTCHAVPDTPQILLAKTVSNLVSENKYKDHVKKHLAQGSYTTLPETRDTVHVKEVTKHVSDTNYKKKFVKEKGKSNYSIMLEPPEVKHAMEVAKKQSDVAYRKDAKENLHYTTVADRPDIKKATQAAKQASEVEYRAKHRKEGSHGLSMLGRPDIEMAKKAAKLSSQVKYRENFDKEKGKTPKYNPKDSQLYKVMKDANNLASEVKYKADLKKLHKPVTDMKESLIMNHVLNTSQLASSYQYKKKYEKSKGHYHTIPDNLEQLHLKEATELQSIVKYKEKYEKERGKPMLDFETPTYITAKESQQMQSGKEYRKDYEESIKGRNLTGLEVTPALLHVKYATKIASEKEYRKDLEESIRGKGLTEMEDTPDMLRAKNATQILNEKEYKRDLELEVKGRGLNAMANETPDFMRARNATDIASQIKYKQSAEMEKANFTSVVDTPEIIHAQQVKNLSSQKKYKEDAEKSMSYYETVLDTPEIQRVRENQKNFSLLQYQCDLKNSKGKITVVQDTPEILRVKENQKNFSSVLYKEDVSPGTAIGKTPEMMRVKQTQDHISSVKYKEAIGQGTPIPDLPEVKRVKETQKHISSVMYKENLGTGIPTTVTPEIERVKRNQENFSSVLYKENLGKGIPTPITPEMERVKRNQENFSSVLYKENMGKGTPLAVTPEMERVKHNQENISSVLYKENVGKATATPVTPEMQRVKRNQENISSVLYKENLGKATPTPFTPEMERVKRNQENFSSVLYKENMRKATPTPVTPEMERAKRNQENISSVLYSDSFRKQIQGKAAYVLDTPEMRRVRETQRHISTVKYHEDFEKHKGCFTPVVTDPITERVKKNMQDFSDINYRGIQRKVVEMEQKRNDQDQETITGLRVWRTNPGSVFDYDPAEDNIQSRSLHMINVQAQRRSREQSRSASALSISGGEEKSEHSEAPDHHLSTYSDGGVFAVSTAYKHAKTTELPQQRSSSVATQQTTVSSIPSHPSTAGKIFRAMYDYMAADADEVSFKDGDAIINVQAIDEGWMYGTVQRTGRTGMLPANYVEAI

SEQ ID NO: 22 - protein, 398 aa, Homo sapiens
MMSMLGGLQRYFRVILLLLLALTLLLLAGFLHSDLELDTPLFGGQAEGPPVTNIMFLKTHKTASSTVLNILYRFAETHNLSVALPAGSRVHLGYPWLFLARYVEGVGSQQRFNIMCNHLRFNLPQVQKVMPNDTFYFSILRNPVFQLESSFIYYKTYAPAFRGAPSLDAFLASPRTFYNDSRHLRNVYAKNNMWFDFGFDPNAQCEEGYVRARIAEVERRFRLVLIAEHLDESLVLLRRRLRWALDDVVAFRLNSRSARSVARLSPETRERARSWCALDWRLYEHFNRTLWAQLRAELGPRRLRGEVERLRARRRELASLCLQDGGALKNHTQIRDPRLRPYQSGKADILGYNLRPGLDNQTLGVCQRLVMPELQYMARLYALQFPEKPLKNIPFLGA

SEQ ID NO: 23 - protein, 1440 aa, Homo sapiens
MAGIIKKQILKHLSRFTKNLSPDKINLSTLKGEGQLTNLELDEEVLQNVLELPTWLAITRVYCNRASIRIQWTKLKTHPICLCLDKVEVEMKTCEDPRPPNGQSPIALASGQSEYGFAEKVVEGMFIIVNSITIKIHSKAFHASFELWQLQGYSVNPNWQQSDLRLTRITDPCRGEVLTFKEITWQTLRIEADATDNGDQDPVTTPLRLITNQGRIQIALKRRTKDCNVISSKLMFLLDDLLWVLTDSQLKAMMKYAESLSEAMEKSAHQRKSLAPEPVQITPPAPSAQQSWAQAFGGSQGNSNSSSSRLSQYFEKFDVKESSYHLLISRLDLHICDDSQSREPGVSANRLMGGAMQLTFRKMAFDYYPFHWAGDSCKHWVRHCEAMETRGQWAQKLVMEFQSKMEKWHEETGLKPPWHLGVDSLFRRKADSLSSPRKNPLERSPSQGRQPAFQPPAWNRLRSSCMVVRVDDLDIHQVSTAGQPSKKPSTLLSCSRKLHNLPTQVSAIHIEFTEYYFPDNQELPVPCPNLYIQLNGLTFTMDPVSLLWGNLFCLDLYRSLEQFKAIYKLEDSSQKDEHLDIRLDAFWLKVSFPLEKRERAELHRPQALVFSASGMIATNTRHAPHCSCSDLQSLFRGFAAAEFFHSNYDHFPKVPGGFSLLHMLFLHHAFQMDSCLPQPNTLPPQRPKASWDLWSVHFTQISLDFEGTENFKGHTLNFVAPFPLSIWACLPLRWQQAQARKLLLASEGRLKPSASFGSPVQSEALAPDSMSHPRSKTEHDLKSLSGLTEVMEILKEGSSGMDNKGPLTELEDVADVHMLVHSPAHVRVRLDHYQYLALLRLKEVLQRLQEQLTKDTESMTGSPLQNQTACIGVLFPSAEVALLMHPAPGAVDADSAGSDSTSLVDSELSPSEDRELKSDASSDQGPASPEKVLEESSIENQDVSQERPHSNGELQDSGPLAQQLAGKGHEAVESLQAKKLSRTQASSSPAALKPPAGRETAVNGQGELIPLKNIEGELSSAIHMTKDATKEALHATMDLTKEAVSLTKDAFSLGRDRMTSTMHKMLSLPPAKEPMAKTDEGVAAPVSGGAARLRFFSMKRTVSQQSFDGVSLDSSGPEDRISVDSDGSDSFVMLLESESGPESVPPGSLSNVSDNAGVQGSPLVNNYGQGSPAANSSVSPSGEDLIFHPVSVLVLKVNEVSFGIEVRGEDLTVALQAEELTLQQLGTVGLWQFLHGQCPGTCFQESSTLKTGHIRPAVGLRFEVGPGAAVHSPLASQNGFLHLLLHGCDLELLTSVLSGLGPFLEDEEIPVVVPMQIELLNSSITLKDDIPPIYPTSPGPIPITLAMEHVVLKRSDDGVFHIGAAAQDKPSAEVLKSEKRQPPKEQVFLVPTGEVFEQQVKELPILQKELIETKQALANANQDKEKLLQEIRKYNPFFEL

SEQ ID NO: 24 - protein, 334 aa, Homo sapiens
MEPGPTAAQRRCSLPPWLPLGLLLWSGLALGALPFGSSPHRVFHDLLSEQQLLEVEDLSLSLLQGGGLGPLSLPPDLPDLDPECRELLLDFANSSAELTGCLVRSARPVRLCQTCYPLFQQVVSKMDNISRAAGNTSESQSCARSLLMADRMQIVVILSEFFNTTWQEANCANCLTNNSEELSNSTVYFLNLFNHTLTCFEHNLQGNAHSLLQTKNYSEVCKNCREAYKTLSSLYSEMQKMNELENKAEPGTHLCIDVEDAMNITRKLWSRTFNCSVPCSDTVPVIAVSVFILFLPVVFYLSSFLHSEQKKRKLILPKRLKSSTSFANIQENSN

SEQ ID NO: 25 - protein, 303 aa, Homo sapiens
MGRPLLLPLLPLLLPPAFLQPSGSTGSGPSYLYGVTQPKHLSASMGGSVEIPFSFYYPWELATAPDVRISWRRGHFHRQSFYSTRPPSIHKDYVNRLFLNWTEGQKSGFLRISNLQKQDQSVYFCRVELDTRSSGRQQWQSIEGTKLSITQAVTTTTQRPSSMTTTWRLSSTTTTTGLRVTQGKRRSDSWHISLETAVGVAVAVTVLGIMILGLICLLRWRRRKGQQRTKATTPAREPFQNTEEPYENIRNEGQNTDPKLNPKDDGIVYASLALSSSTSPRAPPSHRPLKSPQNETLYSVLKA

SEQ ID NO: 26 - protein, 551 aa, Homo sapiens
MRDYDEVIAFLGEWGPFQRLIFFLLSASIIPNGFNGMSVVFLAGTPEHRCRVPDAANLSSAWRNNSVPLRLRDGREVPHSCSRYRLATIANFSALGLEPGRDVDLGQLEQESCLDGWEFSQDVYLSTVVTEWNLVCEDNWKVPLTTSLFFVGVLLGSFVSGQLSDRFGRKNVLFATMAVQTGFSFLQIFSISWEMFTVLFVIVGMGQISNYVVAFILGTEILGKSVRIIFSTLGVCTFFAVGYMLLPLFAYFIRDWRMLLLALTVPGVLCVPLWWFIPESPRWLISQRRFREAEDIIQKAAKMNNIAVPAVIFDSVEELNPLKQQKAFILDLFRTRNIAIMTIMSLLLWMLTSVGYFALSLDAPNLHGDAYLNCFLSALIEIPAYITAWLLLRTLPRRYIIAAVLFWGGGVLLFIQLVPVDYYFLSIGLVMLGKFGITSAFSMLYVFTAELYPTLVRNMAVGVTSTASRVGSIIAPYFVYLGAYNRMLPYIVMGSLTVLIGILTLFFPESLGMTLPETLEQMQKVKWFRSGKKTRDSMETEENPKVLITAF

SEQ ID NO: 27 - protein, 493 aa, Homo sapiens [sequence omitted]

SEQ ID NO: 28 - protein, 400 aa, Homo sapiens
MMDLRNTPAKSLDKFIEDYLLPDTCFRMQINHAIDIICGFLKERCFRGSSYPVCVSKVVKGGSSGKGTTLRGRSDADLVVFLSPLTTFQDQLNRRGEFIQEIRRQLEACQRERAFSVKFEVQAPRWGNPRALSFVLSSLQLGEGVEFDVLPAFDALGQLTGGYKPNPQIYVKLIEECTDLQKEGEFSTCFTELQRDFLKQRPTKLKSLIRLVKHWYQNCKKKLGKLPPQYALELLTVYAWERGSMKTHFNTAQGFRTVLELVINYQQLCIYWTKYYDFKNPIIEKYLRRQLTKPRPVILDPADPTGNLGGGDPKGWRQLAQEAEAWLNYPCFKNWDGSPVSSWILLAESNSADDETDDPRRYQKYGYIGTHEYPHFSHRPSTLQAASTPQAEEDWTCTIL

SEQ ID NO: 29 - protein, 153 aa, Homo sapiens
MERLKTVAGSKMQGLLERVNTEIHFVTKCAFQPPPSCLRFVQTNISRLLQETSEQLVALKPWITRQNFSRCLELQCQPDSSTLPPPWSPRPLEATAPTAPQPPLLLLLLLPVGLLLLAAAWCLHWQRTRRRTPRPGEQVPPVPSPQDLLLVEH

SEQ ID NO: 30 - protein, 1498 aa, Homo sapiens
MDGASAEQDGLQEDRSHSGPSSLPEAPLKPPGPLVPPDQQDKVQCAEVNRASTEGESPDGPGQGGLCQNGPTPPFPDPPSSLDPTTSPVGPDASPGVAGFHDNLRKSQGTSAEGSVRKEALQSLRLSLPMQETQLCSTDSPLPLEKEEQVRLQARKWLEEQLKQYRVKRQQERSSQPATKTRLFSTLDPELMLNPENLPRASTLAMTKEYSFLRTSVPRGPKVGSLGLPAHPREKKTSKSSKIRSLADYRTEDSNAGNSGGNVPAPDSTKGSLKQNRSSAASVVSEISLSPDTDDRLENTSLAGDSVSEVDGNDSDSSSYSSASTRGTYGILSKTVGTQDTPYMVNGQEIPADTLGQFPSIKDVLQAAAAEHQDQGQEVNGEVRSRRDSICSSVSLESSAAETQEEMLQVLKEKMRLEGQLEALSLEASQALKEKAELQAQLAALSTKLQAQVECSHSSQQRQDSLSSEVDTLKQSCWDLERAMTDLQNMLEAKNASLASSNNDLQVAEEQYQRLMAKVEDMQRSMLSKDNTVHDLRQQMTALQSQLQQVQLERTTLTSKLKASQAEISSLQSVRQWYQQQLALAQEARVRLQGEMAHIQVGQMTQAGLLEHLKLENVSLSQQLTETQHRSMKEKGRIAAQLQGIEADMLDQEAAFMQIQEAKTMVEEDLQRRLEEFEGERERLQRMADSAASLEQQLEQVKLTLLQRDQQLEALQQEHLDLMKQLTLTQEALQSREQSLDALQTHYDELQARLGELQGEAASREDTICLLQNEKIILEAALQAAKSGKEELDRGARRLEEGTEETSETLEKLREELAIKSGQVEHLQQETAALKKQMQKIKEQFLQQKVMVEAYRRDATSKDQLISELKATRKRLDSELKELRQELMQVHGEKRTAEAELSRLHREVAQVRQHMADLEGHLQSAQKERDEMETHLQSLQFDKEQMVAVTEANEALKKQIEELQQEARKAITEQKQKMRRLGSDLTSAQKEMKTKHKAYENAVGILSRRLQEALAAKEAADAELGQLRAQGGSSDSSLALHERIQALEAELQAVSHSKTLLEKELQEVIALTSQELEESREKVLELEDELQESRGFRKKIKRLEESNKKLALELEHEKGKLTGLGQSNAALREHNSILETALAKREADLVQLNLQVQAVLQRKEEEDRQMKHLVQALQASLEKEKEKVNSLKEQVAAAKVEAGHNRRHFKAASLELSEVKKELQAKEHLVQKLQAEADDLQIREGKHSQEIAQFQAELAEARAQLQLLQKQLDEQLSKQPVGNQEMENLKWEVDQKEREIQSLKQQLDLTEQQGRKELEGLQQLLQNVKSELEMAQEDLSMTQKDKFMLQAKVSELKNNMKTLLQQNQQLKLDLRRGAAKTRKEPKGEASSSNPATPIKIPDCPVPASLLEELLRPPPAVSKEPLKNLNSCLQQLKQEMDSLQRQMEEHALTVHESLSSWTPLEPATASPVPPGGHAGPRGDPQRHSQSRASKEGPGE

SEQ ID NO: 31 - protein, 345 aa, Homo sapiens
MISPVLILFSSFLCHVAIAGRTCPKPDDLPFSTVVPLKTFYEPGEEITYSCKPGYVSRGGMRKFICPLTGLWPINTLKCTPRVCPFAGILENGAVRYTTFEYPNTISFSCNTGFYLNGADSAKCTEEGKWSPELPVCAPIICPPPSIPTFATLRVYKPSAGNNSLYRDTAVFECLPQHAMFGNDTITCTTHGNWTKLPECREVKCPFPSRPDNGFVNYPAKPTLYYKDKATFGCHDGYSLDGPEEIECTKLGNWSAMPSCKASCKVPVKKATVVYQGERVKIQEKFKNGMLHGDKVSFFCKNKEKKCSYTEDAQCIDGTIEVPKCFKEHSSLAFWKTDASDVKPC

SEQ ID NO: 32 - protein, 1090 aa, Homo sapiens
MATLLSHPQQRPPFLRQAIKIRRRRVRDLQDPPPQMAPEIQPPSHHFSPEQRALLYEDALYTVLHRLGHPEPNHVTEASELLRYLQEAFHVEPEEHQQTLQRVRELEKPIFCLKATVKQAKGILGKDVSGFSDPYCLLGIEQGVGVPGGSPGSRHRQKAVVRHTIPEEETHRTQVITQTLNPVWDETFILEFEDITNASFHLDMWDLDTVESVRQKLGELTDLHGLRRIFKEARKDKGQDDFLGNVVLRLQDLRCREDQWYPLEPRTETYPDRGQCHLQFQLIHKRRATSASRSQPSYTVHLHLLQQLVSHEVTQHEAGSTSWDGSLSPQAATVLFLHATQKDLSDFHQSMAQWLAYSRLYQSLEFPSSCLLHPITSIEYQWIQGRLKAEQQEELAASFSSLLTYGLSLIRRFRSVFPLSVSDSPARLQSLLRVLVQMCKMKAFGELCPNTAPLPQLVTEALQTGTTEWFHLKQQHHQPMVQGIPEAGKALLGLVQDVIGDLHQCQRTWDKIFHNTLKIHLFSMAFRELQWLVAKRVQDHTTVVGDVVSPEMGESLFQLYISLKELCQLRMSSSERDGVLALDNFHRWFQPAIPSWLQKTYNEALARVQRAVQMDELVPLGELTKHSTSAVDLSTCFAQISHTARQLDWPDPEEAFMITVKFVEDTCRLALVYCSLIKARARELSSGQKDQGQAANMLCVVVNDMEQLRLVIGKLPAQLAWEALEQRVGAVLEQGQLQNTLHAQLQSALAGLGHEIRTGVRTLAEQLEVGIAKHIQKLVGVRESVLPEDAILPLMKFLEVELCYMNTNLVQENFSSLLTLLWTHTLTVLVEAAASQRSSSLASNRLKIALQNLEICFHAEGCGLPPKALHTATFQALQRDLELQAASSRELIRKYFCSRIQQQAETTSEELGAVTVKASYRASEQKLRVELLSASSLLPLDSNGSSDPFVQLTLEPRHEFPELAARETQKHKKDLHPLFDETFEFLVPAEPCRKAGACLLLTVLDYDTLGADDLEGEAFLPLREVPGLSGSEEPGEVPQTRLPLTYPAPNGDPILQLLEGRKGDREAQVFVRLRRHRAKQASQHALRPAP

SEQ ID NO: 33 - protein, 843 aa, Homo sapiens
MWGRLWPLLLSILTATAVPGPSLRRPSRELDATPRMTIPYEELSGTRHFKGQAQNYSTLLLEEASARLLVGARGALFSLSANDIGDGAHKEIHWEASPEMQSKCHQKGKNNQTECFNHVRFLQRLNSTHLYACGTHAFQPLCAAIDAEAFTLPTSFEEGKEKCPYDPARGFTGLIIDGGLYTATRYEFRSIPDIRRSRHPHSLRTEETPMHWLNDAEFVFSVLVRESKASAVGDDDKVYYFFTERATEEGSGSFTQSRSSHRVARVARVCKGDLGGKKILQKKWTSFLKARLICHIPLYETLRGVCSLDAETSSRTHFYAAFTLSTQWKTLEASAICRYDLAEIQAVFAGPYMEYQDGSRRWGRYEGGVPEPRPGSCITDSLRSQGYNSSQDLPSLVLDFVKLHPLMARPVVPTRGRPLLLKRNIRYTHLTGTPVTTPAGPTYDLLFLGTADGWIHKAVVLGSGMHIIEETQVFRESQSVENLVISLLQHSLYVGAPSGVIQLPLSSCSRYRSCYDCILARDPYCGWDPGTHACAAATTIANRSQGSRTALIQDIERGNRGCESSRDTGPPPPLKTRSVLRGDDVLLPCDQPSNLARALWLLNGSMGLSDGQGGYRVGVDGLLVTDAQPEHSGNYGCYAEENGLRTLLASYSLTVRPATPAPAPKAPATPGAQLAPDVRLLYVLAIAALGGLCLILASSLLYVACLREGRRGRRRKYSLGRASRAGGSAVQLQTVSGQCPGEEDEGDDEGAGGLEGSCLQIIPGEGAPAPPPPPPPPPPAELTNGLVALPSRLRRMNGNSYVLLRQSNNGVPAGPCSFAEELSRILEKRKHTQLVEQLDESSV

SEQ ID NO: 34 - protein, 427 aa, Homo sapiens
MRHLGAFLFLLGVLGALTEMCEIPEMDSHLVEKLGQHLLPWMDRLSLEHLNPSIYVGLRLSSLQAGTKEDLYLHSLKLGYQQCLLGSAFSEDDGDCQGKPSMGQLALYLLALRANCEFVRGHKGDRLVSQLKWFLEDEKRAIGHDHKGHPHTSYYQYGLGILALCLHQKRVHDSVVDKLLYAVEPFHQGHHSVDTAAMAGLAFTCLKRSNFNPGRRQRITMAIRTVREEILKAQTPEGHFGNVYSTPLALQFLMTSPMRGAELGTACLKARVALLASLQDGAFQNALMISQLLPVLNHKTYIDLIFPDCLAPRVMLEPAAETIPQTQEIISVTLQVLSLLPPYRQSISVLAGSTVEDVLKKAHELGGFTYETQASLSGPYLTSVMGKAAGEREFWQLLRDPNTPLLQGIADYRPKDGETIELRLVSW

SEQ ID NO: 35 - protein, 214 aa, Homo sapiens
MNVFRILGDLSHLLAMILLLGKIWRSKCCKGISGKSQILFALVFTTRYLDLFTNFISIYNTVMKVVFLLCAYVTVYMIYGKFRKTFDSENDTFRLEFLLVPVIGLSFLENYSFTLLEILWTFSIYLESVAILPQLFMISKTGEAETITTHYLFFLGLYRALYLANWIRRYQTENFYDQIAVVSGVVQTIFYCDFFYLYVTKVLKGKKLSLPMPI

SEQ ID NO: 36 - protein, 644 aa, Homo sapiens
MEAERGPERRPAERSSPGQTPEEGAQALAEFAALHGPALRASGVPERYWGRLLHKLEHEVFDAGEVFGIMQVEEVEEEEDEAAREVRKQQPNPGNELCYKVIVTRESGLQAAHPNSIFLIDHAWTCRVEHARQQLQQVPGLLHRMANLMGIEFHGELPSTEAVALVLEEMWKFNQTYQLAHGTAEEKMPVWYIMDEFGSRIQHADVPSFATAPFFYMPQQVAYTLLWPLRDLDTGEEVTRDFAYGETDPLIRKCMLLPWAPTDMLDLSSCTPEPPAEHYQAILEENKEKLPLDINPVVHPHGHIFKVYTDVQQVASSLTHPRFTLTQSEADADILFNFSHFKDYRKLSQERPGVLLNQFPCENLLTVKDCLASIARRAGGPEGPPWLPRTFNLRTELPQFVSYFQQRERWGEDNHWICKPWNLARSLDTHVTKSLHSIIRHRESTPKVVSKYIESPVLFLREDVGKVKFDIRYIVLLRSVRPLRLFVYDVFWLRFSNRAFALNDLDDYEKHFTVMNYDPDVVLKQVHCEEFIPEFEKQYPEFPWTDVQAEIFRAFTELFQVACAKPPPLGLCDYPSSRAMYAVDLMLKWDNGPDGRRVMQPQILEVNFNPDCERACRYHPTFFNDVFSTLFLDQPGGCHVTCLV

SEQ ID NO: 37 - protein, 481 aa, Homo sapiens
MYDAERGWSLSFAGCGFLGFYHVGATRCLSEHAPHLLRDARMLFGASAGALHCVGVLSGIPLEQTLQVLSDLVRKARSRNIGIFHPSFNLSKFLRQGLCKCLPANVHQLISGKIGISLTRVSDGENVLVSDFRSKDEVVDALVCSCFIPFYSGLIPPSFRGVRYVDGGVSDNVPFIDAKTTITVSPFYGEYDICPKVKSTNFLHVDITKLSLRLCTGNLYLLSRAFVPPDLKVLGEICLRGYLDAFRFLEEKGICNRPQPGLKSSSEGMDPEVAMPSWANMSLDSSPESAALAVRLEGDELLDHLRLSILPWDESILDTLSPRLATALSEEMKDKGGYMSKICNLLPIRIMSYVMLPCTLPVESAIAIVQRLVTWLPDMPDDVLWLQWVTSQVFTRVLMCLLPASRSQMPVSSQQASPCTPEQDWPCWTPCSPKGCPAETKAEATPRSILRSSLNFFLGNKVPAGAEGLSTFPSFSLEKSL

SEQ ID NO: 38 - protein, 357 aa, Homo sapiens
MDSVEKTTNRSEQKSRKFLKSLIRKQPQELLLVIGTGVSAAVAPGIPALCSWRSCIEAVIEAAEQLEVLHPGDVAEFRRKVTKDRDLLVVAHDLIRKMSPRTGDAKPSFFQDCLMEVFDDLEQHIRSPVVLQSILSLMDRGAMVLTTNYDNLLEAFGRRQNKPMESLDLKDKTKVLEWARGHMKYGVLHIHGLYTDPCGVVLDPSGYKDVTQDAEVMEVLQNLYRTKSFLFVGCGETLRDQIFQALFLYSVPNKVDLEHYMLVLKENEDHFFKHQADMLLHGIKVVSYGDCFDHFPGYVQDLATQICKQQSPDADRVDSTTLLGNACQDCAKRKLEENGIEVSKKRTQSDTDDAGGS

SEQ ID NO: 39 - protein, 551 aa, Homo sapiens
MAAPALSWRLPLLILLLPLATSWASAAVNGTSQFTCFYNSRANISCVWSQDGALQDTSCQVHAWPDRRRWNQTCELLPVSQASWACNLILGAPDSQKLTTVDIVTLRVLCREGVRWRVMAIQDFKPFENLRLMAPISLQVVHVETHRCNISWEISQASHYFERHLEFEARTLSPGHTWEEAPLLTLKQKQEWICLETLTPDTQYEFQVRVKPLQGEFTTWSPWSQPLAFRTKPAALGKDTIPWLGHLLVGLSGAFGFIILVYLLINCRNTGPWLKKVLKCNTPDPSKFFSQLSSEHGGDVQKWLSSPFPSSSFSPGGLAPEISPLEVLERDKVTQLLLQQDKVPEPASLSSNHSLTSCFTNQGYFFFHLPDALEIEACQVYFTYDPYSEEDPDEGVAGAPTGSSPQPLQPLSGEDDAYCTFPSRDDLLLFSPSLLGGPSPPSTAPGGSGAGEERMPPSLQERVPRDWDPQPLGPPTPGVPDLVDFQPPPELVLREAGEEVPDAGPREGVSFPWSRPPGQGEFRALNARLPLNTDAYLSLQELQGQDPTHLV

SEQ ID NO: 40 - protein, 762 aa, Homo sapiens
MEGPRSSTHVPLVLPLLVLLLLAPARQAAAQRCPQACICDNSRRHVACRYQNLTEVPDAIPELTQRLDLQGNLLKVIPAAAFQGVPHLTHLDLRHCEVELVAEGAFRGLGRLLLLNLASNHLRELPQEALDGLGSLRRLELEGNALEELRPGTFGALGALATLNLAHNALVYLPAMAFQGLLRVRWLRLSHNALSVLAPEALAGLPALRRLSLHHNELQALPGPVLSQARGLARLELGHNPLTYAGEEDGLALPGLRELLLDGGALQALGPRAFAHCPRLHTLDLRGNQLDTLPPLQGPGQLRRLRLQGNPLWCGCQARPLLEWLARARVRSDGACQGPRRLRGEALDALRPWDLRCPGDAAQEEEELEERAVAGPRAPPRGPPRGPGEERAVAPCPRACVCVPESRHSSCEGCGLQAVPRGFPSDTQLLDLRRNHFPSVPRAAFPGLGHLVSLHLQHCGIAELEAGALAGLGRLIYLYLSDNQLAGLSAAALEGAPRLGYLYLERNRFLQVPGAALRALPSLFSLHLQDNAVDRLAPGDLGRTRALRWVYLSGNRITEVSLGALGPARELEKLHLDRNQLREVPTGALEGLPALLELQLSGNPLRALRDGAFQPVGRSLQHLFLNSSGLEQICPGAFSGLGPGLQSLHLQKNQLRALPALPSLSQLELIDLSSNPFHCDCQLLPLHRWLTGLNLRVGATCATPPNARGQRVKAAAAVFEDCPGWAARKAKRTPASRPSARRTPIKGRQCGADKVGKEKGRL

SEQ ID NO: 41 - protein, 247 aa, Homo sapiens
MQPILLLLAFLLLPRADAGEIIGGHEAKPHSRPYMAYLMIWDQKSLKRCGGFLIRDDFVLTAAHCWGSSINVTLGAHNIKEQEPTQQFIPVKRPIPHPAYNPKNFSNDIMLLQLERKAKRTRAVQPLRLPSNKAQVKPGQTCSVAGWGQTAPLGKHSHTLQEVKMTVQEDRKCESDLRHYYDSTIELCVGDPEIKKTSFKGDSGGPLVCNKVAQGIVSYGRNNGMPPRACTKVSSFVHWIKKTMKRY

SEQ ID NO: 42 - protein, 1332 aa, Homo sapiens [sequence omitted]

SEQ ID NO: 43 - protein, 985 aa, Homo sapiens
MIRHAGAPARGDPTGPVPVVGKGEEEEEEDGMRLCLPANPKNCLPHRRGISILEKLIKTCPVWLQLSLGQAEVARILHRVVAGMFLVRRDSSSKQLVLCVHFPSLNESSAEVLEYTIKEEKSILYLEGSALVFEDIFRLIAFYCVSRDLLPFTLRLPQAILEASSFTDLETIANLGLGFWDSSLNPPQERGKPAEPPRDRAPGFPLVSSLRPTAHDANCACEIELSVGNDRLWFVNPIFIEDCSSALPTDQPPLGNCPARPLPPTSDATSPTSRWAPRRPPPPPPVLPLQPCSPAQPPVLPALAPAPACPLPTSPPVPAPHVTPHAPGPPDHPNQPPMMTCERLPCPTAGLGPLREEAMKPGAASSPLQQVPAPPLPAKKNLPTAPPRRRVSERVSLEDQSPGMAAEGDQLSLPPQGTSDGPEDTPRESTEQGQDTEVKASDPHSMPELPRTAKQPPVPPPRKKRISRQLASTLPAPLENAELCTQAMALETPTPGPPREGQSPASQAGTQHPPAQATAHSQSSPEFKGSLASLSDSLGVSVMATDQDSYSTSSTEEELEQFSSPSVKKKPSMILGKARHRLSFASFSSMFHAFLSNNRKLYKKVVELAQDKGSYFGSLVQDYKVYSLEMMARQTSSTEMLQEIRTMMTQLKSYLLQSTELKALVDPALHSEEELEAIVESALYKCVLKPLKEAINSCLHQIHSKDGSLQQLKENQLVILATTTTDLGVTTSVPEVPMMEKILQKFTSMHKAYSPEKKISILLKTCKLIYDSMALGNPGKPYGADDFLPVLMYVLARSNLTEMLLNVEYMMELMDPALQLGEGSYYLTTTYGALEHIKSYDKITVTRQLSVEVQDSIHRWERRRTLNKARASRSSVQDFICVSYLEPEQQARTLASRADTQAQALCAQCAEKFAVERPQAHRLFVLVDGRCFQLADDALPHCIKGYLLRSEPKRDFHFVYRPLDGGGGGGGGSPPCLVVREPNFL

SEQ ID NO: 44 - protein, 808 aa, Homo sapiens
MRLLLLVPLLLAPAPGSSAPKVRRQSDTWGPWSQWSPCSRTCGGGVSFRERPCYSQRRDGGSSCVGPARSHRSCRTESCPDGARDFRAEQCAEFDGAEFQGRRYRWLPYYSAPNKCELNCIPKGENFYYKHREAVVDGTPCEPGKRDVCVDGSCRVVGCDHELDSSKQEDKCLRCGGDGTTCYPVAGTFDANDLSRGYNQILIVPMGATSILIDEAAASRNFLAVKNVRGEYYLNGHWTIEAARALPAASTILHYERGAEGDLAPERLHARGPTSEPLVIELISQEPNPGVHYEYHLPLRRPSPGFSWSHGSWSDCSAECGGGHQSRLVFCTIDHEAYPDHMCQRQPRPADRRSCNLHPCPETKRWKAGPWAPCSASCGGGSQSRSVYCISSDGAGIQEAVEEAECAGLPGKPPAIQACNLQRCAAWSPEPWGECSVSCGVGVRKRSVTCRGERGSLLHTAACSLEDRPPLTEPCVHEDCPLLSDQAWHVGTWGLCSKSCSSGTRRRQVICAIGPPSHCGSLQHSKPVDVEPCNTQPCHLPQEVPSMQDVHTPASNPWMPLGPQESPASDSRGQWWAAQEHPSARGDHRGERGDPRGDQGTHLSALGPAPSLQQPPYQQPLRSGSGPHDCRHSPHGCCPDGHTASLGPQWQGCPGAPCQQSRYGCCPDRVSVAEGPHHAGCTKSYGGDSTGGMPRSRAVASTVHNTHQPQAQQNEPSECRGSQFGCCYDNVATAAGPLGEGCVGQPSHGLAWQVWSPRWCRQPWGSWCGSPAQTTLPRNPRLPGRKMASPSPLTGVCDGPPTSSDRCV

SEQ ID NO: 45 - protein, 239 aa, Homo sapiens
MAKPCGVRLSGEARKQVEVFRQNLFQEAEEFLYRFLPQKIIYLNQLLQEDSLNVADLTSLRAPLDIPIPDPPPKDDEMETDKQEKKEVHKCGFLPGNEKVLSLLALVKPEVWTLKEKCILVITWIQHLIPKIEDGNDFGVAIQEKVLERVNAVKTKVEAFQTTISKYFSERGDAVAKASKETHVMDYRALVHERDEAAYGELRAMVLDLRAFYAELYHIISSNLEKIVNPKGEEKPSMY

SEQ ID NO: 46 - protein, 238 aa, Homo sapiens
MLTTLLPILLLSGWAFCSQDASDGLQRLHMLQISYFRDPYHVWYQGNASLGGHLTHVLEGPDTNTTIIQLQPLQEPESWARTQSGLQSYLLQFHGLVRLVHQERTLAFPLTIRCFLGCELPPEGSRAHVFFEVAVNGSSFVSFRPERALWQADTQVTSGVVTFTLQQLNAYNRTRYELREFLEDTCVQYVQKHISAENTKGSQTSRSYTSLVLGVLVGSFIIAGVAVGIFLCTGGRRC

SEQ ID NO: 47 - protein, 1053 aa, Homo sapiens
MSRRKQAKPQHINSEEDQGEQQPQQQTPEFADAAPAAPAAGELGAPVNHPGNDEVASEDEATVKRLRREETHVCEKCCAEFFSISEFLEHKKNCTKNPPVLIMNDSEGPVPSEDFSGAVLSHQPTSPGSKDCHRENGGSSEDMKEKPDAESVVYLKTETALPPTPQDISYLAKGKVANTNVTLQALRGTKVAVNQRSADALPAPVPGANSIPWVLEQILCLQQQQLQQIQLTEQIRIQVNMWASHALHSSGAGADTLKTLGSHMSQQVSAAVALLSQKAGSQGLSLDALKQAKLPHANIPSATSSLSPGLAPFTLKPDGTRVLPNVMSRLPSALLPQAPGSVLFQSPFSTVALDTSKKGKGKPPNISAVDVKPKDEAALYKHKCKYCSKVFGTDSSLQIHLRSHTGERPFVCSVCGHRFTTKGNLKVHFHRHPQVKANPQLFAEFQDKVAAGNGIPYALSVPDPIDEPSLSLDSKPVLVTTSVGLPQNLSSGTNPKDLTGGSLPGDLQPGPSPESEGGPTLPGVGPNYNSPRAGGFQGSGTPEPGSETLKLQQLVENIDKATTDPNECLICHRVLSCQSSLKMHYRTHTGERPFQCKICGRAFSTKGNLKTHLGVHRTNTSIKTQHSCPICQKKFTNAVMLQQHIRMHMGGQIPNTPLPENPCDFTGSEPMTVGENGSTGAICHDDVIESIDVEEVSSQEAPSSSSKVPTPLPSIHSASPTLGFAMMASLDAPGKVGPAPFNLQRQGSRENGSVESDGLTNDSSSLMGDQEYQSRSPDILETTSFQALSPANSQAESIKSKSPDAGSKAESSENSRTEMEGRSSLPSTFIRAPPTYVKVEVPGTFVGPSTLSPGMTPLLAAQPRRQAKQHGCTRCGKNFSSASALQIHERTHTGEKPFVCNICGRAFTTKGNLKVHYMTHGANNNSARRGRKLAIENTMALLGTDGKRVSEIFPKEILAPSVNVDPVVWNQYTSMLNGGLAVKTNEISVIQSGGVPTLPVSLGATSVVNNATVSKMDGSQSGISADVEKPSATDGVPKHQFPHFLEENKIAVS

SEQ ID NO: 48 - protein, 195 aa, Homo sapiens
MAAEDVVATGADPSDLESGGLLHEIFTSPLNLLLLGLCIFLLYKIVRGDQPAASGDSDDDEPPPLPRLKRRDFTPAELRRFDGVQDPRILMAINGKVFDVTKGRKFYGPEGPYGVFAGRDASRGLATFCLDKEALKDEYDDLSDLTAAQQETLSDWESQFTFKYHHVGKLLKEGEEPTVYSDEEEPKDESARKND

SEQ ID NO: 49 - protein, 461 aa, Homo sapiens
MQRVNMIMAESPGLITICLLGYLLSAECTVFLDHENANKILNRPKRYNSGKLEEFVQGNLERECMEEKCSFEEAREVFENTERTTEFWKQYVDGDQCESNPCLNGGSCKDDINSYECWCPFGFEGKNCELDVTCNIKNGRCEQFCKNSADNKVVCSCTEGYRLAENQKSCEPAVPFPCGRVSVSQTSKLTRAETVFPDVDYVNSTEAETILDNITQSTQSFNDFTRVVGGEDAKPGQFPWQVVLNGKVDAFCGGSIVNEKWIVTAAHCVETGVKITVVAGEHNIEETEHTEQKRNVIRIIPHHNYNAAINKYNHDIALLELDEPLVLNSYVTPICIADKEYTNIFLKFGSGYVSGWGRVFHKGRSALVLQYLRVPLVDRATCLRSTKFTIYNNMFCAGFHEGGRDSCQGDSGGPHVTEVEGTSFLTGIISWGEECAMKGKYGIYTKVSRYVNWIKEKTKLT

SEQ ID NO: 50 - protein, 292 aa, Homo sapiens
MAQPPPDVEGDDCLPAYRHLFCPDLLRDKVAFITGGGSGIGFRIAEIFMRHGCHTVIASRSLPRVLTAARKLAGATGRRCLPLSMDVRAPPAVMAAVDQALKEFGRIDILINCAAGNFLCPAGALSFNAFKTVMDIDTSGTFNVSRVLYEKFFRDHGGVIVNITATLGNRGQALQVHAGSAKAAVDAMTRHLAVEWGPQNIRVNSLAPGPISGTEGLRRLGGPQASLSTKVTASPLQRLGNKTEIAHSVLYLASPLASYVTGAVLVADGGAWLTFPNGVKGLPDFASFSAKL

SEQ ID NO: 51 - protein, 781 aa, Homo sapiens
MAKTPSDHLLSTLEELVPYDFEKFKFKLQNTSVQKEHSRIPRSQIQRARPVKMATLLVTYYGEEYAVQLTLQVLRAINQRLLAEELHRAAIQEYSTQENGTDDSAASSSLGENKPRSLKTPDHPEGNEGNGPRPYGGGAASLRCSQPEAGRGLSRKPLSKRREKASEGLDAQGKPRTRSPALPGGRSPGPCRALEGGQAEVRLRRNASSAGRLQGLAGGAPGQKECRPFEVYLPSGKMRPRSLEVTISTGEKAPANPEILLTLEEKTAANLDSATEPRARPTPDGGASADLKEGPGNPEHSVTGRPPDTAASPRCHAQEGDPVDGTCVRDSCSFPEAVSGHPQASGSRSPGCPRCQDSHERKSPGSLSPQPLPQCKRHLKQVQLLFCEDHDEPICLICSLSQEHQGHRVRPIEEVALEHKKKIQKQLEHLKKLRKSGEEQRSYGEEKAVSFLKQTEALKQRVQRKLEQVYYFLEQQEHFFVASLEDVGQMVGQIRKAYDTRVSQDIALLDALIGELEAKECQSEWELLQDIGDILHRAKTVPVPEKWTTPQEIKQKIQLLHQKSEFVEKSTKYFSETLRSEMEMFNVPELIGAQAHAVNVILDAETAYPNLIFSDDLKSVRLGNKWERLPDGPQRFDSCIIVLGSPSFLSGRRYWEVEVGDKTAWILGACKTSISRKGNMTLSPENGYWVVIMMKENEYQASSVPPTRLLIKEPPKRVGIFVDYRVGSISFYNVTARSHIYTFASCSFSGPLQPIFSPGTRDGGKNTAPLTICPVGGQGPD

SEQ ID NO: 52 - protein, 335 aa, Homo sapiens
MWATLPLLCAGAWLLGVPVCGAAELCVNSLEKFHFKSWMSKHRKTYSTEEYHHRLQTFASNWRKINAHNNGNHTFKMALNQFSDMSFAEIKHKYLWSEPQNCSATKSNYLRGTGPYPPSVDWRKKGNFVSPVKNQGACGSCWTFSTTGALESAIAIATGKMLSLAEQQLVDCAQDFNNHGCQGGLPSQAFEYILYNKGIMGEDTYPYQGKDGYCKFQPGKAIGFVKDVANITIYDEEAMVEAVALYNPVSFAFEVTQDFMMYRTGIYSSTSCHKTPDKVNHAVLAVGYGEKNGIPYWIVKNSWGPQWGMNGYFLIERGKNMCGLAACASYPIPLV

SEQ ID NO: 53 - protein, 1361 aa, Homo sapiens
MGAAGRQDFLFKAMLTISWLTLTCFPGATSTVAAGCPDQSPELQPWNPGHDQDHHVHIGQGKTLLLTSSATVYSIHISEGGKLVIKDHDEPIVLRTRHILIDNGGELHAGSALCPFQGNFTIILYGRADEGIQPDPYYGLKYIGVGKGGALELHGQKKLSWTFLNKTLHPGGMAEGGYFFERSWGHRGVIVHVIDPKSGTVIHSDRFDTYRSKKESERLVQYLNAVPDGRILSVAVNDEGSRNLDDMARKAMTKLGSKHFLHLGFRHPWSFLTVKGNPSSSVEDHIEYHGHRGSAAARVFKLFQTEHGEYFNVSLSSEWVQDVEWTEWFDHDKVSQTKGGEKISDLWKAHPGKICNRPIDIQATTMDGVNLSTEVVYKKGQDYRFACYDRGRACRSYRVRFLCGKPVRPKLTVTIDTNVNSTILNLEDNVQSWKPGDTLVIASTDYSMYQAEEFQVLPCRSCAPNQVKVAGKPMYLHIGEEIDGVDMRAEVGLLSRNIIVMGEMEDKCYPYRNHICNFFDFDTFGGHIKFALGFKAAHLEGTELKHMGQQLVGQYPIHFHLAGDVDERGGYDPPTYIRDLSIHHTFSRCVTVHGSNGLLIKDVVGYNSLGHCFFTEDGPEERNTFDHCLGLLVKSGTLLPSDRDSKMCKMITEDSYPGYIPKPRQDCNAVSTFWMANPNNNLINCAAAGSEETGFWFIFHHVPTGPSVGMYSPGYSEHIPLGKFYNNRAHSNYRAGMIIDNGVKTTEASAKDKRPFLSIISARYSPHQDADPLKPREPAIIRHFIAYKNQDHGAWLRGGDVWLDSCRFADNGIGLTLASGGTFPYDDGSKQEIKNSLFVGESGNVGTEMMDNRIWGPGGLDHSGRTLPIGQNFPIRGIQLYDGPINIQNCTFRKFVALEGRHTSALAFRLNNAWQSCPHNNVTGIAFEDVPITSRVFFGEPGPWFNQLDMDGDKTSVFHDVDGSVSEYPGSYLTKNDNWLVRHPDCINVPDWRGAICSGCYAQMYIQAYKTSNLRMKIIKNDFPSHPLYLEGALTRSTHYQQYQPVVTLQKGYTIHWDQTAPAELAIWLINFNKGDWIRVGLCYPRGTTFSILSDVHNRLLKQTSKTGVFVRTLQMDKVEQSYPGRSHYYWDEDSGLLFLKLKAQNEREKFAFCSMKGCERIKIKALIPKNAGVSDCTATAYPKFTERAVVDVPMPKKLFGSQLKTKDHFLEVKMESSKQHFFHLWNDFAYIEVDGKKYPSSEDGIQVVVIDGNQGRVVSHTSFRNSILQGIPWQLFNYVATIPDNSIVLMASKGRYVSRGPWTRVLEKLGADRGLKLKEQMAFVGFKGSFRPIWVTLDTEDHKAKIFQVVPIPVVKKKKL

SEQ ID NO: 54 - protein, 2768 aa, Homo sapiens
MALVLEIFTLLASICWVSANIFEYQVDAQPLRPCELQRETAFLKQADYVPQCAEDGSFQTVQCQNDGRSCWCVGANGSEVLGSRQPGRPVACLSFCQLQKQQILLSGYINSTDTSYLPQCQDSGDYAPVQCDVQQVQCWCVDAEGMEVYGTRQLGRPKRCPRSCEIRNRRLLHGVGDKSPPQCSAEGEFMPVQCKFVNTTDMMIFDLVHSYNRFPDAFVTFSSFQRRFPEVSGYCHCADSQGRELAETGLELLLDEIYDTIFAGLDLPSTFTETTLYRILQRRFLAVQSVISGRFRCPTKCEVERFTATSFGHPYVPSCRRNGDYQAVQCQTEGPCWCVDAQGKEMHGTRQQGEPPSCAEGQSCASERQQALSRLYFGTSGYFSQHDLFSSPEKRWASPRVARFATSCPPTIKELFVDSGLLRPMVEGQSQQFSVSENLLKEAIRAIFPSRGLARLALQFTTNPKRLQQNLFGGKFLVNVGQFNLSGALGTRGTFNFSQFFQQLGLASFLNGGRQEDLAKPLSVGLDSNSSTGTPEAAKKDGTMNKPTVGSFGFEINLQENQNALKFLASLLELPEFLLFLQHAISVPEDVARDLGDVMETVLSSQTCEQTPERLFVPSCTTEGSYEDVQCFSGECWCVNSWGKELPGSRVRGGQPRCPTDCEKQRARMQSLMGSQPAGSTLFVPACTSEGHFLPVQCFNSECYCVDAEGQAIPGTRSAIGKPKKCPTPCQLQSEQAFLRTVQALLSNSSMLPTLSDTYIPQCSTDGQWRQVQCNGPPEQVFELYQRWEAQNKGQDLTPAKLLVKIMSYREAASGNFSLFIQSLYEAGQQDVFPVLSQYPSLQDVPLAALEGKRPQPRENILLEPYLFWQILNGQLSQYPGSYSDFSTPLAHFDLRNCWCVDEAGQELEGMRSEPSKLPTCPGSCEEAKLRVLQFIRETEEIVSASNSSRFPLGESFLVAKGIRLRNEDLGLPPLFPPREAFAEQFLRGSDYAIRLAAQSTLSFYQRRRFSPDDSAGASALLRSGPYMPQCDAFGSWEPVQCHAGTGHCWCVDEKGGFIPGSLTARSLQIPQCPTTCEKSRTSGLLSSWKQARSQENPSPKDLFVPACLETGEYARLQASGAGTWCVDPASGEELRPGSSSSAQCPSLCNVLKSGVLSRRVSPGYVPACRAEDGGFSPVQCDQAQGSCWCVMDSGEEVPGTRVTGGQPACESPRCPLPFNASEVVGGTILCETISGPTGSAMQQCQLLCRQGSWSVFPPGPLICSLESGRWESQLPQPRACQRPQLWQTIQTQGHFQLQLPPGKMCSADYADLLQTFQVFILDELTARGFCQIQVKTFGTLVSIPVCNNSSVQVGCLTRERLGVNVTWKSRLEDIPVASLPDLHDIERALVGKDLLGRFTDLIQSGSFQLHLDSKTFPAETIRFLQGDHFGTSPRTWFGCSEGFYQVLTSEASQDGLGCVKCPEGSYSQDEECIPCPVGFYQEQAGSLACVPCPVGRTTISAGAFSQTHCVTDCQRNEAGLQCDQNGQYRASQKDRGSGKAFCVDGEGRRLPWWETEAPLEDSQCLMMQKFEKVPESKVIFDANAPVAVRSKVPDSEFPVMQCLTDCTEDEACSFFTVSTTEPEISCDFYAWTSDNVACMTSDQKRDALGNSKATSFGSLRCQVKVRSHGQDSPAVYLKKGQGSTTTLQKRFEPTGFQNMLSGLYNPIVFSASGANLTDAHLFCLLACDRDLCCDGFVLTQVQGGAIICGLLSSPSVLLCNVKDWMDPSEAWANATCPGVTYDQESHQVILRLGDQEFIKSLTPLEGTQDTFTNFQQVYLWKDSDMGSRPESMGCRKDTVPRPASPTEAGLTTELFSPVDLNQVIVNGNQSLSSQKHWLFKHLFSAQQANLWCLSRCVQEHSFCQLAEITESASLYFTCTLYPEAQVCDDIMESNAQGCRLILPQMPKALFRKKVILEDKVKNFYTRLPFQKLMGISIRNKVPMSEKSISNGFFECERRCDADPCCTGFGFLNVSQLKGGEVTCLTLNSLGIQMCSEENGGAWRILDCGSPDIEVHTYPFGWYQKPIAQNNAPSFCPLVVLPSLTEKVSLDSWQSLALSSVVVDPSIRHFDVAHVSTAATSNFSAVRDLCLSECSQHEACLITTLQTQPGAVRCMFYADTQSCTHSLQGQNCRLLLREEATHIYRKPGISLLSYEASVPSVPISTHGRLLGRSQAIQVGTSWKQVDQFLGVPYAAPPLAERRFQAPEPLNWTGSWDASKPRASCWQPGTRTSTSPGVSEDCLYLNVFIPQNVAPNASVLVFFHNTMDREESEGWPAIDGSFLAAVGNLIVVTASYRVGVFGFLSSGSGEVSGNWGLLDQVAALTWVQTHIRGFGGDPRRVSLAADRGGADVASIHLLTARATNSQLFRRAVLMGGSALSPAAVISHERAQQQAIALAKEVSCPMSSSQEVVSCLRQKPANVLNDAQTKLLAVSGPFHYWGPVIDGHFLREPPARALKRSLWVEVDLLIGSSQDDGLINRAKAVKQFEESRGRTSSKTAFYQALQNSLGGEDSDARVEAAATWYYSLEHSTDDYASFSRALENATRDYFIICPIIDMASAWAKRARGNVFMYHAPENYGHGSLELLADVQFALGLPFYPAYEGQFSLEEKSLSLKIMQYFSHFIRSGNPNYPYEFSRKVPTFATPWPDFVPRAGGENYKEFSELLPNRQGLKKADCSFWSKYISSLKTSADGAKGGQSAESEEEELTAGSGLREDLLSLQEPGSKTYSK

SEQ ID NO: 55 - protein, 562 aa, Homo sapiens
MDAMKRGLCCVLLLCGAVFVSPSQEIHARFRRGARSYQVICRDEKTQMIYQQHQSWLRPVLRSNRVEYCWCNSGRAQCHSVPVKSCSEPRCFNGGTCQQALYFSDFVCQCPEGFAGKCCEIDTRATCYEDQGISYRGTWSTAESGAECTNWNSSALAQKPYSGRRPDAIRLGLGNHNYCRNPDRDSKPWCYVFKAGKYSSEFCSTPACSEGNSDCYFGNGSAYRGTHSLTESGASCLPWNSMILIGKVYTAQNPSAQALGLGKHNYCRNPDGDAKPWCHVLKNRRLTWEYCDVPSCSTCGLRQYSQPQFRIKGGLFADIASHPWQAAIFAKHRRSPGERFLCGGILISSCWILSAAHCFQERFPPHHLTVILGRTYRVVPGEEEQKFEVEKYIVHKEFDDDTYDNDIALLQLKSDSSRCAQESSVVRTVCLPPADLQLPDWTECELSGYGKHEALSPFYSERLKEAHVRLYPSSRCTSQHLLNRTVTDNMLCAGDTRSGGPQANLHDACQGDSGGPLVCLNDGRMTLVGIISWGLGCGQKDVPGVYTKVTNYLDWIRDNMRP

SEQ ID NO: 56 - protein, 242 aa, Homo sapiens
MGEASPPAPARRHLLVLLLLLSTLVIPSAAAPIHDADAQESSLGLTGLQSLLQGFSRLFLKGNLLRGIDSLFSAPMDFRGLPGNYHKEENQEHQLGNNTLSSHLQIDKMTDNKTGEVLISENVVASIQPAEGSFEGDLKVPRMEEKEALVPIQKATDSFHTELHPRVAFWIIKLPRRRSHQDALEGGHWLSEKRHRLQAIRDGLRKGTHKDVLEEGTESSSHSRLSPRKTHLLYILRPSRQL

SEQ ID NO: 57 - protein, 334 aa, Homo sapiens
MKPPPRRRAAPARYLGEVTGPATWSAREKRQLVRLLQARQGQPEPDATELARELRGRSEAEIRVFLQQLKGRVAREAIQKVHPGGLQGPRRREAQPPAPIEVWTDLAEKITGPLEEALAVAFSQVLTIAATEPVTLLHSKPPKPTQARGKPLLLSAPGGQEDPAPEIPSSAPAAPSSAPRTPDPAPEKPSESSAGPSTEEDFAVDFEKIYKYLSSVSRSGRSPELSAAESAVVLDLLMSLPEELPLLPCTALVEHMTETYLRLTAPQPIPAGGSLGPAAEGDGAGSKAPEETPPATEKAEHSELKSPWQAAGICPLNPFLVPLELLGRAATPAR

SEQ ID NO: 58 - protein, 96 aa, Homo sapiens
MIQAKLLKADLHGAIISVTKSKCPSYVGITGILLQETKHIFKIITKEDRLKVIPKLNCVFTVETDGFISYIYGSKFQLRSSERSAKKFKAKGTIDL

SEQ ID NO: 59 - protein, 651 aa, Homo sapiens
MGPASPAARGLSRRPGQPPLPLLLPLLLLLLRAQPAIGSLAGGSPGAAEAPGSAQVAGLCGRLTLHRDLRTGRWEPDPQRSRRCLRDPQRVLEYCRQMYPELQIARVEQATQAIPMERWCGGSRSGSCAHPHHQVVPFRCLPGEFVSEALLVPEGCRFLHQERMDQCESSTRRHQEAQEACSSQGLILHGSGMLLPCGSDRFRGVEYVCCPPPGTPDPSGTAVGDPSTRSWPPGSRVEGAEDEEEEESFPQPVDDYFVEPPQAEEEEETVPPPSSHTLAVVGKVTPTPRPTDGVDIYFGMPGEISEHEGFLRAKMDLEERRMRQINEVMREWAMADNQSKNLPKADRQALNEHFQSILQTLEEQVSGERQRLVETHATRVIALINDQRRAALEGFLAALQADPPQAERVLLALRRYLRAEQKEQRHTLRHYQHVAAVDPEKAQQMRFQVHTHLQVIEERVNQSLGLLDQNPHLAQELRPQIQELLHSEHLGPSELEAPAPGGSSEDKGGLQPPDSKDADTPMTLPKGSTEQDAASPEKEKMNPLEQYERKVNASVPRGFPFHSSEIQRDELAPAGTGVSREAVSGLLIMGAGGGSLIVLSMLLLRRKKPYGAISHGVVEVDPMLTLEEQQLRELQRHGYENPTYRFLEERP

SEQ ID NO: 60 - protein, 390 aa, Homo sapiens
MPPSGLRLLPLLLPLLWLLVLTPGRPAAGLSTCKTIDMELVKRKRIEAIRGQILSKLRLASPPSQGEVPPGPLPEAVLALYNSTRDRVAGESAEPEPEPEADYYAKEVTRVLMVETHNEIYDKFKQSTHSIYMFFNTSELREAVPEPVLLSRAELRLLRLKLKVEQHVELYQKYSNNSWRYLSNRLLAPSDSPEWLSFDVTGVVRQWLSRGGEIEGFRLSAHCSCDSRDNTLQVDINGFTTGRRGDLATIHGMNRPFLLLMATPLERAQHLQSSRHRRALDTNYCFSSTEKNCCVRQLYIDFRKDLGWKWIHEPKGYHANFCLGPCPYIWSLDTQYSKVLALYNQHNPGASAAPCCVPQALEPLPIVYYVGRKPKVEQLSNMIVRSCKCS

SEQ ID NO: 61 - protein, 702 aa, Homo sapiens
MESPSAPPHRWCIPWQRLLLTASLLTFWNPPTTAKLTIESTPFNVAEGKEVLLLVHNLPQHLFGYSWYKGERVDGNRQIIGYVIGTQQATPGPAYSGREIIYPNASLLIQNIIQNDTGFYTLHVIKSDLVNEEATGQFRVYPELPKPSISSNNSKPVEDKDAVAFTCEPETQDATYLWWVNNQSLPVSPRLQLSNGNRTLTLFNVTRNDTASYKCETQNPVSARRSDSVILNVLYGPDAPTISPLNTSYRSGENLNLSCHAASNPPAQYSWFVNGTFQQSTQELFIPNITVNNSGSYTCQAHNSDTGLNRTTVTTITVYAEPPKPFITSNNSNPVEDEDAVALTCEPEIQNTTYLWWVNNQSLPVSPRLQLSNDNRTLTLLSVTRNDVGPYECGIQNELSVDHSDPVILNVLYGPDDPTISPSYTYYRPGVNLSLSCHAASNPPAQYSWLIDGNIQQHTQELFISNITEKNSGLYTCQANNSASGHSRTTVKTITVSAELPKPSISSNNSKPVEDKDAVAFTCEPEAQNTTYLWWVNGQSLPVSPRLQLSNGNRTLTLFNVTRNDARAYVCGIQNSVSANRSDPVTLDVLYGPDTPIISPPDSSYLSGANLNLSCHSASNPSPQYSWRINGIPQQHTQVLFIAKITPNNNGTYACFVSNLATGRNNSIVKSITVSASGTSPGLSAGATVGIMIGVLVGVALI

SEQ ID NO: 62 - protein, 299 aa, Homo sapiens [sequence omitted]

SEQ ID NO: 63 - protein, 963 aa, Homo sapiens
MLSGERKEGGSPRFGKLHLPVGLWINSPRKQLAKLGRRWPSAASVKSSSSDTGSRSSEPLPPPPPHVELRRVGAVKAAGGASGSRAKRISQLFRGSGTGTTGSSGAGGPGTPGGAQRWASEKKLPELAAGVAPEPPLATRATAPPGVLKIFGAGLASGANYKSVLATARSTARELVAEALERYGLAGSPGGGPGESSCVDAFALCDALGRPAAAGVGSGEWRAEHLRVLGDSERPLLVQELWRARPGWARRFELRGREEARRLEQEAFGAADSEGTGAPSWRPQKNRSRAASGGAALASPGPGTGSGAPAGSGGKERSENLSLRRSVSELSLQGRRRRQQERRQQALSMAPGAADAQIGTADPGDFDQLTQCLIQAPSNRPYFLLLQGYQDAQDFVVYVMTREQHVFGRGGNSSGRGGSPAPYVDTFLNAPDILPRHCTVRAGPEHPAMVRPSRGAPVTHNGCLLLREAELHPGDLLGLGEHFLFMYKDPRTGGSGPARPPWLPARPGATPPGPGWAFSCRLCGRGLQERGEALAAYLDGREPVLRFRPREEEALLGEIVRAAAAGSGDLPPLGPATLLALCVQHSARELELGHLPRLLGRLARLIKEAVWEKIKEIGDRQPENHPEGVPEVPLTPEAVSVELRPLMLWMANTTELLSFVQEKVLEMEKEADQEDPQLCNDLELCDEAMALLDEVIMCTFQQSVYYLTKTLYSTLPALLDSNPFTAGAELPGPGAELGAMPPGLRPTLGVFQAALELTSQCELHPDLVSQTFGYLFFFSNASLLNSLMERGQGRPFYQWSRAVQIRTNLDLVLDWLQGAGLGDIATEFFRKLSMAVNLLCVPRTSLLKASWSSLRTDHPTLTPAQLHHLLSHYQLGPGRGPPAAWDPPPAEREAVDTGDIFESFSSHPPLILPLGSSRLRLTGPVTDDALHRELRRLRRLLWDLEQQELPANYRHGPPVATSP

SEQ ID NO: 64 - protein, 986 aa, Homo sapiens
MPRATWANSKERSWAESERGPRDTGNGGSKAERHIQEIETGRGGDRAKAHRRQRMRLRGTERASLGPGRRLGDSRGTDMPGARAQGLAAAMTEESEETVLYIEHRYVCSECNQLYGSLEEVLMHQNSHVPQQHFELVGVADPGVTVATDTASGTGLYQTLVQESQYQCLECGQLLMSPSQLLEHQELHLKMMAPQEAVPAEPSPKAPPLSSSTIHYECVDCKALFASQELWLNHRQTHLRATPTKAPAPVVLGSPVVLGPPVGQARVAVEHSYRKAEEGGEGATVPSAAATTTEVVTEVELLLYKCSECSQLFQLPADFLEHQATHFPAPVPESQEPALQQEVQASSPAEVPVSQPDPLPASDHSYELRNGEAIGRDRRGRRARRNNSGEAGGAATQELFCSACDQLFLSPHQLQQHLRSHREGVFKCPLCSRVFPSPSSLDQHLGDHSSESHFLCVDCGLAFGTEALLLAHRRAHTPNPLHSCPCGKTFVNLTKFLYHRRTHGVGGVPLPTTPVPPEEPVIGFPEPAPAETGEPEAPEPPVSEETSAGPAAPGTYRCLLCSREFGKALQLTRHQRFVHRLERRHKCSICGKMFKKKSHVRNHLRTHTGERPFPCPDCSKPFNSPANLARHRLTHTGERPYRCGDCGKAFTQSSTLRQHRLVHAQHFPYRCQECGVRFHRPYRLLMHRYHHTGEYPYKCRECPRSFLLRRLLEVHQLVVHAGRQPHRCPSCGAAFPSSLRLREHRCAAAAAQAPRRFECGTCGKKVGSAARLQAHEAAHAAAGPGEVLAKEPPAPRAPRATRAPVASPAALGSTATASPAAPARRRGLECSECKKLFSTETSLQVHRRIHTGERPYPCPDCGKAFRQSTHLKDHRRLHTGERPFACEVCGKAFAISMRLAEHRRIHTGERPYSCPDCGKSYRSFSNLWKHRKTHQQQHQAAVRQQLAEAEAAVGLAVMETAVEALPLVEAIEIYPLAEAEGVQISG

SEQ ID NO: 65 - protein, 1781 aa, Homo sapiens
MTTYRAIPSDGVDLAASCGARVGDVLPGPHTGDYAPLGFWAQNGSMSQPLGESPATATATATATTRPSPTTPAMPKMGVRARVADWPPKREALREHSNPSPSQDTDGTKATKMAHSMRSIQNGQPPTSTPASSGSKAFHRLSRRRSKDVEFQDGWPRSPGRAFLPLRHRSSSEITLSECDAEDAGEPRGARHTGALPLFREYGSTSSIDVQGMPEQSFFDILNEFRSEQPDARGCQALTELLRADPGPHLMGGGGGAKGDSHNGQPAKDSLLPLQPTKEKEKARKKPARGLGGGDTVDSSIFRKLRSSKPEGEAGRSPGEADEGRSPPEASRPWVCQKSFAHFDVQSMLFDLNEAAANRVSVSQRRNTTTGASAASAASAMASLTASRAHSLGGLDPAFTSTEDLNCKENLEQDLGDDNSNDLLLSCPHFRNEIGGECERNVSFSRASVGSPSSGEGHLAEPALSAYRTNASISVLEVPKEQQRTQSRPRQYSIEHVDLGARYYQDYFVGKEHANYFGVDEKLGPVAVSIKREKLEDHKEHGPQYQYRIIFRTRELITLRGSILEDATPTATKHGTGRGLPLKDALEYVIPELNIHCLRLALNTPKVTEQLLKLDEQGLCRKHKVGILYCKAGQSSEEEMYNNEEAGPAFEEFLSLIGEKVCLKGFTKYAAQLDVKTDSTGTHSLYTMYQDYEIMFHVSTLLPYTPNNRQQLLRKRHIGNDIVTIIFQEPGALPFTPKNIRSHFQHVFIIVRVHNPCTDNVCYSMAVTRSKDAPPFGPPIPSGTTFRKSDVFRDFLLAKVINAENAAHKSDKFHTMATRTRQEYLKDLAENCVSNTPIDSTGKFNLISLTSKKKEKTKARAGAEQHSAGAIAWRVVAQDYAQGVEIDCILGISNEFVVLLDLRTKEVVFNCYCGDVIGWTPDSSTLKIFYGRGDHIFLQATEGSVEDIREIVQRLKVMTSGWETVDMTLRRNGLGQLGFHVKYDGTVAEVEDYGFAWQAGLRQGSRLVEICKVAVVTLTHDQMIDLLRTSVTVKVVIIPPFEDGTPRRGWPETYDMNTSEPKTEQESITPGGRPPYRSNAPWQWSGPASHNSLPASKWATPTTPGHAQSLSRPLKQTPIVPFRESQPLHSKRPVSFPETPYTVSPAGADRVPPYRQPSGSFSTPGSATYVRYKPSPERYTAAPHPLLSLDPHFSHDGTSSGDSSSGGLTSQESTMERQKPEPLWHVPAQARLSAIAGSSGNKHPSRQDAAGKDSPNRHSKGEPQYSSHSSSNTLSSNASSSHSDDRWFDPLDPLEPEQDPLSKGGSSDSGIDTTLYTSSPSCMSLAKAPRPAKPHKPPGSMGLCGGGREAAGRSHHADRRREVSPAPAVAGQSKGYRPKLYSSGSSTPTGLAGGSRDPPRQPSDMGSRVGYPAQVYKTASAETPRPSQLAQPSPFQLSASVPKSFFSKQPVRNKHPTGWKRTEEPPPRPLPFSDPKKQVDTNTKNVFGQPRLRASLRDLRSPRKNYKSTIEDDLKKLIIMDNLGPEQERDTGQSPQKGLQRTLSDESLCSGRREPSFASPAGLEPGLPSDVLFTSTCAFPSSTLPARRQHQHPHPPVGPGATPAAGSGFPEKKSTISASELSLADGRDRPLRRLDPGLMPLPDTAAGLEWSSLVNAAKAYEVQRAVSLFSLNDPALSPDIPPAHSPVHSHLSLERGPPTPRTTPTMSEEPPLDLTGKVYQLEVMLKQLHTDLQKEKQDKVVLQSEVASLRQNNQRLQEESQAASEQLRKFAEIFCREKKEL

SEQ ID NO: 66 - protein, 365 aa, Homo sapiens
MDRAALLGLARLCALWAALLVLFPYGAQGNWMWLGIASFGVPEKLGCANLPLNSRQKELCKRKPYLLPSIREGARLGIQECGSQFRHERWNCMITAAATTAPMGASPLFGYELSSGTKETAFIYAVMAAGLVHSVTRSCSAGNMTECSCDTTLQNGGSASEGWHWGGCSDDVQYGMWFSRKFLDFPIGNTTGKENKVLLAMNLHNNEAGRQAVAKLMSVDCRCHGVSGSCAVKTCWKTMSSFEKIGHLLKDKYENSIQISDKTKRKMRRREKDQRKIPIHKDDLLYVNKSPNYCVEDKKLGIPGTQGRECNRTSEGADGCNLLCCGRGYNTHVVRHVERCECKFIWCCYVRCRRCESMTDVHTCK

SEQ ID NO: 67 - protein, 419 aa, Homo sapiens
MAMRLILFFGALFGHIYCLETFVGDQVLEIVPSNEEQIKNLLQLEAQEHLQLDFWKSPTTPGETAHVRVPFVNVQAVKVFLESQGIAYSIMIEDVQVLLDKENEEMLFNRRRERSGNFNFGAYHTLEEISQEMDNLVAEHPGLVSKVNIGSSFENRPMNVLKFSTGGDKPAIWLDAGIHAREWVTQATALWTANKIVSDYGKDPSITSILDALDIFLLPVTNPDGYVFSQTKNRMWRKTRSKVSGSLCVGVDPNRNWDAGFGGPGASSNPCSDSYHGPSANSEVEVKSIVDFIKSHGKVKAFITLHSYSQLLMFPYGYKCTKLDDFDELSEVAQKAAQSLRSLHGTKYKVGPICSVIYQASGGSIDWSYDYGIKYSFAFELRDTGRYGFLLPARQILPTAEETWLGLKAIMEHVRDHPY

SEQ ID NO: 68 - protein, 162 aa, Homo sapiens
MGLETEKADVQLFMDDDSYSHHSGLEYADPEKFADSDQDRDPHRLNSHLKLGFEDVIAEPVTTHSFDKVWICSHALFEISKYVMYKFLTVFLAIPLAFIAGILFATLSCLHIWILMPFVKTCLMVLPSVQTIWKSVTDVIIAPLCTSVGRCFSSVSLQLSQD

SEQ ID NO: 69 - protein, 465 aa, Homo sapiens
MTGRAMDPLPAAAVGAAAEAEADEEADPPASDLPTPQAIEPQAIVQQVPAPSRMQMPQGNPLLLSHTLQELLARDTVQVELIPEKKGLFLKHVEYEVSSQRFKSSVYRRYNDFVVFQEMLLHKFPYRMVPALPPKRMLGADREFIEARRRALKRFVNLVARHPLFSEDVVLKLFLSFSGSDVQNKLKESAQCVGDEFLNCKLATRAKDFLPADIQAQFAISRELIRNIYNSFHKLRDRAERIASRAIDNAADLLIFGKELSAIGSDTTPLPSWAALNSSTWGSLKQALKGLSVEFALLADKAAQQGKQEENDVVEKLNLFLDLLQSYKDLCERHEKGVLHKHQRALHKYSLMKRQMMSATAQNREPESVEQLESRIVEQENAIQTMELRNYFSLYCLHQETQLIHVYLPLTSHILRAFVNSQIQGHKEMSKVWNDLRPKLSCLFAGPHSTLTPPCSPPEDGLCPH

SEQ ID NO: 70 - protein, 466 aa, Homo sapiens
MAMDVTRSQAQTALTLVEQILAEFQLQEEDLKKVMRRMQKEMDRGLRLETHEEASVKMLPTYVRSTPEGSEVGDFLSLDLGGTNFRVMLVKVGEGEEGQWSVKTKHQMYSIPEDAMTGTAEMLFDYISECISDFLDKHQMKHKKLPLGFTFSFPVRHEDIDKGILLNWTKGFKASGAEGNNVVGLLRDAIKRRGDFEMDVVAMVNDTVATMISCYYEDHQCEVGMIVGTGCNACYMEEMQNVELVEGDEGRMCVNTEWGAFGDSGELDEFLLEYDRLVDESSANPGQQLYEKLIGGKYMGELVRLVLLRLVDENLLFHGEASEQLRTRGAFETRFVSQVESDTGDRKQIYNILSTLGLRPSTTDCDIVRRACESVSTRAAHMCSAGLAGVINRMRESRSEDVMRITVGVDGSVYKLHPSFKERFHASVRRLTPSCEITFIESEEGSGRGAALVSAVACKKACMLGQ

SEQ ID NO: 71 - protein, 1676 aa, Homo sapiens
MGLLGILCFLIFLGKTWGQEQTYVISAPKIFRVGASENIVIQVYGYTEAFDATISIKSYPDKKFSYSSGHVHLSSENKFQNSAILTIQPKQLPGGQNPVSYVYLEVVSKHFSKSKRMPITYDNGFLFIHTDKPVYTPDQSVKVRVYSLNDDLKPAKRETVLTFIDPEGSEVDMVEEIDHIGIISFPDFKIPSNPRYGMWTIKAKYKEDFSTTGTAYFEVKEYVLPHFSVSIEPEYNFIGYKNFKNFEITIKARYFYNKVVTEADVYITFGIREDLKDDQKEMMQTAMQNTMLINGIAQVTFDSETAVKELSYYSLEDLNNKYLYIAVTVIESTGGFSEEAEIPGIKYVLSPYKLNLVATPLFLKPGIPYPIKVQVKDSLDQLVGGVPVTLNAQTIDVNQETSDLDPSKSVTRVDDGVASFVLNLPSGVTVLEFNVKTDAPDLPEENQAREGYRAIAYSSLSQSYLYIDWTDNHKALLVGEHLNIIVTPKSPYIDKITHYNYLILSKGKIIHFGTREKFSDASYQSINIPVTQNMVPSSRLLVYYIVTGEQTAELVSDSVWLNIEEKCGNQLQVHLSPDADAYSPGQTVSLNMATGMDSWVALAAVDSAVYGVQRGAKKPLERVFQFLEKSDLGCGAGGGLNNANVFHLAGLTFLTNANADDSQENDEPCKEILRPRRTLQKKIEEIAAKYKHSVVKKCCYDGACVNNDETCEQRAARISLGPRCIKAFTECCVVASQLRANISHKDMQLGRLHMKTLLPVSKPEIRSYFPESWLWEVHLVPRRKQLQFALPDSLTTWEIQGVGISNTGICVADTVKAKVFKDVFLEMNIPYSVVRGEQIQLKGTVYNYRTSGMQFCVKMSAVEGICTSESPVIDHQGTKSSKCVRQKVEGSSSHLVTFTVLPLEIGLHNINFSLETWFGKEILVKTLRVVPEGVKRESYSGVTLDPRGIYGTISRRKEFPYRIPLDLVPKTEIKRILSVKGLLVGEILSAVLSQEGINILTHLPKGSAEAELMSVVPVFYVFHYLETGNHWNIFHSDPLIEKQKLKKKLKEGMLSIMSYRNADYSYSVWKGGSASTWLTAFALRVLGQVNKYVEQNQNSICNSLLWLVENYQLDNGSFKENSQYQPIKLQGTLPVEARENSLYLTAFTVIGIRKAFDICPLVKIDTALIKADNFLLENTLPAQSTFTLAISAYALSLGDKTHPQFRSIVSALKREALVKGNPPIYRFWKDNLQHKDSSVPNTGTARMVETTAYALLTSLNLKDINYVNPVIKWLSEEQRYGGGFYSTQDTINAIEGLTEYSLLVKQLRLSMDIDVSYKHKGALHNYKMTDKNFLGRPVEVLLNDDLIVSTGFGSGLATVHVTTVVHKTSTSEEVCSFYLKIDTQDIEASHYRGYGNSDYKRIVACASYKPSREESSSGSSHAVMDISLPTGISANEEDLKALVEGVDQLFTDYQIKDGHVILQLNSIPSSDFLCVRFRIFELFEVGFLSPATFTVYEYHRPDKQCTMFYSTSNIKIQKVCEGAACKCVEADCGQMQEELDLTISAETRKQTACKPEIAYAYKVSITSITVENVFVKYKATLLDIYKTGEAVAEKDSEITFIKKVTCTNAELVKGRQYLIMGKEALQIKYNFSFRYIYPLDSLTWIEYWPRDTTCSSCQAFLANLDEFAEDIFLNGC

SEQ ID NO: 72 - protein, 3354 aa, Homo sapiens
MGRHVATSCHVAWLLVLISGCWGQVNRLPFFTNHFFDTYLLISEDTPVGSSVTQLLAQDMDNDPLVFGVSGEEASRFFAVEPDTGVVWLRQPLDRETKSEFTVEFSVSDHQGVITRKVNIQVGDVNDNAPTFHNQPYSVRIPENTPVGTPIFIVNATDPDLGAGGSVLYSFQPPSQFFAIDSARGIVTVIRELDYETTQAYQLTVNATDQDKTRPLSTLANLAIIITDVQDMDPIFINLPYSTNIYEHSPPGTTVRIITAIDQDKGRPRGIGYTIVSGNTNSIFALDYISGVLTLNGLLDRENPLYSHGFILTVKGTELNDDRTPSDATVTTTFNILVIDINDNAPEFNSSEYSVAITELAQVGFALPLFIQVVDKDENLGLNSMFEVYLVGNNSHHFIISPTSVQGKADIRIRVAIPLDYETVDRYDFDLFANESVPDHVGYAKVKITLINENDNRPIFSQPLYNISLYENVTVGTSVLTVLATDNDAGTFGEVSYFFSDDPDRFSLDKDTGLIMLIARLDYELIQRFTLTIIARDGGGEETTGRVRINVLDVNDNVPTFQKDAYVGALRENEPSVTQLVRLRATDEDSPPNNQITYSIVSASAFGSYFDISLYEGYGVISVSRPLDYEQISNGLIYLTVMAMDAGNPPLNSTVPVTIEVFDENDNPPTFSKPAYFVSVVENIMAGATVLFLNATDLDRSREYGQESIIYSLEGSTQFRINARSGEITTTSLLDRETKSEYILIVRAVDGGVGHNQKTGIATVNITLLDINDNHPTWKDAPYYINLVEMTPPDSDVTTVVAVDPDLGENGTLVYSIQPPNKFYSLNSTTGKIRTTHAMLDRENPDPHEAELMRKIVVSVTDCGRPPLKATSSATVFVNLLDLNDNDPTFQNLPFVAEVLEGIPAGVSIYQVVAIDLDEGLNGLVSYRMPVGMPRMDFLINSSSGVVVTTTELDRERIAEYQLRVVASDAGTPTKSSTSTLTIHVLDVNDETPTFFPAVYNVSVSEDVPREFRVVWLNCTDNDVGLNAELSYFITGGNVDGKFSVGYRDAVVRTVVGLDRETTAAYMLILEAIDNGPVGKRHTGTATVFVTVLDVNDNRPIFLQSSYEASVPEDIPEGHSILQLKATDADEGEFGRVWYRILHGNHGNNFRIHVSNGLLMRGPRPLDRERNSSHVLIVEAYNHDLGPMRSSVRVIVYVEDINDEAPVFTQQQYSRLGLRETAGIGTSVIVVQATDRDSGDGGLVNYRILSGAEGKFEIDESTGLIITVNYLDYETKTSYMMNVSATDQAPPFNQGFCSVYITLLNELDEAVQFSNASYEAAILENLALGTEIVRVQAYSIDNLNQITYRFNAYTSTQAKALFKIDAITGVITVQGLVDREKGDFYTLTVVADDGGPKVDSTVKVYITVLDENDNSPRFDFTSDSAVSIPEDCPVGQRVATVKAWDPDAGSNGQVVFSLASGNIAGAFEIVTTNDSIGEVFVARPLDREELDHYILQVVASDRGTPPRKKDHILQVTILDINDNPPVIESPFGYNVSVNENVGGGTAVVQVRATDRDIGINSVLSYYITEGNKDMAFRMDRISGEIATRPAPPDRERQSFYHLVATVEDEGTPTLSATTHVYVTIVDENDNAPMFQQPHYEVLLDEGPDTLNTSLITIQALDLDEGPNGTVTYAIVAGNIVNTFRIDRHMGVITAAKELDYEISHGRYTLIVTATDQCPILSHRLTSTTTVLVNVNDINDNVPTFPRDYEGPFEVTEGQPGPRVWTFLAHDRDSGPNGQVEYSIMDGDPLGEFVISPVEGVLRVRKDVELDRETIAFYNLTICARDRGMPPLSSTMLVGIRVLDINDNDPVLLNLPMNITISENSPVSSFVAHVLASDADSGCNARLTFNITAGNRERAFFINATTGIVTVNRPLDRERIPEYKLTISVKDNPENPRIARRDYDLLLIFLSDENDNHPLFTKSTYQAEVMENSPAGTPLTVLNGPILALDADQDIYAVVTYQLLGAQSGLFDINSSTGVVTVRSGVIIDREAFSPPILELLLLAEDIGLLNSTAHLLITILDDNDNRPTFSPATLTVHLLENCPPGFSVLQVTATDEDSGLNGELVYRIEAGAQDRFLIHLVTGVIRVGNATIDREEQESYRLTVVATDRGTVPLSGTAIVTILIDDINDSRPEFLNPIQTVSVLESAEPGTVIANITAIDHDLNPKLEYHIVGIVAKDDTDRLVPNQEDAFAVNINTGSVMVKSPMNRELVATYEVTLSVIDNASDLPERSVSVPNAKLTVNVLDVNDNTPQFKPFGITYYMERILEGATPGTTLIAVAAVDPDKGLNGLVTYTLLDLVPPGYVQLEDSSAGKVIANRTVDYEEVHWLNFTVRASDNGSPPRAAEIPVYLEIVDINDNNPIFDQPSYQEAVFEDVPVGTIILTVTATDADSGNFALIEYSLGDGESKFAINPTTGDIYVLSSLDREKKDHYILTALAKDNPGDVASNRRENSVQVVIQVLDVNDCRPQFSKPQFSTSVYENEPAGTSVITMMATDQDEGPNGELTYSLEGPGVEAFHVDMDSGLVTTQRPLQSYEKFSLTVVATDGGEPPLWGTTMLLVEVIDVNDNRPVFVRPPNGTILHIREEIPLRSNVYEVYATDKDEGLNGAVRYSFLKTAGNRDWEFFIIDPISGLIQTAQRLDRESQAVYSLILVASDLGQPVPYETMQPLQVALEDIDDNEPLFVRPPKGSPQYQLLTVPEHSPRGTLVGNVTGAVDADEGPNAIVYYFIAAGNEEKNFHLQPDGCLLVLRDLDREREAIFSFIVKASSNRSWTPPRGPSPTLDLVADLTLQEVRVVLEDINDQPPRFTKAEYTAGVATDAKVGSELIQVLALDADIGNNSLVFYSILAIHYFRALANDSEDVGQVFTMGSMDGILRTFDLFMAYSPGYFVVDIVARDLAGHNDTAIIGIYILRDDQRVKIVINEIPDRVRGFEEEFIHLLSNITGAIVNTDNVQFHVDKKGRVNFAQTELLIHVVNRDTNRILDVDRVIQMIDENKEQLRNLFRNYNVLDVQPAISVRLPDDMSALQMAIIVLAILLFLAAMLFVLMNWYYRTVHKRKLKAIVAGSAGNRGFIDIMDMPNTNKYSFDGANPVWLDPFCRNLELAAQAEHEDDLPENLSEIADLWNSPTRTHGTFGREPAAVKPDDDRYLRAAIQEYDNIAKLGQIIREGPIKGSLLKVVLEDYLRLKKLFAQRMVQKASSCHSSISELIQTELDEEPGDHSPGQGSLRFRHKPPVELKGPDGIHVVHGSTGTLLATDLNSLPEEDQKGLGRSLETLTAAEATAFERNARTESAKSTPLHKLRDVIMETPLEITEL

SEQ ID NO: 73 - protein, 368 aa, Homo sapiens
MQPGSSRCEEETPSLLWGLDPVFLAFAKLYIRDILDMKESRQVPGVFLYNGHPIKQVDVLGTVIGVRERDAFYSYGVDDSTGVINCICWKKLNTESVSAAPSAARELSLTSQLKKLQETIEQKTKIEIGDTIRVRGSIRTYREEREIHATTYYKVDDPVWNIQIARMLELPTIYRKVYDQPFHSSALEKEEALSNPGALDLPSLTSLLSEKAKEFLMENRVQSFYQQELEMVESLLSLANQPVIHSASSDQVNFKKDTTSKAIHSIFKNAIQLLQEKGLVFQKDDGFDNLYYVTREDKDLHRKIHRIIQQDCQKPNHMEKGCHFLHILACARLSIRPGLSEAVLQQVLELLEDQSDIVSTMEHYYTAF

SEQ ID NO: 74 - protein, 374 aa, Homo sapiens
MGLPRGSFFWLLLLLTAACSGLLFALYFSAVQRYPGPAAGARDTTSFEAFFQSKASNSWTGKGQACRHLLHLAIQRHPHFRGLFNLSIPVLLWGDLFTPALWDRLSQHKAPYGWRGLSHQVIASTLSLLNGSESAKLFAPPRDTPPKCIRCAVVGNGGILNGSRQGPNIDAHDYVFRLNGAVIKGFERDVGTKTSFYGFTVNTMKNSLVSYWNLGFTSVPQGQDLQYIFIPSDIRDYVMLRSAILGVPVPEGLDKGDRPHAYFGPEASASKFKLLHPDFISYLTERFLKSKLINTHFGDLYMPSTGALMLLTALHTCDQVSAYGFITSNYWKFSDHYFERKMKPLIFYANHDLSLEAALWRDLHKAGILQLYQR

SEQ ID NO: 75 - protein, 662 aa, Homo sapiens
MRGAGPSPRQSPRTLRPDPGPAMSFFRRKVKGKEQEKTSDVKSIKASISVHSPQKSTKNHALLEAAGPSHVAINAISANMDSFSSSRTATLKKQPSHMEAAHFGDLGRSCLDYQTQETKSSLSKTLEQVLHDTIVLPYFIQFMELRRMEHLVKFWLEAESFHSTTWSRIRAHSLNTVKQSSLAEPVSPSKKHETTASFLTDSLDKRLEDSGSAQLFMTHSEGIDLNNRTNSTQNHLLLSQECDSAHSLRLEMARAGTHQVSMETQESSSTLTVASRNSPASPLKELSGKLMKSIEQDAVNTFTKYISPDAAKPIPITEAMRNDIIARICGEDGQVDPNCFVLAQSIVFSAMEQEHFSEFLRSHHFCKYQIEVLTSGTVYLADILFCESALFYFSEYMEKEDAVNILQFWLAADNFQSQLAAKKGQYDGQEAQNDAMILYDKYFSLQATHPLGFDDVVRLEIESNICREGGPLPNCFTTPLRQAWTTMEKVFLPGFLSSNLYYKYLNDLIHSVRGDEFLGGNVSLTAPGSVGPPDESHPGSSDSSASQSSVKKASIKILKNFDEAIIVDAASLDPESLYQRTYAGKMTFGRVSDLGQFIRESEPEPDVRKSKGSMFSQAMKKWVQGNTDEAQEELAWKIAKMIVSDIMQQAQYDQPLEKSTKL

SEQ ID NO: 76 - protein, 448 aa, Homo sapiens
MTSSCCVTNNLQASLKSCPRPASVCSSGVNCRPELCLGYVCQPMACLPSVCLPTTFRPASCLSKTYLSSSCQAASGISGSMGPGSWYSEGAFNGNEKETMQFLNDRLASYLTRVRQLEQENAELESRIQEASHSQVLTMTPDYQSHFRTIEELQQKILCTKAENARMVVNIDNAKLAADDFRAKYEAELAMRQLVEADINGLRRILDDLTLCKADLEAQVESLKEELMCLKKNHEEEVGSLRCQLGDRLNIEVDAAPPVDLTRVLEEMRCQYEAMVEANRRDVEEWFNMQMEELNQQVATSSEQLQNYQSDIIDLRRTVNTLEIELQAQHSLRDSLENTLTESEARYSSQLAQMQCMITNVEAQLAEIRADLERQNQEYQVLLDVRARLEGEINTYRSLLENEDCKLPCNPCSTPSCTTCVPSPCVPRTVCVPRTVGMPCSPCPQGRY

SEQ ID NO: 77 - protein, 366 aa, Homo sapiens
MAELQQLQEFEIPTGREALRGNHSALLRVADYCEDNYVQATDKRKALEETMAFTTQALASVAYQVGNLAGHTLRMLDLQGAALRQVEARVSTLGQMVNMHMEKVARREIGTLATVQRLPPGQKVIAPENLPPLTPYCRRPLNFGCLDDIGHGIKDLSTQLSRTGTLSRKSIKAPATPASATLGRPPRIPEPVHLPVVPDGRLSAASSAFSLASAGSAEGVGGAPTPKGQAAPPAPPLPSSLDPPPPPAAVEVFQRPPTLEELSPPPPDEELPLPLDLPPPPPLDGDELGLPPPPPGFGPDEPSWVPASYLEKVVTLYPYTSQKDNELSFSEGTVICVTRRYSDGWCEGVSSEGTGFFPGNYVEPSC

SEQ ID NO: 78 - protein, 478 aa, Homo sapiens
MAPLRPLLILALLAWVALADQESCKGRCTEGFNVDKKCQCDELCSYYQSCCTDYTAECKPQVTRGDVFTMPEDEYTVYDDGEEKNNATVHEQVGGPSLTSDLQAQSKGNPEQTPVLKPEEEAPAPEVGASKPEGIDSRPETLHPGRPQPPAEEELCSGKPFDAFTDLKNGSLFAFRGQYCYELDEKAVRPGYPKLIRDVWGIEGPIDAAFTRINCQGKTYLFKGSQYWRFEDGVLDPDYPRNISDGFDGIPDNVDAALALPAHSYSGRERVYFFKGKQYWEYQFQHQPSQEECEGSSLSAVFEHFAMMQRDSWEDIFELLFWGRTSAGTRQPQFISRDWHGVPGQVDAAMAGRIYISGMAPRPSLAKKQRFRHRNRKGYRSQRGHSRGRNQNSRRPSRATWLSLFSSEESNLGANNYDDYRMDWLVPATCEPIQSVFFFSGDKYYRVNLRTRRVDTVDPPYPRSIAQYWLGCPAPGHL

SEQ ID NO: 79 - protein, 317 aa, Homo sapiens
MKTALILLSILGMACAFSMKNLHRRVKIEDSEENGVFKYRPRYYLYKHAYFYPHLKRFPVQGSSDSSEENGDDSSEEEEEEEETSNEGENNEESNEDEDSEAENTTLSATTLGYGEDATPGTGYTGLAAIQLPKKAGDITNKATKEKESDEEEEEEEEGNENEESEAEVDENEQGINGTSTNSTEAENGNGSSGGDNGEEGEEESVTGANAEDTTETGRQGKGTSKTTTSPNGGFEPTTPPQVYRTTSPPFGKTTTVEYEGEYEYTGANEYDNGYEIYESENGEPRGDNYRAYEDEYSYFKGQGYDGYDGQNYYHHQ

SEQ ID NO: 80 - protein, 890 aa, Homo sapiens
MDSNTAPLGPSCPQPPPAPQPQARSRLNATASLEQERSERPRAPGPQAGPGPGVRDAAAPAEPQAQHTRSRERADGTGPTKGDMEIPFEEVLERAKAGDPKAQTEVGKHYLQLAGDTDEELNSCTAVDWLVLAAKQGRREAVKLLRRCLADRRGITSENEREVRQLSSETDLERAVRKAALVMYWKLNPKKKKQVAVAELLENVGQVNEHDGGAQPGPVPKSLQKQRRMLERLVSSESKNYIALDDFVEITKKYAKGVIPSSLFLQDDEDDDELAGKSPEDLPLRLKVVKYPLHAIMEIKEYLIDMASRAGMHWLSTIIPTHHINALIFFFIVSNLTIDFFAFFIPLVIFYLSFISMVICTLKVFQDSKAWENFRTLTDLLLRFEPNLDVEQAEVNFGWNHLEPYAHFLLSVFFVIFSFPIASKDCIPCSELAVITGFFTVTSYLSLSTHAEPYTRRALATEVTAGLLSLLPSMPLNWPYLKVLGQTFITVPVGHLVVLNVSVPCLLYVYLLYLFFRMAQLRNFKGTYCYLVPYLVCFMWCELSVVILLESTGLGLLRASIGYFLFLFALPILVAGLALVGVLQFARWFTSLELTKIAVTVAVCSVPLLLRWWTKASFSVVGMVKSLTRSSMVKLILVWLTAIVLFCWFYVYRSEGMKVYNSTLTWQQYGALCGPRAWKETNMARTQILCSHLEGHRVTWTGRFKYVRVTDIDNSAESAINMLPFFIGDWMRCLYGEAYPACSPGNTSTAEEELCRLKLLAKHPCHIKKFDRYKFEITVGMPFSSGADGSRSREEDDVTKDIVLRASSEFKSVLLSLRQGSLIEFSTILEGRLGSKWPVFELKAISCLNCMAQLSPTRRHVKIEHDWRSTVHGAVKFAFDFFFFPFLSAA

SEQ ID NO: 81 - protein, 482 aa, Homo sapiens
MLFEGKVNPQTQSLLAECGEWTRRSLHLRVLGRQLILPTDKGVQHFQGSTPASAVHRPPLSACGHSSNIRELCISGSQIVPAALSASALPGPDDTGVADLTARSSLEEEVYHVDGKIEEYFAFDRKEDDDECLEQKPAQPGRKWRKLGLPPVSPRDCVKDAVAAEVFDHVWTNMVELLEELIRKHWETTLTEGKKQRETLKVAGNRFPHVLVPHAHADGASGPPSGHAEAHGISLASRLNPPQIHHFSSSFYSDMNGVMTIQAKPLQRRPAYFADRTQNEKEDKASGGGAGALSSAPHRLGRASDTHGLSPSAKKTPVPWRLPSLASDSQRLKTPNIYSDEVLRGTKLPTGVDHMASPLVQTSRSRFPPLVTETRGQNTAVPGCRLVSYRGRHLQNRVLSAMPDGTERSRLRERTATLERLSRPSTTHTFRQSDTPRKSSLTQMEFAAHTWTGQSILTGSQYVPKSFQRTTLTFKRRFQVTS

SEQ ID NO: 82 - protein, 426 aa, Homo sapiens
MAIAQLATEYVFSDFLLKEPTEPKFKGLRLELAVDKMVTCIAVGLPLLLISLAFAQEISIGTQISCFSPSSFSWRQAAFVDSYCWAAVQQKNSLQSESGNLPLWLHKFFPYILLLFAILLYLPPLFWRFAAAPHICSDLKFIMEELDKVYNRAIKAAKSARDLDMRDGACSVPGVTENLGQSLWEVSESHFKYPIVEQYLKTKKNSNNLIIKYISCRLLTLIIILLACIYLGYYFSLSSLSDEFVCSIKSGILRNDSTVPDQFQCKLIAVGIFQLLSVINLVVYVLLAPVVVYTLFVPFRQKTDVLKVYEILPTFDVLHFKSEGYNDLSLYNLFLEENISEVKSYKCLKVLENIKSSGQGIDPMLLLTNLGMIKMDVVDGKTPMSAEMREEQGNQTAELQGMNIDSETKANNGEKNARQRLLDSSC

SEQ ID NO: 83 - protein, 366 aa, Homo sapiens
MASMAAVLTWALALLSAFSATQARKGFWDYFSQTSGDKGRVEQIHQQKMAREPATLKDSLEQDLNNMNKFLEKLRPLSGSEAPRLPQDPVGMRRQLQEELEEVKARLQPYMAEAHELVGWNLEGLRQQLKPYTMDLMEQVALRVQELQEQLRVVGEDTKAQLLGGVDEAWALLQGLQSRVVHHTGRFKELFHPYAESLVSGIGRHVQELHRSVAPHAPASPARLSRCVQVLSRKLTLKAKALHARIQQNLDQLREELSRAFAGTGTEEGAGPDPQMLSEEVRQRLQAFRQDTYLQIAAFTRAIDQETEEVQQQLAPPPPGHSAFAPEFQQTDSGKVLSKLQARLDDLWEDITHSLHDQGHSHLGDP

SEQ ID NO: 84 - protein, 99 aa, Homo sapiens
MQPRVLLVVALLALLASARASEAEDASLLSFMQGYMKHATKTAKDALSSVQESQVAQQARGWVTDGFSSLKDYWSTVKDKFSEFWDLDPEVRPTSAVAA

SEQ ID NO: 85 - protein, 198 aa, Homo sapiens
MSNVRVSNGSPSLERMDARQAEHPKPSACRNLFGPVDHEELTRDLEKHCRDMEEASQRKWNFDFQNHKPLEGKYEWQEVEKGSLPEFYYRPPRPPKGACKVPAQESQDVSGSRPAAPLIGAPANSEDTHLVDPKTDPSDSQTGLAEQCAGIRKRPATDDSSTQNKRANRTEENVSDGSPNAGSVEQTPKKPGLRRRQT

SEQ ID NO: 86 - protein, 669 aa, Homo sapiens
MEGNKLEEQDSSPPQSTPGLMKGNKREEQGLGPEPAAPQQPTAEEEALIEFHRSYRELFEFFCNNTTIHGAIRLVCSQHNRMKTAFWAVLWLCTFGMMYWQFGLLFGEYFSYPVSLNINLNSDKLVFPAVTICTLNPYRYPEIKEELEELDRITEQTLFDLYKYSSFTTLVAGSRSRRDLRGTLPHPLQRLRVPPPPHGARRARSVASSLRDNNPQVDWKDWKIGFQLCNQNKSDCFYQTYSSGVDAVREWYRFHYINILSRLPETLPSLEEDTLGNFIFACRFNQVSCNQANYSHFHHPMYGNCYTFNDKNNSNLWMSSMPGINNGLSLMLRAEQNDFIPLLSTVTGARVMVHGQDEPAFMDDGGFNLRPGVETSISMRKETLDRLGGDYGDCTKNGSDVPVENLYPSKYTQQVCIHSCFQESMIKECGCAYIFYPRPQNVEYCDYRKHSSWGYCYYKLQVDFSSDHLGCFTKCRKPCSVTSYQLSAGYSRWPSVTSQEWVFQMLSRQNNYTVNNKRNGVAKVNIFFKELNYKTNSESPSVTMVTLLSNLGSQWSLWFGSSVLSVVEMAELVFDLLVIMFLMLLRRFRSRYWSPGRGGRGAQEVASTLASSPPSHFCPHPMSLSLSQPGPAPSPALTAPPPAYATLGPRPSPGGSAGASSSTCPLGGP

SEQ ID NO: 87 - protein, 1087 aa, Homo sapiens
MDLYSTPAAALDRFVARRLQPRKEFVEKARRALGALAAALRERGGRLGAAAPRVLKTVKGGSSGRGTALKGGCDSELVIFLDCFKSYVDQRARRAEILSEMRASLESWWQNPVPGLRLTFPEQSVPGALQFRLTSVDLEDWMDVSLVPAFNVLGQAGSGVKPKPQVYSTLLNSGCQGGEHAACFTELRRNFVNIRPAKLKNLILLVKHWYHQVCLQGLWKETLPPVYALELLTIFAWEQGCKKDAFSLAEGLRTVLGLIQQHQHLCVFWTVNYGFEDPAVGQFLQRQLKRPRPVILDPADPTWDLGNGAAWHWDLLAQEAASCYDHPCFLRGMGDPVQSWKGPGLPRAGCSGLGHPIQLDPNQKTPENSKSLNAVYPRAGSKPPSCPAPGPTGAASIVPSVPGMALDLSQIPTKELDRFIQDHLKPSPQFQEQVKKAIDIILRCLHENCVHKASRVSKGGSFGRGTDLRDGCDVELIIFLNCFTDYKDQGPRRAEILDEMRAQLESWWQDQVPSLSLQFPEQNVPEALQFQLVSTALKSWTDVSLLPAFDAVGQLSSGTKPNPQVYSRLLTSGCQEGEHKACFAELRRNFMNIRPVKLKNLILLVKHWYRQVAAQNKGKGPAPASLPPAYALELLTIFAWEQGCRQDCFNMAQGFRTVLGLVQQHQQLCVYWTVNYSTEDPAMRMHLLGQLRKPRPLVLDPADPTWNVGHGSWELLAQEAAALGMQACFLSRDGTSVQPWDVMPALLYQTPAGDLDKFISEFLQPNRQFLAQVNKAVDTICSFLKENCFRNSPIKVIKVVKGGSSAKGTALRGRSDADLVVFLSCFSQFTEQGNKRAEIISEIRAQLEACQQERQFEVKFEVSKWENPRVLSFSLTSQTMLDQSVDFDVLPAFDALGQLVSGSRPSSQVYVDLIHSYSNAGEYSTCFTELQRDFIISRPTKLKSLIRLVKHWYQQCTKISKGRGSLPPQHGLELLTVYAWEQGGKDSQFNMAEGFRTVLELVTQYRQLCIYWTINYNAKDKTVGDFLKQQLQKPRPIILDPADPTGNLGHNARWDLLAKEAAACTSALCCMGRNGIPIQPWPVKAAV

SEQ ID NO: 88 - protein, 340 aa, Homo sapiens [sequence omitted]

SEQ ID NO: 89 - protein, 869 aa, Homo sapiens
MGRSNSRSHSSRSKSRSQSSSRSRSRSHSRKKRYRSRSRTYSRSRSRDRMYSRDYRRDYRNNRGMRRPYGYRGRGRGYYQGGGGRYHRGGYRPVWNRRHSRSPRRGRSRSRSPKRRSVSSQRSRSRSRRSYRSSRSPRSSSSRSSSPYSKSPVSKRRGSQEKQTKKAEGEPQEESPLKSKSQEEPKDTFEHDPSESIDEFNKSSATSGDIWPGLSAYDNSPRSPHSPSPIATPPSQSSSCSDAPMLSTVHSAKNTPSQHSHSIQHSPERSGSGSVGNGSSRYSPSQNSPIHHIPSRRSPAKTIAPQNAPRDESRGRSSFYPDGGDQETAKTGKFLKRFTDEESRVFLLDRGNTRDKEASKEKGSEKGRAEGEWEDQEALDYFSDKESGKQKFNDSEGDDTEETEDYRQFRKSVLADQGKSFATASHRNTEEEGLKYKSKVSLKGNRESDGFREEKNYKLKETGYVVERPSTTKDKHKEEDKNSERITVKKETQSPEQVKSEKLKDLFDYSPPLHKNLDAREKSTFREESPLRIKMIASDSHRPEVKLKMAPVPLDDSNRPASLTKDRLLASTLVHSVKKEQEFRSIFDHIKLPQASKSTSESFIQHIVSLVHHVKEQYFKSAAMTLNERFTSYQKATEEHSTRQKSPEIHRRIDISPSTLRKHTRLAGEERVFKEENQKGDKKLRCDSADLRHDIDRRRKERSKERGDSKGSRESSGSRKQEKTPKDYKEYKSYKDDSKHKREQDHSRSSSSSASPSSPSSREEKESKKEREEEFKTHHEMKEYSGFAGVSRPRGTFHDDRDDGVDYWAKRGRGRGTFQRGRGRFNFKKSGSSPKWTHDKYQGDGIVEDEEETMENNEEKKDRRKEEKE

SEQ ID NO: 90 - protein, 710 aa, Homo sapiens
MGGKQRDEDDEAYGKPVKYDPSFRGPIKNRSCTDVICCVLFLLFILGYIVVGIVAWLYGDPRQVLYPRNSTGAYCGMGENKDKPYLLYFNIFSCILSSNIISVAENGLQCPTPQVCVSSCPEDPWTVGKNEFSQTVGEVFYTKNRNFCLPGVPWNMTVITSLQQELCPSFLLPSAPALGRCFPWTNVTPPALPGITNDTTIQQGISGLIDSLNARDISVKIFEDFAQSWYWILVALGVALVLSLLFILLLRLVAGPLVLVLILGVLGVLAYGIYYCWEEYRVLRDKGASISQLGFTTNLSAYQSVQETWLAALIVLAVLEAILLLMLIFLRQRIRIAIALLKEASKAVGQMMSTMFYPLVTFVLLLICIAYWAMTALYLATSGQPQYVLWASNISSPGCEKVPINTSCNPTAHLVNSSCPGLMCVFQGYSSKGLIQRSVFNLQIYGVLGLFWTLNWVLALGQCVLAGAFASFYWAFHKPQDIPTFPLISAFIRTLRYHTGSLAFGALILTLVQIARVILEYIDHKLRGVQNPVARCIMCCFKCCLWCLEKFIKFLNRNAYIMIAIYGKNFCVSAKNAFMLLMRNIVRVVVLDKVTDLLLFFGKLLVVGGVGVLSFFFFSGRIPGLGKDFKSPHLNYYWLPIMTSILGAYVIASGFFSVFGMCVDTLFLCFLEDLERNNGSLDRPYYMSKSLLKILGKKNEAPPDNKKRKK

SEQ ID NO: 91 - protein, 446 aa, Homo sapiens
MDSSAAPTNASNCTDALAYSSCSPAPSPGSWVNLSHLDGNLSDPCGPNRTDLGGRDSLCPPTGSPSMITAITIMALYSIVCVVGLFGNFLVMYVIVRYTKMKTATNIYIFNLALADALATSTLPFQSVNYLMGTWPFGTILCKIVISIDYYNMFTSIFTLCTMSVDRYIAVCHPVKALDFRTPRNAKIINVCNWILSSAIGLPVMFMATTKYRQGSIDCTLTFSHPTWYWENLLKICVFIFAFIMPVLIITVCYGLMILRLKSVRMLSGSKEKDRNLRRITRMVLVVVAVFIVCWTPIHIYVIIKALVTIPETTFQTVSWHFCIALGYTNSCLNPVLYAFLDENFKRCFREFCIPTSSNIEQQNSTRIRQNTRDHPSTANTVDRTNHQCLPIPSLSCWALEQGCLVVYPGPLQGPLVRYDLPAILHSSCLRGNTAPSPSGGAFLLS

SEQ ID NO: 92 - protein, 542 aa, Homo sapiens
MPLRDETLREVWASDSGHEEESLSPEAPRRPKQRPAPAQRLRKKRTEAPESPCPTGSKPRKPGAGRTGRPREEPSPDPAQARAPQTVYARFLRDPEAKKRDPRETFLVARAPDAEDEEEEEEEDEEDEEEEAEEKKEKILLPPKKPLREKSSADLKERRAKAQGPRGDLGSPDPPPKPLRVRNKEAPAGEGTKMRKTKKKGSGEADKDPSGSPASARKSPAAMFLVGEGSPDKKALKKKGTPKGARKEEEEEEEAATVIKKSNQKGKAKGKGKKKAKEERAPSPPVEVDEPREFVLRPAPQGRTVRCRLTRDKKGMDRGMYPSYFLHLDTEKKVFLLAGRKRKRSKTANYLISIDPTNLSRGGENFIGKLRSNLLGNRFTVFDNGQNPQRGYSTNVASLRQELAAVIYETNVLGFRGPRRMTVIIPGMSAENERVPIRPRNASDGLLVRWQNKTLESLIELHNKPPVWNDDSGSYTLNFQGRVTQASVKNFQIVHADDPDYIVLQFGRVAEDAFTLDYRYPLCALQAFAIALSSFDGKLACE

SEQ ID NO: 93 - protein, 1221 aa, Homo sapiens
MMFRSDRMWSCHWKWKPSPLLFLFALYIMCVPHSVWGCANCRVVLSNPSGTFTSPCYPNDYPNSQACMWTLRAPTGYIIQITFNDFDIEEAPNCIYDSLSLDNGESQTKFCGATAKGLSFNSSANEMHVSFSSDFSIQKKGFNASYIRVAVSLRNQKVILPQTSDAYQVSVAKSISIPELSAFTLCFEATKVGHEDSDWTAFSYSNASFTQLLSFGKAKSGYFLSISDSKCLLNNALPVKEKEDIFAESFEQLCLVWNNSLGSIGVNFKRNYETVPCDSTISKVIPGNGKLLLGSNQNEIVSLKGDIYNFRLWNFTMNAKILSNLSCNVKGNVVDWQNDFWNIPNLALKAESNLSCGSYLIPLPAAELASCADLGTLCQATVNSPSTTPPTVTTNMPVTNRIDKQRNDGIIYRISVVIQNILRHPEVKVQSKVAEWLNSTFQNWNYTVYVVNISFHLSAGEDKIKVKRSLEDEPRLVLWALLVYNATNNTNLEGKIIQQKLLKNNESLDEGLRLHTVNVRQLGHCLAMEEPKGYYWPSIQPSEYVLPCPDKPGFSASRICFYNATNPLVTYWGPVDISNCLKEANEVANQILNLTADGQNLTSANITNIVEQVKRIVNKEENIDITLGSTLMNIFSNILSSSDSDLLESSSEALKTIDELAFKIDLNSTSHVNITTRNLALSVSSLLPGTNAISNFSIGLPSNNESYFQMDFESGQVDPLASVILPPNLLENLSPEDSVLVRRAQFTFFNKTGLFQDVGPQRKTLVSYVMACSIGNITIQNLKDPVQIKIKHTRTQEVHHPICAFWDLNKNKSFGGWNTSGCVAHRDSDASETVCLCNHFTHFGVLMDLPRSASQLDARNTKVLTFISYIGCGISAIFSAATLLTYVAFEKLRRDYPSKILMNLSTALLFLNLLFLLDGWITSFNVDGLCIAVAVLLHFFLLATFTWMGLEAIHMYIALVKVFNTYIRRYILKFCIIGWGLPALVVSVVLASRNNNEVYGKESYGKEKGDEFCWIQDPVIFYVTCAGYFGVMFFLNIAMFIVVMVQICGRNGKRSNRTLREEVLRNLRSVVSLTFLLGMTWGFAFFAWGPLNIPFMYLFSIFNSLQGLFIFIFHCAMKENVQKQWRQHLCCGRFRLADNSDWSKTATNIIKKSSDNLGKSLSSSSIGSNSTYLTSKSKSSSTTYFKRNSHTDNVSYEHSFNKSGSLRQCFHGQVLVKTGPC

SEQ ID NO: 94 - protein, 514 aa, Homo sapiens
MAVWLAQWLGPLLLVSLWGLLAPASLLRRLGEHIQQFQESSAQGLGLSLGPGAAALPKVGWLEQLLDPFNVSDRRSFLQRYWVNDQHWVGQDGPIFLHLGGEGSLGPGSVMRGHPAALAPAWGALVISLEHRFYGLSIPAGGLEMAQLRFLSSRLALADVVSARLALSRLFNISSSSPWICFGGSYAGSLAAWARLKFPHLIFASVASSAPVRAVLDFSEYNDVVSRSLMSTAIGGSLECRAAVSVAFAEVERRLRSGGAAQAALRTELSACGPLGRAENQAELLGALQALVGGVVQYDGQTGAPLSVRQLCGLLLGGGGNRSHSTPYCGLRRAVQIVLHSLGQKCLSFSRAETVAQLRSTEPQLSGVGDRQWLYQTCTEFGFYVTCENPRCPFSQLPALPSQLDLCEQVFGLSALSVAQAVAQTNSYYGGQTPGANKVLFVNGDTDPWHVLSVTQALGSSESTLLIRTGSHCLDMAPERPSDSPSLRLGRQNIFQQLQTWLKLAKESQIKGEV

SEQ ID NO: 95 - protein, 417 aa, Homo sapiens
MRFAWTVLLLGPLQLCALVHCAPPAAGQQQPPREPPAAPGAWRQQIQWENNGQVFSLLSLGSQYQPQRRRDPGAAVPGAANASAQQPRTPILLIRDNRTAAARTRTAGSSGVTAGRPRPTARHWFQAGYSTSRAREAGASRAENQTAPGEVPALSNLRPPSRVDGMVGDDPYNPYKYSDDNPYYNYYDTYERPRPGGRYRPGYGTGYFQYGLPDLVADPYYIQASTYVQKMSMYNLRCAAEENCLASTAYRADVRDYDHRVLLRFPQRVKNQGTSDFLPSRPRYSWEWHSCHQHYHSMDEFSHYDLLDANTQRRVAEGHKASFCLEDTSCDYGYHRRFACTAHTQGLSPGCYDTYGADIDCQWIDITDVKPGNYILKVSVNPSYLVPESDYTNNVVRCDIRYTGHHAYASGCTISPY

SEQ ID NO: 96 - protein, 303 aa, Homo sapiens
MRAWIFFLLCLAGRALAAPQQEALPDETEVVEETVAEVTEVSVGANPVQVEVGEFDDGAEETEEEVVAENPCQNHHCKHGKVCELDENNTPMCVCQDPTSCPAPIGEFEKVCSNDNKTFDSSCHFFATKCTLEGTKKGHKLHLDYIGPCKYIPPCLDSELTEFPLRMRDWLKNVLVTLYERDEDNNLLTEKQKLRVKKIHENEKRLEAGDHPVELLARDFEKNYNMYIFPVHWQFGQLDQHPIDGYLSHTELAPLRAPLIPMEHCTTRFFETCDLDNDKYIALDEWAGCFGIKQKDIDKDLVI

SEQ ID NO: 97 - protein, 1500 aa, Homo sapiens
MTRILTAFKVVRTLKTGFGFTNVTAHQKWKFSRPGIRLLSVKAQTAHIVLEDGTKMKGYSFGHPSSVAGEVVFNTGLGGYPEAITDPAYKGQILTMANPIIGNGGAPDTTALDELGLSKYLESNGIKVSGLLVLDYSKDYNHWLATKSLGQWLQEEKVPAIYGVDTRMLTKIIRDKGTMLGKIEFEGQPVDFVDPNKQNLIAEVSTKDVKVYGKGNPTKVVAVDCGIKNNVIRLLVKRGAEVHLVPWNHDFTKMEYDGILIAGGPGNPALAEPLIQNVRKILESDRKEPLFGISTGNLITGLAAGAKTYKMSMANRGQNQPVLNITNKQAFITAQNHGYALDNTLPAGWKPLFVNVNDQTNEGIMHESKPFFAVQFHPEVTPGPIDTEYLFDSFFSLIKKGKATTITSVLPKPALVASRVEVSKVLILGSGGLSIGQAGEFDYSGSQAVKAMKEENVKTVLMNPNIASVQTNEVGLKQADTVYFLPITPQFVTEVIKAEQPDGLILGMGGQTALNCGVELFKRGVLKEYGVKVLGTSVESIMATEDRQLFSDKLNEINEKIAPSFAVESIEDALKAADTIGYPVMIRSAYALGGLGSGICPNRETLMDLSTKAFAMTNQILVEKSVTGWKEIEYEVVRDADDNCVTVCNMENVDAMGVHTGDSVVVAPAQTLSNAEFQMLRRTSINVVRHLGIVGECNIQFALHPTSMEYCIIEVNARLSRSSALASKATGYPLAFIAAKIALGIPLPEIKNVVSGKTSACFEPSLDYMVTKIPRWDLDRFHGTSSRIGSSMKSVGEVMAIGRTFEESFQKALRMCHPSIEGFTPRLPMNKEWPSNLDLRKELSEPSSTRIYAIAKAIDDNMSLDEIEKLTYIDKWFLYKMRDILNMEKTLKGLNSESMTEETLKRAKEIGFSDKQISKCLGLTEAQTRELRLKKNIHPWVKQIDTLAAEYPSVTNYLYVTYNGQEHDVNFDDHGMMVLGCGPYHIGSSVEFDWCAVSSIRTLRQLGKKTVVVNCNPETVSTDFDECDKLYFEELSLERILDIYHQEACGGCIISVGGQIPNNLAVPLYKNGVKIMGTSPLQIDRAEDRSIFSAVLDELKVAQAPWKAVNTLNEALEFAKSVDYPCLLRPSYVLSGSAMNVVFSEDEMKKFLEEATRVSQEHPVVLTKFVEGAREVEMDAVGKDGRVISHAISEHVEDAGVHSGDATLMLPTQTISQGAIEKVKDATRKIAKAFAISGPFNVQFLVKGNDVLVIECNLRASRSFPFVSKTLGVDFIDVATKVMIGENVDEKHLPTLDHPIIPADYVAIKAPMFSWPRLRDADPILRCEMASTGEVACFGEGIHTAFLKAMLSTGFKIPQKGILIGIQQSFRPRFLGVAEQLHNEGFKLFATEATSDWLNANNVPATPVAWPSQEGQNPSLSSIRKLIRDGSIDLVINLPNNNTKFVHDNYVIRRTAVDSGIPLLTNFQVTKLFAEAVQKSRKVDSKSLFHYRQYSAGKAA

SEQ ID NO: 98 - protein, 4563 aa, Homo sapiens
MDPPRPALLALLALPALLLLLLAGARAEEEMLENVSLVCPKDATRFKHLRKYTYNYEAESSSGVPGTADSRSATRINCKVELEVPQLCSFILKTSQCTLKEVYGFNPEGKALLKKTKNSEEFAAAMSRYELKLAIPEGKQVFLYPEKDEPTYILNIKRGIISALLVPPETEEAKQVLFLDTVYGNCSTHFTVKTRKGNVATEISTERDLGQCDRFKPIRTGISPLALIKGMTRPLSTLISSSQSCQYTLDAKRKHVAEAICKEQHLFLPFSYKNKYGMVAQVTQTLKLEDTPKINSRFFGEGTKKMGLAFESTKSTSPPKQAEAVLKTLQELKKLTISEQNIQRANLFNKLVTELRGLSDEAVTSLLPQLIEVSSPITLQALVQCGQPQCSTHILQWLKRVHANPLLIDVVTYLVALIPEPSAQQLREIFNMARDQRSRATLYALSHAVNNYHKTNPTGTQELLDIANYLMEQIQDDCTGDEDYTYLILRVIGNMGQTMEQLTPELKSSILKCVQSTKPSLMIQKAAIQALRKMEPKDKDQEVLLQTFLDDASPGDKRLAAYLMLMRSPSQADINKIVQILPWEQNEQVKNFVASHIANILNSEELDIQDLKKLVKEALKESQLPTVMDFRKFSRNYQLYKSVSLPSLDPASAKIEGNLIFDPNNYLPKESMLKTTLTAFGFASADLIEIGLEGKGFEPTLEALFGKQGFFPDSVNKALYWVNGQVPDGVSKVLVDHFGYTKDDKHEQDMVNGIMLSVEKLIKDLKSKEVPEARAYLRILGEELGFASLHDLQLLGKLLLMGARTLQGIPQMIGEVIRKGSKNDFFLHYIFMENAFELPTGAGLQLQISSSGVIAPGAKAGVKLEVANMQAELVAKPSVSVEFVTNMGIIIPDFARSGVQMNTNFFHESGLEAHVALKAGKLKFIIPSPKRPVKLLSGGNTLHLVSTTKTEVIPPLIENRQSWSVCKQVFPGLNYCTSGAYSNASSTDSASYYPLTGDTRLELELRPTGEIEQYSVSATYELQREDRALVDTLKFVTQAEGAKQTEATMTFKYNRQSMTLSSEVQIPDFDVDLGTILRVNDESTEGKTSYRLTLDIQNKKITEVALMGHLSCDTKEERKIKGVISIPRLQAEARSEILAHWSPAKLLLQMDSSATAYGSTVSKRVAWHYDEEKIEFEWNTGTNVDTKKMTSNFPVDLSDYPKSLHMYANRLLDHRVPQTDMTFRHVGSKLIVAMSSWLQKASGSLPYTQTLQDHLNSLKEFNLQNMGLPDFHIPENLFLKSDGRVKYTLNKNSLKIEIPLPFGGKSSRDLKMLETVRTPALHFKSVGFHLPSREFQVPTFTIPKLYQLQVPLLGVLDLSTNVYSNLYNWSASYSGGNTSTDHFSLRARYHMKADSVVDLLSYNVQGSGETTYDHKNTFTLSCDGSLRHKFLDSNIKFSHVEKLGNNPVSKGLLIFDASSSWGPQMSASVHLDSKKKQHLFVKEVKIDGQFRVSSFYAKGTYGLSCQRDPNTGRLNGESNLRFNSSYLQGTNQITGRYEDGTLSLTSTSDLQSGIIKNTASLKYENYELTLKSDTNGKYKNFATSNKMDMTFSKQNALLRSEYQADYESLRFFSLLSGSLNSHGLELNADILGTDKINSGAHKATLRIGQDGISTSATTNLKCSLLVLENELNAELGLSGASMKLTTNGRFREHNAKFSLDGKAALTELSLGSAYQAMILGVDSKNIFNFKVSQEGLKLSNDMMGSYAEMKFDHTNSLNIAGLSLDFSSKLDNIYSSDKFYKQTVNLQLQPYSLVTTLNSDLKYNALDLTNNGKLRLEPLKLHVAGNLKGAYQNNEIKHIYAISSAALSASYKADTVAKVQGVEFSHRLNTDIAGLASAIDMSTNYNSDSLHFSNVFRSVMAPFTMTIDAHTNGNGKLALWGEHTGQLYSKFLLKAEPLAFTFSHDYKGSTSHHLVSRKSISAALEHKVSALLTPAEQTGTWKLKTQFNNNEYSQDLDAYNTKDKIGVELTGRTLADLTLLDSPIKVPLLLSEPINIIDALEMRDAVEKPQEFTIVAFVKYDKNQDVHSINLPFFETLQEYFERNRQTIIVVLENVQRNLKHINIDQFVRKYRAALGKLPQQANDYLNSFNWERQVSHAKEKLTALTKKYRITENDIQIALDDAKINFNEKLSQLQTYMIQFDQYIKDSYDLHDLKIAIANIIDEIIEKLKSLDEHYHIRVNLVKTIHDLHLFIENIDFNKSGSSTASWIQNVDTKYQIRIQIQEKLQQLKRHIQNIDIQHLAGKLKQHIEAIDVRVLLDQLGTTISFERINDILEHVKHFVINLIGDFEVAEKINAFRAKVHELIERYEVDQQIQVLMDKLVELAHQYKLKETIQKLSNVLQQVKIKDYFEKLVGFIDDAVKKLNELSFKTFIEDVNKFLDMLIKKLKSFDYHQFVDETNDKIREVTQRLNGEIQALELPQKAEALKLFLEETKATVAVYLESLQDTKITLIINWLQEALSSASLAHMKAKFRETLEDTRDRMYQMDIQQELQRYLSLVGQVYSTLVTYISDWWTLAAKNLTDFAEQYSIQDWAKRMKALVEQGFTVPEIKTILGTMPAFEVSLQALQKATFQTPDFIVPLTDLRIPSVQINFKDLKNIKIPSRFSTPEFTILNTFHIPSFTIDFVEMKVKIIRTIDQMLNSELQWPVPDIYLRDLKVEDIPLARITLPDFRLPEIAIPEFIIPTLNLNDFQVPDLHIPEFQLPHISHTIEVPTFGKLYSILKIQSPLFTLDANADIGNGTTSANEAGIAASITAKGESKLEVLNFDFQANAQLSNPKINPLALKESVKFSSKYLRTEHGSEMLFFGNAIEGKSNTVASLHTEKNTLELSNGVIVKINNQLTLDSNTKYFHKLNIPKLDFSSQADLRNEIKTLLKAGHIAWTSSGKGSWKWACPRFSDEGTHESQISFTIEGPLTSFGLSNKINSKHLRVNQNLVYESGSLNFSKLEIQSQVDSQHVGHSVLTAKGMALFGEGKAEFTGRHDAHLNGKVIGTLKNSLFFSAQPFEITASTNNEGNLKVRFPLRLTGKIDFLNNYALFLSPSAQQASWQVSARFNQYKYNQNFSAGNNENIMEAHVGINGEANLDFLNIPLTIPEMRLPYTIITTPPLKDFSLWEKTGLKEFLKTTKQSFDLSVKAQYKKNKHRHSITNPLAVLCEFISQSIKSFDRHFEKNRNNALDFVTKSYNETKIKFDKYKAEKSHDELPRTFQIPGYTVPVVNVEVSPFTIEMSAFGYVFPKAVSMPSFSILGSDVRVPSYTLILPSLELPVLHVPRNLKLSLPDFKELCTISHIFIPAMGNITYDFSFKSSVITLNTNAELFNQSDIVAHLLSSSSSVIDALQYKLEGTTRLTRKRGLKLATALSLSNKFVEGSHNSTVSLTTKNMEVSVATTTKAQIPILRMNFKQELNGNTKSKPTVSSSMEFKYDFNSSMLYSTAKGAVDHKLSLESLTSYFSIESSTKGDVKGSVLSREYSGTIASEANTYLNSKSTRSSVKLQGTSKIDDIWNLEVKENFAGEATLQRIYSLWEHSTKNHLQLEGLFFTNGEHTSKATLELSPWQMSALVQVHASQPSSFHDFPDLGQEVALNANTKNQKIRWKNEVRIHSGSFQSQVELSNDQEKAHLDIAGSLEGHLRFLKNIILPVYDKSLWDFLKLDVTTSIGRRQHLRVSTAFVYTKNPNGYSFSIPVKVLADKFIIPGLKLNDLNSVLVMPTFHVPFTDLQVPSCKLDFREIQIYKKLRTSSFALNLPTLPEVKFPEVDVLTKYSQPEDSLIPFFEITVPESQLTVSQFTLPKSVSDGIAALDLNAVANKIADFELPTIIVPEQTIEIPSIKFSVPAGIVIPSFQALTARFEVDSPVYNATWSASLKNKADYVETVLDSTCSSTVQFLEYELNVLGTHKIEDGTLASKTKGTFAHRDFSAEYEEDGKYEGLQEWEGKAHLNIKSPAFTDLHLRYQKDKKGISTSAASPAVGTVGMDMDEDDDFSKWNFYYSPQSSPDKKLTIFKTELRVRESDEETQIKVNWEEEAASGLLTSLKDNVPKATGVLYDYVNKYHWEHTGLTLREVSSKLRRNLQNNAEWVYQGAIRQIDDIDVRFQKAASGTTGTYQEWKDKAQNLYQELLTQEGQASFQGLKDNVFDGLVRVTQEFHMKVKHLIDSLIDFLNFPRFQFPGKPGIYTREELCTMFIREVGTVLSQVYSKVHNGSEILFSYFQDLVITLPFELRKHKLIDVISMYRELLKDLSKEAQEVFKAIQSLKTTEVLRNLQDLLQFIFQLIEDNIKQLKEMKFTYLINYIQDEINTIFSDYIPYVFKLLKENLCLNLHKFNEFIQNELQEASQELQQIHQYIMALREEYFDPSIVGWTVKYYELEEKIVSLIKNLLVALKDFHSEYIVSASNFTSQLSSQVEQFLHRNIQEYLSILTDPDGKGKEKIAELSATAQEIIKSQAIATKKIISDYHQQFRYKLQDFSDQLSDYYEKFIAESKRLIDLSIQNYHTFLIYITELLKKLQSTTVMNPYMKLAPGELTIIL

SEQ ID NO: 99 - protein, 152 aa, Homo sapiens
MRLPLSHSPEHVEMALLSNILAAYSFVSENPERAALYFVSGVCIGLVLTLAALVIRISCHTDCRRRPGKKFLQDRESSSDSSDSEDGSEDTVSDLSVRRHRRFERTLNKNVFTSAEELERAQRLEERERIIREIWMNGQPEVPGTRSLNRYY

SEQ ID NO: 100 - protein, 360 aa, Homo sapiens
MDSSNCKVIAPLLSQRYRRMVTKDGHSTLQMDGAQRGLAYLRDAWGILMDMRWRWMMLVFSASFVVHWLVFAVLWYVLAEMNGDLELDHDAPPENHTICVKYITSFTAAFSFSLETQLTIGYGTMFPSGDCPSAIALLAIQMLLGLMLEAFITGAFVAKIARPKNRAFSIRFTDTAVVAHMDGKPNLIFQVANTRPSPLTSVRVSAVLYQERENGKLYQTSVDFHLDGISSDECPFFIFPLTYYHSITPSSPLATLLQHENPSHFELVVFLSAMQEGTGEICQRRTSYLPSEIMLHHCFASLLTRGSKGEYQIKMENFDKTVPEFPTPLVSKSPNRTDLDIHINGQSIDNFQISETGLTE

SEQ ID NO: 101 - protein, 758 aa, Homo sapiens
MAVSAGSARTSPSSDKVQKDKAELISGPRQDSRIGKLLGFEWTDLSSWRRLVTLLNRPTDPASLAVFRFLFGFLMVLDIPQERGLSSLDRKYLDGLDVCRFPLLDALRPLPLDWMYLVYTIMFLGALGMMLGLCYRISCVLFLLPYWYVFLLDKTSWNNHSYLYGLLAFQLTFMDANHYWSVDGLLNAHRRNAHVPLWNYAVLRGQIFIVYFIAGVKKLDADWVEGYSMEYLSRHWLFSPFKLLLSEELTSLLVVHWGGLLLDLSAGFLLFFDVSRSIGLFFVSYFHCMNSQLFSIGMFSYVMLASSPLFCSPEWPRKLVSYCPRRLQQLLPLKAAPQPSVSCVYKRSRGKSGQKPGLRHQLGAAFTLLYLLEQLFLPYSHFLTQGYNNWTNGLYGYSWDMMVHSRSHQHVKITYRDGRTGELGYLNPGVFTQSRRWKDHADMLKQYATCLSRLLPKYNVTEPQIYFDIWVSINDRFQQRIFDPRVDIVQAAWSPFQRTSWVQPLLMDLSPWRAKLQEIKSSLDNHTEVVFIADFPGLHLENFVSEDLGNTSIQLLQGEVTVELVAEQKNQTLREGEKMQLPAGEYHKVYTTSPSPSCYMYVYVNTTELALEQDLAYLQELKEKVENGSETGPLPPELQPLLEGEVKGGPEPTPLVQTFLRRQQRLQEIERRRNTPFHERFFRFLLRKLYVFRRSFLMTCISLRNLILGRPSLEQLAQEVTYANLRPFEAVGELNPSNTDSSHSNPPESNPDPVHSEF

SEQ ID NO: 102 - protein, 1949 aa, Homo sapiens
MGNSYAGQLKTTRFEEVLHNSIEASLRSNNLVPRPIFSQLYLEAEQQLAALEGGSRVDNEEEEEEGEGGLETNGPPNPFQLHPLPEGCCTTDGFCQAGKDLRLVSISNEPMDVPAGFLLVGVKSPSLPDHLLVCAVDKRFLPDDNGHNALLGFSGNCVGCGKKGFCYFTEFSNHINLKLTTQPKKQKHLKYYLVRNAQGTLTKGPLICWKGSEFRSRQIPASTCSSSLFPALESTAAFPSEPVPGTNPSILMGAQQAGPASDHPSLNAAMGPAVFNGKDSPKCQQLAKNNLLALPRPSALGILSNSGPPKKRHKGWSPESPSAPDGGCPQGGGNRAKYESAGMSCVPQVGLVGPASVTFPVVASGEPVSVPDNLLKICKAKPVIFKGHGNFPYLCGNLNDVVVSPLLYTCYQNSQSVSRAYEQYGASAIQPISEEMQLLLTVYYLVQLAADQVPLMEDLEQIFLRSWRESHLTEIRQYQQAPPQPFPPAPSAAAPVTSAQLPWLASLAASSCNDSVHVIECAYSLAEGLSEMFRLLVEGKLAKTNYVVIICACRSAAIDSCIAVTGKYQARILSESLLTPAEYQKEVNYELVTGKVDSLGAFFSTLCPEGDIDILLDKFHQENQGHISSSLAASSVTKAASLDVSGTPVCTSYNLEPHSIRPFQLAVAQKLLSHVCSIADSSTQNLDLGSFEKVDFLICIPPSEVTYQQTLLHVWHSGVLLELGLKKEHMTKQRVEQYVLKLDTEAQTKFKAFLQNSFQNPHTLFVLIHDHAHWDLVSSTVHNLYSQSDPSVGLVDRLLNCREVKEAPNIVTLHVTSFPYALQTQHTLISPYNEIHWPASCSNGVDLYHENKKYFGLSEFIESTLSGHSLPLLRYDSSFEAMVTALGKRFPRLHSAVIRTFVLVQHYAAALMAVSGLPQMKNYTSVETLEITQNLLNSPKQCPCGHGLMVLLRVPCSPLAVVAYERLAHVRARLALEEHFEIILGSPSSGVTVGKHFVKQLRMWQKIEDVEWRPQTYLELEGLPCILIFSGMDPHGESLPRSLRYCDLRLINSSCLVRTALEQELGLAAYFVSNEVPLEKGARNEALESDAEKLSSTDNEDEELGTEGSTSEKRSPMKRERSRSHDSASSSLSSKASGSALGGESSAQPTALPQGEHARSPQPRGPAEEGRAPGEKQRPRASQGPPSAISRHSPGPTPQPDCSLRTGQRSVQVSVTSSCSQLSSSSGSSSSSVAPAAGTWVLQASQCSLTKACRQPPIVFLPKLVYDMVVSTDSSGLPKAASLLPSPSVMWASSFRPLLSKTMTSTEQSLYYRQWTVPRPSHMDYGNRAEGRVDGFHPRRLLLSGPPQIGKTGAYLQFLSVLSRMLVRLTEVDVYDEEEININLREESDWHYLQLSDPWPDLELFKKLPFDYIIHDPKYEDASLICSHYQGIKSEDRGMSRKPEDLYVRRQTARMRLSKYAAYNTYHHCEQCHQYMGFHPRYQLYESTLHAFAFSYSMLGEEIQLHFIIPKSKEHHFVFSQPGGQLESMRLPLVTDKSHEYIKSPTFTPTTGRHEHGLFNLYHAMDGASHLHVLVVKEYEMAIYKKYWPNHIMLVLPSIFNSAGVGAAHFLIKELSYHNLELERNRQEELGIKPQDIWPFIVISDDSCVMWNVVDVNSAGERSREFSWSERNVSLKHIMQHIEAAPDIMHYALLGLRKWSSKTRASEVQEPFSRCHVHNFIILNVDLTQNVQYNQNRFLCDDVDFNLRVHSAGLLLCRFNRFSVMKKQIVVGGHRSFHITSKVSDNSAAVVPAQYICAPDSKHTFLAAPAQLLLEKFLQHHSHLFFPLSLKNHDHPVLSVDCYLNLGSQISVCYVSSRPHSLNISCSDLLFSGLLLYLCDSFVGASFLKKFHFLKGATLCVICQDRSSLRQTVVRLELEDEWQFRLRDEFQTANAREDRPLFFLTGRHI

SEQ ID NO: 103 - protein, 181 aa, Homo sapiens
MPMILGYWDIRGLAHAIRLLLEYTDSSYEEKKYTMGDAPDYDRSQWLNEKFKLGLDFPNLPYLIDGAHKITQSNAILCYIARKHNLCGETEEEKIRVDILENQTMDNHMQLGMICYNPEFEKLKPKYLEELPEKLKLYSEFLGKRPWFAGNKGLEKISAYMKSSRFLPRPVFSKMAVWGNK

SEQ ID NO: 104 - protein, 372 aa, Homo sapiens [sequence omitted]

SEQ ID NO: 105 - protein, 607 aa, Homo sapiens
MWMNSILPIFLFRSVRLLKNDPVNLQKFSYTSEDEAWKTYLENPLTAATKAMMRVNGDDDSVAALSFLYDYYMGPKEKRILSSSTGGRNDQGKRYYHGMEYETDLTPLESPTHLMKFLTENVSGTPEYPDLLKKNNLMSLEGALPTPGKAAPLPAGPSKLEAGSVDSYLLPTTDMYDNGSLNSLFESIHGVPPTQRWQPDSTFKDDPQESMLFPDILKTSPEPPCPEDYPSLKSDFEYTLGSPKAIHIKSGESPMAYLNKGQFYPVTLRTPAGGKGLALSSNKVKSVVMVVFDNEKVPVEQLRFWKHWHSRQPTAKQRVIDVADCKENFNTVEHIEEVAYNALSFVWNVNEEAKVFIGVNCLSTDFSSQKGVKGVPLNLQIDTYDCGLGTERLVHRAVCQIKIFCDKGAERKMRDDERKQFRRKVKCPDSSNSGVKGCLLSGFRGNETTYLRPETDLETPPVLFIPNVHFSSLQRSGGAAPSAGPSSSNRLPLKRTCSPFTEEFEPLPSKQAKEGDLQRVLLYVRRETEEVFDALMLKTPDLKGLRNAISEKYGFPEENIYKVYKKCKRGILVNMDNNIIQHYSNHVAFLLDMGELDGKIQIILKEL

SEQ ID NO: 106 - protein, 790 aa, Homo sapiens
MAEQVLPQALYLSNMRKAVKIRERTPEDIFKPTNGIIHHFKTMHRYTLEMFRTCQFCPQFREIIHKALIDRNIQATLESQKKLNWCREVRKLVALKTNGDGNCLMHATSQYMWGVQDTDLVLRKALFSTLKETDTRNFKFRWQLESLKSQEFVETGLCYDTRNWNDEWDNLIKMASTDTPMARSGLQYNSLEEIHIFVLCNILRRPIIVISDKMLRSLESGSNFAPLKVGGIYLPLHWPAQECYRYPIVLGYDSHHFVPLVTLKDSGPEIRAVPLVNRDRGRFEDLKVHFLTDPENEMKEKLLKEYLMVIEIPVQGWDHGTTHLINAAKLDEANLPKEINLVDDYFELVQHEYKKWQENSEQGRREGHAQNPMEPSVPQLSLMDVKCETPNCPFFMSVNTQPLCHECSERRQKNQNKLPKLNSKPGPEGLPGMALGASRGEAYEPLAWNPEESTGGPHSAPPTAPSPFLFSETTAMKCRSPGCPFTLNVQHNGFCERCHNARQLHASHAPDHTRHLDPGKCQACLQDVTRTFNGICSTCFKRTTAEASSSLSTSLPPSCHQRSKSDPSRLVRSPSPHSCHRAGNDAPAGCLSQAARTPGDRTGTSKCRKAGCVYFGTPENKGFCTLCFIEYRENKHFAAASGKVSPTASRFQNTIPCLGRECGTLGSTMFEGYCQKCFIEAQNQRFHEAKRTEEQLRSSQRRDVPRTTQSTSRPKCARASCKNILACRSEELCMECQHPNQRMGPGAHRGEPAPEDPPKQRCRAPACDHFGNAKCNGYCNECFQFKQMYG

SEQ ID NO: 107 - protein, 1007 aa, Homo sapiens
MKDEAGERDREVSSLNSKLLSLQLDIKNLHDVCKRQRKTLQDNQLCMEEAMNSSHDKKQAQALAFEESEVEFGSSKQCHLRQLQQLKKKLLVLQQELEFHTEELQTSYYSLRQYQSILEKQTSDLVLLHHHCKLKEDEVILYEEEMGNHNENTGEKLHLAQEQLALAGDKIASLERSLNLYRDKYQSSLSNIELLECQVKMLQGELGGIMGQEPENKGDHSKVRIYTSPCMIQEHQETQKRLSEVWQKVSQQDDLIQELRNKLACSNALVLEREKALIKLQADFASCTATHRYPPSSSEECEDIKKILKHLQEQKDSQCLHVEEYQNLVKDLRVELEAVSEQKRNIMKDMMKLELDLHGLREETSAHIERKDKDITILQCRLQELQLEFTETQKLTLKKDKFLQEKDEMLQELEKKLTQVQNSLLKKEKELEKQQCMATELEMTVKEAKQDKSKEAECKALQAEVQKLKNSLEEAKQQERLAAQQAAQCKEEAALAGCHLEDTQRKLQKGLLLDKQKADTIQELQRELQMLQKESSMAEKEQTSNRKRVEELSLELSEALRKLENSDKEKRQLQKTVAEQDMKMNDMLDRIKHQHREQGSIKCKLEEDLQEATKLLEDKREQLKKSKEHEKLMEGELEALRQEFKKKDKTLKENSRKLEEENENLRAELQCCSTQLESSLNKYNTSQQVIQDLNKEIALQKESLMSLQAQLDKALQKEKHYLQTTITKEAYDALSRKSAACQDDLTQALEKLNHVTSETKSLQQSLTQTQEKKAQLEEEIIAYEERMKKLNTELRKLRGFHQESELEVHAFDKKLEEMSCQVLQWQKQHQNDLKMLAAKEEQLREFQEEMAALKENLLEDDKEPCCLPQWSVPKDTCRLYRGNDQIMTNLEQWAKQQKVANEKLGNQLREQVKYIAKLSGEKDHLHSVMVHLQQENKKLKKEIEEKKMKAENTRLCTKALGPSRTESTQREKVCGTLGWKGLPQDMGQRMDLTKYIGMPHCPGSSYC

SEQ ID NO: 108 - protein, 655 aa, Homo sapiens
MSSSNVEVFIPVSQGNTNGFPATASNDLKAFTEGAVLSFHNICYRVKLKSGFLPCRKPVEKEILSNINGIMKPGLNAILGPTGGGKSSLLDVLAARKDPSGLSGDVLINGAPRPANFKCNSGYVVQDDVVMGTLTVRENLQFSAALRLATTMTNHEKNERINRVIQELGLDKVADSKVGTQFIRGVSGGERKRTSIGMELITDPSILFLDEPTTGLDSSTANAVLLLLKRMSKQGRTIIFSIHQPRYSIFKLFDSLTLLASGRLMFHGPAQEALGYFESAGYHCEAYNNPADFFLDIINGDSTAVALNREEDFKATEIIEPSKQDKPLIEKLAEIYVNSSFYKETKAELHQLSGGEKKKKITVFKEISYTTSFCHQLRWVSKRSFKNLLGNPQASIAQIIVTVVLGLVIGAIYFGLKNDSTGIQNRAGVLFFLTTNQCFSSVSAVELFVVEKKLFIHEYISGYYRVSSYFLGKLLSDLLPMRMLPSIIFTCIVYFMLGLKPKADAFFVMMFTLMMVAYSASSMALAIAAGQSVVSVATLLMTICFVFMMIFSGLLVNLTTIASWLSWLQYFSIPRYGFTALQHNEFLGQNFCPGLNATGNNPCNYATCTGEEYLVKQGIDLSPWGLWKNHVALACMIVIFLTIAYLKLLFLKKYS

SEQ ID NO: 109 - protein, 331 aa, Homo sapiens
MTSPHFSSYDEGPLDVSMAATNLENQLHSAQKNLLFLQREHASTLKGLHSEIRRLQQHCTDLTYELTVKSSEQTGDGTSKSSELKKRCEELEAQLKVKENENAELLKELEQKNAMITVLENTIKEREKKYLEELKAKSHKLTLLSSELEQRASTIAYLTSQLHAAKKKLMSSSGTSDASPSGSPVLASYKPAPPKDKLPETPRRRMKKSLSAPLHPEFEEVYRFGAESRKLLLREPVDAMPDPTPFLLARESAEVHLIKERPLVIPPIASDRSGEQHSPAREKPHKAHVGVAHRIHHATPPQAQPEVKTLAVDQVNGGKVVRKHSGTDRTV

SEQ ID NO: 110 - protein, 217 aa, Homo sapiens
MSSLYYANTLFSKYPASSSVFATGAFPEQTSCAFASNPQRPGYGAGSGASFAASMQGLYPGGGGMAGQSAAGVYAAGYGLEPSSFNMHCAPFEQNLSGVCPGDSAKAAGAKEQRDSDLAAESNFRIYPWMRSSGTDRKRGRQTYTRYQTLELEKEFHYNRYLTRRRRIEIAHTLCLTERQIKIWFQNRRMKWKKENKTAGPGTTGQDRAEAEEEEEE

SEQ ID NO: 111 - protein, 715 aa, Homo sapiens
MSLDCTSHIALGAASPAPEETYDHLSEVPVTREQLNHYRNVAQNARSELAATLVKFECAQSELQDLRSKMLSKEVSCQELKAEMESYKENNARKSSLLTSLRDRVQELEEESAALSTSKIRTEITAHAAIKENQELKKKVVELNEKLQKCSKENEENKKQVSKNCRKHEEFLTQLRDCLDPDERNDKASDEDLILKLRDLRKENEFVKGQIVILEETINVHEMEAKASRETIMRLASEVNREQKKAASCTEEKEKLNQDLLSAVEAKEALEREVKIFQERLLAGQQVWDASKQEVSLLKKSSSELEKSLKASQDAVTTSQSQYFSFREKIAALLRGRLSMTGSTEDTILEKIREMDSREESRDRMVSQLEAQISELVEQLGKESGFHQKALQRAQKAENMLETLQGQLTHLEAELVSGGVLRDNLNFEKQKYLKFLDQLSQKMKLDQMAAELGFDMRLDVVLARTEQLVRLESNAVIENKTIAHNLQRKLKTQKERLESKELHMSLLRQKIAQLEEEKQARTALVVERDNAHLTIRNLQKKVERLQKELNTCRDLHTELKAKLADTNELKIKTLEQTKAIEDLNKSRDQLEKMKEKAEKKLMSVKSELDTTEHEAKENKERARNMIEVVTSEMKTLKKSLEEAEKREKQLADFREVVSQMLGLNVTSLALPDYEIIKCLERLVHSHQHHFVTCACLKDVTTGQERHPQGHLQLLH

SEQ ID NO: 112 - protein, 712 aa, Homo sapiens
MREPALAASAMAYHPFHAPRPADFPMSAFLAAAQPSFFPALALPPGALAKPLPDPGLAGAAAAAAAAAAAAEAGLHVSALGPHPPAAHLRSLKSLEPEDEVEDDPKVTLEAKELWDQFHKLGTEMVITKSGRRMFPPFKVRVSGLDKKAKYILLMDIVAADDCRYKFHNSRWMVAGKADPEMPKRMYIHPDSPATGEQWMAKPVAFHKLKLTNNISDKHGFTILNSMHKYQPRFHIVRANDILKLPYSTFRTYVFPETDFIAVTAYQNDKITQLKIDNNPFAKGFRDTGNGRREKRKQLTLPSLRLYEEHCKPERDGAESDASSCDPPPAREPPTSPGAAPSPLRLHRARAEEKSCAADSDPEPERLSEERAGAPLGRSPAPDSASPTRLTEPERARERRSPERGKEPAESGGDGPFGLRSLEKERAEARRKDEGRKEAAEGKEQGLAPLVVQTDSASPLGAGHLPGLAFSSHLHGQQFFGPLGAGQPLFLHPGQFTMGPGAFSAMGMGHLLASVAGGGNGGGGGPGTAAGLDAGGLGPAASAASTAAPFPFHLSQHMLASQGIPMPTFGGLFPYPYTYMAAAAAAASALPATSAAAAAAAAAGSLSRSPFLGSARPRLRFSPYQIPVTIPPSTSLLTTGLASEGSKAAGGNSREPSPLPELALRKVGAPSRGALSPSGSAKEAANELQSIQRLVSGLESQRALSPGRESPK

SEQ ID NO: 113 - protein, 614 aa, Homo sapiens
MRPPQCLLHTPSLASPLLLLLLWLLGGGVGAEGREDAELLVTVRGGRLRGIRLKTPGGPVSAFLGIPFAEPPMGPRRFLPPEPKQPWSGVVDATTFQSVCYQYVDTLYPGFEGTEMWNPNRELSEDCLYLNVWTPYPRPTSPTPVLVWIYGGGFYSGASSLDVYDGRFLVQAERTVLVSMNYRVGAFGFLALPGSREAPGNVGLLDQRLALQWVQENVAAFGGDPTSVTLFGESAGAASVGMHLLSPPSRGLFHRAVLQSGAPNGPWATVGMGEARRRATQLAHLVGCPPGGTGGNDTELVACLRTRPAQVLVNHEWHVLPQESVFRFSFVPVVDGDFLSDTPEALINAGDFHGLQVLVGVVKDEGSYFLVYGAPGFSKDNESLISRAEFLAGVRVGVPQVSDLAAEAVVLHYTDWLHPEDPARLREALSDVVGDHNVVCPVAQLAGRLAAQGARVYAYVFEHRASTLSWPLWMGVPHGYEIEFIFGIPLDPSRNYTAEEKIFAQRLMRYWANFARTGDPNEPRDPKAPQWPPYTAGAQQYVSLDLRPLEVRRGLRAQACAFWNRFLPKLLSATDTLDEAERQWKAEFHRWSSYMVHWKNQFDHYSKQDRCSDL

SEQ ID NO: 114 - protein, 993 aa, Homo sapiens
MPALARDGGQLPLLVVFSAMIFGTITNQDLPVIKCVLINHKNNDSSVGKSSSYPMVSESPEDLGCALRPQSSGTVYEAAAVEVDVSASITLQVLVDAPGNISCLWVFKHSSLNCQPHFDLQNRGVVSMVILKMTETQAGEYLLFIQSEATNYTILFTVSIRNTLLYTLRRPYFRKMENQDALVCISESVPEPIVEWVLCDSQGESCKEESPAVVKKEEKVLHELFGTDIRCCARNELGRECTRLFTIDLNQTPQTTLPQLFLKVGEPLWIRCKAVHVNHGFGLTWELENKALEEGNYFEMSTYSTNRTMIRILFAFVSSVARNDTGYYTCSSSKHPSQSALVTIVEKGFINATNSSEDYEIDQYEEFCFSVRFKAYPQIRCTWTFSRKSFPCEQKGLDNGYSISKFCNHKHQPGEYIFHAENDDAQFTKMFTLNIRRKPQVLAEASASQASCFSDGYPLPSWTWKKCSDKSPNCTEEITEGVWNRKANRKVFGQWVSSSTLNMSEAIKGFLVKCCAYNSLGTSCETILLNSPGPFPFIQDNISFYATIGVCLLFIVVLTLLICHKYKKQFRYESQLQMVQVTGSSDNEYFYVDFREYEYDLKWEFPRENLEFGKVLGSGAFGKVMNATAYGISKTGVSIQVAVKMLKEKADSSEREALMSELKMMTQLGSHENIVNLLGACTLSGPIYLIFEYCCYGDLLNYLRSKREKFHRTWTEIFKEHNFSFYPTFQSHPNSSMPGSREVQIHPDSDQISGLHGNSFHSEDEIEYENQKRLEEEEDLNVLTFEDLLCFAYQVAKGMEFLEFKSCVHRDLAARNVLVTHGKVVKICDFGLARDIMSDSNYVVRGNARLPVKWMAPESLFEGIYTIKSDVWSYGILLWEIFSLGVNPYPGIPVDANFYKLIQNGFKMDQPFYATEEIYIIMQSCWAFDSRKRPSFPNLTSFLGCQLADAEEAMYQNVDGRVSECPHTYQNRRPFSREMDLGLLSPQAQVEDS

SEQ ID NO: 115 - protein, 414 aa, Homo sapiens
MAAAPPSYCFVAFPPRAKDGLVVFGKNSARPRDEVQEVVYFSAADHEPESKVECTYISIDQVPRTYAIMISRPAWLWGAEMGANEHGVCIANEAINTREPAAEIEALLGMDLVRLGLERGETAKEALDVIVSLLEEHGQGGNYFEDANSCHSFQSAYLIVDRDEAWVLETIGKYWAAEKVTEGVRCICSQLSLTTKMDAEHPELRSYAQSQGWWTGEGEFNFSEVFSPVEDHLDCGAGKDSLEKQEESITVQTMMNTLRDKASGVCIDSEFFLTTASGVSVLPQNRSSPCIHYFTGTPDPSRSIFKPFIFVDDVKLVPKTQSPCFGDDDPAKKEPRFQEKPDRRHELYKAHEWARAIIESDQEQGRKLRSTMLELEKQGLEAMEEILTSSEPLDPAEVGDLFYDCVDTEIKFFK

SEQ ID NO: 116 - protein, 400 aa, Homo sapiens
MGVLMSKRQTVEQVQKVSLAVSAFKDGLRDRPSIRRTGELPGSRRGTVEGSVQEVQEEKEAEAGTSVVQEESSAGRAAWERLRDGRGVEPEEFDRTSRFTPPAFIRPTRKLDDDKPPEICLEPREPVVNDEMCDVCEVWTAESLFPCRVCTRVFHDGCLRRMGYIQGDSAAEVTEMAHTETGWSCHYCDNINLLLTEEEMYSLTETFQRCKVIPDCSLTLEDFLRYRHQAAKRGDRDRALSEEQEEQAARQFAALDPEHRGHIEWPDFLSHESLLLLQQLRPQNSLLRLLTVKERERARAAFLARGSGSTVSEAECRRAQHSWFCKRFPEAPSCSVSISHVGPIADSSPASSSSKSQDKTLLPTEQESRFVDWPTFLQENVLYILAARPNSAAIHLKPPG

SEQ ID NO: 117 - protein, 214 aa, Homo sapiens
MTPQPSGAPTVQVTRETERSFPRASEDEVTCPTSAPPSPTRTRGNCAEAEEGGCRGAPRKLRARRGGRSRPKSELALSKQRRSRRKKANDRERNRMHNLNSALDALRGVLPTFPDDAKLTKIETLRFAHNYIWALTQTLRIADHSLYALEPPAPHCGELGSPGGSPGDWGSLYSPVSQAGSLSPAASLEERPGLLGATFSACLSPGSLAFSDFL

SEQ ID NO: 118 - protein, 942 aa, Homo sapiens
MASDAVQSEPRSWSLLEQLGLAGADLAAPGVQQQLELERERLRREIRKELKLKEGAENLRRATTDLGRSLGPVELLLRGSSRRLDLLHQQLQELHAHVVLPDPAATHDGPQSPGAGGPTCSATNLSRVAGLEKQLAIELKVKQGAENMIQTYSNGSTKDRKLLLTAQQMLQDSKTKIDIIRMQLRRALQAGQLENQAAPDDTQGSPDLGAVELRIEELRHHFRVEHAVAEGAKNVLRLLSAAKAPDRKAVSEAQEKLTESNQKLGLLREALERRLGELPADHPKGRLLREELAAASSAAFSTRLAGPFPATHYSTLCKPAPLTGTLEVRVVGCRDLPETIPWNPTPSMGGPGTPDSRPPFLSRPARGLYSRSGSLSGRSSLKAEAENTSEVSTVLKLDNTVVGQTSWKPCGPNAWDQSFTLELERARELELAVFWRDQRGLCALKFLKLEDFLDNERHEVQLDMEPQGCLVAEVTFRNPVIERIPRLRRQKKIFSKQQGKAFQRARQMNIDVATWVRLLRRLIPNATGTGTFSPGASPGSEARTTGDISVEKLNLGTDSDSSPQKSSRDPPSSPSSLSSPIQESTAPELPSETQETPGPALCSPLRKSPLTLEDFKFLAVLGRGHFGKVLLSEFRPSGELFAIKALKKGDIVARDEVESLMCEKRILAAVTSAGHPFLVNLFGCFQTPEHVCFVMEYSAGGDLMLHIHSDVFSEPRAIFYSACVVLGLQFLHEHKIVYRDLKLDNLLLDTEGYVKIADFGLCKEGMGYGDRTSTFCGTPEFLAPEVLTDTSYTRAVDWWGLGVLLYEMLVGESPFPGDDEEEVFDSIVNDEVRYPRFLSAEAIGIMRRLLRRNPERRLGSSERDAEDVKKQPFFRTLGWEALLARRLPPPFVPTLSGRTDVSNFDEEFTGEAPTLSPPRDARPLTAAEQAAFLDFDFVAGGC

SEQ ID NO: 119 - protein, 290 aa, Homo sapiens
MSNYVNDMWPGSPQEKDSPSTSRSGGSSRLSSRSRSRSFSRSSRSHSRVSSRFSSRSRRSKSRSRSRRRHQRKYRRYSRSYSRSRSRSRSRRYRERRYGFTRRYYRSPSRYRSRSRSRSRSRGRSYCGRAYAIARGQRYYGFGRTVYPEEHSRWRDRSRTRSRSRTPFRLSEKDRMELLEIAKTNAAKALGTTNIDLPASLRTVPSAKETSRGIGVSSNGAKPELSEKVTEDGTRNPNEKPTQQRSIAFSSNNSVAKPIQKSAKAATEEASSRSPKIDQKKSPYGLWIPI

SEQ ID NO: 120 - protein, 680 aa, Homo sapiens
MLPQIPFLLLVSLNLVHGVFYAERYQMPTGIKGPLPNTKTQFFIPYTIKSKGIAVRGEQGTPGPPGPAGPRGHPGPSGPPGKPGYGSPGLQGEPGLPGPPGPSAVGKPGVPGLPGKPGERGPYGPKGDVGPAGLPGPRGPPGPPGIPGPAGISVPGKPGQQGPTGAPGPRGFPGEKGAPGVPGMNGQKGEMGYGAPGRPGERGLPGPQGPTGPSGPPGVGKRGENGVPGQPGIKGDRGFPGEMGPIGPPGPQGPPGERGPEGIGKPGAAGAPGQPGIPGTKGLPGAPGIAGPPGPPGFGKPGLPGLKGERGPAGLPGGPGAKGEQGPAGLPGKPGLTGPPGNMGPQGPKGIPGSHGLPGPKGETGPAGPAGYPGAKGERGSPGSDGKPGYPGKPGLDGPKGNPGLPGPKGDPGVGGPPGLPGPVGPAGAKGMPGHNGEAGPRGAPGIPGTRGPIGPPGIPGFPGSKGDPGSPGPPGPAGIATKGLNGPTGPPGPPGPRGHSGEPGLPGPPGPPGPPGQAVMPEGFIKAGQRPSLSGTPLVSANQGVTGMPVSAFTVILSKAYPAIGTPIPFDKILYNRQQHYDPRTGIFTCQIPGIYYFSYHVHVKGTHVWVGLYKNGTPVMYTYDEYTKGYLDQASGSAIIDLTENDQVWLQLPNAESNGLYSSEYVHSSFSGFLVAPM

SEQ ID NO: 121 - protein, 175 aa, Homo sapiens
MAEVHVIGQIIGASGFSESSLFCKWGIHTGAAWKLLSGVREGQTQVDTPQIGDMAYWSHPIDLHFATKGLQGWPRLHFQVWSQDSFGRCQLAGYGFCHVPSSPGTHQLACPTWRPLGSWREQLARAFVGGGPQLLHGDTIYSGADRYRLHTAAGGTVHLEIGLLLRNFDRYGVEC

SEQ ID NO: 122 - protein, 1291 aa, Homo sapiens
MAGAASPCANGCGPGAPSDAEVLHLCRSLEVGTVMTLFYSKKSQRPERKTFQVKLETRQITWSRGADKIEGAIDIREIKEIRPGKTSRDFDRYQEDPAFRPDQSHCFVILYGMEFRLKTLSLQATSEDEVNMWIKGLTWLMEDTLQAPTPLQIERWLRKQFYSVDRNREDRISAKDLKNMLSQVNYRVPNMRFLRERLTDLEQRSGDITYGQFAQLYRSLMYSAQKTMDLPFLEASTLRAGERPELCRVSLPEFQQFLLDYQGELWAVDRLQVQEFMLSFLRDPLREIEEPYFFLDEFVTFLFSKENSVWNSQLDAVCPDTMNNPLSHYWISSSHNTYLTGDQFSSESSLEAYARCLRMGCRCIELDCWDGPDGMPVIYHGHTLTTKIKFSDVLHTIKEHAFVASEYPVILSIEDHCSIAQQRNMAQYFKKVLGDTLLTKPVEISADGLPSPNQLKRKILIKHKKLAEGSAYEEVPTSMMYSENDISNSIKNGILYLEDPVNHEWYPHYFVLTSSKIYYSEETSSDQGNEDEEEPKEVSSSTELHSNEKWFHGKLGAGRDGRHIAERLLTEYCIETGAPDGSFLVRESETFVGDYTLSFWRNGKVQHCRIHSRQDAGTPKFFLTDNLVFDSLYDLITHYQQVPLRCNEFEMRLSEPVPQTNAHESKEWYHASLTRAQAEHMLMRVPRDGAFLVRKRNEPNSYAISFRAEGKIKHCRVQQEGQTVMLGNSEFDSLVDLISYYEKHPLYRKMKLRYPINEEALEKIGTAEPDYGALYEGRNPGFYVEANPMPTFKCAVKALFDYKAQREDELTFIKSAIIQNVEKQEGGWWRGDYGGKKQLWFPSNYVEEMVNPVALEPEREHLDENSPLGDLLRGVLDVPACQIAIRPEGKNNRLFVFSISMASVAHWSLDVAADSQEELQDWVKKIREVAQTADARLTEGKIMERRKKIALELSELVVYCRPVPFDEEKIGTERACYRDMSSFPETKAEKYVNKAKGKKFLQYNRLQLSRIYPKGQRLDSSNYDPLPMWICGSQLVALNFQTPDKPMQMNQALFMTGRHCGYVLQPSTMRDEAFDPFDKSSLRGLEPCAISIEVLGARHLPKNGRGIVCPFVEIEVAGAEYDSTKQKTEFVVDNGLNPVWPAKPFHFQISNPEFAFLRFVVYEEDMFSDQNFLAQATFPVKGLKTGYRAVPLKNNYSEDLELASLLIKIDIFPAKQENGDLSPFSGTSLRERGSDASGQLFHGRAREGSFESRYQQPFEDFRISQEHLADHFDSRERRAPRRTRVNGDNRL

SEQ ID NO: 123 - protein, 463 aa, Homo sapiens
MATSKLPVVPGEEENTILMAKERLEALRTAFESGDLPQAASHLQELLASTESIRLEVGVTGESGAGKSSLINALRGLEAEDPGAALTGVMETTMQPSPYPHPQFPDVTLWDLPGAGSPGCPADKYLKQVDFSRYDFFLLVSPRRCGAVETRLAAEILCQGKKFYFVRTKVDEDLAATRTQRPSGFREAAVLQEIRDHCAERLREAGVADPRIFLVSNLSPARYDFPTLVSTWEHDLPSHRRHAGLLSLPDISLEALQKKKAMLQEQVLKTALVLGVIQALPVPGLAAAYDDALLIHSLRGYHRSFGLDDDSLAKLAEQVGKQAGDLRSVIRSPLANEVSPETVLRLYSQSSDGAMRVARAFERGIPVFGTLVAGGISFGAVYTMLQGCLNEMAEDAQRVRIKALEDDEPQPEVSLEVASDNGVEKGGSGEGGGEEAPLSTCRKLGLLLKYILDSWKKHDSEEK

SEQ ID NO: 124 - protein, 420 aa, Homo sapiens
MWWRDLTRLRLWLKREAIPGEGRKAAKVNAGVGEKGIYTASSRGGPPSARSKAVTVVAEGAASRSWLSMDAPELGPGLVERLEQLATCPLCGGSFEDPVLLACEHSFCRACLARRWGTPPATGTEASPTACPCCGLPCPRRSLRSNVRLAVEVRISRELREKLAEPGARAGRRRGGRIPTMGCLDLPGEDMRKTWRRFEVPTSKSSNSEDDLPEDYPVVKKMLHRLTADLTLDPGTAHRRLLISADRRSVQLAPPGTPAPPDGPKRFDQLPAVLGAQGFGAGRHCWEVETADAASCRDSSGEDADDEESHYAVGAAGESVQRKGCVRLCPAGAVWAVEGRGGRLWALTAPEPTLLGGVEPPPRRIRVDLDWERGRVAFYDGRSLDLLYAFQAPGPLGERIFPLFCTCDPRAPLRIVPAES

SEQ ID NO: 125 - protein, 467 aa, Homo sapiens
MQMDNRLPPKKVPGFCSFRYGLSFLVHCCNVIITAQRACLNLTMVVMVNSTDPHGLPNTSTKKLLDNIKNPMYNWSPDIQGIILSSTSYGVIIIQVPVGYFSGIYSTKKMIGFALCLSSVLSLLIPPAAGIGVAWVVVCRAVQGAAQGIVATAQFEIYVKWAPPLERGRLTSMSTSGFLLGPFIVLLVTGVICESLGWPMVFYIFGACGCAVCLLWFVLFYDDPKDHPCISISEKEYITSSLVQQVSSSRQSLPIKAILKSLPVWAISTGSFTFFWSHNIMTLYTPMFINSMLHVNIKENGFLSSLPYLFAWICGNLAGQLSDFFLTRNILSVIAVRKLFTAAGFLLPAIFGVCLPYLSSTFYSIVIFLILAGATGSFCLGGVFINGLDIAPRYFGFIKACSTLTGMIGGLIASTLTGLILKQDPESAWFKTFILMAAINVTGLIFYLIVATAEIQDWAKEKQHTRL

SEQ ID NO: 126 - protein, 784 aa, Homo sapiens
MTSPAAAQSREIDCLSPEAQKLAEARLAAKRAARAEAREIRMKELERQQKEEDSERYSRRSRRNTSASDEDERMSVGSRGSLRVEERPEKDFTEKGSRNMPGLSAATLASLGGTSSRRGSGDTSISIDTEASIREIKDSLAEVEEKYKKAMVSNAQLDNEKTNFMYQVDTLKDMLLELEEQLAESRRQYEEKNKEFEREKHAHSILQFQFAEVKEALKQREEMLEKHGIILNSEIATNGETSDTLNNVGYQGPTKMTKEELNALKSTGDGTLGRASEVEVKNEIVANVGKREILHNTEKEQHTEDTVKDCVDIEVFPAGENTEDQKSSEDTAPFLGTLAGATYEEQVQSQILESSSLPENTVQVESNEVMGAPDDRTRTPLEPSNCWSDLDGGNHTENVGEAAVTQVEEQAGTVASCPLGHSDDTVYHDDKCMVEVPQELETSTGHSLEKEFTNQEAAEPKEVPAHSTEVGRDHNEEEGEETGLRDEKPIKTEVPGSPAGTEGNCQEATGPSTVDTQNEPLDMKEPDEEKSDQQGEALDSSQKKTKNKKKKNKKKKSPVPVETLKDVKKELTYQNTDLSEIKEEEQVKSTDRKSAVEAQNEVTENPKQKIAAESSENVDCPENPKIKLDGKLDQEGDDVQTAAEEVLADGDTLDFEDDTVQSSGPRAGGEELDEGVAKDNAKIDGATQSSPAEPKSEDADRCTLPEHESPSQDISDACEAESTERCEMSEHPSQTVRKALDSNSLENDDLSAPGREPGHFNPESREDTRGGNEKGKSKEDCTMS

SEQ ID NO: 127 - protein, 654 aa, Homo sapiens
MNGHLEAEEQQDQRPDQELTGSWGHGPRSTLVRAKAMAPPPPPLAASTPLLHGEFGSYPARGPRFALTLTSQALHIQRLRPKPEARPRGGLVPLAEVSGCCTLRSRSPSDSAAYFCIYTYPRGRRGARRRATRTFRADGAATYEENRAEAQRWATALTCLLRGLPLPGDGEITPDLLPRPPRLLLLVNPFGGRGLAWQWCKNHVLPMISEAGLSFNLIQTERQNHARELVQGLSLSEWDGIVTVSGDGLLHEVLNGLLDRPDWEEAVKMPVGILPCGSGNALAGAVNQHGGFEPALGLDLLLNCSLLLCRGGGHPLDLLSVTLASGSRCFSFLSVAWGFVSDVDIQSERFRALGSARFTLGTVLGLATLHTYRGRLSYLPATVEPASPTPAHSLPRAKSELTLTPDPAPPMAHSPLHRSVSDLPLPLPQPALASPGSPEPLPILSLNGGGPELAGDWGGAGDAPLSPDPLLSSPPGSPKAALHSPVSEGAPVIPPSSGLPLPTPDARVGASTCGPPDHLLPPLGTPLPPDWVTLEGDFVLMLAISPSHLGADLVAAPHARFDDGLVHLCWVRSGISRAALLRLFLAMERGSHFSLGCPQLGYAAARAFRLEPLTPRGVLTVDGEQVEYGPLQAQMHPGIGTLLTGPPGCPGREP

SEQ ID NO: 128 - protein, 348 aa, Homo sapiens
MNDPNSCVDNATVCSGASCVVPESNFNNILSVVLSTVLTILLALVMFSMGCNVEIKKFLGHIKRPWGICVGFLCQFGIMPLTGFILSVAFDILPLQAVVVLIIGCCPGGTASNILAYWVDGDMDLSVSMTTCSTLLALGMMPLCLLIYTKMWVDSGSIVIPYDNIGTSLVSLVVPVSIGMFVNHKWPQKAKIILKIGSIAGAILIVLIAVVGGILYQSAWIIAPKLWIIGTIFPVAGYSLGFLLARIAGLPWYRCRTVAFETGMQNTQLCSTIVQLSFTPEELNVVFTFPLIYSIFQLAFAAIFLGFYVAYKKCHGKNKAEIPESKENGTEPESSFYKANGGFQPDEK

SEQ ID NO: 129 - protein, 521 aa, Homo sapiens
MACSLQKLFAVEEEFEDEDFLSAVEDAENRFTGSLPVNAGRLRPVSSRPQETVQAQSSRLLLLHPTAPSEALGLPDLDLCLPASSTPSADSRPSCIGAAPLRPVSTSSSWIGNQRRVTVTEVLRETARPQSSALHPLLTFESQQQQVGGFEGPEQDEFDKVLASMELEEPGMELECGVSSEAIPILPAQQREGSVLAKKARVVDLSGSCQKGPVPAIHKAGIMSAQDESLDPVIQCRTPRPPLRPGAVGHLPVPTALTVPTQQLHWEVCPQRSPVQALQPLQAARGTIQSSPQNRFPCQPFQSPSSWLSGKAHLPRPRTPNSSCSTPSRTSSGLFPRIPLQPQAPVSSIGSPVGTPKGPQGALQTPIVTNHLVQLVTAASRTPQQPTHPSTRAKTRRFPGPAGILPHQAALKQLPRNKVPNMAVMIKSLTRSTMDASVVFKDPTGEMQGTVHRLLLETCQNELKPGSVLLLKQIGVFSPSLRNHYLNVTPNNLVHIYSPDSGDGSFLKPSQPFPKMTWMDS

SEQ ID NO: 130 - protein, 1663 aa, Homo sapiens
MGPTSGPSLLLLLLTHLPLALGSPMYSIITPNILRLESEETMVLEAHDAQGDVPVTVTVHDFPGKKLVLSSEKTVLTPATNHMGNVTFTIPANREFKSEKGRNKFVTVQATFGTQVVEKVVLVSLQSGYLFIQTDKTIYTPGSTVLYRIFTVNHKLLPVGRTVMVNIENPEGIPVKQDSLSSQNQLGVLPLSWDIPELVNMGQWKIRAYYENSPQQVFSTEFEVKEYVLPSFEVIVEPTEKFYYIYNEKGLEVTITARFLYGKKVEGTAFVIFGIQDGEQRISLPESLKRIPIEDGSGEVVLSRKVLLDGVQNPRAEDLVGKSLYVSATVILHSGSDMVQAERSGIPIVTSPYQIHFTKTPKYFKPGMPFDLMVFVTNPDGSPAYRVPVAVQGEDTVQSLTQGDGVAKLSINTHPSQKPLSITVRTKKQELSEAEQATRTMQALPYSTVGNSNNYLHLSVLRTELRPGETLNVNFLLRMDRAHEAKIRYYTYLIMNKGRLLKAGRQVREPGQDLVVLPLSITTDFIPSFRLVAYYTLIGASGQREVVADSVWVDVKDSCVGSLVVKSGQSEDRQPVPGQQMTLKIEGDHGARVVLVAVDKGVFVLNKKNKLTQSKIWDVVEKADIGCTPGSGKDYAGVFSDAGLTFTSSSGQQTAQRAELQCPQPAARRRRSVQLTEKRMDKVGKYPKELRKCCEDGMRENPMRFSCQRRTRFISLGEACKKVFLDCCNYITELRRQHARASHLGLARSNLDEDIIAEENIVSRSEFPESWLWNVEDLKEPPKNGISTKLMNIFLKDSITTWEILAVSMSDKKGICVADPFEVTVMQDFFIDLRLPYSVVRNEQVEIRAVLYNYRQNQELKVRVELLHNPAFCSLATTKRRHQQTVTIPPKSSLSVPYVIVPLKTGLQEVEVKAAVYHHFISDGVRKSLKVVPEGIRMNKTVAVRTLDPERLGREGVQKEDIPPADLSDQVPDTESETRILLQGTPVAQMTEDAVDAERLKHLIVTPSGCGEQNMIGMTPTVIAVHYLDETEQWEKFGLEKRQGALELIKKGYTQQLAFRQPSSAFAAFVKRAPSTWLTAYVVKVFSLAVNLIAIDSQVLCGAVKWLILEKQKPDGVFQEDAPVIHQEMIGGLRNNNEKDMALTAFVLISLQEAKDICEEQVNSLPGSITKAGDFLEANYMNLQRSYTVAIAGYALAQMGRLKGPLLNKFLTTAKDKNRWEDPGKQLYNVEATSYALLALLQLKDFDFVPPVVRWLNEQRYYGGGYGSTQATFMVFQALAQYQKDAPDHQELNLDVSLQLPSRSSKITHRIHWESASLLRSEETKENEGFTVTAEGKGQGTLSVVTMYHAKAKDQLTCNKFDLKVTIKPAPETEKRPQDAKNTMILEICTRYRGDQDATMSILDISMMTGFAPDTDDLKQLANGVDRYISKYELDKAFSDRNTLIIYLDKVSHSEDDCLAFKVHQYFNVELIQPGAVKVYAYYNLEESCTRFYHPEKEDGKLNKLCRDELCRCAEENCFIQKSDDKVTLEERLDKACEPGVDYVYKTRLVKVQLSNDFDEYIMAIEQTIKSGSDEVQVGQQRTFISPIKCREALKLEEKKHYLMWGLSSDFWGEKPNLSYIIGKDTWVEHWPEEDECQDEENQKQCQDLGAFTESMVVFGCPN

SEQ ID NO: 131 - protein, 204 aa, Homo sapiens
MEESVVRPSVFVVDGQTDIPFTRLGRSHRRQSCSVARDGPAGSWEQLIQERRSHEVNPAAHLTGANSSLTGSGGPLLWETQLGLAFLRGLSYHDGALVVTKAGYYYIYSKVQLGGVGCPLGLASTITHGLYKRTPRYPEELELLVSQQSPCGRATSSSRVWWDSSFLGGVVHLEAGEKVVVRVLDERLVRLRDGTRSYFGAFMV

SEQ ID NO: 132 - protein, 298 aa, Homo sapiens
MTEPGASPEDPWVKASPVGAHAGEGRAGRARARRGAGRRGASLLSPKSPTLSVPRGCREDSSHPACAKVEYAYSDNSLDPGLFVESTRKGSVVSRANSIGSTSASSVPNTDDEDSDYHQEAYKESYKDRRRRAHTQAEQKRRDAIKRGYDDLQTIVPTCQQQDFSIGSQKLSKAIVLQKTIDYIQFLHKEKKKQEEEVSTLRKDVTALKIMKVNYEQIVKAHQDNPHEGEDQVSDQVKFNVFQGIMDSLFQSFNASISVASFQELSACVFSWIEEHCKPQTLREIVIGVLHQLKNQLY

SEQ ID NO: 133 - protein, 282 aa, Homo sapiens [sequence omitted]

SEQ ID NO: 134 - protein, 259 aa, Homo sapiens
MLLRSWFGNKDFQALPILARLPSMPTDMEHTGHYLHLAFLMTTVFSLSPGTKANYTRLWANSTSSWDSVIQNKTGRNQNENINTNPITPEVDYKGNSTNMPETSHIVALTSKSEQELYIPSVVSNSPSTVQSIENTSKSHGEIFKKDVCAENNNNMAMLICLIIIAVLFLICTFLFLSTVVLANKVSSLRRSKQVGKRQPRSNGDFLASGLWPAESDTWKRTKQLTGPNLVMQSTGVLTATRERKDEEGTEKLTNKQIG

SEQ ID NO: 135 - protein, 440 aa, Homo sapiens
MEYQILKMSLCLFILLFLTPGILCICPLQCICTERHRHVDCSGRNLSTLPSGLQENIIHLNLSYNHFTDLHNQLTQYTNLRTLDISNNRLESLPAHLPRSLWNMSAANNNIKLLDKSDTAYQWNLKYLDVSKNMLEKVVLIKNTLRSLEVLNLSSNKLWTVPTNMPSKLHIVDLSNNSLTQILPGTLINLTNLTHLYLHNNKFTFIPDQSFDQLFQLQEITLYNNRWSCDHKQNITYLLKWMMETKAHVIGTPCSTQISSLKEHNMYPTPSGFTSSLFTVSGMQTVDTINSLSVVTQPKVTKIPKQYRTKETTFGATLSKDTTFTSTDKAFVPYPEDTSTETINSHEAAAATLTIHLQDGMVTNTSLTSSTKSSPTPMTLSITSGMPNNFSEMPQQSTTLNLWREETTTNVKTPLPSVANAWKVNASFLLLLNVVVMLAV

SEQ ID NO: 136 - protein, 237 aa, Homo sapiens
MAGVSACIKYSMFTFNFLFWLCGILILALAIWVRVSNDSQAIFGSEDVGSSSYVAVDILIAVGAIIMILGFLGCCGAIKESRCMLLLFFIGLLLILLLQVATGILGAVFKSKSDRIVNETLYENTKLLSATGESEKQFQEAIIVFQEEFKCCGLVNGAADWGNNFQHYPELCACLDKQRPCQSYNGKQVYKETCISFIKDFLAKNLIIVIGISFGLAVIEILGLVFSMVLYCQIGNK

SEQ ID NO: 137 - protein, 653 aa, Homo sapiens
MRPLRPRAALLALLASLLAAPPVAPAEAPHLVHVDAARALWPLRRFWRSTGFCPPLPHSQADQYVLSWDQQLNLAYVGAVPHRGIKQVRTHWLLELVTTRGSTGRGLSYNFTHLDGYLDLLRENQLLPGFELMGSASGHFTDFEDKQQVFEWKDLVSSLARRYIGRYGLAHVSKWNFETWNEPDHHDFDNVSMTMQGFLNYYDACSEGLRAASPALRLGGPGDSFHTPPRSPLSWGLLRHCHDGTNFFTGEAGVRLDYISLHRKGARSSISILEQEKVVAQQIRQLFPKFADTPIYNDEADPLVGWSLPQPWRADVTYAAMVVKVIAQHQNLLLANTTSAFPYALLSNDNAFLSYHPHPFAQRTLTARFQVNNTRPPHVQLLRKPVLTAMGLLALLDEEQLWAEVSQAGTVLDSNHTVGVLASAHRPQGPADAWRAAVLIYASDDTRAHPNRSVAVTLRLRGVPPGPGLVYVTRYLDNGLCSPDGEWRRLGRPVFPTAEQFRRMRAAEDPVAAAPRPLPAGGRLTLRPALRLPSLLLVHVCARPEKPPGQVTRLRALPLTQGQLVLVWSDEHVGSKCLWTYEIQFSQDGKAYTPVSRKPSTFNLFVFSPDTGAVSGSYRVRALDYWARPGPFSDPVPYLEVPVPRGPPSPGNP

SEQ ID NO: 138 - protein, 1029 aa, Homo sapiens
MASEAVKVVVRCRPMNQRERELRCQPVVTVDCARAQCCIQNPGAADEPPKQFTFDGAYHVDHVTEQIYNEIAYPLVEGVTEGYNGTIFAYGQTGSGKSFTMQGLPDPPSQRGIIPRAFEHVFESVQCAENTKFLVRASYLEIYNEDVRDLLGADTKQKLELKEHPEKGVYVKGLSMHTVHSVAQCEHIMETGWKNRSVGYTLMNKDSSRSHSIFTISIEMSAVDERGKDHLRAGKLNLVDLAGSERQSKTGATGERLKEATKINLSLSALGNVISALVDGRCKHVPYRDSKLTRLLQDSLGGNTKTLMVACLSPADNNYDETLSTLRYANRAKNIRNKPRINEDPKDALLREYQEEIKKLKAILTQQMSPSSLSALLSRQVPPDPVQVEEKLLPQPVIQHDVEAEKQLIREEYEERLARLKADYKAEQESRARLEEDITAMRNSYDVRLSTLEENLRKETEAVLQVGVLYKAEVMSRAEFASSAEYPPAFQYETVVKPKVFSTTDTLPSDDVSKTQVSSRFAELPKVEPSKSEISLGSSESSSLEETSVSEAFPGPEEPSNVEVSMPTEESRSRYFLDECLGQEAAGHLLGEQNYLPQEEPQEVPLQGLLGLQDPFAEVEAKLARLSSTVARTDAPQADVPKVPVQVPAPTDLLEPSDARPEAEAADDFPPRPEVDLASEVALEVVRTAEPGVWLEAQAPVALVAQPEPLPATAGVKRESVGMEVAVLTDDPLPVVDQQQVLARLQLLEQQVVGGEQAKNKDLKEKHKRRKRYADERRKQLVAALQNSDEDSGDWVLLNVYDSIQEEVRAKSKLLEKMQRKLRAAEVEIKDLQSEFQLEKIDYLATIRRQERDSMLLQQLLEQVQPLIRRDCNYSNLEKILRESCWDEDNGFWKIPHPVITKTSLPVAVSTGPQNKPARKTSAADNGEPNMEDDRYRLMLSRSNSENIASNYFRSKRASQILSTDARKSLTHHNSPPGLSCPLSNNSAIPPTQAPEMPQPRPFRLESLDIPFTKAKRKKSKSNFGSEPL

SEQ ID NO: 139 - protein, 355 aa, Homo sapiens
MALSEPILPSFSTFASPCRERGLQERWPRAEPESGGTDDDLNSVLDFILSMGLDGLGAEAAPEPPPPPPPPAFYYPEPGAPPPYSAPAGGLVSELLRPELDAPLGPALHGRFLLAPPGRLVKAEPPEADGGGGYGCAPGLTRGPRGLKREGAPGPAASCMRGPGGRPPPPPDTPPLSPDGPARLPAPGPRASFPPPFGGPGFGAPGPGLHYAPPAPPAFGLFDDAAAAAAALGLAPPAARGLLTPPASPLELLEAKPKRGRRSWPRKRTATHTCSYAGCGKTYTKSSHLKAHLRTHTGEKPYHCNWDGCGWKFARSDELTRHYRKHTGHRPFQCHLCDRAFSRSDHLALHMKRHM

SEQ ID NO: 140 - protein, 569 aa, Homo sapiens
MKKKLVVLGLLAVVLVLVIVGLCLWLPSASKEPDNHVYTRAAVAADAKQCSKIGRDALRDGGSAVDAAIAALLCVGLMNAHSMGIGGGLFLTIYNSTTRKAEVINAREVAPRLAFATMFNSSEQSQKGGLSVAVPGEIRGYELAHQRHGRLPWARLFQPSIQLARQGFPVGKGLAAALENKRTVIEQQPVLCEVFCRDRKVLREGERLTLPQLADTYETLAIEGAQAFYNGSLTAQIVKDIQAAGGIVTAEDLNNYRAELIEHPLNISLGDVVLYMPSAPLSGPVLALILNILKGYNFSRESVESPEQKGLTYHRIVEAFRFAYAKRTLLGDPKFVDVTEVVRNMTSEFFAAQLRAQISDDTTHPISYYKPEFYTPDDGGTAHLSVVAEDGSAVSATSTINLYFGSKVRSPVSGILFNNEMDDFSSPSITNEFGVPPSPANFIQPGKQPLSSMCPTIMVGQDGQVRMVVGAAGGTQITTATALAIIYNLWFGYDVKRAVEEPRLHNQLLPNVTTVERNIDQAVTAALETRHHHTQIASTFIAVVQAIVRTAGGWAAASDSRKGGEPAGY

SEQ ID NO: 141 - protein, 422 aa, Homo sapiens
MSVGAMKKGVGRAVGLGGGSGCQATEEDPLPNCGACAPGQGGRRWRLPQPAWVEGSSARLWEQATGTGWMDLEASLLPTGPNASNTSDGPDNLTSAGSPPRTGSISYINIIMPSVFGTICLLGIIGNSTVIFAVVKKSKLHWCNNVPDIFIINLSVVDLLFLLGMPFMIHQLMGNGVWHFGETMCTLITAMDANSQFTSTYILTAMAIDRYLATVHPISSTKFRKPSVATLVICLLWALSFISITPVWLYARLIPFPGGAVGCGIRLPNPDTDLYWFTLYQFFLAFALPFVVITAAYVRILQRMTSSVAPASQRSIRLRTKRVTRTAIAICLVFFVCWAPYYVLQLTQLSISRPTLTFVYLYNAAISLGYANSCLNPFVYIVLCETFRKRLVLSVKPAAQGQLRAVSNAQTADEERTESKGT

SEQ ID NO: 142 - protein, 787 aa, Homo sapiens
MAAARPARGPELPLLGLLLLLLLGDPGRGAASSGNATGPGPRSAGGSARRSAAVTGPPPPLSHCGRAAPCEPLRYNVCLGSVLPYGATSTLLAGDSDSQEEAHGKLVLWSGLRNAPRCWAVIQPLLCAVYMPKCENDRVELPSRTLCQATRGPCAIVERERGWPDFLRCTPDRFPEGCTNEVQNIKFNSSGQCEVPLVRTDNPKSWYEDVEGCGIQCQNPLFTEAEHQDMHSYIAAFGAVTGLCTLFTLATFVADWRNSNRYPAVILFYVNACFFVGSIGWLAQFMDGARREIVCRADGTMRLGEPTSNETLSCVIIFVIVYYALMAGVVWFVVLTYAWHTSFKALGTTYQPLSGKTSYFHLLTWSLPFVLTVAILAVAQVDGDSVSGICFVGYKNYRYRAGFVLAPIGLVLIVGGYFLIRGVMTLFSIKSNHPGLLSEKAASKINETMLRLGIFGFLAFGFVLITFSCHFYDFFNQAEWERSFRDYVLCQANVTIGLPTKQPIPDCEIKNRPSLLVEKINLFAMFGTGIAMSTWVWTKATLLIWRRTWCRLTGQSDDEPKRIKKSKMIAKAFSKRHELLQNPGQELSFSMHTVSHDGPVAGLAFDLNEPSADVSSAWAQHVTKMVARRGAILPQDISVTPVATPVPPEEQANLWLVEAEISPELQKRLGRKKKRRKRKKEVCPLAPPPELHPPAPAPSTIPRLPQLPRQKCLVAAGAWGAGDSCRQGAWTLVSNPFCPEPSPPQDPFLPSAPAPVAWAHGRRQGLGPIHSRTNLMDTELMDADSDF

SEQ ID NO: 143 - protein, 348 aa, Homo sapiens
MRKMSEEEFYLFKNISSVGPWDGPQYHIAPVWAFYLQAAFMGTVFLIGFPLNAMVLVATLRYKKLRQPLNYILVNVSFGGFLLCIFSVFPVFVASCNGYFVFGRHVCALEGFLGTVAGLVTGWSLAFLAFERYIVICKPFGNFRFSSKHALTVVLATWTIGIGVSIPPFFGWSRFIPEGLQCSCGPDWYTVGTKYRSESYTWFLFIFCFIVPLSLICFSYTQLLRALKAVAAQQQESATTQKAEREVSRMVVVMVGSFCVCYVPYAAFAMYMVNNRNHGLDLRLVTIPSFFSKSACIYNPIIYCFMNKQFQACIMKMVCGKAMTDESDTCSSQKTEVSTVSSTQVGPN

SEQ ID NO: 144 - protein, 428 aa, Homo sapiens
MQELHLLWWALLLGLAQACPEPCDCGEKYGFQIADCAYRDLESVPPGFPANVTTLSLSANRLPGLPEGAFREVPLLQSLWLAHNEIRTVAAGALASLSHLKSLDLSHNLISDFAWSDLHNLSALQLLKMDSNELTFIPRDAFRSLRALRSLQLNHNRLHTLAEGTFTPLTALSHLQINENPFDCTCGIVWLKTWALTTAVSIPEQDNIACTSPHVLKGTPLSRLPPLPCSAPSVQLSYQPSQDGAELRPGFVLALHCDVDGQPAPQLHWHIQIPSGIVEITSPNVGTDGRALPGTPVASSQPRFQAFANGSLLIPDFGKLEEGTYSCLATNELGSAESSVDVALATPGEGGEDTLGRRFHGKAVEGKGCYTVDNEVQPSGPEDNVVIIYLSRAGNPEAAVAEGVPGQLPPGLLLLGQSLLLFFFLTSF

SEQ ID NO: 145 - protein, 780 aa, Homo sapiens
MRTLEDSSGTVLHRLIQEQLRYGNLTETRTLLAIQQQALRGGAGTGGTGSPQASLEILAPEDSQVLQQATRQEPQGQEHQGGENHLAENTLYRLCPQPSKGEELPTYEEAKAHSQYYAAQQAGTRPHAGDRDPRGAPGGSRRQDEALRELRHGHVRSLSERLLQLSLERNGARAPSHMSSSHSFPQLARNQQGPPLRGPPAEGPESRGPPPQYPHVVLAHETTTAVTDPRYRARGSPHFQHAEVRILQAQVPPVFLQQQQQYQYLQQSQEHPPPPHPAALGHGPLSSLSPPAVEGPVSAQASSATSGSAHLAQMEAVLRENARLQRDNERLQRELESSAEKAGRIEKLESEIQRLSEAHESLTRASSKREALEKTMRNKMDSEMRRLQDFNRDLRERLESANRRLASKTQEAQAGSQDMVAKLLAQSYEQQQEQEKLEREMALLRGAIEDQRRRAELLEQALGNAQGRAARAEEELRKKQAYVEKVERLQQALGQLQAACEKREQLELRLRTRLEQELKALRAQQRQAGAPGGSSGSGGSPELSALRLSEQLREKEEQILALEADMTKWEQKYLEERAMRQFAMDAAATAAAQRDTTLIRHSPQPSPSSSFNEGLLTGGHRHQEMESRLKVLHAQILEKDAVIKVLQQRSRRDPGKAIQGSLRPAKSVPSVFAAAAAGTQGWQGLSSSERQTADAPARLTTADRAPTEEPVVTAPPAAHAKHGSRDGSTQTEGPPDSTSTCLPPEPDSLLGCSSSQRAASLDSVATSRVQDLSDMVEILI

SEQ ID NO: 146 - protein, 580 aa, Homo sapiens
MGTTGLESLSLGDRGAAPTVTSSERLVPDPPNDLRKEDVAMELERVGEDEEQMMIKRSSECNPLLQEPIASAQFGATAGTECRKSVPCGWERVVKQRLFGKTAGRFDVYFISPQGLKFRSKSSLANYLHKNGETSLKPEDFDFTVLSKRGIKSRYKDCSMAALTSHLQNQSNNSNWNLRTRSKCKKDVFMPPSSSSELQESRGLSNFTSTHLLLKEDEGVDDVNFRKVRKPKGKVTILKGIPIKKTKKGCRKSCSGFVQSDSKRESVCNKADAESEPVAQKSQLDRTVCISDAGACGETLSVTSEENSLVKKKERSLSSGSNFCSEQKTSGIINKFCSAKDSEHNEKYEDTFLESEEIGTKVEVVERKEHLHTDILKRGSEMDNNCSPTRKDFTGEKIFQEDTIPRTQIERRKTSLYFSSKYNKEALSPPRRKAFKKWTPPRSPFNLVQETLFHDPWKLLIATIFLNRTSGKMAIPVLWKFLEKYPSAEVARTADWRDVSELLKPLGLYDLRAKTIVKFSDEYLTKQWKYPIELHGIGKYGNDSYRIFCVNEWKQVHPEDHKLNKYHDWLWENHEKLSLS

SEQ ID NO: 147 - protein, 320 aa, Homo sapiens
MELLSPPLRDVDLTAPDGSLCSFATTDDFYDDPCFDSPDLRFFEDLDPRLMHVGALLKPEEHSHFPAAVHPAPGAREDEHVRAPSGHHQAGRCLLWACKACKRKTTNADRRKAATMRERRRLSKVNEAFETLKRCTSSNPNQRLPKVEILRNAIRYIEGLQALLRDQDAAPPGAAAAFYAPGPLPPGRGGEHYSGDSDASSPRSNCSDGMMDYSGPPSGARRRNCYEGAYYNEAPSEPRPGKSAAVSSLDCLSSIVERISTESPAAPALLLADVPSESPPRRQEAAAPSEGESSGDPTQSPDAAPQCPAGANPNPIYQVL

SEQ ID NO: 148 - protein, 354 aa, Homo sapiens
MRLAVLFSGALLGLLAAQGTGNDCPHKKSATLLPSFTVTPTVTESTGTTSHRTTKSHKTTTHRTTTTGTTSHGPTTATHNPTTTSHGNVTVHPTSNSTATSQGPSTATHSPATTSHGNATVHPTSNSTATSPGFTSSAHPEPPPPSPSPSPTSKETIGDYTWTNGSQPCVHLQAQIQIRVMYTTQGGGEAWGISVLNPNKTKVQGSCEGAHPHLLLSFPYGHLSFGFMQDLQQKVVYLSYMAVEYNVSFPHAAQWTFSAQNASLRDLQAPLGQSFSCSNSSIILSPAVHLDLLSLRLQAAQLPHTGVFGQSFSCPSDRSILLPLIIGLILLGLLALVLIAFCIIRRRPSAYQAL

SEQ ID NO: 149 - protein, 463 aa, Homo sapiens
MLLLLLPLLWGRERAEGQTSKLLTMQSSVTVQEGLCVHVPCSFSYPSHGWIYPGPVVHGYWFREGANTDQDAPVATNNPARAVWEETRDRFHLLGDPHTKNCTLSIRDARRSDAGRYFFRMEKGSIKWNYKHHRLSVNVTALTHRPNILIPGTLESGCPQNLTCSVPWACEQGTPPMISWIGTSVSPLDPSTTRSSVLTLIPQPQDHGTSLTCQVTFPGASVTTNKTVHLNVSYPPQNLTMTVFQGDGTVSTVLGNGSSLSLPEGQSLRLVCAVDAVDSNPPARLSLSWRGLTLCPSQPSNPGVLELPWVHLRDAAEFTCRAQNPLGSQQVYLNVSLQSKATSGVTQGVVGGAGATALVFLSFCVIFVVVRSCRKKSARPAAGVGDTGIEDANAVRGSASQGPLTEPWAEDSPPDQPPPASARSSVGEGELQYASLSFQMVKPWDSRGQEATDTEYSEIKIHR

SEQ ID NO: 150 - protein, 465 aa, Homo sapiens
MVQKKPAELQGFHRSFKGQNPFELAFSLDQPDHGDSDFGLQCSARPDMPASQPIDIPDAKKRGKKKKRGRATDSFSGRFEDVYQLQEDVLGEGAHARVQTCINLITSQEYAVKIIEKQPGHIRSRVFREVEMLYQCQGHRNVLELIEFFEEEDRFYLVFEKMRGGSILSHIHKRRHFNELEASVVVQDVASALDFLHNKGIAHRDLKPENILCEHPNQVSPVKICDFDLGSGIKLNGDCSPISTPELLTPCGSAEYMAPEVVEAFSEEASIYDKRCDLWSLGVILYILLSGYPPFVGRCGSDCGWDRGEACPACQNMLFESIQEGKYEFPDKDWAHISCAAKDLISKLLVRDAKQRLSAAQVLQHPWVQGCAPENTLPTPMVLQRNSCAKDLTSFAAEAIAMNRQLAQHDEDLAEEEAAGQGQPVLVRATSRCLQLSPPSQSKLAQRRQRASLSSAPVVLVGDHA

SEQ ID NO: 151 - protein, 578 aa, Homo sapiens
MEPDVPLPQTLLSHPSYLKVFVPDYTRELLLELRDCVSNGSLGCPVRLTVGPVTLPSNFQKVLTCTGAPWPCRLLLPSPPWDRWLQVTAESLVGPLGTVAFSAVAALTACRPRSVTIQPLLQSSQNQSFNASSGLLSPSPDHQDLGRSGRVDRSPFCLTNYPVTREDMDVVSVHFQPLDRVSVRVCSDTPSVMRLRLNTGMDSGGSLTISLRANKTEMRNETVVVACVNAASPFLGFNTSLNCTTAFFQGYPLSLSAWSRRANLIIPYPETDNWYLSLQLMCPENAEDCEQAVVHVETTLYLVPCLNDCGPYGQCLLLRRHSYLYASCSCKAGWRGWSCTDNSTAQTVAQQRAATLLLTLSNLMFLAPIAVSVRRFFLVEASVYAYTMFFSTFYHACDQPGEAVLCILSYDTLQYCDFLGSGAAIWVTILCMARLKTVLKYVLFLLGTLVIAMSLQLDRRGMWNMLGPCLFAFVIMASMWAYRCGHRRQCYPTSWQRWAFYLLPGVSMASVGIAIYTSMMTSDNYYYTHSIWHILLAGSAALLLPPPDQPAEPWACSQKFPCHYQICKNDREELYAVT

SEQ ID NO: 152 - protein, 1251 aa, Homo sapiens
MLGWVQRVLPQPPGTPRKTKMQEEEEVEPEPEMEAEVEPEPNPEEAETESESMPPEESFKEEEVAVADPSPQETKEAALTSTISLRAQGAEISEMNSPSRRVLTWLMKGVEKVIPQPVHSITEDPAQILGHGSTGDTGCTDEPNEALEAQDTRPGLRLLLWLEQNLERVLPQPPKSSEVWRDEPAVATGAASDPAPPGRPQEMGPKLQARETPSLPTPIPLQPKEEPKEAPAPEPQPGSQAQTSSLPPTRDPARLVAWVLHRLEMALPQPVLHGKIGEQEPDSPGICDVQTISILPGGQVEPDLVLEEVEPPWEDAHQDVSTSPQGTEVVPAYEEENKAVEKMPRELSRIEEEKEDEEEEEEEEEEEEEEEVTEVLLDSCVVSQVGVGQSEEDGTRPQSTSDQKLWEEVGEEAKKEAEEKAKEEAEEVAEEEAEKEPQDWAETKEEPEAEAEAASSGVPATKQHPEVQVEDTDADSCPLMAEENPPSTVLPPPSPAKSDTLIVPSSASGTHRKKLPSEDDEAEELKALSPAESPVVAWSDPTTPKDTDGQDRAASTASTNSAIINDRLQELVKLFKERTEKVKEKLIDPDVTSDEESPKPSPAKKAPEPAPDTKPAEAEPVEEEHYCDMLCCKFKHRPWKKYQFPQSIDPLTNLMYVLWLFFVVMAWNWNCWLIPVRWAFPYQTPDNIHHWLLMDYLCDLIYFLDITVFQTRLQFVRGGDIITDKKDMRNNYLKSRRFKMDLLSLLPLDFLYLKVGVNPLLRLPRCLKYMAFFEFNSRLESILSKAYVYRVIRTTAYLLYSLHLNSCLYYWASAYQGLGSTHWVYDGVGNSYIRCYYFAVKTLITIGGLPDPKTLFEIVFQLLNYFTGVFAFSVMIGQMRDVVGAATAGQTYYRSCMDSTVKYMNFYKIPKSVQNRVKTWYEYTWHSQGMLDESELMVQLPDKMRLDLAIDVNYNIVSKVALFQGCDRQMIFDMLKRLRSVVYLPNDYVCKKGEIGREMYIIQAGQVQVLGGPDGKSVLVTLKAGSVFGEISLLAVGGGNRRTANVVAHGFTNLFILDKKDLNEILVHYPESQKLLRKKARRMLRSNNKPKEEKSVLILPPRAGTPKLFNAALAMTGKMGGKGAKGGKLAHLRARLKELAALEAAAKQQELVEQAKSSQDVKGEEGSAAPDQHTHPKEAATDPPAPRTPPEPPGSPPSSPPPASLGRPEGEEEGPAEPEEHSVRICMSPGPEPGEQILSVKMPEEREEKAE

SEQ ID NO: 153 - protein, 2845 aa, Homo sapiens
MALGKVLAMALVLALAVLGSLSPGARAGDCKGQRQVLREAPGFVTDGAGNYSVNGNCEWLIEAPSPQHRILLDFLFLDTECTYDYLFVYDGDSPRGPLLASLSGSTRPPPIEASSGKMLLHLFSDANYNLLGFNASFRFSLCPGGCQSHGQCQPPGVCACEPGWGGPDCGLQECSAYCGSHGTCASPLGPCRCEPGFLGRACDLHLWENQGAGWWHNVSARDPAFSARIGAAGAFLSPPGLLAVFGGQDLNNALGDLVLYNFSANTWESWDLSPAPAARHSHVAVAWAGSLVLMGGELADGSLTNDVWAFSPLGRGHWELLAPPASSSSGPPGLAGHAAALVDDVWLYVSGGRTPHDLFSSGLFRFRLDSTSGGYWEQVIPAGGRPPAATGHSMVFHAPSRALLVHGGHRPSTARFSVRVNSTELFHVDRHVWTTLKGRDGLQGPRERAFHTASVLGNYMVVYGGNVHTHYQEEKCYEDGIFFYHLGCHQWVSGAELAPPGTPEGRAAPPSGRYSHVAAVLGGSVLLVAGGYSGRPRGDLMAYKVPPFVFQAPAPDYHLDYCSMYTDHSVCSRDPECSWCQGACQAAPPPGTPLGACPAASCLGLGRLLGDCQACLAFSSPTAPPRGPGTLGWCVHNESCLPRPEQARCRGEQISGTVGWWGPAPVFVTSLEACVTQSFLPGLHLLTFQQPPNTSQPDKVSIVRSTTITLTPSAETDVSLVYRGFIYPMLPGGPGGPGAEDVAVWTRAQRLHVLARMARGPDTENMEEVGRWVAHQEKETRRLQRPGSARLFPLPGRDHKYAVEIQGQLNGSAGPGHSELTLLWDRTGVPGGSEISFFFLEPYRSSSCTSYSSCLGCLADQGCGWCLTSATCHLRQGGAHCGDDGAGGSLLVLVPTLCPLCEEHRDCHACTQDPFCEWHQSTSRKGDAACSRRGRGRGALKSPEECPPLCSQRLTCEDCLANSSQCAWCQSTHTCFLFAAYLARYPHGGCRGWDDSVHSEPRCRSCDGFLTCHECLQSHECGWCGNEDNPTLGRCLQGDFSGPLGGGNCSLWVGEGLGLPVALPARWAYARCPDVDECRLGLARCHPRATCLNTPLSYECHCQRGYQGDGISHCNRTCLEDCGHGVCSGPPDFTCVCDLGWTSDLPPPTPAPGPPAPRCSRDCGCSFHSHCRKRGPGFCDECQDWTWGEHCERCRPGSFGNATGSRGCRPCQCNGHGDPRRGHCDNLSGLCFCQDHTEGAHCQLCSPGYYGDPRAGGSCFRECGGRALLTNVSSVALGSRRVGGLLPPGGGAARAGPGLSYCVWVVSATEELQPCAPGTLCPPLTLTFSPDSSTPCTLSYVLAFDGFPRFLDTGVVQSDRSLIAAFCGQRRDRPLTVQALSGLLVLHWEANGSSSWGFNASVGSARCGSGGPGSCPVPQECVPQDGAAGAGLCRCPQGWAGPHCRMALCPENCNAHTGAGTCNQSLGVCICAEGFGGPDCATKLDGGQLVWETLMDSRLSADTASRFLHRLGHTMVDGPDATLWMFGGLGLPQGLLGNLYRYSVSERRWTQMLAGAEDGGPGPSPRSFHAAAYVPAGRGAMYLLGGLTAGGVTRDFWVLNLTTLQWRQEKAPQTVELPAVAGHTLTARRGLSLLLVGGYSPENGFNQQLLEYQLATGTWVSGAQSGTPPTGLYGHSAVYHEATDSLYVFGGFRFHVELAAPSPELYSLHCPDRTWSLLAPSQGAKRDRMRNVRGSSRGLGQVPGEQPGSWGFREVRKKMALWAALAGTGGFLEEISPHLKEPRPRLFHASALLGDTMVVLGGRSDPDEFSSDVLLYQVNCNAWLLPDLTRSASVGPPMEESVAHAVAAVGSRLYISGGFGGVALGRLLALTLPPDPCRLLSSPEACNQSGACTWCHGACLSGDQAHRLGCGGSPCSPMPRSPEECRRLRTCSECLARHPRTLQPGDGEASTPRCKWCTNCPEGACIGRNGSCTSENDCRINQREVFWAGNCSEAACGAADCEQCTREGKCMWTRQFKRTGETRRILSVQPTYDWTCFSHSLLNVSPMPVESSPPLPCPTPCHLLPNCTSCLDSKGADGGWQHCVWSSSLQQCLSPSYLPLRCMAGGCGRLLRGPESCSLGCAQATQCALCLRRPHCGWCAWGGQDGGGRCMEGGLSGPRDGLTCGRPGASWAFLSCPPEDECANGHHDCNETQNCHDQPHGYECSCKTGYTMDNMTGLCRPVCAQGCVNGSCVEPDHCRCHFGFVGRNCSTECRCNRHSECAGVGARDHCLLCRNHTKGSHCEQCLPLFVGSAVGGGTCRPCHAFCRGNSHICISRKELQMSKGEPKKYSLDPEEIENWVTEGPSEDEAVCVNCQNNSYGEKCESCLQGYFLLDGKCTKCQCNGHADTCNEQDGTGCPCQNNTETGTCQGSSPSDRRDCYKYQCAKCRESFHGSPLGGQQCYRLISVEQECCLDPTSQTNCFHEPKRRALGPGRTVLFGVQPKFTNVDIRLTLDVTFGAVDLYVSTSYDTFVVRVAPDTGVHTVHIQPPPAPPPPPPPADGGPRGAGDPGGAGASSGPGAPAEPRVREVWPRGLITYVTVTEPSAVLVVRGVRDRLVITYPHEHHALKSSRFYLLLLGVGDPSGPGANGSADSQGLLFFRQDQAHIDLFVFFSVFFSCFFLFLSLCVLLWKAKQALDQRQEQRRHLQEMTKMASRPFAKVTVCFPPDPTAPASAWKPAGLPPPAFRRSEPFLAPLLLTGAGGPWGPMGGGCCPPAIPATTAGLRAGPITLEPTEDGMAGVATLLLQLPGGPHAPNGACLGSALVTLRHRLHEYCGGGGGAGGSGHGTGAGRKGLLSQDNLTSMSL

SEQ ID NO: 154 - protein, 489 aa, Homo sapiens
MTPIVTVLICLRLSLGPRTHVQAGTLPKPTLWAEPGSVITQGSPVTLWCQGILETQEYRLYREKKTAPWITRIPQEIVKKGQFPIPSITWEHTGRYRCFYGSHTAGWSEPSDPLELVVTGAYIKPTLSALPSPVVTSGGNVTLHCVSQVAFGSFILCKEGEDEHPQCLNSQPRTHGWSRAIFSVGPVSPSRRWSYRCYAYDSNSPHVWSLPSDLLELLVLGVSKKPSLSVQPGPIVAPGESLTLQCVSDVSYDRFVLYKEGERDFLQLPGPQPQAGLSQANFTLGPVSRSYGGQYRCSGAYNLSSEWSAPSDPLDILIAGQFRGRPFISVHPGPTVASGENVTLLCQSWGPFHTFLLTKAGAADAPLRLRSIHEYPKYQAEFPMSPVTSAHSGTYRCYGSLSSNPYLLSHPSDSLELMVSGAAETLSPPQNKSDSKAGAANTLSPSQNKTASHPQDYTVENLIRMGIAGLVLVVLGILLFEAQHSQRSL

SEQ ID NO: 155 - protein, 678 aa, Homo sapiens
MELRSYQWEVIMPALEGKNIIIWLPTGAGKTRAAAYVAKRHLETVDGAKVVVLVNRVHLVTQHGEEFRRMLDGRWTVTTLSGDMGPRAGFGHLARCHDLLICTAELLQMALTSPEEEEHVELTVFSLIVVDECHHTHKDTVYNVIMSQYLELKLQRAQPLPQVLGLTASPGTGGASKLDGAINHVLQLCANLDTWCIMSPQNCCPQLQEHSQQPCKQYNLCHRRSQDPFGDLLKKLMDQIHDHLEMPELSRKFGTQMYEQQVVKLSEAAALAGLQEQRVYALHLRRYNDALLIHDTVRAVDALAALQDFYHREHVTKTQILCAERRLLALFDDRKNELAHLATHGPENPKLEMLEKILQRQFSSSNSPRGIIFTRTRQSAHSLLLWLQQQQGLQTVDIRAQLLIGAGNSSQSTHMTQRDQQEVIQKFQDGTLNLLVATSVAEEGLDIPHCNVVVRYGLLTNEISMVQARGRARADQSVYAFVATEGSRELKRELINEALETLMEQAVAAVQKMDQAEYQAKIRDLQQAALTKRAAQAAQRENQRQQFPVEHVQLLCINCMVAVGHGSDLRKVEGTHHVNVNPNFSNYYNVSRDPVVINKVFKDWKPGGVISCRNCGEVWGLQMIYKSVKLPVLKVRSMLLETPQGRIQAKKWSRVPFSVPDFDFLQHCAENLSDLSLD

SEQ ID NO: 156 - protein, 1235 aa, Homo sapiens
MFGDLFEEEYSTVSNNQYGKGKKLKTKALEPPAPREFTNLSGIRNQGGTCYLNSLLQTLHFTPEFREALFSLGPEELGLFEDKDKPDAKVRIIPLQLQRLFAQLLLLDQEAASTADLTDSFGWTSNEEMRQHDVQELNRILFSALETSLVGTSGHDLIYRLYHGTIVNQIVCKECKNVSERQEDFLDLTVAVKNVSGLEDALWNMYVEEEVFDCDNLYHCGTCDRLVKAAKSAKLRKLPPFLTVSLLRFNFDFVKCERYKETSCYTFPLRINLKPFCEQSELDDLEYIYDLFSVIIHKGGCYGGHYHVYIKDVDHLGNWQFQEEKSKPDVNLKDLQSEEEIDHPLMILKAILLEENNLIPVDQLGQKLLKKIGISWNKKYRKQHGPLRKFLQLHSQIFLLSSDESTVRLLKNSSLQAESDFQRNDQQIFKMLPPESPGLNNSISCPHWFDINDSKVQPIREKDIEQQFQGKESAYMLFYRKSQLQRPPEARANPRYGVPCHLLNEMDAANIELQTKRAECDSANNTFELHLHLGPQYHFFNGALHPVVSQTESVWDLTFDKRKTLGDLRQSIFQLLEFWEGDMVLSVAKLVPAGLHIYQSLGGDELTLCETEIADGEDIFVWNGVEVGGVHIQTGIDCEPLLLNVLHLDTSSDGEKCCQVIESPHVFPANAEVGTVLTALAIPAGVIFINSAGCPGGEGWTAIPKEDMRKTFREQGLRNGSSILIQDSHDDNSLLTKEEKWVTSMNEIDWLHVKNLCQLESEEKQVKISATVNTMVFDIRIKAIKELKLMKELADNSCLRPIDRNGKLLCPVPDSYTLKEAELKMGSSLGLCLGKAPSSSQLFLFFAMGSDVQPGTEMEIVVEETISVRDCLKLMLKKSGLQGDAWHLRKMDWCYEAGEPLCEEDATLKELLICSGDTLLLIEGQLPPLGFLKVPIWWYQLQGPSGHWESHQDQTNCTSSWGRVWRATSSQGASGNEPAQVSLLYLGDIEISEDATLAELKSQAMTLPPFLEFGVPSPAHLRAWTVERKRPGRLLRTDRQPLREYKLGRRIEICLEPLQKGENLGPQDVLLRTQVRIPGERTYAPALDLVWNAAQGGTAGSLRQRVADFYRLPVEKIEIAKYFPEKFEWLPISSWNQQITKRKKKKKQDYLQGAPYYLKDGDTIGVKNLLIDDDDDFSTIRDDTGKEKQKQRALGRRKSQEALHEQSSYILSSAETPARPRAPETSLSIHVGSFR

SEQ ID NO: 157 - protein, 724 aa, Homo sapiens
MAGLTAAAPRPGVLLLLLSILHPSRPGGVPGAIPGGVPGGVFYPGAGLGALGGGALGPGGKPLKPVPGGLAGAGLGAGLGAFPAVTFPGALVPGGVADAAAAYKAAKAGAGLGGVPGVGGLGVSAGAVVPQPGAGVKPGKVPGVGLPGVYPGGVLPGARFPGVGVLPGVPTGAGVKPKAPGVGGAFAGIPGVGPFGGPQPGVPLGYPIKAPKLPGGYGLPYTTGKLPYGYGPGGVAGAAGKAGYPTGTGVGPQAAAAAAAKAAAKFGAGAAGVLPGVGGAGVPGVPGAIPGIGGIAGVGTPAAAAAAAAAAKAAKYGAAAGLVPGGPGFGPGVVGVPGAGVPGVGVPGAGIPVVPGAGIPGAAVPGVVSPEAAAKAAAKAAKYGARPGVGVGGIPTYGVGAGGFPGFGVGVGGIPGVAGVPGVGGVPGVGGVPGVGISPEAQAAAAAKAAKYGVGTPAAAAAKAAAKAAQFGLVPGVGVAPGVGVAPGVGVAPGVGLAPGVGVAPGVGVAPGVGVAPGIGPGGVAAAAKSAAKVAAKAQLRAAAGLGAGIPGLGVGVGVPGLGVGAGVPGLGVGAGVPGFGAVPGALAAAKAAKYGAAVPGVLGGLGALGGVGIPGGVVGAGPAAAAAAAKAAAKAAQFGLVGAAGLGGLGVGGLGVPGVGGLGGIPPAAAAKAAKYGAAGLGGVLGGAGQFPLGGVAARPGFGLSPIFPGGACLGKACGRKRK

SEQ ID NO: 158 - protein, 1938 aa, Homo sapiens
MSSDAEMAIFGEAAPYLRKPEKERIEAQNRPFDSKKACFVADNKEMYVKGMIQTRENDKVIVKTLDDRMLTLNNDQVFPMNPPKFDKIEDMAMMTHLHEPAVLYNLKERYAAWMIYTYSGLFCVTVNPYKWLPVYKPEVVAAYRGKKRQEAPPHIFSISDNAYQFMLTDRDNQSILITGESGAGKTVNTKRVIQYFATIAVTGDKKKETQPGKMQGTLEDQIIQANPLLEAFGNAKTVRNDNSSRFGKFIRIHFGATGKLASADIETYLLEKSRVTFQLSSERSYHIFYQIMSNKKPELIDLLLISTNPFDFPFVSQGEVTVASIDDSEELLATDNAIDILGFSSEEKVGIYKLTGAVMHYGNMKFKQKQREEQAEPDGTEVADKAGYLMGLNSAEMLKGLCCPRVKVGNEYVTKGQNVQQVTNSVGALAKAVYEKMFLWMVTRINQQLDTKQPRQYFIGVLDIAGFEIFDFNSLEQLCINFTNEKLQQFFNHHMFVLEQEEYKKEGIEWEFIDFGMDLAACIELIEKPMGIFSILEEECMFPKATDTSFKNKLYDQHLGKSNNFQKPKPAKGKAEAHFSLVHYAGTVDYNIAGWLDKNKDPLNETVVGLYQKSSLKLLSFLFSNYAGAETGDSGGSKKGGKKKGSSFQTVSAVFRENLNKLMTNLRSTHPHFVRCLIPNETKTPGVMDHYLVMHQLRCNGVLEGIRICRKGFPSRILYADFKQRYRILNASAIPEGQFIDSKNASEKLLNSIDVDREQFRFGNTKVFFKAGLLGLLEEMRDEKLVTLMTSTQAVCRGYLMRVEFKKMMERRDSIFCIQYNIRSFMNVKHWPWMNLFFKIKPLLKSAEAEKEMATMKEDFERTKEELARSEARRKELEEKMVSLLQEKNDLQLQVQSETENLMDAEERCEGLIKSKILLEAKVKELTERLEEEEEMNSELVAKKRNLEDKCSSLKRDIDDLELTLTKVEKEKHATENKVKNLSEEMTALEENISKLTKEKKSLQEAHQQTLDDLQVEEDKVNGLIKINAKLEQQTDDLEGSLEQEKKLRADLERAKRKLEGDLKMSQESIMDLENDKQQIEEKLKKKEFELSQLQAKIDDEQVHSLQFQKKIKELQARIEELEEEIEAEHTLRAKIEKQRSDLARELEEISERLEEASGATSAQIEMNKKREAEFQKMRRDLEEATLQHEATAATLRKKQADSVAELGEQIDNLQRVKQKLEKEKSELKMEIDDMASNIEALSKSKSNIERTCRTVEDQFSEIKAKDEQQTQLIHDLNMQKARLQTQNGELSHRVEEKESLISQLTKSKQALTQQLEELKRQMEEETKAKNAMAHALQSSRHDCDLLREQYEEEQEAKAELQRALSKANSEVAQWRTKYETDAIQRTEELEEAKKKLAQRLQEAEENTETANSKCASLEKTKQRLQGEVEDLMRDLERSHTACATLDKKQRNFDKVLAEWKQKLDESQAELEAAQKESRSLSTELFKMRNAYEEVVDQLETLRRENKNLQEEISDLTEQIAETGKNLQEAEKTKKLVEQEKSDLQVALEEVEGSLEHEESKILRVQLELSQVKSELDRKVIEKDEEIEQLKRNSQRAAEALQSVLDAEIRSRNDALRLKKKMEGDLNEMEIQLGHSNRQMAETQKHLRTVQGQLKDSQLHLDDALRSNEDLKEQLAIVERRNGLLLEELEEMKVALEQTERTRRLSEQELLDASDRVQLLHSQNTSLINTKKKLEADIAQCQAEVENSIQESRNAEEKAKKAITDAAMMAEELKKEQDTSAHLERMKKNLEQTVKDLQHRLDEAEQLALKGGKKQIQKLENRVRELENELDVEQKRGAEALKGAHKYERKVKEMTYQAEEDHKNILRLQDLVDKLQAKVKSYKRQAEEAEEQANTQLSRCRRVQHELEEAAERADIAESQVNKLRAKSRDVGSQKMEE

SEQ ID NO: 159 - protein, 383 aa, Homo sapiens
MGLGRVLLFLAVAFPFAPPAAAAEPHSLRYNLMVLSQDGSVQSGFLAEGHLDGQPFLRYDRQKRRAKPQGQWAENVLGAKTWDTETEDLTENGQDLRRTLTHIKDQKGGLHSLQEIRVCEIHEDSSTRGSRHFYYDGELFLSQNLETQESTVPQSSRAQTLAMNVTNFWKEDAMKTKTHYRAMQADCLQKLQRYLKSGVAIRRTVPPMVNVTCSEVSEGNITVTCRASSFYPRNITLTWRQDGVSLSHNTQQWGDVLPDGNGTYQTWVATRIRQGEEQRFTCYMEHSGNHGTHPVPSGKALVLQSQRTDFPYVSAAMPCFVIIIILCVPCCKKKTSAAEGPELVSLQVLDQHPVGTGDHRDAAQLGFQPLMSATGSTGSTEGT

SEQ ID NO: 160 - protein, 590 aa, Homo sapiens
MSRQSSVSFRSGGSRSFSTASAITPSVSRTSFTSVSRSGGGGGGGFGRVSLAGACGVGGYGSRSLYNLGGSKRISISTSGGSFRNRFGAGAGGGYGFGGGAGSGFGFGGGAGGGFGLGGGAGFGGGFGGPGFPVCPPGGIQEVTVNQSLLTPLNLQIDPSIQRVRTEEREQIKTLNNKFASFIDKVRFLEQQNKVLDTKWTLLQEQGTKTVRQNLEPLFEQYINNLRRQLDSIVGERGRLDSELRNMQDLVEDFKNKYEDEINKRTTAENEFVMLKKDVDAAYMNKVELEAKVDALMDEINFMKMFFDAELSQMQTHVSDTSVVLSMDNNRNLDLDSIIAEVKAQYEEIANRSRTEAESWYQTKYEELQQTAGRHGDDLRNTKHEISEMNRMIQRLRAEIDNVKKQCANLQNAIADAEQRGELALKDARNKLAELEEALQKAKQDMARLLREYQELMNTKLALDVEIATYRKLLEGEECRLSGEGVGPVNISVVTSSVSSGYGSGSGYGGGLGGGLGGGLGGGLAGGSSGSYYSSSSGGVGLGGGLSVGGSGFSASSGRGLGVGFGSGGGSSSSVKFVSTTSSSRKSFKS

SEQ ID NO: 161 - protein, 944 aa, Homo sapiens
GRPGVPPRFLSQRRRQVPGPRSRLRDIHESPSVILGPPGEVPGFRCALWRHLRPHLVLGGALAPPAPIKFTEGPPATLKASVPYEVETLPQNLPAPPWSAAEIFSHVGDRCERNEFQCQDGKCISYKWVCDGSAECQDGSDESQETCLSVTCKSGDFSCGGRVNRCIPQFWRCDGQVDCDNGSDEQGCPPKTCSQDEFRCHDGKCISRQFVCDSDRDCLDGSDEASCPVLTCGPASFQCNSSTCIPQLWACDNDPDCEDGSDEWPQRCRGLYVFQGDSSPCSAFEFHCLSGECIHSSWRCDGGPDCKDKSDEENCAVATCRPDEFQCSDGNCIHGSRQCDREYDCKDMSDEVGCVNVTLCEGPNKFKCHSGECITLDKVCNMARDCRDWSDEPIKECGTNECLDNNGGCSHVCNDLKIGYECLCPDGFQLVAQRRCEDIDECQDPDTCSQLCVNLEGGYKCQCEEGFQLDPHTKACKAVGSIAYLFFTNRHEVRKMTLDRSEYTSLIPNLRNVVALDTEVASNRIYWSDLSQRMICSTQLDRAHGVSSYDTVISRDIQAPDGLAVDWIHSNIYWTDSVLGTVSVADTKGVKRKTLFRENGSKPRAIVVDPVHGFMYWTDWGTPAKIKKGGLNGVDIYSLVTENIQWPNGITLDLLSGRLYWVDSKLHSISSIDVNGGNRKTILEDEKRLAHPFSLAVFEDKVFWTDIINEAIFSANRLTGSDVNLLAENLLSPEDMVLFHNLTQPRGVNWCERTTLSNGGCQYLCLPAPQINPHSPKFTCACPDGMLLARDMRSCLTEAEAAVATQETSTVRLKVSSTAVRTQHTTTRPVPDTSRLPGATPGLTTVEIVTMSHQALGDVAGRGNEKKPSSVRALSIVLPIVLLVFLCLGVFLLWKNWRLKNINSINFDNPVYQKTTEDEVHICHNQDGYSYPSRQMVSLEDDVA

SEQ ID NO: 162 - protein, 198 aa, Homo sapiens
MPVPALCLLWALAMVTRPASAAPMGGPELAQHEELTLLFHGTLQLGQALNGVYRTTEGRLTKARNSLGLYGRTIELLGQEVSRGRDAAQELRASLLETQMEEDILQLQAEATAEVLGEVAQAQKVLRDSVQRLEVQLRSAWLGPAYREFEVLKAHADKQSHILWALTGHVQRQRREMVAQQHRLRQIQERLHTAALPA

SEQ ID NO: 163 - protein, 317 aa, Homo sapiens [sequence omitted]

SEQ ID NO: 164 - protein, 361 aa, Homo sapiens
MGNVLAASSPPAGPPPPPAPALVGLPPPPPSPPGFTLPPLGGSLGAGTSTSRSSERTPGAATASASGAAEDGACGCLPNPGTFEECHRKCKELFPIQMEGVKLTVNKGLSNHFQVNHTVALSTIGESNYHFGVTYVGTKQLSPTEAFPVLVGDMDNSGSLNAQVIHQLGPGLRSKMAIQTQQSKFVNWQVDGEYRGSDFTAAVTLGNPDVLVGSGILVAHYLQSITPCLALGGELVYHRRPGEEGTVMSLAGKYTLNNWLATVTLGQAGMHATYYHKASDQLQVGVEFEASTRMQDTSVSFGYQLDLPKANLLFKGSVDSNWIVGATLEKKLPPLPLTLALGAFLNHRKNKFQCGFGLTIG

SEQ ID NO: 165 - protein, 1321 aa, Homo sapiens
MGAPFVWALGLLMLQMLLFVAGEQGTQDITDASERGLHMQKLGSGSVQAALAELVALPCLFTLQPRPSAARDAPRIKWTKVRTASGQRQDLPILVAKDNVVRVAKSWQGRVSLPSYPRRRANATLLLGPLRASDSGLYRCQVVRGIEDEQDLVPLEVTGVVFHYRSARDRYALTFAEAQEACRLSSAIIAAPRHLQAAFEDGFDNCDAGWLSDRTVRYPITQSRPGCYGDRSSLPGVRSYGRRNPQELYDVYCFARELGGEVFYVGPARRLTLAGARAQCRRQGAALASVGQLHLAWHEGLDQCDPGWLADGSVRYPIQTPRRRCGGPAPGVRTVYRFANRTGFPSPAERFDAYCFRAHHPTSQHGDLETPSSGDEGEILSAEGPPVRELEPTLEEEEVVTPDFQEPLVSSGEEETLILEEKQESQQTLSPTPGDPMLASWPTGEVWLSTVAPSPSDMGAGTAASSHTEVAPTDPMPRRRGRFKGLNGRYFQQQEPEPGLQGGMEASAQPPTSEAAVNQMEPPLAMAVTEMLGSGQSRSPWADLTNEVDMPGAGSAGGKSSPEPWLWPPTMVPPSISGHSRAPVLELEKAEGPSARPATPDLFWSPLEATVSAPSPAPWEAFPVATSPDLPMMAMLRGPKEWMLPHPTPISTEANRVEAHGEATATAPPSPAAETKVYSLPLSLTPTGQGGEAMPTTPESPRADFRETGETSPAQVNKAEHSSSSPWPSVNRNVAVGFVPTETATEPTGLRGIPGSESGVFDTAESPTSGLQATVDEVQDPWPSVYSKGLDASSPSAPLGSPGVFLVPKVTPNLEPWVATDEGPTVNPMDSTVTPAPSDASGIWEPGSQVFEEAESTTLSPQVALDTSIVTPLTTLEQGDKVGVPAMSTLGSSSSQPHPEPEDQVETQGTSGASVPPHQSSPLGKPAVPPGTPTAASVGESASVSSGEPTVPWDPSSTLLPVTLGIEDFELEVLAGSPGVESFWEEVASGEEPALPGTPMNAGAEEVHSDPCENNPCLHGGTCNANGTMYGCSCDQGFAGENCEIDIDDCLCSPCENGGTCIDEVNGFVCLCLPSYGGSFCEKDTEGCDRGWHKFQGHCYRYFAHRRAWEDAEKDCRRRSGHLTSVHSPEEHSFINSFGHENTWIGLNDRIVERDFQWTDNTGLQFENWRENQPDNFFAGGEDCVVMVAHESGRWNDVPCNYNLPYVCKKGTVLCGPPPAVENASLIGARKAKYNVHATVRYQCNEGFAQHHVATIRCRSNGKWDRPQIVCTKPRRSHRMRRHHHHHQHHHQHHHHKSRKERRKHKKHPTEDWEKDEGNFC

SEQ ID NO: 166 - protein, 332 aa, Homo sapiens
MTWTSGQLQREKQARPGSGAVLAFPDDKDLRVYGPAESQSAVFGDVCPLLTSLLDGYNVCVMAYGQTGSGKSYTMLGRHSDDGPVLPLDPQSDLGIIPRVAEELFRLILENTSRSPKVEVSIVEVYNNDIFDLLAKDSIAAVSGVKREVVTAKDGRTEVALLASEAVGSASKLMELVHGGLQLRAKHPTLVHADSSRSHLIITVTLTTASCSDSTADQACSATLPREQTEAGRAGRSRRASQGALAPQLVPGNPAGHAEQVQARLQLVDSAGSECVGGDAKLLVILCISPSQRHLAQTLQGLGFGIRARQVQRGPARKKPPSSQTEGKRRPD

SEQ ID NO: 167 - protein, 902 aa, Homo sapiens
MSEFRIHHDVNELLSLLRVHGGDGAEVYIDLLQKNRTPYVTTTVSAHSAKVKIAEFSRTPEDFLKKYDELKSKNTRNLDPLVYLLSKLTEDKETLQYLQQNAKERAELAAAAVGSSTTSINVPAAASKISMQELEELRKQLGSVATGSTLQQSLELKRKMLRDKQNKKNSGQHLPIFPAWVYERPALIGDFLIGAGISTDTALPIGTLPLASQESAVVEDLLYVLVGVDGRYVSAQPLAGRQSRTFLVDPNLDLSIRELVHRILPVAASYSAVTRFIEEKSSFEYGQVNHALAAAMRTLVKEHLILVSQLEQLHRQGLLSLQKLWFYIQPAMRTMDILASLATSVDKGECLGGSTLSLLHDRSFSYTGDSQAQELCLYLTKAASAPYFEVLEKWIYRGIIHDPYSEFMVEEHELRKERIQEDYNDKYWDQRYTIVQQQIPSFLQKMADKILSTGKYLNVVRECGHDVTCPVAKEIIYTLKERAYVEQIEKAFNYASKVLLDFLMEEKELVAHLRSIKRYFLMDQGDFFVHFMDLAEEELRKPVEDITPPRLEALLELALRMSTANTDPFKDDLKIDLMPHDLITQLLRVLAIETKQEKAMAHADPTELALSGLEAFSFDYIVKWPLSLIINRKALTRYQMLFRHMFYCKHVERQLCSVWISNKTAKQHSLHSAQWFAGAFTLRQRMLNFVQNIQYYMMFEVMEPTWHILEKNLKSASNIDDVLGHHTGFLDTCLKDCMLTNPELLKVFSKLMSVCVMFTNCMQKFTQSMKLDGELGGQTLEHSTVLGLPAGAEERARKELARKHLAEHADTVQLVSGFEATINKFDKNFSAHLLDLLARLSIYSTSDCEHGMASVISRLDFNGFYTERLERLSAERSQKATPQVPVLRGPPAPAPRVAVTAQ

SEQ ID NO: 168 - protein, 397 aa, Homo sapiens
MYQSLALAASPRQAAYADSGSFLHAPGAGSPMFVPPARVPSMLSYLSGCEPSPQPPELAARPGWAQTATADSSAFGPGSPHPPAAHPPGATAFPFAHSPSGPGSGGSAGGRDGSAYQGALLPREQFAAPLGRPVGTSYSATYPAYVSPDVAQSWTAGPFDGSVLHGLPGRRPTFVSDFLEEFPGEGRECVNCGALSTPLWRRDGTGHYLCNACGLYHKMNGVNRPLVRPQKRLSSSRRAGLCCTNCHTTNTTLWRRNSEGEPVCNACGLYMKLHGVPRPLAMKKESIQTRKRKPKTIAKARGSSGSTRNASASPSAVASTDSSAATSKAKPSLASPVCPGPSMAPQASGQEDDSLAPGHLEFKFEPEDFAFPSTAPSPQAGLRGALRQEAWCALALA

SEQ ID NO: 169 - protein, 3695 aa, Homo sapiens
MAKRLCAGSALCVRGPRGPAPLLLVGLALLGAARAREEAGGGFSLHPPYFNLAEGARIAASATCGEEAPARGSPRPTEDLYCKLVGGPVAGGDPNQTIRGQYCDICTAANSNKAHPASNAIDGTERWWQSPPLSRGLEYNEVNVTLDLGQVFHVAYVLIKFANSPRPDLWVLERSMDFGRTYQPWQFFASSKRDCLERFGPQTLERITRDDAAICTTEYSRIVPLENGEIVVSLVNGRPGAMNFSYSPLLREFTKATNVRLRFLRTNTLLGHLMGKALRDPTVTRRYYYSIKDISIGGRCVCHGHADACDAKDPTDPFRLQCTCQHNTCGGTCDRCCPGFNQQPWKPATANSANECQSCNCYGHATDCYYDPEVDRRRASQSLDGTYQGGGVCIDCQHHTTGVNCERCLPGFYRSPNHPLDSPHVCRRCNCESDFTDGTCEDLTGRCYCRPNFSGERCDVCAEGFTGFPSCYPTPSSSNDTREQVLPAGQIVNCDCSAAGTQGNACRKDPRVGRCLCKPNFQGTHCELCAPGFYGPGCQPCQCSSPGVADDRCDPDTGQCRCRVGFEGATCDRCAPGYFHFPLCQLCGCSPAGTLPEGCDEAGRCLCQPEFAGPHCDRCRPGYHGFPNCQACTCDPRGALDQLCGAGGLCRCRPGYTGTACQECSPGFHGFPSCVPCHCSAEGSLHAACDPRSGQCSCRPRVTGLRCDTCVPGAYNFPYCEAGSCHPAGLAPVDPALPEAQVPCMCRAHVEGPSCDRCKPGFWGLSPSNPEGCTRCSCDLRGTLGGVAECQPGTGQCFCKPHVCGQACASCKDGFFGLDQADYFGCRSCRCDIGGALGQSCEPRTGVCRCRPNTQGPTCSEPARDHYLPDLHHLRLELEEAATPEGHAVRFGFNPLEFENFSWRGYAQMAPVQPRIVARLNLTSPDLFWLVFRYVNRGAMSVSGRVSVREEGRSATCANCTAQSQPVAFPPSTEPAFITVPQRGFGEPFVLNPGTWALRVEAEGVLLDYVVLLPSAYYEAALLQLRVTEACTYRPSAQQSGDNCLLYTHLPLDGFPSAAGLEALCRQDNSLPRPCPTEQLSPSHPPLITCTGSDVDVQLQVAVPQPGRYALVVEYANEDARQEVGVAVHTPQRAPQQGLLSLHPCLYSTLCRGTARDTQDHLAVFHLDSEASVRLTAEQARFFLHGVTLVPIEEFSPEFVEPRVSCISSHGAFGPNSAACLPSRFPKPPQPIILRDCQVIPLPPGLPLTHAQDLTPAMSPAGPRPRPPTAVDPDAEPTLLREPQATVVFTTHVPTLGRYAFLLHGYQPAHPTFPVEVLINAGRVWQGHANASFCPHGYGCRTLVVCEGQALLDVTHSELTVTVRVPKGRWLWLDYVLVVPENVYSFGYLREEPLDKSYDFISHCAAQGYHISPSSSSLFCRNAAASLSLFYNNGARPCGCHEVGATGPTCEPFGGQCPCHAHVIGRDCSRCATGYWGFPNCRPCDCGARLCDELTGQCICPPRTIPPDCLLCQPQTFGCHPLVGCEECNCSGPGIQELTDPTCDTDSGQCKCRPNVTGRRCDTCSPGFHGYPRCRPCDCHEAGTAPGVCDPLTGQCYCKENVQGPKCDQCSLGTFSLDAANPKGCTRCFCFGATERCRSSSYTRQEFVDMEGWVLLSTDRQVVPHERQPGTEMLRADLRHVPEAVPEAFPELYWQAPPSYLGDRVSSYGGTLRYELHSETQRGDVFVPMESRPDVVLQGNQMSITFLEPAYPTPGHVHRGQLQLVEGNFRHTETRNTVSREELMMVLASLEQLQIRALFSQISSAVFLRRVALEVASPAGQGALASNVELCLCPASYRGDSCQECAPGFYRDVKGLFLGRCVPCQCHGHSDRCLPGSGVCVDCQHNTEGAHCERCQAGFVSSRDDPSAPCVSCPCPLSVPSNNFAEGCVLRGGRTQCLCKPGYAGASCERCAPGFFGNPLVLGSSCQPCDCSGNGDPNLLFSDCDPLTGACRGCLRHTTGPRCEICAPGFYGNALLPGNCTRCDCTPCGTEACDPHSGHCLCKAGVTGRRCDRCQEGHFGFDGCGGCRPCACGPAAEGSECHPQSGQCHCRPGTMGPQCRECAPGYWGLPEQGCRRCQCPGGRCDPHTGRCNCPPGLSGERCDTCSQQHQVPVPGGPVGHSIHCEVCDHCVVLLLDDLERAGALLPAIHEQLRGINASSMAWARLHRLNASIADLQSQLRSPLGPRHETAQQLEVLEQQSTSLGQDARRLGGQAVGTRDQASQLLAGTEATLGHAKTLLAAIRAVDRTLSELMSQTGHLGLANASAPSGEQLLRTLAEVERLLWEMRARDLGAPQAAAEAELAAAQRLLARVQEQLSSLWEENQALATQTRDRLAQHEAGLMDLREALNRAVDATREAQELNSRNQERLEEALQRKQELSRDNATLQATLHAARDTLASVFRLLHSLDQAKEELERLAASLDGARTPLLQRMQTFSPAGSKLRLVEAAEAHAQQLGQLALNLSSIILDVNQDRLTQRAIEASNAYSRILQAVQAAEDAAGQALQQADHTWATVVRQGLVDRAQQLLANSTALEEAMLQEQQRLGLVWAALQGARTQLRDVRAKKDQLEAHIQAAQAMLAMDTDETSKKIAHAKAVAAEAQDTATRVQSQLQAMQENVERWQGQYEGLRGQDLGQAVLDAGHSVSTLEKTLPQLLAKLSILENRGVHNASLALSASIGRVRELIAQARGAASKVKVPMKFNGRSGVQLRTPRDLADLAAYTALKFYLQGPEPEPGQGTEDRFVMYMGSRQATGDYMGVSLRDKKVHWVYQLGEAGPAVLSIDEDIGEQFAAVSLDRTLQFGHMSVTVERQMIQETKGDTVAPGAEGLLNLRPDDFVFYVGGYPSTFTPPPLLRFPGYRGCIEMDTLNEEVVSLYNFERTFQLDTAVDRPCARSKSTGDPWLTDGSYLDGTGFARISFDSQISTTKRFEQELRLVSYSGVLFFLKQQSQFLCLAVQEGSLVLLYDFGAGLKKAVPLQPPPPLTSASKAIQVFLLGGSRKRVLVRVERATVYSVEQDNDLELADAYYLGGVPPDQLPPSLRRLFPTGGSVRGCVKGIKALGKYVDLKRLNTTGVSAGCTADLLVGRAMTFHGHGFLRLALSNVAPLTGNVYSGFGFHSAQDSALLYYRASPDGLCQVSLQQGRVSLQLLRTEVKTQAGFADGAPHYVAFYSNATGVWLYVDDQLQQMKPHRGPPPELQPQPEGPPRLLLGGLPESGTIYNFSGCISNVFVQRLLGPQRVFDLQQNLGSVNVSTGCAPALQAQTPGLGPRGLQATARKASRRSRQPARHPACMLPPHLRTTRDSYQFGGSLSSHLEFVGILARHRNWPSLSMHVLPRSSRGLLLFTARLRPGSPSLALFLSNGHFVAQMEGLGTRLRAQSRQRSRPGRWHKVSVRWEKNRILLVTDGARAWSQEGPHRQHQGAEHPQPHTLFVGGLPASSHSSKLPVTVGFSGCVKRLRLHGRPLGAPTRMAGVTPCILGPLEAGLFFPGSGGVITLDLPGATLPDVGLELEVRPLAVTGLIFHLGQARTPPYLQLQVTEKQVLLRADDGAGEFSTSVTRPSVLCDGQWHRLAVMKSGNVLRLEVDAQSNHTVGPLLAAAAGAPAPLYLGGLPEPMAVQPWPPAYCGCMRRLAVNRSPVAMTRSVEVHGAVGASGCPAA

SEQ ID NO: 170 - protein, 1303 aa, Homo sapiens
MEAAPGTPPPPPSESPPPPSPPPPSTPSPPPCSPDARPATPHLLHHRLPLPDDREDGELEEGELEDDGAEETQDTSGGPERSRKEKGEKHHSDSDEEKSHRRLKRKRKKEREKEKRRSKKRRKSKHKRHASSSDDFSDFSDDSDFSPSEKGHRKYREYSPPYAPSHQQYPPSHATPLPKKAYSKMDSKSYGMYEDYENEQYGEYEGDEEEDMGKEDYDDFTKELNQYRRAKEGSSRGRGSRGRGRGYRGRGSRGGSRGRGMGRGSRGRGRGSMGGDHPEDEEDFYEEEMDYGESEEPMGDDDYDEYSKELNQYRRSKDSRGRGLSRGRGRGSRGRGKGMGRGRGRGGSRGGMNKGGMNDDEDFYDEDMGDGGGGSYRSRDHDKPHQQSDKKGKVICKYFVEGRCTWGDHCNFSHDIELPKKRELCKFYITGFCARAENCPYMHGDFPCKLYHTTGNCINGDDCMFSHDPLTEETRELLDKMLADDAEAGAEDEKEVEELKKQGINPLPKPPPGVGLLPTPPRPPGPQAPTSPNGRPMQGGPPPPPPPPPPPPGPPQMPMPVHEPLSPQQLQQQDMYNKKIPSLFEIVVRPTGQLAEKLGVRFPGPGGPPGPMGPGPNMGPPGPMGGPMHPDMHPDMHPDMHPDMHADMHADMPMGPGMNPGPPMGPGGPPMMPYGPGDSPHSGMMPPIPPAQNFYENFYQQQEGMEMEPGLLGDAEDYGHYEELPGEPGEHLFPEHPLEPDSFSEGGPPGRPKPGAGVPDFLPSAQRALYLRIQQKQQEEEERARRLAESSKQDRENEEGDTGNWYSSDEDEGGSSVTSILKTLRQQTSSRPPASVGELSSSGLGDPRLQKGHPTGSRLADPRLSRDPRLTRHVEASGGSGPGDSGPSDPRLARALPTSKPEGSLHSSPVGPSSSKGSGPPPTEEEEGERALREKAVNIPLDPLPGHPLRDPRSQLQQFSHIKKDVTLSKPSFARTVLWNPEDLIPLPIPKQDAVPPVPAALQSMPTLDPRLHRAATAGPPNARQRPGASTDSSTQGANLPDFELLSRILKTVNATGSSAAPGSSDKPSDPRVRKAPTDPRLQKPTDSTASSRAAKPGPAEAPSPTASPSGDASPPATAPYDPRVLAAGGLGQGGGGGQSSVLSGISLYDPRTPNAGGKATEPAADTGAQPKGAEGNGKSSASKAKEPPFVRKSALEQPETGKAGADGGTPTDRYNSYNRPRPKAAAAPAATTATPPPEGAPPQPGVHNLPVPTLFGTVKQTPKTGSGSPFAGNSPAREGEQDAASLKDVFKGFDPTASPFCQ

SEQ ID NO: 171 - protein, 1068 aa, Homo sapiens
MNSIKNVPARVLSRRPGHSLEAEREQFDKTQAISISKAINTQEAPVKEKHARRIILGTHHEKGAFTFWSYAIGLPLPSSSILSWKFCHVLHKVLRDGHPNVLHDCQRYRSNIREIGDLWGHLHDRYGQLVNVYTKLLLTKISFHLKHPQFPAGLEVTDEVLEKAAGTDVNNIFQLTVEMFDYMDCELKLSESVFRQLNTAIAVSQMSSGQCRLAPLIQVIQDCSHLYHYTVKLLFKLHSCLPADTLQGHRDRFHEQFHSLRNFFRRASDMLYFKRLIQIPRLPEGPPNFLRASALAEHIKPVVVIPEEAPEDEEPENLIEISTGPPAGEPVVVADLFDQTFGPPNGSVKDDRDLQIESLKREVEMLRSELEKIKLEAQRYIAQLKSQVNALEGELEEQRKQKQKALVDNEQLRHELAQLRAAQLEGERSQGLREEAERKASATEARYNKLKEKHSELVHVHAELLRKNADTAKQLTVTQQSQEEVARVKEQLAFQVEQVKRESELKLEEKSDQLEKLKRELEAKAGELARAQEALSHTEQSKSELSSRLDTLSAEKDALSGAVRQREADLLAAQSLVRETEAALSREQQRSSQEQGELQGRLAERESQEQGLRQRLLDEQFAVLRGAAAEAAGILQDAVSKLDDPLHLRCTSSPDYLVSRAQEALDAVSTLEEGHAQYLTSLADASALVAALTRFSHLAADTIINGGATSHLAPTDPADRLIDTCRECGARALELMGQLQDQQALRHMQASLVRTPLQGILQLGQELKPKSLDVRQEELGAVVDKEMAATSAAIEDAVRRIEDMMNQARHASSGVKLEVNERILNSCTDLMKAIRLLVTTSTSLQKEIVESGRGAATQQEFYAKNSRWTEGLISASKAVGWGATQLVEAADKVVLHTGKYEELIVCSHEIAASTAQLVAASKVKANKHSPHLSRLQECSRTVNERAANVVASTKSGQEQIEDRDTMDFSGLSLIKLKKQEMETQVRVLELEKTLEAERMRLGELRKQHYVLAGASGSPGEEVAIRPSTAPRSVTTKKPPLAQKPSVAPRQDHQLDKKDGIYPAQLVNY

SEQ ID NO: 172 - protein, 825 aa, Homo sapiens
MPSTSFPVPSKFPLGPAAAVFGRGETLGPAPRAGGTMKSAEEEHYGYASSNVSPALPLPTAHSTLPAPCHNLQTSTPGIIPPADHPSGYGAALDGGPAGYFLSSGHTRPDGAPALESPRIEITSCLGLYHNNNQFFHDVEVEDVLPSSKRSPSTATLSLPSLEAYRDPSCLSPASSLSSRSCNSEASSYESNYSYPYASPQTSPWQSPCVSPKTTDPEEGFPRGLGACTLLGSPRHSPSTSPRASVTEESWLGARSSRPASPCNKRKYSLNGRQPPYSPHHSPTPSPHGSPRVSVTDDSWLGNTTQYTSSAIVAAINALTTDSSLDLGDGVPVKSRKTTLEQPPSVALKVEPVGEDLGSPPPPADFAPEDYSSFQHIRKGGFCDQYLAVPQHPYQWAKPKPLSPTSYMSPTLPALDWQLPSHSGPYELRIEVQPKSHHRAHYETEGSRGAVKASAGGHPIVQLHGYLENEPLMLQLFIGTADDRLLRPHAFYQVHRITGKTVSTTSHEAILSNTKVLEIPLLPENSMRAVIDCAGILKLRNSDIELRKGETDIGRKNTRVRLVFRVHVPQPSGRTLSLQVASNPIECSQRSAQELPLVEKQSTDSYPVVGGKKMVLSGHNFLQDSKVIFVEKAPDGHHVWEMEAKTDRDLCKPNSLVVEIPPFRNQRITSPVHVSFYVCNGKRKRSQYQRFTYLPANVPIIKTEPTDDYEPAPTCGPVSQGLSPLPRPYYSQQLAMPPDPSSCLVAGFPPCPQRSTLMPAAPGVSPKLHDLSPAAYTKGVASPGHCHLGLPQPAGEAPAVQDVPRPVATHPGSPGQPPPALLPQQ

SEQ ID NO: 173 - protein, 904 aa, Homo sapiens
MSYIKSNLELYQQYTAMAPKLLARISKLLMICQNAGISVPKGIRNIFEFTWEELISDPSVPTPSDILGLEVSFGAPLVVLMEPTFVQVPTLKKPLPPPPPAPPRPVLLATTGAAKRSTLSPTMARQVRTHQETLNRFQQQSIHLLTELLRLKMKAMVESMSVGANPLDITRRFVEASQLLHLNAKEMAFNCLISTAGRSGYSSGQLWKESLANMSAIGVNSPYQLIYHSSTACLSFSLSAGKEAKKKIGKSRTTEDVSMPPLHRGVGTPANSLEFSDPCPEAREKLQELCRHIEAERATWKGRNISYPMILRNYKAKMPSHLMLARKGDSQTPGLHYPPTAGAQTLSPTSHPSSANHHFSQHCQEGKAPKKAFKFHYTFYDGSSFVYYPSGNVAVCQIPTCCRGRTITCLFNDIPGFSLLALFNTEGQGCVHYNLKTSCPYVLILDEEGGTTNDQQGYVVHKWSWTSRTETLLSLEYKVNEEMKLKVLGQDSITVTFTSLNETVTLTVSANNCPHGMAYDKRLNRRISNMDDKVYKMSRALAEIKKRFQKTVTQFINSILLAAGLFTIEYPTKKEEEEFVRFKMRSRTHPERLPKLSLYSGESLLRSQSGHLESSIAETLKDEPESAPVSPVRKTTKIHTKAKVTSRGKAREGRSPTRWAALPSDCPLVLRKLMLKEDTRAGCKCLVKAPLVSDVELERFLLAPRDPSQVLVFGIISSQNYTSTGQLQWLLNTLYNHQQRGRGSPCIQCRYDSYRLLQYDLDSPLQEDPPLMVKKNSVVQGMILMFAGGKLIFGGRVLNGYGLSKQNLLKQIFRSQQDYKMGYFLPDDYKFSVPNSVLSLEDSESVKKAESEDIQGSSSSLALEDYVEKELSLEAEKTREPEVELHPLSRDSKITSWKKQASKK

SEQ ID NO: 174 - protein, 357 aa, Homo sapiens
MEEGMNVLHDFGIQSTHYLQVNYQDSQDWFILVSVIADLRNAFYVLFPIWFHLQEAVGIKLLWVAVIGDWLNLVFKWILFGQRPYWWVLDTDYYSNTSVPLIKQFPVTCETGPGSPSGHAMGTAGVYYVMVTSTLSIFQGKIKPTYRFRCLNVILWLGFWAVQLNVCLSRIYLAAHFPHQVVAGVLSGIAVAETFSHIHSIYNASLKKYFLITFFLFSFAIGFYLLLKGLGVDLLWTLEKAQRWCEQPEWVHIDTTPFASLLKNLGTLFGLGLALNSSMYRESCKGKLSKWLPFRLSSIVASLVLLHVFDSLKPPSQVELVFYVLSFCKSAVVPLASVSVIPYCLAQVLGQPHKKSL

SEQ ID NO: 175 - protein, 1080 aa, Homo sapiens
MPAKGRYFLNEGEEGPDQDALYEKYQLTSQHGPLLLTLLLVAATACVALIIIAFSQGDPSRHQAILGMAFLVLAVFAALSVLMYVECLLRRWLRALALLTWACLVALGYVLVFDAWTKAACAWEQVPFFLFIVFVVYTLLPFSMRGAVAVGAVSTASHLLVLGSLMGGFTTPSVRVGLQLLANAVIFLCGNLTGAFHKHQMQDASRDLFTYTVKCIQIRRKLRIEKRQQENLLLSVLPAHISMGMKLAIIERLKEHGDRRCMPDNNFHSLYVKRHQNVSILYADIVGFTQLASDCSPKELVVVLNELFGKFDQIAKANECMRIKILGDCYYCVSGLPVSLPTHARNCVKMGLDMCQAIKQVREATGVDINMRVGIHSGNVLCGVIGLRKWQYDVWSHDVSLANRMEAAGVPGRVHITEATLKHLDKAYEVEDGHGQQRDPYLKEMNIRTYLVIDPRSQQPPPPSQHLPRPKGDAALKMRASVRMTRYLESWGAARPFAHLNHRESVSSGETHVPNGRRPKSVPQRHRRTPDRSMSPKGRSEDDSYDDEMLSAIEGLSSTRPCCSKSDDFYTFGSIFLEKGFEREYRLAPIPRARHDFACASLIFVCILLVHVLLMPRTAALGVSFGLVACVLGLVLGLCFATKFSRCCPARGTLCTISERVETQPLLRLTLAVLTIGSLLTVAIINLPLMPFQVPELPVGNETGLLAASSKTRALCEPLPYYTCSCVLGFIACSVFLRMSLEPKVVLLTVALVAYLVLFNLSPCWQWDCCGQGLGNLTKPNGTTSGTPSCSWKDLKTMTNFYLVLFYITLLTLSRQIDYYCRLDCLWKKKFKKEHEEFETMENVNRLLLENVLPAHVAAHFIGDKLNEDWYHQSYDCVCVMFASVPDFKVFYTECDVNKEGLECLRLLNEIIADFDELLLKPKFSGVEKIKTIGSTYMAAAGLSVASGHENQELERQHAHIGVMVEFSIALMSKLDGINRHSFNSFRLRVGINHGPVIAGVIGARKPQYDIWGNTVNVASRMESTGELGKIQVTEETCTILQGLGYSCECRGLINVKGKGELRTYFVCTDTAKFQGLGLN

SEQ ID NO: 176 - protein, 637 aa, Homo sapiens
MTKRKKLRTSGEGLCPPKPLKNPRLGDFYGDPQSSMLGCLHHPEEPEGKLGPVPSTQQHGEEPGKAVSSSPDEETGSPCRLLRQPEKEPAPLPPSQNSFGRFVPQFAKSRKTVTRKEEMKDEDRGSGAFSLETIAESSAQSPGCQLLVETLGVPLQEATELGDPTQADSARPEQSSQSPVQAVPGSGDSQPDDPPDRGTGLSASQRASQDHLSEQGADDSKPETDRVPGDGGQKEHLPSIDSEGEKPDRGAPQEGGAQRTAGAGLPGGPQEEGDGVPCTPASAPTSGPAPGLGPASWCLEPGSVAQGSPDPQQTPSRMGREGEGTHSSLGCSSLGMVVIADLSTDPTELEERALEVAGPDGQASAISPASPRRKAADGGHRRALPGCTSLTGETTGESGEAGQDGKPPGDVLVGPTASLALAPGSGESMMGAGDSGHASPDTGPCVNQKQEPGPAQEEAELGGQNLERDLEGFRVSPQASVVLEHREIADDPLQEPGAQQGIPDTTSELAGQRDHLPHSADQGTWADSLAVELDFLLDSQIQDALDASDFEAPPEQLFPSGNKPGPCWPGPSSHANGDPVAVAKAQPSRLIMGTHRDLEAFKRLNYRKTKLGGKAPLPYPSKGPGNIPRGDPPWREL

SEQ ID NO: 177 - protein, 956 aa, Homo sapiens
MEKMLAGCFLLILGQIVLLPAEARERSRGRSISRGRHARTHPQTALLESSCENKRADLVFIIDSSRSVNTHDYAKVKEFIVDILQFLDIGPDVTRVGLLQYGSTVKNEFSLKTFKRKSEVERAVKRMRHLSTGTMTGLAIQYALNIAFSEAEGARPLRENVPRVIMIVTDGRPQDSVAEVAAKARDTGILIFAIGVGQVDFNTLKSIGSEPHEDHVFLVANFSQIETLTSVFQKKLCTAHMCSTLEHNCAHFCINIPGSYVCRCKQGYILNSDQTTCRIQDLCAMEDHNCEQLCVNVPGSFVCQCYSGYALAEDGKRCVAVDYCASENHGCEHECVNADGSYLCQCHEGFALNPDKKTCTKIDYCASSNHGCQHECVNTDDSYSCHCLKGFTLNPDKKTCRRINYCALNKPGCEHECVNMEESYYCRCHRGYTLDPNGKTCSRVDHCAQQDHGCEQLCLNTEDSFVCQCSEGFLINEDLKTCSRVDYCLLSDHGCEYSCVNMDRSFACQCPEGHVLRSDGKTCAKLDSCALGDHGCEHSCVSSEDSFVCQCFEGYILREDGKTCRRKDVCQAIDHGCEHICVNSDDSYTCECLEGFRLAEDGKRCRRKDVCKSTHHGCEHICVNNGNSYICKCSEGFVLAEDGRRCKKCTEGPIDLVFVIDGSKSLGEENFEVVKQFVTGIIDSLTISPKAARVGLLQYSTQVHTEFTLRNFNSAKDMKKAVAHMKYMGKGSMTGLALKHMFERSFTQGEGARPLSTRVPRAAIVFTDGRAQDDVSEWASKAKANGITMYAVGVGKAIEEELQEIASEPTNKHLFYAEDFSTMDEISEKLKKGICEALEDSDGRQDSPAGELPKTVQQPTESEPVTINIQDLLSCSNFAVQHRYLFEEDNLLRSTQKLSHSTKPSGSPLEEKHDQCKCENLIMFQNLANEEVRKLTQRLEEMTQRMEALENRLRYR

SEQ ID NO: 178 - protein, 920 aa, Homo sapiens
MSDPHSSPLLPEPLSSRYKLYEAEFTSPSWPSTSPDTHPALPLLEMPEEKDLRSSNEDSHIVKIEKLNERSKRKDDGVAHRDSAGQRCICLSKAVGYLTGDMKEYRIWLKDKHLALQFIDWVLRGTAQVMFINNPLSGLIIFIGLLIQNPWWTITGGLGTVVSTLTALALGQDRSAIASGLHGYNGMLVGLLMAVFSEKLDYYWWLLFPVTFTAMSCPVLSSALNSIFSKWDLPVFTLPFNIAVTLYLAATGHYNLFFPTTLVEPVSSVPNITWTEMEMPLLLQAIPVGVGQVYGCDNPWTGGVFLVALFISSPLICLHAAIGSIVGLLAALSVATPFETIYTGLWSYNCVLSCIAIGGMFYALTWQTHLLALICALFCAYMEAAISNIMSVVGVPPGTWAFCLATIIFLLLTTNNPAIFRLPLSKVTYPEANRIYYLTVKSGEEEKAPSGGGGEHPPTAGPKVEEGSEAVLSKHRSVFHIEWSSIRRRSKVFGKGEHQERQNKDPFPYRYRKPTVELLDLDTMEESSEIKVETNISKTSWIRSSMAASGKRVSKALSYITGEMKECGEGLKDKSPVFQFFDWVLRGTSQVMFVNNPLSGILIILGLFIQNPWWAISGCLGTIMSTLTALILSQDKSAIAAGFHGYNGVLVGLLMAVFSDKGDYYWWLLLPVIIMSMSCPILSSALGTIFSKWDLPVFTLPFNITVTLYLAATGHYNLFFPTTLLQPASAMPNITWSEVQVPLLLRAIPVGIGQVYGCDNPWTGGIFLIALFISSPLICLHAAIGSTMGMLAALTIATPFDSIYFGLCGFNSTLACIAIGGMFYVITWQTHLLAIACALFAAYLGAALANMLSVFGLPPCTWPFCLSALTFLLLTTNNPAIYKLPLSKVTYPEANRIYYLSQERNRRASIITKYQAYDVS

SEQ ID NO: 179 - protein, 1105 aa, Homo sapiens
MLEPSSVLHANVNQAPLWCLVLRWCRECKDTVCGGKQKSRVNHTFQRREIEAKEACDWLRAAGFPQYAQLYEDSQFPINIVAVKNDHDFLEKDLVEPLCRRLNTLNKCASMKLDVNFQRKKGDDSDEEDLCISNKWTFQRTSRRWSRVDDLYTLLPRGDRNGSPGGTGMRNTTSSESVLTDLSEPEVCSIHSESSGGSDSRSQPGQCCTDNPVMLDAPLVSSSLPQPPRDVLNHPFHPKNEKPTRARAKSFLKRMETLRGKGAHGRHKGSGRTGGLVISGPMLQQEPESFKAMQCIQIPNGDLQNSPPPACRKGLPCSGKSSGESSPSEHSSSGVSTPCLKERKCHEANKRGGMYLEDLDVLAGTALPDAGDQSRMHEFHSQENLVVHIPKDHKPGTFPKALSIESLSPTDSSNGVNWRTGSISLGREQVPGAREPRLMASCHRASRVSIYDNVPGSHLYASTGDLLDLEKDDLFPHLDDILQHVNGLQEVVDDWSKDVLPELQTHDTLVGEPGLSTFPSPNQITLDFEGNSVSEGRTTPSDVERDVTSLNESEPPGVRDRRDSGVGASLTRPNRRLRWNSFQLSHQPRPAPASPHISSQTASQLSLLQRFSLLRLTAIMEKHSMSNKHGWTWSVPKFMKRMKVPDYKDKAVFGVPLIVHVQRTGQPLPQSIQQALRYLRSNCLDQVGLFRKSGVKSRIHALRQMNENFPENVNYEDQSAYDVADMVKQFFRDLPEPLFTNKLSETFLHIYQYVSKEQRLQAVQAAILLLADENREVLQTLLCFLNDVVNLVEENQMTPMNLAVCLAPSLFHLNLLKKESSPRVIQKKYATGKPDQKDLNENLAAAQGLAHMIMECDRLFEVPHELVAQSRNSYVEAEIHVPTLEELGTQLEESGATFHTYLNHLIQGLQKEAKEKFKGWVTCSSTDNTDLAFKKVGDGNPLKLWKASVEVEAPPSVVLNRVLRERHLWDEDFVQWKVVETLDRQTEIYQYVLNSMAPHPSRDFVVLRTWKTDLPKGMCTLVSLSVEHEEAQLLGGVRAVVMDSQYLIEPCGSGKSRLTHICRIDLKGHSPEWYSKGFGHLCAAEVARIRNSFQPLIAEGPETKI

SEQ ID NO: 180 - protein, 900 aa, Homo sapiens
MLLYRGAPAGPGAPGCGLARPGGGPQAFGIRLSTMSPRYLQSNSSSHTRPFSAIAELLDNAVDPDVSARTVFIDVEEVKNKSCLTFTDDGCGMTPHKLHRMLSFGFTDKVIKKSQCPIGVFGNGFKSGSMRLGKDALVFTKNGGTLTVGLLSQTYLECVQAQAVIVPIVPFNQQNKKMIITEDSLPSLEAILNYSIFNRENDLLAQFDAIPGKKGTRVLIWNIRRNKNGKSELDFDTDQYDILVSDFDTEEKMTGGVTSELPETEYSLRAFCGILYMKPRMKIFLRQKKVTTQMIAKSLANVEYDTYKPTFTNKQVRITFGFSCKNSNQFGIMMYHNNRLIKSFEKVGCQVKPTRGEGVGVIGVIECNFLKPAYNKQDFEYTKEYRLTINALAQKLNAYWKEKTSQDNFETSTVARPIPKVPDQTWVQCDECLKWRKLPGKIDPSMLPARWFCYYNSHPKYRRCSVPEEQELTDEDLCLSKAKKQEQTVEEKKKMPMENENHQVFSNPPKILTVQEMAGLNNKTIGYEGIHSPSVLPSGGEESRSPSLQLKPLDSSVLQFSSKYKWILGEEPVEKRRRLQNEMTTPSLDYSMPAPYRRVEAPVAYPEGENSHDKSSSERSTPPYLFPEYPEASKNTGQNREVSILYPGAKDQRQGSLLPEELEDQMPRLVAEESNRGSTTINKEEVNKGPFVAVVGVAKGVRDSGAPIQLIPFNREELAERRKAVESWNPVPYSVASAAIPAAAIGEKARGYEESEGHNTPKLKNQRELEELKRTTEKLERVLAERNLFQQKVEELEQERNHWQSEFKKVQHELVIYSTQEAEGLYWSKKHMGYRQAEFQILKAELERTKEEKQELKEKLKETETHLEMLQKAQGFGKAYAATYPRQLSPYFCPPSLGAS

SEQ ID NO: 181 - protein, 335 aa, Homo sapiens
MLQGHSSVFQALLGTFFTWGMTAAGAALVFVFSSGQRRILDGSLGFAAGVMLAASYWSLLAPAVEMATSSGGFGAFAFFPVAVGFTLGAAFVYLADLLMPHLGAAEDPQTTLALNFGSTLMKKKSDPEGPALLFPESELSIRIDKSENGEAYQRKKAAATGLPEGPAVPVPSRGNLAQPGGSSWRRIALLILAITIHNVPEGLAVGVGFGAIEKTASATFESARNLAIGIGIQNFPEGLAVSLPLRGAGFSTWRAFWYGQLSGMVEPLAGVFGAFAVVLAEPILPYALAFAAGAMVYVVMDDIIPEAQISGNGKLASWASILGFVVMMSLDVGLG

SEQ ID NO: 182 - protein, 411 aa, Homo sapiens
MAKRPGSPGSREMGLLTFRDVVIEFSLEEWQCLDHAQQNLYRDVMLENYRNLVSLGIAVSKPDLITCLEQNKEPWNIKRNEMVTKHPVMCSHFTQDLPPELGIKDSLQKVIPRRYGKSGHDNLQVKTCKSMGECEVQKGGCNEVNQCLSTTQNKIFQTHKCVKVFGKFSNSNRHKTRHTGKKHFKCKKYGKSFCMVSQLHQHQIIHTRENSYQCEECGKPFNCSSTLSKHKRIHTGEKPYRCEECGKAFTWSSTLTKHRRIHTGEKPYTCEECGQAFSRSSTLANHKRIHTGEKPYTCEECGKAFSLSSSLTYHKRIHTGEKPYTCEECGKAFNCSSTLKKHKIIHTGEKPYKCKECGKAFAFSSTLNTHKRIHTGEEPYKCEECDKAFKWSSSLANHKSMHTGEKPYKCE

SEQ ID NO: 183 - protein, 482 aa, Homo sapiens
MAEAATPGTTATTSGAGAAAATAAAASPTPIPTVTAPSLGAGGGGGGSDGSGGGWTKQVTCRYFMHGVCKEGDNCRYSHDLSDSPYSVVCKYFQRGYCIYGDRCRYEHSKPLKQEEATATELTTKSSLAASSSLSSIVGPLVEMNTGEAESRNSNFATVGAGSEDWVNAIEFVPGQPYCGRTAPSCTEAPLQGSVTKEESEKEQTAVETKKQLCPYAAVGECRYGENCVYLHGDSCDMCGLQVLHPMDAAQRSQHIKSCIEAHEKDMELSFAVQRSKDMVCGICMEVVYEKANPSERRFGILSNCNHTYCLKCIRKWRSAKQFESKIIKSCPECRITSNFVIPSEYWVEEKEEKQKLILKYKEAMSNKACRYFDEGRGSCPFGGNCFYKHAYPDGRREEPQRQKVGTSSRYRAQRRNHFWELIEERENSNPFDNDEEEVVTFELGEMLLMLLAAGGDDELTDSEDEWDLFHDELEDFYDLDL

SEQ ID NO: 184 - protein, 241 aa, Homo sapiens
MAPVRRSAKWRPGGIEARGEGVSTVGYRNKNVRQKTWRPNHPQAFVGSVREGQGFAFRRKLKIQQSYKKLLRKEKKAQTSLESQFTDRYPDNLKHLYLAEEERHRKQARKVDHPLSEQVHQPLLEEQCSIDEPLFEDQCSFDQPQPEEQCIKTVNSFTIPKKNKKKTSNQKAQEEYEQIQAKRAAKKQEFERRKQEREEAQRQYKKKKMEVFKILNKKTKKGQPNLNVQMEYLLQKIQEKC

SEQ ID NO: 185 - protein, 213 aa, Homo sapiens
MPRRAENWDEAEVGAEEAGVEEYGPEEDGGEESGAEESGPEESGPEELGAEEEMEAGRPRPVLRSVNSREPSQVIFCNRSPRVVLPVWLNFDGEPQPYPTLPPGTGRRIHSYRGHLWLFRDAGTHDGLLVNQTELFVPSLNVDGQPIFANITLPVYTLKERCLQVVRSLVKPENYRRLDIVRSLYEDLEDHPNVQKDLERLTQERIAHQRMGD

SEQ ID NO: 186 - protein, 1625 aa, Homo sapiens
MGQKSWIEKTFCKRECIFVIPSMKDSNRCCCGQFTNQHIPPLPSATPSKNEEESKQVETQPEKWSVAKHTQSYPTDSYGVLEFQGGGYSNKAMYIRVSYDTKPDSLLHLMVKDWQLELPKLLISVHGGLQNFEMQPKLKQVFGKGLIKAAMTTGAWIFTGGVSTGVISHVGDALKDHSSKSRGRVCAIGIAPWGIVENKEDLVGKDVTRVYQTMSNPLSKLSVLNNSHTHFILADNGTLGKYGAEVKLRRLLEKHISLQKINTRLGQGVPLVGLVVEGGPNVVSIVLEYLQEEPPIPVVICDGSGRASDILSFAHKYCEEGGIINESLREQLLVTIQKTFNYNKAQSHQLFAIIMECMKKKELVTVFRMGSEGQQDIEMAILTALLKGTNVSAPDQLSLALAWNRVDIARSQIFVFGPHWPPLGSLAPPTDSKATEKEKKPPMATTKGGRGKGKGKKKGKVKEEVEEETDPRKIELLNWVNALEQAMLDALVLDRVDFVKLLIENGVNMQHFLTIPRLEELYNTRLGPPNTLHLLVRDVKKSNLPPDYHISLIDIGLVLEYLMGGAYRCNYTRKNFRTLYNNLFGPKRPKALKLLGMEDDEPPAKGKKKKKKKKEEEIDIDVDDPAVSRFQYPFHELMVWAVLMKRQKMAVFLWQRGEESMAKALVACKLYKAMAHESSESDLVDDISQDLDNNSKDFGQLALELLDQSYKHDEQIAMKLLTYELKNWSNSTCLKLAVAAKHRDFIAHTCSQMLLTDMWMGRLRMRKNPGLKVIMGILLPPTILFLEFRTYDDFSYQTSKENEDGKEKEEENTDANADAGSRKGDEENEHKKQRSIPIGTKICEFYNAPIVKFWFYTISYLGYLLLFNYVILVRMDGWPSLQEWIVISYIVSLALEKIREILMSEPGKLSQKIKVWLQEYWNITDLVAISTFMIGAILRLQNQPYMGYGRVIYCVDIIFWYIRVLDIFGVNKYLGPYVMMIGKMMIDMLYFVVIMLVVLMSFGVARQAILHPEEKPSWKLARNIFYMPYWMIYGEVFADQIDLYAMEINPPCGENLYDEEGKRLPPCIPGAWLTPALMACYLLVANILLVNLLIAVFNNTFFEVKSISNQVWKFQRYQLIMTFHDRPVLPPPMIILSHIYIIIMRLSGRCRKKREGDQEERDRGLKLFLSDEELKRLHEFEEQCVQEHFREKEDEQQSSSDERIRVTSERVENMSMRLEEINERETFMKTSLQTVDLRLAQLEELSNRMVNALENLAGIDRSDLIQARSRASSECEATYLLRQSSINSADGYSLYRYHFNGEELLFEDTSLSTSPGTGVRKKTCSFRIKEEKDVKTHLVPECQNSLHLSLGTSTSATPDGSHLAVDDLKNAEESKLGPDIGISKEDDERQTDSKKEETISPSLNKTDVIHGQDKSDVQNTQLTVETTNIEGTISYPLEETKITRYFPDETINACKTMKSRSFVYSRGRKLVGGVNQDVEYSSITDQQLTTEWQCQVQKITRSHSTDIPYIVSEAAVQAEHKEQFADMQDEHHVAEAIPRIPRLSLTITDRNGMENLLSVKPDQTLGFPSLRSKSLHGHPRNVKSIQGKLDRSGHASSVSSLVIVSGMTAEEKKVKKEKASTETEC

SEQ ID NO: 187 - protein, 831 aa, Homo sapiens
MERPWGAADGLSRWPHGLGLLLLLQLLPPSTLSQDRLDAPPPPAAPLPRWSGPIGVSWGLRAAAAGGAFPRGGRWRRSAPGEDEECGRVRDFVAKLANNTHQHVFDDLRGSVSLSWVGDSTGVILVLTTFHVPLVIMTFGQSKLYRSEDYGKNFKDITDLINNTFIRTEFGMAIGPENSGKVVLTAEVSGGSRGGRIFRSSDFAKNFVQTDLPFHPLTQMMYSPQNSDYLLALSTENGLWVSKNFGGKWEEIHKAVCLAKWGSDNTIFFTTYANGSCKADLGALELWRTSDLGKSFKTIGVKIYSFGLGGRFLFASVMADKDTTRRIHVSTDQGDTWSMAQLPSVGQEQFYSILAANDDMVFMHVDEPGDTGFGTIFTSDDRGIVYSKSLDRHLYTTTGGETDFTNVTSLRGVYITSVLSEDNSIQTMITFDQGGRWTHLRKPENSECDATAKNKNECSLHIHASYSISQKLNVPMAPLSEPNAVGIVIAHGSVGDAISVMVPDVYISDDGGYSWTKMLEGPHYYTILDSGGIIVAIEHSSRPINVIKFSTDEGQCWQTYTFTRDPIYFTGLASEPGARSMNISIWGFTESFLTSQWVSYTIDFKDILERNCEEKDYTIWLAHSTDPEDYEDGCILGYKEQFLRLRKSSVCQNGRDYVVTKQPSICLCSLEDFLCDFGYYRPENDSKCVEQPELKGHDLEFCLYGREEHLTTNGYRKIPGDKCQGGVNPVREVKDLKKKCTSNFLSPEKQNSKSNSVPIILAIVGLMLVTVVAGVLIVKKYVCGGRFLVHRYSVLQQHAEANGVDGVDALDTASHTNKSGYHDDSDEDLLE

SEQ ID NO: 188 - protein, 1274 aa, Homo sapiens [sequence omitted]

SEQ ID NO: 189 - protein, 1439 aa, Homo sapiens
MATLACRVQFLDDTDPFNSTNFPEPSRPPLFTFREDLALGTQLAGVHRLLQAPHKLDDCTLQLSHNGAYLDLEATLAEQRDELEGFQDDAGRGKKHSIILRTQLSVRVHACIEKLYNSSGRDLRRALFSLKQIFQDDKDLVHEFVVAEGLTCLIKVGAEADQNYQNYILRALGQIMLYVDGMNGVINRNETIQWLYTLIGSKFRLVVKTALKLLLVFVEYSESNAPLLIQAVTAVDTKRGVKPWSNIMEILEEKDGVDTELLVYAMTLVNKTLSGLPDQDTFYDVVDCLEELGIAAVSQRHLNKKGTDLDLVEQLNIYEVALRHEDGDETTEPPPSGCRDRRRASVCSSGGGEHRGLDRRRSRRHSVQSIKSTLSAPTSPCSQSAPSFKPNQVRDLREKYSNFGNNSYHSSRPSSGSSVPTTPTSSVSPPQEARLERSSPSGLLTSSFRQHQESLAAERERRRQEREERLQRIEREERNKFSRDYLDKREEQRQAREERYKYLEQLAAEEHEKELRSRSVSRGRADLSLDLTSPAAPACLAPLSHSPSSSDSQEALTVSASSPGTPHHPQASAGDPEPESEAEPEAEAGAGQVADEAGQDIASAHEGAETEVEQALEQEPEERASLSEKERQNEGVNERDNCSASSVSSSSSTLEREEKEDKLSRDRTTGLWPAGVQDAGVNGQCGDILTNKRFMLDMLYAHNRKSPDDEEKGDGEAGRTQQEAEAVASLATRISTLQANSQTQDESVRRVDVGCLDNRGSVKAFAEKFNSGDLGRGSISPDAEPNDKVPETAPVQPKTESDYIWDQLMANPRELRIQDMDFTDLGEEDDIDVLDVDLGHREAPGPPPPPPPTFLGLPPPPPPPLLDSIPPPPVPGNLLVPPPPVFNAPQGLGWSQVPRGQPTFTKKKKTIRLFWNEVRPFDWPCKNNRRCREFLWSKLEPIKVDTSRLEHLFESKSKELSVSKKTAADGKRQEIIVLDSKRSNAINIGLTVLPPPRTIKIAILNFDEYALNKEGIEKILTMIPTDEEKQKIQEAQLANPEIPLGSAEQFLLTLSSISELSARLHLWAFKMDYETTEKEVAEPLLDLKEGIDQLENNKTLGFILSTLLAIGNFLNGTNAKAFELSYLEKVPEVKDTVHKQSLLHHVCTMVVENFPDSSDLYSEIGAITRSAKVDFDQLQDNLCQMERRCKASWDHLKAIAKHEMKPVLKQRMSEFLKDCAERIIILKIVHRRIINRFHSFLLFMGHPPYAIREVNINKFCRIISEFALEYRTTRERVLQQKQKRANHRERNKTRGKMITDSGKFSGSSPAPPSQPQGLSYAEDAAEHENMKAVLKTSSPSVEDATPALGVRTRSRASRGSTSSWTMGTDDSPNVTDDAADEIMDRIVKSATQVPSQRVVPRERKRSRANRKSLRRTLKSGLTPEEARALGLVGTSELQL

SEQ ID NO: 190 - protein, 2843 aa, Homo sapiens
MAAASYDQLLKQVEALKMENSNLRQELEDNSNHLTKLETEASNMKEVLKQLQGSIEDEAMASSGQIDLLERLKELNLDSSNFPGVKLRSKMSLRSYGSREGSVSSRSGECSPVPMGSFPRRGFVNGSRESTGYLEELEKERSLLLADLDKEEKEKDWYYAQLQNLTKRIDSLPLTENFSLQTDMTRRQLEYEARQIRVAMEEQLGTCQDMEKRAQRRIARIQQIEKDILRIRQLLQSQATEAERSSQNKHETGSHDAERQNEGQGVGEINMATSGNGQGSTTRMDHETASVLSSSSTHSAPRRLTSHLGTKVEMVYSLLSMLGTHDKDDMSRTLLAMSSSQDSCISMRQSGCLPLLIQLLHGNDKDSVLLGNSRGSKEARARASAALHNIIHSQPDDKRGRREIRVLHLLEQIRAYCETCWEWQEAHEPGMDQDKNPMPAPVEHQICPAVCVLMKLSFDEEHRHAMNELGGLQAIAELLQVDCEMYGLTNDHYSITLRRYAGMALTNLTFGDVANKATLCSMKGCMRALVAQLKSESEDLQQVIASVLRNLSWRADVNSKKTLREVGSVKALMECALEVKKESTLKSVLSALWNLSAHCTENKADICAVDGALAFLVGTLTYRSQTNTLAIIESGGGILRNVSSLIATNEDHRQILRENNCLQTLLQHLKSHSLTIVSNACGTLWNLSARNPKDQEALWDMGAVSMLKNLIHSKHKMIAMGSAAALRNLMANRPAKYKDANIMSPGSSLPSLHVRKQKALEAELDAQHLSETFDNIDNLSPKASHRSKQRHKQSLYGDYVFDTNRHDDNRSDNFNTGNMTVLSPYLNTTVLPSSSSSRGSLDSSRSEKDRSLERERGIGLGNYHPATENPGTSSKRGLQISTTAAQIAKVMEEVSAIHTSQEDRSSGSTTELHCVTDERNALRRSSAAHTHSNTYNFTKSENSNRTCSMPYAKLEYKRSSNDSLNSVSSSDGYGKRGQMKPSIESYSEDDESKFCSYGQYPADLAHKIHSANHMDDNDGELDTPINYSLKYSDEQLNSGRQSPSQNERWARPKHIIEDEIKQSEQRQSRNQSTTYPVYTESTDDKHLKFQPHFGQQECVSPYRSRGANGSETNRVGSNHGINQNVSQSLCQEDDYEDDKPTNYSERYSEEEQHEEEERPTNYSIKYNEEKRHVDQPIDYSLKYATDIPSSQKQSFSFSKSSSGQSSKTEHMSSSSENTSTPSSNAKRQNQLHPSSAQSRSGQPQKAATCKVSSINQETIQTYCVEDTPICFSRCSSLSSLSSAEDEIGCNQTTQEADSANTLQIAEIKEKIGTRSAEDPVSEVPAVSQHPRTKSSRLQGSSLSSESARHKAVEFSSGAKSPSKSGAQTPKSPPEHYVQETPLMFSRCTSVSSLDSFESRSIASSVQSEPCSGMVSGIISPSDLPDSPGQTMPPSRSKTPPPPPQTAQTKREVPKNKAPTAEKRESGPKQAAVNAAVQRVQVLPDADTLLHFATESTPDGFSCSSSLSALSLDEPFIQKDVELRIMPPVQENDNGNETESEQPKESNENQEKEAEKTIDSEKDLLDDSDDDDIEILEECIISAMPTKSSRKAKKPAQTASKLPPPVARKPSQLPVYKLLPSQNRLQPQKHVSFTPGDDMPRVYCVEGTPINFSTATSLSDLTIESPPNELAAGEGVRGGAQSGEFEKRDTIPTEGRSTDEAQGGKTSSVTIPELDDNKAEEGDILAECINSAMPKGKSHKPFRVKKIMDQVQQASASSSAPNKNQLDGKKKKPTSPVKPIPQNTEYRTRVRKNADSKNNLNAERVFSDNKDSKKQNLKNNSKVFNDKLPNNEDRVRGSFAFDSPHHYTPIEGTPYCFSRNDSLSSLDFDDDDVDLSREKAELRKAKENKESEAKVTSHTELTSNQQSANKTQAIAKQPINRGQPKPILQKQSTFPQSSKDIPDRGAATDEKLQNFAIENTPVCFSHNSSLSSLSDIDQENNNKENEPIKETEPPDSQGEPSKPQASGYAPKSFHVEDTPVCFSRNSSLSSLSIDSEDDLLQECISSAMPKKKKPSRLKGDNEKHSPRNMGGILGEDLTLDLKDIQRPDSEHGLSPDSENFDWKAIQEGANSIVSSLHQAAAAACLSRQASSDSDSILSLKSGISLGSPFHLTPDQEEKPFTSNKGPRILKPGEKSTLETKKIESESKGIKGGKKVYKSLITGKVRSNSEISGQMKQPLQANMPSISRGRTMIHIPGVRNSSSSTSPVSKKGPPLKTPASKSPSEGQTATTSPRGAKPSVKSELSPVARQTSQIGGSSKAPSRSGSRDSTPSRPAQQPLSRPIQSPGRNSISPGRNGISPPNKLSQLPRTSSPSTASTKSSGSGKMSYTSPGRQMSQQNLTKQTGLSKNASSIPRSESASKGLNQMNNGNGANKKVELSRMSSTKSSGSESDRSERPVLVRQSTFIKEAPSPTLRRKLEESASFESLSPSSRPASPTRSQAQTPVLSPSLPDMSLSTHSSVQAGGWRKLPPNLSPTIEYNDGRPAKRHDIARSHSESPSRLPINRSGTWKREHSKHSSSLPRVSTWRRTGSSSSILSASSESSEKAKSEDEKHVNSISGTKQSKENQVSAKGTWRKIKENEFSPTNSTSQTVSSGATNGAESKTLIYQMAPAVSKTEDVWVRIEDCPINNPRSGRSPTGNTPPVIDSVSEKANPNIKDSKDNQAKQNVGNGSVPMRTVGLENRLNSFIQVDAPDQKGTEIKPGQNNPVPVSETNESSIVERTPFSSSSSSKHSSPSGTVAARVTPFNYNPSPRKSSADSTSARPSQIPTPVNNNTKKRDSKTDSTESSGTQSPKRHSGSYLVTSV

SEQ ID NO: 191 - protein, 918 aa, Homo sapiens
MPGGAGAARLCLLAFALQPLRPRAAREPGWTRGSEEGSPKLQHELIIPQWKTSESPVREKHPLKAELRVMAEGRELILDLEKNEQLFAPSYTETHYTSSGNPQTTTRKLEDHCFYHGTVRETELSSVTLSTCRGIRGLITVSSNLSYVIEPLPDSKGQHLIYRSEHLKPPPGNCGFEHSKPTTRDWALQFTQQTKKRPRRMKREDLNSMKYVELYLVADYLEFQKNRRDQDATKHKLIEIANYVDKFYRSLNIRIALVGLEVWTHGNMCEVSENPYSTLWSFLSWRRKLLAQKYHDNAQLITGMSFHGTTIGLAPLMAMCSVYQSGGVNMDHSENAIGVAATMAHEMGHNFGMTHDSADCCSASAADGGCIMAAATGHPFPKVFNGCNRRELDRYLQSGGGMCLSNMPDTRMLYGGRRCGNGYLEDGEECDCGEEEECNNPCCNASNCTLRPGAECAHGSCCHQCKLLAPGTLCREQARQCDLPEFCTGKSPHCPTNFYQMDGTPCEGGQAYCYNGMCLTYQEQCQQLWGPGARPAPDLCFEKVNVAGDTFGNCGKDMNGEHRKCNMRDAKCGKIQCQSSEARPLESNAVPIDTTIIMNGRQIQCRGTHVYRGPEEEGDMLDPGLVMTGTKCGYNHICFEGQCRNTSFFETEGCGKKCNGHGVCNNNQNCHCLPGWAPPFCNTPGHGGSIDSGPMPPESVGPVVAGVLVAILVLAVLMLMYYCCRQNNKLGQLKPSALPSKLRQQFSCPFRVSQNSGTGHANPTFKLQTPQGKRKVINTPEILRKPSQPPPRPPPDYLRGGSPPAPLPAHLSRAARNSPGPGSQIERTESSRRPPPSRPIPPAPNCIVSQDFSRPRPPQKALPANPVPGRRSLPRPGGASPLRPPGAGPQQSRPLAALAPKFPEYRSQRAGGMISSKI

SEQ ID NO: 192 - protein, 631 aa, Homo sapiens
MVSKLSQLQTELLAALLESGLSKEALIQALGEPGPYLLAGEGPLDKGESCGGGRGELAELPNGLGETRGSEDETDDDGEDFTPPILKELENLSPEEAAHQKAVVETLLQEDPWRVAKMVKSYLQQHNIPQREVVDTTGLNQSHLSQHLNKGTPMKTQKRAALYTWYVRKQREVAQQFTHAGQGGLIEEPTGDELPTKKGRRNRFKWGPASQQILFQAYERQKNPSKEERETLVEECNRAECIQRGVSPSQAQGLGSNLVTEVRVYNWFANRRKEEAFRHKLAMDTYSGPPPGPGPGPALPAHSSPGLPPPALSPSKVHGVRYGQPATSETAEVPSSSGGPLVTVSTPLHQVSPTGLEPSHSLLSTEAKLVSAAGGPLPPVSTLTALHSLEQTSPGLNQQPQNLIMASLPGVMTIGPGEPASLGPTFTNTGASTLVIGLASTQAQSVPVINSMGSSLTTLQPVQFSQPLHPSYQQPLMPPVQSHVTQSPFMATMAQLQSPHALYSHKPEVAQYTHTGLLPQTMLITDTTNLSALASLTPTKQVFTSDTEASSESGLHTPASQATTLHVPSQDPASIQHLQPAHRLSASPTVSSSSLVLYQSSDSSNGQSHLLPSNHSVIETFISTQMASSSQ

SEQ ID NO: 193 - protein, 227 aa, Homo sapiens
MEGSAVTVLERGGASSPAERRSKRRRRSGGDGGGGGGARAPEGVRAPAAGQPRATKGAPPPPGTPPPSPMSSAIERKSLDPSEEPVDEVLQIPPSLLTCGGCQQNIGDRYFLKAIDQYWHEDCLSCDLCGCRLGEVGRRLYYKLGRKLCRRDYLRLFGQDGLCASCDKRIRAYEMTMRVKDKVYHLECFKCAACQKHFCVGDRYLLINSDIVCEQDIYEWTKINGMI

SEQ ID NO: 194 - protein, 1137 aa, Homo sapiens
MAGARSRDPWGASGICYLFGSLLVELLFSRAVAFNLDVMGALRKEGEPGSLFGFSVALHRQLQPRPQSWLLVGAPQALALPGQQANRTGGLFACPLSLEETDCYRVDIDQGADMQKESKENQWLGVSVRSQGPGGKIVTCAHRYEARQRVDQILETRDMIGRCFVLSQDLAIRDELDGGEWKFCEGRPQGHEQFGFCQQGTAAAFSPDSHYLLFGAPGTYNWKGLLFVTNIDSSDPDQLVYKTLDPADRLPGPAGDLALNSYLGFSIDSGKGLVRAEELSFVAGAPRANHKGAVVILRKDSASRLVPEVMLSGERLTSGFGYSLAVADLNSDGWPDLIVGAPYFFERQEELGGAVYVYLNQGGHWAGISPLRLCGSPDSMFGISLAVLGDLNQDGFPDIAVGAPFDGDGKVFIYHGSSLGVVAKPSQVLEGEAVGIKSFGYSLSGSLDMDGNQYPDLLVGSLADTAVLFRARPILHVSHEVSIAPRSIDLEQPNCAGGHSVCVDLRVCFSYIAVPSSYSPTVALDYVLDADTDRRLRGQVPRVTFLSRNLEEPKHQASGTVWLKHQHDRVCGDAMFQLQENVKDKLRAIVVTLSYSLQTPRLRRQAPGQGLPPVAPILNAHQPSTQRAEIHFLKQGCGEDKICQSNLQLVRARFCTRVSDTEFQPLPMDVDGTTALFALSGQPVIGLELMVTNLPSDPAQPQADGDDAHEAQLLVMLPDSLHYSGVRALDPAEKPLCLSNENASHVECELGNPMKRGAQVTFYLILSTSGISIETTELEVELLLATISEQELHPVSARARVFIELPLSIAGMAIPQQLFFSGVVRGERAMQSERDVGSKVKYEVTVSNQGQSLRTLGSAFLNIMWPHEIANGKWLLYPMQVELEGGQGPGQKGLCSPRPNILHLDVDSRDRRRRELEPPEQQEPGERQEPSMSWWPVSSAEKKKNITLDCARGTANCVVFSCPLYSFDRAAVLHVWGRLWNSTFLEEYSAVKSLEVIVRANITVKSSIKNLMLRDASTVIPVMVYLDPMAVVAEGVPWWVILLAVLAGLLVLALLVLLLWKMGFFKRAKHPEATVPQYHAVKIPREDRQQFKEEKTGTILRNNWGSPRREGPDAHPILAADGHPELGPDGHPGPGTA

SEQ ID NO: 195 - protein, 417 aa, Homo sapiens
MGSAHPRPWLRLRPQPQPRPALWVLLFFLLLLAAAMPRSAPNDILDLRLPPEPVLNANTVCLTLPGLSRRQMEVCVRHPDVAASAIQGIQIAIHECQHQFRDQRWNCSSLETRNKIPYESPIFSRGFRESAFAYAIAAAGVVHAVSNACALGKLKACGCDASRRGDEEAFRRKLHRLQLDALQRGKGLSHGVPEHPALPTASPGLQDSWEWGGCSPDMGFGERFSKDFLDSREPHRDIHARMRLHNNRVGRQAVMENMRRKCKCHGTSGSCQLKTCWQVTPEFRTVGALLRSRFHRATLIRPHNRNGGQLEPGPAGAPSPAPGAPGPRRRASPADLVYFEKSPDFCEREPRLDSAGTVGRLCNKSSAGSDGCGSMCCGRGHNILRQTRSERCHCRFHWCCFVVCEECRITEWVSVCK

SEQ ID NO: 196 - protein, 311 aa, Homo sapiens
MSNPSAPPPYEDRNPLYPGPPPPGGYGQPSVLPGGYPAYPGYPQPGYGHPAGYPQPMPPTHPMPMNYGPGHGYDGEERAVSDSFGPGEWDDRKVRHTFIRKVYSIISVQLLITVAIIAIFTFVEPVSAFVRRNVAVYYVSYAVFVVTYLILACCQGPRRRFPWNIILLTLFTFAMGFMTGTISSMYQTKAVIIAMIITAVVSISVTIFCFQTKVDFTSCTGLFCVLGIVLLVTGIVTSIVLYFQYVYWLHMLYAALGAICFTLFLAYDTQLVLGNRKHTISPEDYITGALQIYTDIIYIFTFVLQLMGDRN

SEQ ID NO: 197 - protein, 448 aa, Homo sapiens
MAHVGDCTQTPWLPVLVVSLMCSARAEYSNCGENEYYNQTTGLCQECPPCGPGEEPYLSCGYGTKDEDYGCVPCPAEKFSKGGYQICRRHKDCEGFFRATVLTPGDMENDAECGPCLPGYYMLENRPRNIYGMVCYSCLLAPPNTKECVGATSGASANFPGTSGSSTLSPFQHAHKELSGQGHLATALIIAMSTIFIMAIAIVLIIMFYILKTKPSAPACCTSHPGKSVEAQVSKDEEKKEAPDNVVMFSEKDEFEKLTATPAKPTKSENDASSENEQLLSRSVDSDEEPAPDKQGSPELCLLSLVHLAREKSATSNKSAGIQSRRKKILDVYANVCGVVEGLSPTELPFDCLEKTSRMLSSTYNSEKAVVKTWRHLAESFGLKRDEIGGMTDGMQLFDRISTAGYSIPELLTKLVQIERLDAVESLCADILEWAGVVPPASQPHAAS

SEQ ID NO: 198 - protein, 712 aa, Homo sapiens
MLAMDTCKHVGQLQLAQDHSSLNPQKWHCVDCNTTESIWACLSCSHVACGRYIEEHALKHFQESSHPVALEVNEMYVFCYLCDDYVLNDNTTGDLKLLRRTLSAIKSQNYHCTTRSGRFLRSMGTGDDSYFLHDGAQSLLQSEDQLYTALWHRRRILMGKIFRTWFEQSPIGRKKQEEPFQEKIVVKREVKKRRQELEYQVKAELESMPPRKSLRLQGLAQSTIIEIVSVQVPAQTPASPAKDKVLSTSENEISQKVSDSSVKRRPIVTPGVTGLRNLGNTCYMNSVLQVLSHLLIFRQCFLKLDLNQWLAMTASEKTRSCKHPPVTDTVVYQMNECQEKDTGFVCSRQSSLSSGLSGGASKGRKMELIQPKEPTSQYISLCHELHTLFQVMWSGKWALVSPFAMLHSVWRLIPAFRGYAQQDAQEFLCELLDKIQRELETTGTSLPALIPTSQRKLIKQVLNVVNNIFHGQLLSQVTCLACDNKSNTIEPFWDLSLEFPERYQCSGKDIASQPCLVTEMLAKFTETEALEGKIYVCDQCNSKRRRFSSKPVVLTEAQKQLMICHLPQVLRLHLKRFRWSGRNNREKIGVHVGFEEILNMEPYCCRETLKSLRPECFIYDLSAVVMHHGKGFGSGHYTAYCYNSEGGFWVHCNDSKLSMCTMDEVCKAQAYILFYTQRVTENGHSKLLPPELLLGSQHPNEDADTSSNEILS

SEQ ID NO: 199 - protein, 164 aa, Homo sapiens [sequence omitted]

SEQ ID NO: 200 - protein, 560 aa, Homo sapiens
MECLYYFLGFLLLAARLPLDAAKRFHDVLGNERPSAYMREHNQLNGWSSDENDWNEKLYPVWKRGDMRWKNSWKGGRVQAVLTSDSPALVGSNITFAVNLIFPRCQKEDANGNIVYEKNCRNEAGLSADPYVYNWTAWSEDSDGENGTGQSHHNVFPDGKPFPHHPGWRRWNFIYVFHTLGQYFQKLGRCSVRVSVNTANVTLGPQLMEVTVYRRHGRAYVPIAQVKDVYVVTDQIPVFVTMFQKNDRNSSDETFLKDLPIMFDVLIHDPSHFLNYSTINYKWSFGDNTGLFVSTNHTVNHTYVLNGTFSLNLTVKAAAPGPCPPPPPPPRPSKPTPSLGPAGDNPLELSRIPDENCQINRYGHFQATITIVEGILEVNIIQMTDVLMPVPWPESSLIDFVVTCQGSIPTEVCTIISDPTCEITQNTVCSPVDVDEMCLLTVRRTFNGSGTYCVNLTLGDDTSLALTSTLISVPDRDPASPLRMANSALISVGCLAIFVTVISLLVYKKHKEYNPIENSPGNVVRSKGLSVFLNRAKAVFFPGNQEKDPLLKNQEFKGVS

SEQ ID NO: 201 - protein, 631 aa, Homo sapiens
MAAHLVKRCTCLLREAARQAPAMAPVGRLRLAWVAHKTLTSSATSPISHLPGSLMEPVEKERASTPYIEKQVDHLIKKATRPEELLELLGGSHDLDSNQAAMVLIRLSHLLSEKPEDKGLLIQDAHFHQLLCLLNSQIASVWHGTLSKLLGSLYALGIPKASKELQSVEQEVRWRMRKLKYKHLAFLAESCATLSQEQHSQELLAELLTHLERRWTEIEDSHTLVTVMMKVGHLSEPLMNRLEDKCLELVEHFGPNELRKVLVMLAAQSRRSVPLLRAISYHLVQKPFSLTKDVLLDVAYAYGKLSFHQTQVSQRLATDLLSLMPSLTSGEVAHCAKSFALLKWLSLPLFEAFAQHVLNRAQDITLPHLCSVLLAFARLNFHPDQEDQFFSLVHEKLGSELPGLEPALQVDLVWALCVLQQAREAELQAVLHPEFHIQFLGGKSQKDQNTFQKLLHINATALLEYPEYSGPLLPASAVAPGPSALDRKVTPLQKELQETLKGLLGSADKGSLEVATQYGWVLDAEVLLDSDGEFLPVRDFVAPHLAQPTGSQSPPPGSKRLAFLRWEFPNFNSRSKDLLGRFVLARRHIVAAGFLIVDVPFYEWLELKSEWQKGAYLKDKMRKAVAEELAK

SEQ ID NO: 202 - protein, 444 aa, Homo sapiens
MEEEGKKGKKPGIVSPFKRVFLKGEKSRDKKAHEKVTERRPLHTVVLSLPERVEPDRLLSDYIEKEVKYLGQLTSIPGYLNPSSRTEILHFIDNAKRAHQLPGHLTQEHDAVLSLSAYNVKLAWRDGEDIILRVPIHDIAAVSYVRDDAAHLVVLKTAQDPGISPSQSLCAESSRGLSAGSLSESAVGPVEACCLVILAAESKVAAEELCCLLGQVFQVVYTESTIDFLDRAIFDGASTPTHHLSLHSDDSSTKVDIKETYEVEASTFCFPESVDVGGASPHSKTISESELSASATELLQDYMLTLRTKLSSQEIQQFAALLHEYRNGASIHEFCINLRQLYGDSRKFLLLGLRPFIPEKDSQHFENFLETIGVKDGRGIITDSFGRHRRALSTTSSSTTNGNRATGSSDDRSAPSEGDEWDRMISDISSDIEALGCSMDQDSA

SEQ ID NO: 203 - protein, 446 aa, Homo sapiens
MEETIKDPPTSAVLLDHCHFSQVIFNSVEKFYIPGGDVTCHYTFTQHFIPRRKDWIGIFRVGWKTTREYYTFMWVTLPIDLNNKSAKQQEVQFKAYYLPKDDEYYQFCYVDEDGVVRGASIPFQFRPENEEDILVVTTQGEVEEIEQHNKELCKENQELKDSCISLQKQNSDMQAELQKKQEELETLQSINKKLELKVKEQKDYWETELLQLKEQNQKMSSENEKMGIRVDQLQAQLSTQEKEMEKLVQGDQDKTEQLEQLKKENDHLFLSLTEQRKDQKKLEQTVEQMKQNETTAMKKQQELMDENFDLSKRLSENEIICNALQRQKERLEGENDLLKRENSRLLSYMGLDFNSLPYQVPTSDEGGARQNPGLAYGNPYSGIQESSSPSPLSIKKCPICKADDICDHTLEQQQMQPLCFNCPICDKIFPATEKQIFEDHVFCHSL

SEQ ID NO: 204 - protein, 496 aa, Homo sapiens
MADESETAVKPPAPPLPQMMEGNGNGHEHCSDCENEEDNSYNRGGLSPANDTGAKKKKKKQKKKKEKGSETDSAQDQPVKMNSLPAERIQEIQKAIELFSVGQGPAKTMEEASKRSYQFWDTQPVPKLGEVVNTHGPVEPDKDNIRQEPYTLPQGFTWDALDLGDRGVLKELYTLLNENYVEDDDNMFRFDYSPEFLLWALRPPGWLPQWHCGVRVVSSRKLVGFISAIPANIHIYDTEKKMVEINFLCVHKKLRSKRVAPVLIREITRRVHLEGIFQAVYTAGVVLPKPVGTCRYWHRSLNPRKLIEVKFSHLSRNMTMQRTMKLYRLPETPKTAGLRPMETKDIPVVHQLLTRYLKQFHLTPVMSQEEVEHWFYPQENIIDTFVVENANGEVTDFLSFYTLPSTIMNHPTHKSLKAAYSFYNVHTQTPLLDLMSDALVLAKMKGFDVFNALDLMENKTFLEKLKFGIGDGNLQYYLYNWKCPSMGAEKVGLVLQ

SEQ ID NO: 205 - protein, 1198 aa, Homo sapiens
MPVIPALWEVEMGRSQGQEIETILANRSHSDSTPLPNFLSGSHRPECCTCRLLTASGAQDSLPFGRRLYSGPWRSCEEVCHVSVLSVLSTSCGLSLSLPIFPGWMEWLSPDIALPRRDEWTQTSPARKRITHAKVQGAGQLRLSIDAQDRVLLLHIIEGKGLISKQPGTCDPYVKISLIPEDSRLRHQKTQTVPDCRDPAFHEHFFFPVQEEDDQKRLLVTVWNRASQSRQSGLIGCMSFGVKSLLTPDKEISGWYYLLGEHLGRTKHLKVARRRLRPLRDPLLRMPGGGDTENGKKLKITIPRGKDGFGFTICCDSPVRVQAVDSGGPAERAGLQQLDTVLQLNERPVEHWKCVELAHEIRSCPSEIILLVWRMVPQVKPGPDGGVLRRASCKSTHDLQSPPNKREKNCTHGVQARPEQRHSCHLVCDSSDGLLLGGWERYTEVAKRGGQHTLPALSRATAPTDPNYIILAPLNPGSQLLRPVYQEDTIPEESGSPSKGKSYTGLGKKSRLMKTVQTMKGHGNYQNCPVVRPHATHSSYGTYVTLAPKVLVFPVFVQPLDLCNPARTLLLSEELLLYEGRNKAAEVTLFAYSDLLLFTKEDEPGRCDVLRNPLYLQSVKLQEGSSEDLKFCVLYLAEKAECLFTLEAHSQEQKKRVCWCLSENIAKQQQLAASPPDSKMFETEADEKREMALEEGKGPGAEDSPPSKEPSPGQELPPGQDLPPNKDSPSGQEPAPSQEPLSSKDSATSEGSPPGPDAPPSKDVPPCQEPPPAQDLSPCQDLPAGQEPLPHQDPLLTKDLPAIQESPTRDLPPCQDLPPSQVSLPAKALTEDTMSSGDLLAATGDPPAAPRPAFVIPEVRLDSTYSQKAGAEQGCSGDEEDAEEAEEVEEGEEGEEDEDEDTSDDNYGERSEAKRSSMIETGQGAEGGLSLRVQNSLRRRTHSEGSLLQEPRGPCFASDTTLHCSDGEGAASTWGMPSPSTLKKELGRNGGSMHHLSLFFTGHRKMSGADTVGDDDEASRKRKSKNLAKDMKNKLGIFRRRNESPGAPPAGKADKMMKSFKPTSEEALKWGESLEKLLVHKYGLAVFQAFLRTEFSEENLEFWLACEDFKKVKSQSKMASKAKKIFAEYIAIQACKEVNLDSYTREHTKDNLQSVTRGCFDLAQKRIFGLMEKDSYPRFLRSDLYLDLINQKKMSPPL

SEQ ID NO: 206 - protein, 260 aa, Homo sapiens
MGPRARPALLLLMLLQTAVLQGRLLQSHTLQVILGCEMQEDNSTEGYWKYGYDGQDHLEFCPDTLDWRAAEPRAWPTKLEWERHKIRARQNRAYLERDCPAQLQQLLELGRGVLDQQVPPLVKVTHHVTSSVTTLRCRALNYYPQNITMKWLKDKQPMDAKEFEPKDVLPNGDGTYQGWITLAVPPGEEQRYTCQVEHPGLDQPLIVIWEPSPSGTLVIGVISGIAVFVVILFIGILFIILRKRQGSRGAMGHYVLAERE

SEQ ID NO: 207 - protein, 345 aa, Homo sapiens
MPRIDADLKLDFKDVLLRPKRSSLKSRAEVDLERTFTFRNSKQTYSGIPIIVANMDTVGTFEMAAVMSQHSMFTAIHKHYSLDDWKLFATNHPECLQNVAVSSGSGQNDLEKMTSILEAVPQVKFICLDVANGYSEHFVEFVKLVRAKFPEHTIMAGNVVTGEMVEELILSGADIIKVGVGPGSVCTTRTKTGVGYPQLSAVIECADSAHGLKGHIISDGGCTCPGDVAKAFGAGADFVMLGGMFSGHTECAGEVFERNGRKLKLFYGMSSDTAMNKHAGGVAEYRASEGKTVEVPYKGDVENTILDILGGLRSTCTYVGAAKLKELSRRATFIRVTQQHNTVFS

SEQ ID NO: 208 - protein, 325 aa, Homo sapiens
MQGRVAGSCAPLGLLLVCLHLPGLFARSIGVVEEKVSQNLGTNLPQLGQPSSTGPSNSEHPQPALDPRSNDLARVPLKLSVPASDGFPPAGGSAVQRWPPSWGLPAMDSWPPEDPWQMMAAAAEDRLGEALPEELSYLSSAAALAPGSGPLPGESSPDATGLSPKASLLHQDSESRRLPRSNSLGAGGKILSQRPPWSLIHRVLPDHPWGTLNPSVSWGGGGPGTGWGTRPMPHPEGIWGINNQPPGTSWGNINRYPGGSWGNINRYPGGSWGNINRYPGGSWGNIHLYPGINNPFPPGVLRPPGSSWNIPAGFPNPPSPRLQWG

SEQ ID NO: 209 - protein, 258 aa, Homo sapiens
MAASVLNTVLRRLPMLSLFRGSHRVQVPLQTLCTKAPSEEDSLSSVPISPYKDEPWKYLESEEYQERYGSRPVWADYRRNHKGGVPPQRTRKTCIRRNKVVGNPCPICRDHKLHVDFRNVKLLEQFVCAHTGIIFYAPYTGVCVKQHKRLTQAIQKARDHGLLIYHIPQVEPRDLDFSTSHGAVSATPPAPTLVSGDPWYPWYNWKQPPERELSRLRRLYQGHLQEESGPPPESMPKMPPRTPAEASSTGQTGPQSAL

SEQ ID NO: 210 - protein, 809 aa, Homo sapiens
MYEALPGPAPENEDGLVKVKEEDPTWEQVCNSQEGSSHTQEICRLRFRHFCYQEAHGPQEALAQLRELCHQWLRPEMHTKEQIMELLVLEQFLTILPKELQPCVKTYPLESGEEAVTVLENLETGSGDTGQQASVYIQGQDMHPMVAEYQGVSLECQSLQLLPGITTLKCEPPQRPQGNPQEVSGPVPHGSAHLQEKNPRDKAVVPVFNPVRSQTLVKTEEETAQAVAAEKWSHLSLTRRNLCGNSAQETVMSLSPMTEEIVTKDRLFKAKQETSEEMEQSGEASGKPNRECAPQIPCSTPIATERTVAHLNTLKDRHPGDLWARMHISSLEYAAGDITRKGRKKDKARVSELLQGLSFSGDSDVEKDNEPEIQPAQKKLKVSCFPEKSWTKRDIKPNFPSWSALDSGLLNLKSEKLNPVELFELFFDDETFNLIVNETNNYASQKNVSLEVTVQEMRCVFGVLLLSGFMRHPRREMYWEVSDTDQNLVRDAIRRDRFELIFSNLHFADNGHLDQKDKFTKLRPLIKQMNKNFLLYAPLEEYYCFDKSMCECFDSDQFLNGKPIRIGYKIWCGTTTQGYLVWFEPYQEESTMKVDEDPDLGLGGNLVMNFADVLLERGQYPYHLCFDSFFTSVKLLSALKKKGVRATGTIRENRTEKCPLMNVEHMKKMKRGYFDFRIEENNEIILCRWYGDGIISLCSNAVGIEPVNEVSCCDADNEEIPQISQPSIVKVYDECKEGVAKMDQIISKYRVRIRSKKWYSILVSYMIDVAMNNAWQLHRACNPGASLDPLDFRRFVAHFYLEHNAHLSD

SEQ ID NO: 211 - protein, 413 aa, Homo sapiens
MAEGPEEARGHPPGQDDGGGDHEPVPSLRGPPTTAVPCPRDDPQAEPQAPGRPTAPGLAAAAAADKLEPPRELRKRGEAASGSGAELQEQAGCEAPEAAAPRERPARLSAREYSRQVHEWLWQSYCGYLTWHSGLAAFPAYCSPQPSPQSFPSGGAAVPQAAAPPPPQLGYYNPFYFLSPGAAGPDPRTAAGISTPAPVAGLGPRAPHVQASVRATPVTRVGSAAPSRSPSETGRQAGREYVIPSLAHRFMAEMVDFFILFFIKATIVLSIMHLSGIKDISKFAMHYIIEEIDEDTSMEDLQKMMVVALIYRLLVCFYEIICIWGAGGATPGKFLLGLRVVTCDTSVLIAPSRVLVIPSSNVSITTSTIRALIKNFSIASFFPAFITLLFFQHNRTAYDIVAGTIVVKRNGVR

SEQ ID NO: 212 - protein, 296 aa, Homo sapiens [sequence omitted]

SEQ ID NO: 213 - protein, 619 aa, Homo sapiens
MAAAPPLSKAEYLKRYLSGADAGVDRGSESGRKRRKKRPKPGGAGGKGMRIVDDDVSWTAISTTKLEKEEEEDDGDLPVVAEFVDERPEEVKQMEAFRSSAKWKLLGGHNEDLPSNRHFRHDTPDSSPRRVRHGTPDPSPRKDRHDTPDPSPRRARHDTPDPSPLRGARHDSDTSPPRRIRHDSSDTSPPRRARHDSPDPSPPRRPQHNSSGASPRRVRHDSPDPSPPRRARHGSSDISSPRRVHNNSPDTSRRTLGSSDTQQLRRARHDSPDLAPNVTYSLPRTKSGKAPERASSKTSPHWKESGASHLSFPKNSKYEYDPDISPPRKKQAKSHFGDKKQLDSKGDCQKATDSDLSSPRHKQSPGHQDSDSDLSPPRNRPRHRSSDSDLSPPRRRQRTKSSDSDLSPPRRSQPPGKKAAHMYSGAKTGLVLTDIQREQQELKEQDQETMAFEAEFQYAETVFRDKSGRKRNLKLERLEQRRKAEKDSERDELYAQWGKGLAQSRQQQQNVEDAMKEMQKPLARYIDDEDLDRMLREQEREGDPMANFIKKNKAKENKNKKVRPRYSGPAPPPNRFNIWPGYRWDGVDRSNGFEQKRFARLASKKAVEELAYKWSVEDM

SEQ ID NO: 214 - protein, 1185 aa, Homo sapiens
MSLLNPVLLPPKVKAYLSQGERFIKWDDETTVASPVILRVDPKGYYLYWTYQSKEMEFLDITSIRDTRFGKFAKMPKSQKLRDVFNMDFPDNSFLLKTLTVVSGPDMVDLTFHNFVSYKENVGKAWAEDVLALVKHPLTANASRSTFLDKILVKLKMQLNSEGKIPVKNFFQMFPADRKRVEAALSACHLPKGKNDAINPEDFPEPVYKSFLMSLCPRPEIDEIFTSYHAKAKPYMTKEHLTKFINQKQRDSRLNSLLFPPARPDQVQGLIDKYEPSGINAQRGQLSPEGMVWFLCGPENSVLAQDKLLLHHDMTQPLNHYFINSSHNTYLTAGQFSGLSSAEMYRQVLLSGCRCVELDCWKGKPPDEEPIITHGFTMTTDIFFKEAIEAIAESAFKTSPYPIILSFENHVDSPRQQAKMAEYCRTIFGDMLLTEPLEKFPLKPGVPLPSPEDLRGKILIKNKKNQFSGPTSSSKDTGGEAEGSSPPSAPAGEGTVWAGEEGTELEEEEVEEEEEEESGNLDEEEIKKMQSDEGTAGLEVTAYEEMSSLVNYIQPTKFVSFEFSAQKNRSYVISSFTELKAYDLLSKASVQFVDYNKRQMSRIYPKGTRMDSSNYMPQMFWNAGCQMVALNFQTMDLPMQQNMAVFEFNGQSGYLLKHEFMRRPDKQFNPFSVDRIDVVVATTLSITVISGQFLSERSVRTYVEVELFGLPGDPKRRYRTKLSPSTNSINPVWKEEPFVFEKILMPELASLRVAVMEEGNKFLGHRIIPINALNSGYHHLCLHSESNMPLTMPALFIFLEMKDYIPGAWADLTVALANPIKFFSAHDTKSVKLKEAMGGLPEKPFPLASPVASQVNGALAPTSNGSPAARAGAREEAMKEAAEPRTASLEELRELKGVVKLQRRHEKELRELERRGARRWEELLQRGAAQLAELGPPGVGGVGACKLGPGKGSRKKRSLPREESAGAAPGEGPEGVDGRVRELKDRLELELLRQGEEQYECVLKRKEQHVAEQISKMMELAREKQAAELKALKETSENDTKEMKKKLETKRLERIQGMTKVTTDKMAQERLKREINNSHIQEVVQVIKQMTENLERHQEKLEEKQAACLEQIREMEKQFQKEALAEYEARMKGLEAEVKESVRACLRTCFPSEAKDKPERACECPPELCEQDPLIAKADAQESRL

SEQ ID NO: 215 - protein, 825 aa, Homo sapiens
MAAGKFASLPRNMPVNHQFPLASSMDLLSSRSPLAEHRPDAYQDVSIHGTLPRKKKGPPPIRSCDDFSHMGTLPHSKSPRQNSPVTQDGIQESPWQDRHGETFTFRDPHLLDPTVEYVKFSKERHIMDRTPEKLKKELEEELLLSSEDLRSHAWYHGRIPRQVSENLVQRDGDFLVRDSLSSPGNFVLTCQWKNLAQHFKINRTVLRLSEAYSRVQYQFEMESFDSIPGLVRCYVGNRRPISQQSGAIIFQPINRTVPLRCLEEHYGTSPGQAREGSLTKGRPDVAKRLSLTMGGVQAREQNLPRGNLLRNKEKSGSQPACLDHMQDRRALSLKAHQSESYLPIGCKLPPQSSGVDTSPCPNSPVFRTGSEPALSPAVVRRVSSDARAGEALRGSDSQLCPKPPPKPCKVPFLKVPSSPSAWLNSEANYCELNPAFATGCGRGAKLPSCAQGSHTELLTAKQNEAPGPRNSGVNYLILDDDDRERPWEPAAAQMEKGQWDKGEFVTPLLETVSSFRPNEFESKFLPPENKPLETAMLKRAKELFTNNDPKVIAQHVLSMDCRVARILGVSEEMRRNMGVSSGLELITLPHGHQLRLDIIERHNTMAIGIAVDILGCTGTLEDRAATLSKIIQVAVELKDSMGDLYSFSALMKALEMPQITRLEKTWTALRHQYTQTAILYEKQLKPFSKLLHEGRESTCVPPNNVSVPLLMPLVTLMERQAVTFEGTDMWEKNDQSCEIMLNHLATARFMAEAADSYRMNAERILAGFQPDEEMNEICKTEFQMRLLWGSKGAQVNQTERYEKFNQILTALSRKLEPPPVKQAEL

SEQ ID NO: 216 - protein, 620 aa, Homo sapiens
MALGEEKAEAEASEDTKAQSYGRGSCRERELDIPGPMSGEQPPRLEAEGGLISPVWGAEGIPAPTCWIGTDPGGPSRAHQPQASDANREPVAERSEPALSGLPPATMGSGDLLLSGESQVEKTKLSSSEEFPQTLSLPRTTTICSGHDADTEDDPSLADLPQALDLSQQPHSSGLSCLSQWKSVLSPGSAAQPSSCSISASSTGSSLQGHQERAEPRGGSLAKVSSSLEPVVPQEPSSVVGLGPRPQWSPQPVFSGGDASGLGRRRLSFQAEYWACVLPDSLPPSPDRHSPLWNPNKEYEDLLDYTYPLRPGPQLPKHLDSRVPADPVLQDSGVDLDSFSVSPASTLKSPTNVSPNCPPAEATALPFSGPREPSLKQWPSRVPQKQGGMGLASWSQLASTPRAPGSRDARWERREPALRGAKDRLTIGKHLDMGSPQLRTRDRGWPSPRPEREKRTSQSARRPTCTESRWKSEEEVESDDEYLALPARLTQTFCCQLEELICWLYNVADVTDHGTAARSNLTSLKSSLQLYRQFKKDIDEHQSLTESVLQKGEILLQCLLENTPVLEDVLGRIAKQSGELESHADRLYDSILASLDMLAGCTLIPDKKPMAAMEHPCEGV

SEQ ID NO: 217 - protein, 1144 aa, Homo sapiens
MPRNQGFSEPEYSAEYSAEYSVSLPSDPDRGVGRTHEISVRNSGSCLCLPRFMRLTFVPESLENLYQTYFKRQRHETLLVLVVFAALFDCYVVVMCAVVFSSDKLASLAVAGIGLVLDIILFVLCKKGLLPDRVTRRVLPYVLWLLITAQIFSYLGLNFARAHAASDTVGWQVFFVFSFFITLPLSLSPIVIISVVSCVVHTLVLGVTVAQQQQEELKGMQLLREILANVFLYLCAIAVGIMSYYMADRKHRKAFLEARQSLEVKMNLEEQSQQQENLMLSILPKHVADEMLKDMKKDESQKDQQQFNTMYMYRHENVSILFADIVGFTQLSSACSAQELVKLLNELFARFDKLAAKYHQLRIKILGDCYYCICGLPDYREDHAVCSILMGLAMVEAISYVREKTKTGVDMRVGVHTGTVLGGVLGQKRWQYDVWSTDVTVANKMEAGGIPGRVHISQSTMDCLKGEFDVEPGDGGSRCDYLEEKGIETYLIIASKPEVKKTATQNGLNGSALPNGAPASSKSSSPALIETKEPNGSAHSSGSTSEKPEEQDAQADNPSFPNPRRRLRLQDLADRVVDASEDEHELNQLLNEALLERESAQVVKKRNTFLLSMRFMDPEMETRYSVEKEKQSGAAFSCSCVVLLCTALVEILIDPWLMTNYVTFMVGEILLLILTICSLAAIFPRAFPKKLVAFSTWIDRTRWARNTWAMLAIFILVMANVVDMLSCLQYYTGPSNATAGMETEGSCLENPKYYNYVAVLSLIATIMLVQVSHMVKLTLMLLVAGAVATINLYAWRPVFDEYDHKRFREHDLPMVALEQMQGFNPGLNGTDRLPLVPSKYSMTVMVFLMMLSFYYFSRHVEKLARTLFLWKIEVHDQKERVYEMRRWNEALVTNMLPEHVARHFLGSKKRDEELYSQTYDEIGVMFASLPNFADFYTEESINNGGIECLRFLNEIISDFDSLLDNPKFRVITKIKTIGSTYMAASGVTPDVNTNGFASSNKEDKSERERWQHLADLADFALAMKDTLTNINNQSFNNFMLRIGMNKGGVLAGVIGARKPHYDIWGNTVNVASRMESTGVMGNIQVVEETQVILREYGFRFVRRGPIFVKGKGELLTFFLKGRDKLATFPNGPSVTLPHQVVDNS

SEQ ID NO: 218 - protein, 756 aa, Homo sapiens
MAWSPPATLFLFLLLLGQPPPSRPQSLGTTKLRLVGPESKPEEGRLEVLHQGQWGTVCDDNFAIQEATVACRQLGFEAALTWAHSAKYGQGEGPIWLDNVRCVGTESSLDQCGSNGWGVSDCSHSEDVGVICHPRRHRGYLSETVSNALGPQGRRLEEVRLKPILASAKQHSPVTEGAVEVKYEGHWRQVCDQGWTMNNSRVVCGMLGFPSEVPVDSHYYRKVWDLKMRDPKSRLKSLTNKNSFWIHQVTCLGTEPHMANCQVQVAPARGKLRPACPGGMHAVVSCVAGPHFRPPKTKPQRKGSWAEEPRVRLRSGAQVGEGRVEVLMNRQWGTVCDHRWNLISASVVCRQLGFGSAREALFGARLGQGLGPIHLSEVRCRGYERTLSDCPALEGSQNGCQHENDAAVRCNVPNMGFQNQVRLAGGRIPEEGLLEVQVEVNGVPRWGSVCSENWGLTEAMVACRQLGLGFAIHAYKETWFWSGTPRAQEVVMSGVRCSGTELALQQCQRHGPVHCSHGGGRFLAGVSCMDSAPDLVMNAQLVQETAYLEDRPLSQLYCAHEENCLSKSADHMDWPYGYRRLLRFSTQIYNLGRTDFRPKTGRDSWVWHQCHRHYHSIEVFTHYDLLTLNGSKVAEGHKASFCLEDTNCPTGLQRRYACANFGEQGVTVGCWDTYRHDIDCQWVDITDVGPGNYIFQVIVNPHYEVAESDFSNNMLQCRCKYDGHRVWLHNCHTGNSYPANAELSLEQEQRLRNNLI

SEQ ID NO: 219 - protein, 2243 aa, Homo sapiens
MNIIRENKDLACFYTTKHSWRGKYKRVFSVGTHAITTYNPNTLEVTNQWPYGDICSISPVGKGQGTEFNLTFRKGSGKKSETLKFSTEHRTELLTEALRFRTDFSEGKITGRRYNCYKHHWSDSRKPVILEVTPGGFDQINPATNRVLCSYDYRNIEGFVDLSDYQGGFCILYGGFSRLHLFASEQREEIIKSAIDHAGNYIGISLRIRKEPLEFEQYLNLRFGKYSTDESITSLAEFVVQKISPRHSEPVKRVLALTETCLVERDPATYNIATLKPLGEVFALVCDSENPQLFTIEFIKGQVRKYSSTERDSLLASLLDGVRASGNRDVCVKMTPTHKGQRWGLLSMPVDEEVESLHLRFLATPPNGNFADAVFRFNANISYSGVLHAVTQDGLFSENKEKLINNAITALLSQEGDVVASNAELESQFQAVRRLVASKAGFLAFTQLPKFRERLGVKVVKALKRSNNGIIHAAVDMLCALMCPMHDDYDLRQEQLNKASLLSSKKFLENLLEKFNSHVDHGTGALVISSLLDFLTFALCAPYSETTEGQQFDMLLEMVASNGRTLFKLFQHPSMAIIKGAGLVMKAIIEEGDKEIATKMQELALSEGALPRHLHTAMFTISSDQRMLTNRQLSRHLVGLWTADNATATNLLKRILPPGLLAYLESSDLVPEKDADRMHVRDNVKIAMDQYGKFNKVPEWQRLAGKAAKEVEKFAKEKVDLVLMHWRDRMGIAQKENINQKPVVLRKRRQRIKIEANWDLFYYRFGQDHARSNLIWNFKTREELKDTLESEMRAFNIDRELGSANVISWNHHEFEVKYECLAEEIKIGDYYLRLLLEEDENEESGSIKRSYEFFNELYHRFLLTPKVNMKCLCLQALAIVYGRCHEEIGPFTDTRYIIGMLERCTDKLERDRLILFLNKLILNKKNVKDLMDSNGIRILVDLLTLAHLHVSRATVPLQSNVIEAAPDMKRESEKEWYFGNADKERSGPYGFHEMQELWTKGMLNAKTRCWAQGMDGWRPLQSIPQLKWCLLASGQAVLNETDLATLILNMLITMCGYFPSRDQDNAIIRPLPKVKRLLSDSTCLPHIIQLLLTFDPILVEKVAILLYHIMQDNPQLPRLYLSGVFFFIMMYTGSNVLPVARFLKYTHTKQAFKSEETKGQDIFQRSILGHILPEAMVCYLENYEPEKFSEIFLGEFDTPEAIWSSEMRRLMIEKIAAHLADFTPRLQSNTRALYQYCPIPIINYPQLENELFCNIYYLKQLCDTLRFPDWPIKDPVKLLKDTLDAWKKEVEKKPPMMSIDDAYEVLNLPQGQGPHDESKIRKAYFRLAQKYHPDKNPEGRDMFEKVNKAYEFLCTKSAKIVDGPDPENIILILKTQSILFNRHKEDLQPYKYAGYPMLIRTITMETSDDLLFSKESPLLPAATELAFHTVNCSALNAEELRRENGLEVLQEAFSRCVAVLTRASKPSDMSVQVCGYISKCYSVAAQFEECREKITEMPSIIKDLCRVLYFGKSIPRVAALGVECVSSFAVDFWLQTHLFQAGILWYLLGFLFNYDYTLEESGIQKSEETNQQEVANSLAKLSVHALSRLGGYLAEEQATPENPTIRKSLAGMLTPYVARKLAVASVTEILKMLNSNTESPYLIWNNSTRAELLEFLESQQENMIKKGDCDKTYGSEFVYSDHAKELIVGEIFVRVYNEVPTFQLEVPKAFAASLLDYIGSQAQYLHTFMAITHAAKVESEQHGDRLPRVEMALEALRNVIKYNPGSESECIGHFKLIFSLLRVHGAGQVQQLALEVVNIVTSNQDCVNNIAESMVLSSLLALLHSLPSSRQLVLETLYALTSSTKIIKEAMAKGALIYLLDMFCNSTHPQVRAQTAELFAKMTADKLIGPKVRITLMKFLPSVFMDAMRDNPEAAVHIFEGTHENPELIWNDNSRDKVSTTVREMMLEHFKNQQDNPEANWKLPEDFAVVFGEAEGELAVGGVFLRIFIAQPAWVLRKPREFLIALLEKLTELLEKNNPHGETLETLTMATVCLFSAQPQLADQVPPLGHLPKVIQAMNHRNNAIPKSAIRVIHALSENELCVRAMASLETIGPLMNGMKKRADTVGLACEAINRMFQKEQSELVAQALKADLVPYLLKLLEGIGLENLDSPAATKAQIVKALKAMTRSLQYGEQVNEILCRSSVWSAFKDQKHDLFISESQTAGYLTGPGVAGYLTAGTSTSVMSNLPPPVDHEAGDLGYQT

SEQ ID NO: 220 - protein, 478 aa, Homo sapiens
MPPMPSAPPVHPPPDGGWGWIVVGAAFISIGFSYAFPKAVTVFFKEIQQIFHTTYSEIAWISSIMLAVMYAGGPVSSVLVNKYGSRPVVIAGGLLCCLGMVLASFSSSVVQLYLTMGFITGLGLAFNLQPALTIIGKYFYRKRPMANGLAMAGSPVFLSSLAPFNQYLFNTFGWKGSFLILGSLLLNACVAGSLMRPLGPNQTTSKSKNKTGKTEDDSSPKKIKTKKSTWEKVNKYLDFSLFKHRGFLIYLSGNVIMFLGFFAPIIFLAPYAKDQGIDEYSAAFLLSVMAFVDMFARPSVGLIANSKYIRPRIQYFFSFAIMFNGVCHLLCPLAQDYTSLVLYAVFFGLGFGSVSSVLFETLMDLVGAPRFSSAVGLVTIVECGPVLLGPPLAGKLVDLTGEYKYMYMSCGAIVVAASVWLLIGNAINYRLLAKERKEENARQKTRESEPLSKSKHSEDVNVKVSNAQSVTSERETNI

SEQ ID NO: 221 - protein, 1472 aa, Homo sapiens
MKGSEVSLEKKKKIKMPVKRLREVVSQNHGDHLVLLKDELPCVPPALSANKRLPVGTGTSLNGTSRGSSDLTSARNCYQPLLENPMVSESDFSKDVAVQVLPLDKIEENNKQKANDIFISQYTMGQKDALRTVLKQKAQSMPVFKEVKVHLLEDAGIEKDAVTQETRISPSGIDSATTVAAATAAAIATAAPLIKVQSDLEAKVNSVTELLSKLQETDKHLQRVTEQQTSIQRKQEKLHCHDHEKQMNVFMEQHIRHLEKLQQQQIDIQTHFISAALKTSSFQPVSMPSSRAVEKYSVKPEHPNLGSCNPSLYNTFASKQAPLKEVEDTSFDKQKSPLETPAPRRFAPVPVSRDDELSKRENLLEEKENMEVSCHRGNVRLLEQILNNNDSLTRKSESSNTTSLTRSKIGWTPEKTNRFPSCEELETTKVTMQKSDDVLHDLGQKEKETNSMVQPKESLSMLKLPDLPQNSVKLQTTNTTRSVLKDAEKILRGVQNNKKVLEENLEAIIRAKDGAAMYSLINALSTNREMSEKIRIRKTVDEWIKTISAEIQGLLKATTVIQDEDYMLQVYGKPVYQGHRSTLKKGPYLRFNSPSPKSRPQRPKVIERVKGTKVKSIRTQTDFYATKPKKMDSKMKHSVPVLPHGDQQYLFSPSREMPTFSGTLEGHLIPMAILLGQTQSNSDTMPPAGVIVSKPHPVTVTTSIPPSSRKVETGVKKPNIAIVEMKSEKKDPPQLTVQVLPSVDIDSISNSSADVLSPLSSPKEASLPPVQTWIKTPEIMKVDEEEVKFPGTNFDEIIDVIQEEEKCDEIPDSEPILEFNRSVKADSTKYNGPPFPPVASTFQPTADILDKVIERKETLENSLIQWVEQEIMSRIISGLFPVQQQIAPSISVSVSETSEPLTSDIVEGTSSGALQLFVDAGVPVNSNVIKHFVNEALAETIAVMLGDREAKKQGPVATGVSGDASTNETYLPARVCTPLPTPQPTPPCSPSSPAKECVLVKTPDSSPCDSDHDMAFPVKEICAEKGDDMPAIMLVNTPTVTPTTTPPPAAAVFTPTLSDISIDKLKVSSPELPKPWGDGDLPLEEENPNSPQEELHPRAIVMSVAKDEEPESMDFPAQPPPPEPVPFMPFPAGTKAPSPSQMPGSDSSTLESTLSVTVTETETLDKPISEGEILFSCGQKLAPKILEDIGLYLTNLNDSLSSTLHDAVEMEDDPPSEGQVIRMSHKKFHADAILSFAKQNQESAVSQQAVYHSEDLENSVGELSEGQRPQLTAAAENILMGHSLYMQPPVTNTQSLDQQCDPKPLSRQFDTVSGSIYEDSCASHGPMSLGELELEPNSKLVLPTTLLTAQENDVNLPVAAEDFSQYQLKQNQDVKQVEHKPSQSYLRVRNKSDIAPSQQQVSPGDMDRTQIELNPYLTCVFSGGKAVPLSASQMPPAKMSVMLPSVNLEDCSQSLSLSTMQEDMESSGADTF

SEQ ID NO: 222 - protein, 225 aa, Homo sapiens
MAAAGGGGGGAAAAGRAYSFKVVLLGEGCVGKTSLVLRYCENKFNDKHITTLQASFLTKKLNIGGKRVNLAIWDTAGQERFHALGPIYYRDSNGAILVYDITDEDSFQKVKNWVKELRKMLGNEICLCIVGNKIDLEKERHVSIQEAESYAESVGAKHYHTSAKQNKGIEELFLDLCKRMIETAQVDERAKGNGSSQPGTARRGVQIIDDEPQAQTSGGGCCSSG

SEQ ID NO: 223 - protein, 148 aa, Homo sapiens
MKALIVLGLVLLSVTVQGKVFERCELARTLKRLGMDGYRGISLANWMCLAKWESGYNTRATNYNAGDRSTDYGIFQINSRYWCNDGKTPGAVNACHLSCSALLQDNIADAVACAKRVVRDPQGIRAWVAWRNRCQNRDVRQYVQGCGV

SEQ ID NO: 224 - protein, 814 aa, Homo sapiens
MHLEGRDGRRYPGAPAVELLQTSVPSGLAELVAGKRRLPRGAGGADPSHSCPRGAAGQSSWAPAGQEFASFLTKGRSHSSLPQMSSSRSKDSCFTENTPLLRNSLQEKGSRCIPVYHPEFITAEESWEDSSADWERRYLLSREVSGLSASASSEKGDLLDSPHIRLRLSKLRRCVQWLKVMGLFAFVVLCSILFSLYPDQGKLWQLLALSPLENYSVNLSSHVDSTLLQVDLAGALVASGPSRPGREEHIVVELTQADALGSRWRRPQQVTHNWTVYLNPRRSEHSVMSRTFEVLTRETVSISIRASLQQTQAVPLLMAHQYLRGSVETQVTIATAILAGVYALIIFERPSLTHVVEWIDFETLALLFGMMILVAIFSETGFFDYCAVKAYRLSRGRVWAMIIMLCLIAAVLSAFLDNVTTMLLFTPVTIRLCEVLNLDPRQVLIAEVIFTNIGGAATAIGDPPNVIIVSNQELRKMGLDFAGFTAHMFIGICLVLLVCFPLLRLLYWNRKLYNKEPSEIVELKHEIHVWRLTAQRISPASREETAVRRLLLGKVLALEHLLARRLHTFHRQISQEDKNWETNIQELQKKHRISDGILLAKCLTVLGFVIFMFFLNSFVPGIHLDLGWIAILGAIWLLILADIHDFEIILHRVEWATLLFFAALFVLMEALAHLHLIEYVGEQTALLIKMVPEEQRLIAAIVLVVWVSALASSLIDNIPFTATMIPVLLNLSHDPEVGLPAPPLMYALAFGACLGGNGTLIGASANVVCAGIAEQHGYGFSFMEFFRLGFPMMVVSCTVGMCYLLVAHVVVGWN

SEQ ID NO: 225 - protein, 500 aa, Homo sapiens
MSNSVPLLCFWSLCYCFAAGSPVPFGPEGRLEDKLHKPKATQTEVKPSVRFNLRTSKDPEHEGCYLSVGHSQPLEDCSFNMTAKTFFIIHGWTMSGIFENWLHKLVSALHTREKDANVVVVDWLPLAHQLYTDAVNNTRVVGHSIARMLDWLQEKDDFSLGNVHLIGYSLGAHVAGYAGNFVKGTVGRITGLDPAGPMFEGADIHKRLSPDDADFVDVLHTYTRSFGLSIGIQMPVGHIDIYPNGGDFQPGCGLNDVLGSIAYGTITEVVKCEHERAVHLFVDSLVNQDKPSFAFQCTDSNRFKKGICLSCRKNRCNSIGYNAKKMRNKRNSKMYLKTRAGMPFRVYHYQMKIHVFSYKNMGEIEPTFYVTLYGTNADSQTLPLEIVERIEQNATNTFLVYTEEDLGDLLKIQLTWEGASQSWYNLWKEFRSYLSQPRNPGRELNIRRIRVKSGETQRKLTFCTEDPENTSISPGRELWFRKCRDGWRMKNETSPTVELP

SEQ ID NO: 226 - protein, 205 aa, Homo sapiens
MVNLAAMVWRRLLRKRWVLALVFGLSLVYFLSSTFKQEERAVRDRNLLQVHDHNQPIPWKVQFNLGNSSRPSNQCRNSIQGKHLITDELGYVCERKDLLVNGCCNVNVPSTKQYCCDGCWPNGCCSAYEYCVSCCLQPNKQLLLERFLNRAAVAFQNLFMAVEDHFELCLAKCRTSSQSVQHENTYRDPIAKYCYGESPPELFPA

SEQ ID NO: 227 - protein, 1482 aa, Homo sapiens
MRKDRLLHLCLVLLLILLSASDSNSTEPQYMVLVPSLLHTEAPKKGCVLLSHLNETVTVSASLESGRENRSLFTDLVAEKDLFHCVSFTLPRISASSEVAFLSIQIKGPTQDFRKRNTVLVLNTQSLVFVQTDKPMYKPGQTVRFRVVSVDENFRPRNELIPLIYLENPRRNRIAQWQSLKLEAGINQLSFPLSSEPIQGSYRVVVQTESGGRIQHPFTVEEFVLPKFEVKVQVPKIISIMDEKVNITVCGEYTYGKPVPGLATVSLCRKLSRVLNCDKQEVCEEFSQQLNSNGCITQQVHTKMLQITNTGFEMKLRVEARIREEGTDLEVTANRISEITNIVSKLKFVKVDSHFRQGIPFFAQVLLVDGKGVPIPNKLFFISVNDANYYSNATTNEQGLAQFSINTTSISVNKLFVRVFTVHPNLCFHYSWVAEDHQGAQHTANRVFSLSGSYIHLEPVAGTLPCGHTETITAHYTLNRQAMGELSELSFHYLIMAKGVIVRSGTHTLPVESGDMKGSFALSFPVESDVAPIARMFIFAILPDGEVVGDSEKFEIENCLANKVDLSFSPAQSPPASHAHLQVAAAPQSLCALRAVDQSVLLMKPEAELSVSSVYNLLTVKDLTNFPDNVDQQEEEQGHCPRPFFIHNGAIYVPLSSNEADIYSFLKGMGLKVFTNSKIRKPKSCSVIPSVSAGAVGQGYYGAGLGVVERPYVPQLGTYNVIPLNNEQSSGPVPETVRSYFPETWIWELVAVNSSGVAEVGVTVPDTITEWKAGAFCLSEDAGLGISSTASLRAFQPFFVELTMPYSVIRGEVFTLKATVLNYLPKCIRVSVQLKASPAFLASQNTKGEESYCICGNERQTLSWTVTPKTLGNVNFSVSAEAMQSLELCGNEVVEVPEIKRKDTVIKTLLVEAEGIEQEKTFSSMTCASGANVSEQLSLKLPSNVVKESARASFSVLGDILGSAMQNIQNLLQMPYGCGEQNMVLFAPNIYVLNYLNETQQLTQEIKAKAVGYLITGYQRQLNYKHQDGSYSTFGERYGRNQGNTWLTAFVLKTFAQARSYIFIDEAHITQSLTWLSQMQKDNGCFRSSGSLLNNAIKGGVEDEATLSAYVTIALLEIPLPVTNPIVRNALFCLESAWNVAKEGTHGSHVYTKALLAYAFSLLGKQNQNREILNSLDKEAVKEDNLVHWERPQRPKAPVGHLYQTQAPSAEVEMTSYVLLAYLTAQPAPTSGDLTSATNIVKWIMKQQNAQGGFSSTQDTVVALHALSRYGAATFTRTEKTAQVTVQDSQTFSTNFQVDNNNLLLLQQISLPELPGEYVITVTGERCVYLQTSMKYNILPEKEDSPFALKVQTVPQTCDGHKAHTSFQISLTISYTGNRPASNMVIVDVKMVSGFIPLKPTVKMLERSSSVSRTEVSNNHVLIYVEQVTNQTLSFSFMVLQDIPVGDLKPAIVKVYDYYETDESVVAEYIAPCSTDTEHGNV

SEQ ID NO: 228 - protein, 194 aa, Homo sapiens
MHDSNNVEKDITPSELPANPGCLHSKEHSIKATLIWRLFFLIMFLTIIVCGMVAALSAIRANCHQEPSVCLQAACPESWIGFQRKCFYFSDDTKNWTSSQRFCDSQDADLAQVESFQELNFLLRYKGPSDHWIGLSREQGQPWKWINGTEWTRQLVMKEDGANLYVAKVSQVPRMNPRPVMVSYPGSRRVCLFE

SEQ ID NO: 229 - protein, 1770 aa, Homo sapiens
MPRRRKNLGGNPFRKTANPKEVVVSSVASREEPTTTLPSMGETKVDQEELFTSISEIFSDLDPDVVYLMLSECDFKVENAMDCLLELSATDTKIEESSSQSFVASENQVGAAESKIMEKRPEEESEDSKMDSFLDMQLTEDLDSLIQNAFEKLNSSPDDQVYSFLPSQDVNSFNDSSEFINPDSSNMTPIFSTQNMNLNGENLENSGSTLSLNPLPSHSVLNESKCFIKDNTLALESNYPEDSLLSSSLNVASDSIAGCSSLNQKQKELLESECVEAQFSEAPVDLDASEPQACLNLPGLDLPGTGGDQKSTRVSDVFLPSEGFNFKPHKHPELPTKGKDVSYCPVLAPLPLLLPPPPPPPMWNPMIPAFDLFQGNHGFVAPVVTTAAHWRSVNYTFPPSVISHTSPTKVWRNKDGTSAYQVQETPVSQVVRKKTSYVGLVLVLLRGLPGSGKSFLARTLQEDNPSGVILSTDDYFYINGQYQFDVKYLGEAHEWNQNRAKEAFEKKISPIIIDNTNLQAWEMKPYVALSQKHKYKVLFREPDTWWKFKPKELARRNIHGVSKEKITRMLEHYQRFVSVPIIMSSSVPEKIERIELCAYSCEDRSTSPRDDEDIISEKEENILSLSLKHLEFTEEKNLDVTKETMLPENVAYLSNADLNKRRKEISDMNPSIQSALILETPHMYFSDSESKLQATDKSENEQIEMVAVKGYSKTDTDSSMERVSPSTCCSENNQEDCDLANSGPLQNEKSSPGEIVEERATVTKKAFGKQKSKSTLEKFPRHELSNFVGDWPVDKTIGQRTKRNRKTEKTSSVQSDKKYNYPQSHKLVNSVSVNTDCVQQRGSPHESVEDGRKSQCDDASEPLNSYKYDAYKNIDKNSFNIMGDWPSSDSLAQREHRSRMPKTGLSEPNLEIGTNDKMNEISLSTAHEACWGTSSQKLKTLGSSNLGSSEMLLSEMTCESQTCLSKKSHGQHTSLPLTFTNSAPTVSGVVEPQTLAECQEQMPKRDPGKEVGMCTQTEPQDFALLWKIEKNKISISDSIKVLTGRLDGFKPKVFNINTKSDVQEAIPYRVMYDKSTFVEESELTSADESENLNILCKLFGSFSLEALKDLYERCNKDIIWATSLLLDSETKLCEDTEFENFQKSCDGSQIGPFSLGLNLKEIISQRGTLENSNSPVPEFSHGIGISNADSQSTCDAERGNSEQAEMRAVTPENHESMTSIFPSAAVGLKNNNDILPNSQEELLYSSKQSFPGILKATTPKDMSETEKNLVVTETGDNIHSPSHFSDIFNFVSSTSNLELNEEIYFTDSLEIKRNENFPKDYVKFSDEEEFMNEDEKEMKEILMAGSSLSAGVSGEDKTEILNPTPAMAKSLTIDCLELALPPELAFQLNELFGPVGIDSGSLTVEDCVVHIDLNLAKVIHEKWKESVMERQRQEEVSCGKFMQDPSLVGHTGLDNPEQKSSQRTGKKLLKTLTASEMLPLLDHWNTQTKKVSLREIMSEEIALQEKHNLKRETLMFEKDCATKLKEKQLFKIFPAINQNFLVDIFKDHNYSLEHTVQFLNCVLEGDPVKTVVAQEFVHQNENVTSHTGQKSKEKKPKKLKETEETPSELSFQDFEYPDYDDYRAEAFLHQQKRMECYSKAKEAYRIGKKNVATFYAQQGTLHEQKMKEANHLAAIEIFEKVNASLLPQNVLDLHGLHVDEALEHLMRVLEKKTEEFKQNGGKPYLSVITGRGNHSQGGVARIKPAVIKYLISHSFRFSEIKPGCLKVMLK

SEQ ID NO: 230 - protein, 2429 aa, Homo sapiens
MDMSDPNFWTVLSNFTLPHLRSGNRLRRTQSCRTSNRKSLIGNGQSPALPRPHSPLSAHAGNSPQDSPRNFSPSASAHFSFARRTDGRRWSLASLPSSGYGTNTPSSTVSSSCSSQEKLHQLPYQPTPDELHFLSKHFCTTESIATENRCRNTPMRPRSRSLSPGRSPACCDHEIIMMNHVYKERFPKATAQMEERLKEIITSYSPDNVLPLADGVLSFTHHQIIELARDCLDKSHQGLITSRYFLELQHKLDKLLQEAHDRSESGELAFIKQLVRKILIVIARPARLLECLEFDPEEFYYLLEAAEGHAKEGQGIKTDIPRYIISQLGLNKDPLEEMAHLGNYDSGTAETPETDESVSSSNASLKLRRKPRESDFETIKLISNGAYGAVYFVRHKESRQRFAMKKINKQNLILRNQIQQAFVERDILTFAENPFVVSMYCSFETRRHLCMVMEYVEGGDCATLMKNMGPLPVDMARMYFAETVLALEYLHNYGIVHRDLKPDNLLVTSMGHIKLTDFGLSKVGLMSMTTNLYEGHIEKDAREFLDKQVCGTPEYIAPEVILRQGYGKPVDWWAMGIILYEFLVGCVPFFGDTPEELFGQVISDEINWPEKDEAPPPDAQDLITLLLRQNPLERLGTGGAYEVKQHRFFRSLDWNSLLRQKAEFIPQLESEDDTSYFDTRSEKYHHMETEEEDDTNDEDFNVEIRQFSSCSHRFSKVFSSIDRITQNSAEEKEDSVDKTKSTTLPSTETLSWSSEYSEMQQLSTSNSSDTESNRHKLSSGLLPKLAISTEGEQDEAASCPGDPHEEPGKPALPPEECAQEEPEVTTPASTISSSTLSVGSFSEHLDQINGRSECVDSTDNSSKPSSEPASHMARQRLESTEKKKISGKVTKSLSASALSLMIPGDMFAVSPLGSPMSPHSLSSDPSSSRDSSPSRDSSAASASPHQPIVIHSSGKNYGFTIRAIRVYVGDSDIYTVHHIVWNVEEGSPACQAGLKAGDLITHINGEPVHGLVHTEVIELLLKSGNKVSITTTPFENTSIKTGPARRNSYKSRMVRRSKKSKKKESLERRRSLFKKLAKQPSPLLHTSRSFSCLNRSLSSGESLPGSPTHSLSPRSPTPSYRSTPDFPSGTNSSQSSSPSSSAPNSPAGSGHIRPSTLHGLAPKLGGQRYRSGRRKSAGNIPLSPLARTPSPTPQPTSPQRSPSPLLGHSLGNSKIAQAFPSKMHSPPTIVRHIVRPKSAEPPRSPLLKRVQSEEKLSPSYGSDKKHLCSRKHSLEVTQEEVQREQSQREAPLQSLDENVCDVPPLSRARPVEQGCLKRPVSRKVGRQESVDDLDRDKLKAKVVVKKADGFPEKQESHQKSHGPGSDLENFALFKLEEREKKVYPKAVERSSTFENKASMQEAPPLGSLLKDALHKQASVRASEGAMSDGRVPAEHRQGGGDFRRAPAPGTLQDGLCHSLDRGISGKGEGTEKSSQAKELLRCEKLDSKLANIDYLRKKMSLEDKEDNLCPVLKPKMTAGSHECLPGNPVRPTGGQQEPPPASESRAFVSSTHAAQMSAVSFVPLKALTGRVDSGTEKPGLVAPESPVRKSPSEYKLEGRSVSCLKPIEGTLDIALLSGPQASKTELPSPESAQSPSPSGDVRASVPPVLPSSSGKKNDTTSARELSPSSLKMNKSYLLEPWFLPPSRGLQNSPAVSLPDPEFKRDRKGPHPTARSPGTVMESNPQQREGSSPKHQDHTTDPKLLTCLGQNLHSPDLARPRCPLPPEASPSREKPGLRESSERGPPTARSERSAARADTCREPSMELCFPETAKTSDNSKNLLSVGRTHPDFYTQTQAMEKAWAPGGKTNHKDGPGEARPPPRDNSSLHSAGIPCEKELGKVRRGVEPKPEALLARRSLQPPGIESEKSEKLSSFPSLQKDGAKEPERKEQPLQRHPSSIPPPPLTAKDLSSPAARQHCSSPSHASGREPGAKPSTAEPSSSPQDPPKPVAAHSESSSHKPRPGPDPGPPKTKHPDRSLSSQKPSVGATKGKEPATQSLGGSSREGKGHSKSGPDVFPATPGSQNKASDGIGQGEGGPSVPLHTDRAPLDAKPQPTSGGRPLEVLEKPVHLPRPGHPGPSEPADQKLSAVGEKQTLSPKHPKPSTVKDCPTLCKQTDNRQTDKSPSQPAANTDRRAEGKKCTEALYAPAEGDKLEAGLSFVHSENRLKGAERPAAGVGKGFPEARGKGPGPQKPPTEADKPNGMKRSPSATGQSSFRSTALPEKSLSCSSSFPETRAGVREASAASSDTSSAKAAGGMLELPAPSNRDHRKAQPAGEGRTHMTKSDSLPSFRVSTLPLESHHPDPNTMGGASHRDRALSVTATVGETKGKDPAPAQPPPARKQNVGRDVTKPSPAPNTDRPISLSNEKDFVVRQRRGKESLRSSPHKKAL

SEQ ID NO: 231 - protein, 1186 aa, Homo sapiens [sequence omitted]

SEQ ID NO: 232 - protein, 4834 aa, Homo sapiens
MPSESFCLAAQARLDSKWLKTDIQLAFTRDGLCGLWNEMVKDGEIVYTGTESTQNGELPPRKDDSVEPSGTKKEDLNDKEKKDEEETPAPIYRAKSILDSWVWGKQPDVNELKECLSVLVKEQQALAVQSATTTLSALRLKQRLVILERYFIALNRTVFQENVKVKWKSSGISLPPVDKKSSRPAGKGVEGLARVGSRAALSFAFAFLRRAWRSGEDADLCSELLQESLDALRALPEASLFDESTVSSVWLEVVERATRFLRSVVTGDVHGTPATKGPGSIPLQDQHLALAILLELAVQRGTLSQMLSAILLLLQLWDSGAQETDNERSAQGTSAPLLPLLQRFQSIICRKDAPHSEGDMHLLSGPLSPNESFLRYLTLPQDNELAIDLRQTAVVVMAHLDRLATPCMPPLCSSPTSHKGSLQEVIGWGLIGWKYYANVIGPIQCEGLANLGVTQIACAEKRFLILSRNGRVYTQAYNSDTLAPQLVQGLASRNIVKIAAHSDGHHYLALAATGEVYSWGCGDGGRLGHGDTVPLEEPKVISAFSGKQAGKHVVHIACGSTYSAAITAEGELYTWGRGNYGRLGHGSSEDEAIPMLVAGLKGLKVIDVACGSGDAQTLAVTENGQVWSWGDGDYGKLGRGGSDGCKTPKLIEKLQDLDVVKVRCGSQFSIALTKDGQVYSWGKGDNQRLGHGTEEHVRYPKLLEGLQGKKVIDVAAGSTHCLALTEDSEVHSWGSNDQCQHFDTLRVTKPEPAALPGLDTKHIVGIACGPAQSFAWSSCSEWSIGLRVPFVVDICSMTFEQLDLLLRQVSEGMDGSADWPPPQEKECVAVATLNLLRLQLHAAISHQVDPEFLGLGLGSILLNSLKQTVVTLASSAGVLSTVQSAAQAVLQSGWSVLLPTAEERARALSALLPCAVSGNEVNISPGRRFMIDLLVGSLMADGGLESALHAAITAEIQDIEAKKEAQKEKEIDEQEANASTFHRSRTPLDKDLINTGICESSGKQCLPLVQLIQQLLRNIASQTVARLKDVARRISSCLDFEQHSRERSASLDLLLRFQRLLISKLYPGESIGQTSDISSPELMGVGSLLKKYTALLCTHIGDILPVAASIASTSWRHFAEVAYIVEGDFTGVLLPELVVSIVLLLSKNAGLMQEAGAVPLLGGLLEHLDRFNHLAPGKERDDHEELAWPGIMESFFTGQNCRNNEEVTLIRKADLENHNKDGGFWTVIDGKVYDIKDFQTQSLTGNSILAQFAGEDPVVALEAALQFEDTRESMHAFCVGQYLEPDQEIVTIPDLGSLSSPLIDTERNLGLLLGLHASYLAMSTPLSPVEIECAKWLQSSIFSGGLQTSQIHYSYNEEKDEDHCSSPGGTPASKSRLCSHRRALGDHSQAFLQAIADNNIQDHNVKDFLCQIERYCRQCHLTTPIMFPPEHPVEEVGRLLLCCLLKHEDLGHVALSLVHAGALGIEQVKHRTLPKSVVDVCRVVYQAKCSLIKTHQEQGRSYKEVCAPVIERLRFLFNELRPAVCNDLSIMSKFKLLSSLPRWRRIAQKIIRERRKKRVPKKPESTDDEEKIGNEESDLEEACILPHSPINVDKRPIAIKSPKDKWQPLLSTVTGVHKYKWLKQNVQGLYPQSPLLSTIAEFALKEEPVDVEKMRKCLLKQLERAEVRLEGIDTILKLASKNFLLPSVQYAMFCGWQRLIPEGIDIGEPLTDCLKDVDLIPPFNRMLLEVTFGKLYAWAVQNIRNVLMDASAKFKELGIQPVPLQTITNENPSGPSLGTIPQARFLLVMLSMLTLQHGANNLDLLLNSGMLALTQTALRLIGPSCDNVEEDMNASAQGASATVLEETRKETAPVQLPVSGPELAAMMKIGTRVMRGVDWKWGDQDGPPPGLGRVIGELGEDGWIRVQWDTGSTNSYRMGKEGKYDLKLAELPAAAQPSAEDSDTEDDSEAEQTERNIHPTAMMFTSTINLLQTLCLSAGVHAEIMQSEATKTLCGLLRMLVESGTTDKTSSPNRLVYREQHRSWCTLGFVRSIALTPQVCGALSSPQWITLLMKVVEGHAPFTATSLQRQILAVHLLQAVLPSWDKTERARDMKCLVEKLFDFLGSLLTTCSSDVPLLRESTLRRRRVRPQASLTATHSSTLAEEVVALLRTLHSLTQWNGLINKYINSQLRSITHSFVGRPSEGAQLEDYFPDSENPEVGGLMAVLAVIGGIDGRLRLGGQVMHDEFGEGTVTRITPKGKITVQFSDMRTCRVCPLNQLKPLPAVAFNVNNLPFTEPMLSVWAQLVNLAGSKLEKHKIKKSTKQAFAGQVDLDLLRCQQLKLYILKAGRALLSHQDKLRQILSQPAVQETGTVHTDDGAVVSPDLGDMSPEGPQPPMILLQQLLASATQPSPVKAIFDKQELEAAALAVCQCLAVESTHPSSPGFEDCSSSEATTPVAVQHIRPARVKRRKQSPVPALPIVVQLMEMGFSRRNIEFALKSLTGASGNASSLPGVEALVGWLLDHSDIQVTELSDADTVSDEYSDEEVVEDVDDAAYSMSTGAVVTESQTYKKRADFLSNDDYAVYVRENIQVGMMVRCCRAYEEVCEGDVGKVIKLDRDGLHDLNVQCDWQQKGGTYWVRYIHVELIGYPPPSSSSHIKIGDKVRVKASVTTPKYKWGSVTHQSVGVVKAFSANGKDIIVDFPQQSHWTGLLSEMELVPSIHPGVTCDGCQMFPINGSRFKCRNCDDFDFCETCFKTKKHNTRHTFGRINEPGQSAVFCGRSGKQLKRCHSSQPGMLLDSWSRMVKSLNVSSSVNQASRLIDGSEPCWQSSGSQGKHWIRLEIFPDVLVHRLKMIVDPADSSYMPSLVVVSGGNSLNNLIELKTININPSDTTVPLLNDCTEYHRYIEIAIKQCRSSGIDCKIHGLILLGRIRAEEEDLAAVPFLASDNEEEEDEKGNSGSLIRKKAAGLESAATIRTKVFVWGLNDKDQLGGLKGSKIKVPSFSETLSALNVVQVAGGSKSLFAVTVEGKVYACGEATNGRLGLGISSGTVPIPRQITALSSYVVKKVAVHSGGRHATALTVDGKVFSWGEGDDGKLGHFSRMNCDKPRLIEALKTKRIRDIACGSSHSAALTSSGELYTWGLGEYGRLGHGDNTTQLKPKMVKVLLGHRVIQVACGSRDAQTLALTDEGLVFSWGDGDFGKLGRGGSEGCNIPQNIERLNGQGVCQIECGAQFSLALTKSGVVWTWGKGDYFRLGHGSDVHVRKPQVVEGLRGKKIVHVAVGALHCLAVTDSGQVYAWGDNDHGQQGNGTTTVNRKPTLVQGLEGQKITRVACGSSHSVAWTTVDVATPSVHEPVLFQTARDPLGASYLGVPSDADSSAASNKISGASNSKPNRPSLAKILLSLDGNLAKQQALSHILTALQIMYARDAVVGALMPAAMIAPVECPSFSSAAPSDASAMASPMNGEECMLAVDIEDRLSPNPWQEKREIVSSEDAVTPSAVTPSAPSASARPFIPVTDDLGAASIIAETMTKTKEDVESQNKAAGPEPQALDEFTSLLIADDTRVVVDLLKLSVCSRAGDRGRDVLSAVLSGMGTAYPQVADMLLELCVTELEDVATDSQSGRLSSQPVVVESSHPYTDDTSTSGTVKIPGAEGLRVEFDRQCSTERRHDPLTVMDGVNRIVSVRSGREWSDWSSELRIPGDELKWKFISDGSVNGWGWRFTVYPIMPAAGPKELLSDRCVLSCPSMDLVTCLLDFRLNLASNRSIVPRLAASLAACAQLSALAASHRMWALQRLRKLLTTEFGQSININRLLGENDGETRALSFTGSALAALVKGLPEALQRQFEYEDPIVRGGKQLLHSPFFKVLVALACDLELDTLPCCAETHKWAWFRRYCMASRVAVALDKRTPLPRLFLDEVAKKIRELMADSENMDVLHESHDIFKREQDEQLVQWMNRRPDDWTLSAGGSGTIYGWGHNHRGQLGGIEGAKVKVPTPCEALATLRPVQLIGGEQTLFAVTADGKLYATGYGAGGRLGIGGTESVSTPTLLESIQHVFIKKVAVNSGGKHCLALSSEGEVYSWGEAEDGKLGHGNRSPCDRPRVIESLRGIEVVDVAAGGAHSACVTAAGDLYTWGKGRYGRLGHSDSEDQLKPKLVEALQGHRVVDIACGSGDAQTLCLTDDDTVWSWGDGDYGKLGRGGSDGCKVPMKIDSLTGLGVVKVECGSQFSVALTKSGAVYTWGKGDYHRLGHGSDDHVRRPRQVQGLQGKKVIAIATGSLHCVCCTEDGEVYTWGDNDEGQLGDGTTNAIQRPRLVAALQGKKVNRVACGSAHTLAWSTSKPASAGKLPAQVPMEYNHLQEIPIIALRNRLLLLHHLSELFCPCIPMFDLEGSLDETGLGPSVGFDTLRGILISQGKEAAFRKVVQATMVRDRQHGPVVELNRIQVKRSRSKGGLAGPDGTKSVFGQMCAKMSSFGPDSLLLPHRVWKVKFVGESVDDCGGGYSESIAEICEELQNGLTPLLIVTPNGRDESGANRDCYLLSPAARAPVHSSMFRFLGVLLGIAIRTGSPLSLNLAEPVWKQLAGMSLTIADLSEVDKDFIPGLMYIRDNEATSEEFEAMSLPFTVPSASGQDIQLSSKHTHITLDNRAEYVRLAINYRLHEFDEQVAAVREGMARVVPVPLLSLFTGYELETMVCGSPDIPLHLLKSVATYKGIEPSASLIQWFWEVMESFSNTERSLFLRFVWGRTRLPRTIADFRGRDFVIQVLDKYNPPDHFLPESYTCFFLLKLPRYSCKQVLEEKLKYAIHFCKSIDTDDYARIALTGEPAADDSSDDSDNEDVDSFASDSTQDYLTGH

SEQ ID NO: 233 - protein, 411 aa, Homo sapiens
MWSGWWLWPLVAVCTADFFRDEAERIMRDSPVIDGHNDLPWQLLDMFNNRLQDERANLTTLAGTHTNIPKLRAGFVGGQFWSVYTPCDTQNKDAVRRTLEQMDVVHRMCRMYPETFLYVTSSAGIRQAFREGKVASLIGVEGGHSIDSSLGVLRALYQLGMRYLTLTHSCNTPWADNWLVDTGDSEPQSQGLSPFGQRVVKELNRLGVLIDLAHVSVATMKATLQLSRAPVIFSHSSAYSVCASRRNVPDDVLRLVKQTDSLVMVNFYNNYISCTNKANLSQVADHLDHIKEVAGARAVGFGGDFDGVPRVPEGLEDVSKYPDLIAELLRRNWTEAEVKGALADNLLRVFEAVEQASNLTQAPEEEPIPLDQLGGSCRTHYGYSSGASSLHRHWGLLLASLAPLVLCLSLL

SEQ ID NO: 234 - protein, 293 aa, Homo sapiens
MSGLGRSRRGGRSRVDQEERFPQGLWTGVAMRSCPEEQYWDPLLGTCMSCKTICNHQSQRTCAAFCRSLSCRKEQGKFYDHLLRDCISCASICGQHPKQCAYFCENKLRSPVNLPPELRRQRSGEVENNSDNSGRYQGLEHRGSEASPALPGLKLSADQVALVYSTLGLCLCAVLCCFLVAVACFLKKRGDPCSCQPRSRPRQSPAKSSQDHAMEAGSPVSTSPEPVETCSFCFPECRAPTQESAVTPGTPDPTCAGRWGCHTRTTVLQPCPHIPDSGLGIVCVPAQEGGPGA

SEQ ID NO: 235 - protein, 804 aa, Homo sapiens
MAKSSSLNVRVVEGRALPAKDVSGSSDPYCLVKVDDEVVARTATVWRSLGPFWGEEYTVHLPLDFHQLAFYVLDEDTVGHDDIIGKISLSREAITADPRGIDSWINLSRVDPDAEVQGEICLSVQMLEDGQGRCLRCHVLQARDLAPRDISGTSDPFARVFWGSQSLETSTIKKTRFPHWDEVLELREMPGAPSPLRVELWDWDMVGKNDFLGMVEFSPKTLQQKPPKGWFRLLPFPRAEEDSGGNLGALRVKVRLIEDRVLPSQCYQPLMELLMESVQGPAEEDTASPLALLEELTLGDCRQDLATKLVKLFLGRGLAGRFLDYLTRREVARTMDPNTLFRSNSLASKSMEQFMKLVGMPYLHEVLKPVISRVFEEKKYMELDPCKMDLGRTRRISFKGALSEEQMRETSLGLLTGYLGPIVDAIVGSVGRCPPAMRLAFKQLHRRVEERFPQAEHQDVKYLAISGFLFLRFFAPAILTPKLFDLRDQHADPQTSRSLLLLAKAVQSIGNLGQQLGQGKELWMAPLHPFLLQCVSRVRDFLDRLVDVDGDEAGVPARALFPPSAIVREGYLLKRKEEPAGLATRFAFKKRYVWLSGETLSFSKSPEWQMCHSIPVSHIRAVERVDEGAFQLPHVMQVVTQDGTGALHTTYLQCKNVNELNQWLSALRKASAPNPNKLAACHPGAFRSARWTCCLQAERSAAGCSRTHSAVTLGDWSDPLDPDAEAQTVYRQLLLGRDQLRLKLLEDSNMDTTLEADTGACPEVLARQRAATARLLEVLADLDRAHEEFQQQERGKAALGPLGP

SEQ ID NO: 236 - protein, 517 aa, Homo sapiens
MLRAAARFGPRLGRRLLSAAATQAVPAPNQQPEVFCNQIFINNEWHDAVSRKTFPTVNPSTGEVICQVAEGDKEDVDKAVKAARAAFQLGSPWRRMDASHRGRLLNRLADLIERDRTYLAALETLDNGKPYVISYLVDLDMVLKCLRYYAGWADKYHGKTIPIDGDFFSYTRHEPVGVCGQIIPWNFPLLMQAWKLGPALATGNVVVMKVAEQTPLTALYVANLIKEAGFPPGVVNIVPGFGPTAGAAIASHEDVDKVAFTGSTEIGRVIQVAAGSSNLKRVTLELGGKSPNIIMSDADMDWAVEQAHFALFFNQGQCCCAGSRTFVQEDIYDEFVERSVARAKSRVVGNPFDSKTEQGPQVDETQFKKILGYINTGKQEGAKLLCGGGIAADRGYFIQPTVFGDVQDGMTIAKEEIFGPVMQILKFKTIEEVVGRANNSTYGLAAAVFTKDLDKANYLSQALQAGTVWVNCYDVFGAQSPFGGYKMSGSGRELGEYGLQAYTEVKTVTVKVPQKNS

SEQ ID NO: 237 - protein, 972 aa, Homo sapiens
MATRGHVQDPNDRRLRPIYDYLDNGNNKMAIQQADKLLKKHKDLHCAKVLKAIGLQRTGKQEEAFTLAQEVAALEPTDDNSLQALTILYREMHRPELVTKLYEAAVKKVPNSEEYHSHLFMAYARVGEYKKMQQAGMALYKIVPKNPYYFWSVMSLIMQSISAQDENLSKTMFLPLAERMVEKMVKEDKIEAEAEVELYYMILERLGKYQEALDVIRGKLGEKLTSEIQSRENKCMAMYKKLSRWPECNALSRRLLLKNSDDWQFYLTYFDSVFRLIEEAWSPPAEGEHSLEGEVHYSAEKAVKFIEDRITEESKSSRHLRGPHLAKLELIRRLRSQGCNDEYKLGDPEELMFQYFKKFGDKPCCFTDLKVFVDLLPATQCTKFINQLLGVVPLSTPTEDKLALPADIRALQQHLCVVQLTRLLGLYHTMDKNQKLSVVRELMLRYQHGLEFGKTCLKTELQFSDYYCLLAVHALIDVWRETGDETTVWQALTLLEEGLTHSPSNAQFKLLLVRIYCMLGAFEPVVDLYSSLDAKHIQHDTIGYLLTRYAESLGQYAAASQSCNFALRFFHSNQKDTSEYIIQAYKYGAFEKIPEFIAFRNRLNNSLHFAQVRTERMLLDLLLEANISTSLAESIKSMNLRPEEDDIPWEDLRDNRDLNVFFSWDPKDRDVSEEHKKLSLEEETLWLRIRSLTLRLISGLPSLNHPVEPKNSEKTAENGVSSRIDILRLLLQQLEATLETGKRFIEKDIQYPFLGPVPTRMGGFFNSGCSQCQISSFYLVNDIYELDTSGLEDTMEIQERIENSFKSLLDQLKDVFSKCKGDLLEVKDGNLKTHPTLLENLVFFVETISVILWVSSYCESVLRPYKLNLQKKKKKKKETSIIMPPVFTSFQDYVTGLQTLISNVVDHIKGLETHLIALKLEELILEDTSLSPEERKFSKTVQGKVQSSYLHSLLEMGELLKKRLETTKKLKI

SEQ ID NO: 238 - protein, 257 aa, Homo sapiens
MTAAVFFGCAFIAFGPALALYVFTIATEPLRIIFLIAGAFFWLVSLLISSLVWFMARVIIDNKDGPTQKYLLIFGAFVSVYIQEMFRFAYYKLLKKASEGLKSINPGETAPSMRLLAYVSGLGFGIMSGVFSFVNTLSDSLGPGTVGIHGDSPQFFLYSAFMTLVIILLHVFWGIVFFDGCEKKKWGILLIVLLTHLLVSAQTFISSYYGINLASAFIILVLMGTWAFLAAGGSCRSLKLCLLCQDKNFLLYNQRSR

SEQ ID NO: 239 - protein, 315 aa, Homo sapiens
MAAGVPCALVTSCSSVFSGDQLVQHILGTEDLIVEVTSNDAVRFYPWTIDNKYYSADINLCVVPNKFLVTAEIAESVQAFVVYFDSTQKSGLDSVSSWLPLAKAWLPEVMILVCDRVSEDGINRQKAQEWCIKHGFELVELSPEELPEEDDDFPESTGVKRIVQALNANVWSNVVMKNDRNQGFSLLNSLTGTNHSIGSADPCHPEQPHLPAADSTESLSDHRGGASNTTDAQVDSIVDPMLDLDIQELASLTTGGGDVENFERLFSKLKEMKDKAATLPHEQRKVHAEKVAKAFWMAIGGDRDEIEGLSSDEEH

SEQ ID NO: 240 - protein, 574 aa, Homo sapiens
MALARGSRQLGALVWGACLCVLVHGQQAQPGQGSDPARWRQLIQWENNGQVYSLLNSGSEYVPAGPQRSESSSRVLLAGAPQAQQRRSHGSPRRRQAPSLPLPGRVGSDTVRGQARHPFGFGQVPDNWREVAVGDSTGMARARTSVSQQRHGGSASSVSASAFASTYRQQPSYPQQFPYPQAPFVSQYENYDPASRTYDQGFVYYRPAGGGVGAGAAAVASAGVIYPYQPRARYEEYGGGEELPEYPPQGFYPAPERPYVPPPPPPPDGLDRRYSHSLYSEGTPGFEQAYPDPGPEAAQAHGGDPRLGWYPPYANPPPEAYGPPRALEPPYLPVRSSDTPPPGGERNGAQQGRLSVGSVYRPNQNGRGLPDLVPDPNYVQASTYVQRAHLYSLRCAAEEKCLASTAYAPEATDYDVRVLLRFPQRVKNQGTADFLPNRPRHTWEWHSCHQHYHSMDEFSHYDLLDAATGKKVAEGHKASFCLEDSTCDFGNLKRYACTSHTQGLSPGCYDTYNADIDCQWIDITDVQPGNYILKVHVNPKYIVLESDFTNNVVRCNIHYTGRYVSATNCKIVQS

SEQ ID NO: 241 - protein, 1475 aa, Homo sapiens
MASGAGGVGGGGGGKIRTRRCHQGPIKPYQQGRQQHQGILSRVTESVKNIVPGWLQRYFNKNEDVCSCSTDTSEVPRWPENKEDHLVYADEESSNITDGRITPEPAVSNTEEPSTTSTASNYPDVLTRPSLHRSHLNFSMLESPALHCQPSTSSAFPIGSSGFSLVKEIKDSTSQHDDDNISTTSGFSSRASDKDITVSKNTSLPPLWSPEAERSHSLSQHTATSSKKPAFNLSAFGTLSPSLGNSSILKTSQLGDSPFYPGKTTYGGAAAAVRQSKLRNTPYQAPVRRQMKAKQLSAQSYGVTSSTARRILQSLEKMSSPLADAKRIPSIVSSPLNSPLDRSGIDITDFQAKREKVDSQYPPVQRLMTPKPVSIATNRSVYFKPSLTPSGEFRKTNQRIDNKCSTGYEKNMTPGQNREQRESGFSYPNFSLPAANGLSSGVGGGGGKMRRERTRFVASKPLEEEEMEVPVLPKISLPITSSSLPTFNFSSPEITTSSPSPINSSQALTNKVQMTSPSSTGSPMFKFSSPIVKSTEANVLPPSSIGFTFSVPVAKTAELSGSSSTLEPIISSSAHHVTTVNSTNCKKTPPEDCEGPFRPAEILKEGSVLDILKSPGFASPKIDSVAAQPTATSPVVYTRPAISSFSSSGIGFGESLKAGSSWQCDTCLLQNKVTDNKCIACQAAKLSPRDTAKQTGIETPNKSGKTTLSASGTGFGDKFKPVIGTWDCDTCLVQNKPEAIKCVACETPKPGTCVKRALTLTVVSESAETMTASSSSCTVTTGTLGFGDKFKRPIGSWECSVCCVSNNAEDNKCVSCMSEKPGSSVPASSSSTVPVSLPSGGSLGLEKFKKPEGSWDCELCLVQNKADSTKCLACESAKPGTKSGFKGFDTSSSSSNSAASSSFKFGVSSSSSGPSQTLTSTGNFKFGDQGGFKIGVSSDSGSINPMSEGFKFSKPIGDFKFGVSSESKPEEVKKDSKNDNFKFGLSSGLSNPVSLTPFQFGVSNLGQEEKKEELPKSSSAGFSFGTGVINSTPAPANTIVTSENKSSFNLGTIETKSASVAPFTCKTSEAKKEEMPATKGGFSFGNVEPASLPSASVFVLGRTEEKQQEPVTSTSLVFGKKADNEEPKCQPVFSFGNSEQTKDENSSKSTFSFSMTKPSEKESEQPAKATFAFGAQTSTTADQGAAKPVFSFLNNSSSSSSTPATSAGGGIFGSSTSSSNPPVATFVFGQSSNPVSSSAFGNTAESSTSQSLLFSQDSKLATTSSTGTAVTPFVFGPGASSNNTTTSGFGFGATTTSSSAGSSFVFGTGPSAPSASPAFGANQTPTFGQSQGASQPNPPGFGSISSSTALFPTGSQPAPPTFGTVSSSSQPPVFGQQPSQSAFGSGTTPNSSSAFQFGSSTTNFNFTNNSPSGVFTFGANSSTPAASAQPSGSGGFPFNQSPAAFTVGSNGKNVFSSSGTSFSGRKIKTAVRRRK

SEQ ID NO: 242 - protein, 1235 aa, Homo sapiens
MSGPTDETAGDLPVKDTGLNLFGMGGLQETSTTRTMKSRQAVSRVSREELEDRFLRLHDENILLKQHARKQEDKIKRMATKLIRLVNDKKRYERVGGGPKRLGRDVEMEEMIEQLQEKVHELEKQNETLKNRLISAKQQLQTQGYRQTPYNNVQSRINTGRRKANENAGLQECPRKGIKFQDADVAETPHPMFTKYGNSLLEEARGEIRNLENVIQSQRGQIEELEHLAEILKTQLRRKENEIELSLLQLREQQATDQRSNIRDNVEMIKLHKQLVEKSNALSAMEGKFIQLQEKQRTLRISHDALMANGDELNMQLKEQRLKCCSLEKQLHSMKFSERRIEELQDRINDLEKERELLKENYDKLYDSAFSAAHEEQWKLKEQQLKVQIAQLETALKSDLTDKTEILDRLKTERDQNEKLVQENRELQLQYLEQKQQLDELKKRIKLYNQENDINADELSEALLLIKAQKEQKNGDLSFLVKVDSEINKDLERSMRELQATHAETVQELEKTRNMLIMQHKINKDYQMEVEAVTRKMENLQQDYELKVEQYVHLLDIRAARIHKLEAQLKDIAYGTKQYKFKPEIMPDDSVDEFDETIHLERGENLFEIHINKVTFSSEVLQASGDKEPVTFCTYAFYDFELQTTPVVRGLHPEYNFTSQYLVHVNDLFLQYIQKNTITLEVHQAYSTEYETIAACQLKFHEILEKSGRIFCTASLIGTKGDIPNFGTVEYWFRLRVPMDQAIRLYRERAKALGYITSNFKGPEHMQSLSQQAPKTAQLSSTDSTDGNLNELHITIRCCNHLQSRASHLQPHPYVVYKFFDFADHDTAIIPSSNDPQFDDHMYFPVPMNMDLDRYLKSESLSFYVFDDSDTQENIYIGKVNVPLISLAHDRCISGIFELTDHQKHPAGTIHVILKWKFAYLPPSGSITTEDLGNFIRSEEPEVVQRLPPASSVSTLVLAPRPKPRQRLTPVDKKVSFVDIMPHQSDVSQEGSVDEVKENTEKMQQGKDDVSLLSEGQLAEQSLASSEDETEITEDLEPEVEEDMSASDSDDCIIPGPISKNIKQPSEKIRIEIIALSLNDSQVTMDDTIQRLFVECRFYSLPAEETPVSLPKPKSGQWVYYNYSNVIYVDKENNKAKRDILKAILQKQEMPNRSLRFTVVSDPPEDEQDLECEDIGVAHVDLADMFQEGRDLIEQNIDVFDARADGEGIGKLRVTVEALHALQSVYKQYRDDLEA

SEQ ID NO: 243 - protein, 1159 aa, Homo sapiens
MPVRRGHVAPQNTFLDTIIRKFEGQSRKFIIANARVENCAVIYCNDGFCELCGYSRAEVMQRPCTCDFLHGPRTQRRAAAQIAQALLGAEERKVEIAFYRKDGSCFLCLVDVVPVKNEDGAVIMFILNFEVVMEKDMVGSPAHDTNHRGPPTSWLAPGRAKTFRLKLPALLALTARESSVRSGGAGGAGAPGAVVVDVDLTPAAPSSESLALDEVTAMDNHVAGLGPAEERRALVGPGSPPRSAPGQLPSPRAHSLNPDASGSSCSLARTRSRESCASVRRASSADDIEAMRAGVLPPPPRHASTGAMHPLRSGLLNSTSDSDLVRYRTISKIPQITLNFVDLKGDPFLASPTSDREIIAPKIKERTHNVTEKVTQVLSLGADVLPEYKLQAPRIHRWTILHYSPFKAVWDWLILLLVIYTAVFTPYSAAFLLKETEEGPPATECGYACQPLAVVDLIVDIMFIVDILINFRTTYVNANEEVVSHPGRIAVHYFKGWFLIDMVAAIPFDLLIFGSGSEELIGLLKTARLLRLVRVARKLDRYSEYGAAVLFLLMCTFALIAHWLACIWYAIGNMEQPHMDSRIGWLHNLGDQIGKPYNSSGLGGPSIKDKYVTALYFTFSSLTSVGFGNVSPNTNSEKIFSICVMLIGSLMYASIFGNVSAIIQRLYSGTARYHTQMLRVREFIRFHQIPNPLRQRLEEYFQHAWSYTNGIDMNAVLKGFPECLQADICLHLNRSLLQHCKPFRGATKGCLRALAMKFKTTHAPPGDTLVHAGDLLTALYFISRGSIEILRGDVVVAILGKNDIFGEPLNLYARPGKSNGDVRALTYCDLHKIHRDDLLEVLDMYPEFSDHFWSSLEITFNLRDTNMIPGSPGSTELEGGFSRQRKRKLSFRRRTDKDTEQPGEVSALGPGRAGAGPSSRGRPGGPWGESPSSGPSSPESSEDEGPGRSSSPLRLVPFSSPRPPGEPPGGEPLMEDCEKSSDTCNPLSGAFSGVSNIFSFWGDSRGRQYQELPRCPAPTPSLLNIPLSSPGRRPRGDVESRLDALQRQLNRLETRLSADMATVLQLLQRQMTLVPPAYSAVTTPGPGPTSTSPLLPVSPLPTLTLDSLSQVSQFMACEELPPGAPELPQEGPTRRLSLPGQLGALTSQPLHRHGSDPGS

SEQ ID NO: 244 - protein, 452 aa, Homo sapiens
MELALRRSPVPRWLLLLPLLLGLNAGAVIDWPTEEGKEVWDYVTVRKDAYMFWWLYYATNSCKNFSELPLVMWLQGGPGGSSTGFGNFEEIGPLDSDLKPRKTTWLQAASLLFVDNPVGTGFSYVNGSGAYAKDLAMVASDMMVLLKTFFSCHKEFQTVPFYIFSESYGGKMAAGIGLELYKAIQRGTIKCNFAGVALGDSWISPVDSVLSWGPYLYSMSLLEDKGLAEVSKVAEQVLNAVNKGLYREATELWGKAEMIIEQNTDGVNFYNILTKSTPTSTMESSLEFTQSHLVCLCQRHVRHLQRDALSQLMNGPIRKKLKIIPEDQSWGGQATNVFVNMEEDFMKPVISIVDELLEAGINVTVYNGQLDLIVDTMGQEAWVRKLKWPELPKFSQLKWKALYSDPKSLETSAFVKSYKNLAFYWILKAGHMVPSDQGDMALKMMRLVTQQE

SEQ ID NO: 245 - protein, 4303 aa, Homo sapiens
MPPAAPARLALALGLGLWLGALAGGPGRGCGPCEPPCLCGPAPGAACRVNCSGRGLRTLGPALRIPADATALDVSHNLLRALDVGLLANLSALAELDISNNKISTLEEGIFANLFNLSEINLSGNPFECDCGLAWLPRWAEEQQVRVVQPEAATCAGPGSLAGQPLLGIPLLDSGCGEEYVACLPDNSSGTVAAVSFSAAHEGLLQPEACSAFCFSTGQGLAALSEQGWCLCGAAQPSSASFACLSLCSGPPPPPAPTCRGPTLLQHVFPASPGATLVGPHGPLASGQLAAFHIAAPLPVTATRWDFGDGSAEVDAAGPAASHRYVLPGRYHVTAVLALGAGSALLGTDVQVEAAPAALELVCPSSVQSDESLDLSIQNRGGSGLEAAYSIVALGEEPARAVHPLCPSDTEIFPGNGHCYRLVVEKAAWLQAQEQCQAWAGAALAMVDSPAVQRFLVSRVTRSLDVWIGFSTVQGVEVGPAPQGEAFSLESCQNWLPGEPHPATAEHCVRLGPTGWCNTDLCSAPHSYVCELQPGGPVQDAENLLVGAPSGDLQGPLTPLAQQDGLSAPHEPVEVMVFPGLRLSREAFLTTAEFGTQELRRPAQLRLQVYRLLSTAGTPENGSEPESRSPDNRTQLAPACMPGGRWCPGANICLPLDASCHPQACANGCTSGPGLPGAPYALWREFLFSVPAGPPAQYSVTLHGQDVLMLPGDLVGLQHDAGPGALLHCSPAPGHPGPRAPYLSANASSWLPHLPAQLEGTWACPACALRLLAATEQLTVLLGLRPNPGLRLPGRYEVRAEVGNGVSRHNLSCSFDVVSPVAGLRVIYPAPRDGRLYVPTNGSALVLQVDSGANATATARWPGGSVSARFENVCPALVATFVPGCPWETNDTLFSVVALPWLSEGEHVVDVVVENSASRANLSLRVTAEEPICGLRATPSPEARVLQGVLVRYSPVVEAGSDMVFRWTINDKQSLTFQNVVFNVIYQSAAVFKLSLTASNHVSNVTVNYNVTVERMNRMQGLQVSTVPAVLSPNATLALTAGVLVDSAVEVAFLWTFGDGEQALHQFQPPYNESFPVPDPSVAQVLVEHNVMHTYAAPGEYLLTVLASNAFENLTQQVPVSVRASLPSVAVGVSDGVLVAGRPVTFYPHPLPSPGGVLYTWDFGDGSPVLTQSQPAANHTYASRGTYHVRLEVNNTVSGAAAQADVRVFEELRGLSVDMSLAVEQGAPVVVSAAVQTGDNITWTFDMGDGTVLSGPEATVEHVYLRAQNCTVTVGAASPAGHLARSLHVLVFVLEVLRVEPAACIPTQPDARLTAYVTGNPAHYLFDWTFGDGSSNTTVRGCPTVTHNFTRSGTFPLALVLSSRVNRAHYFTSICVEPEVGNVTLQPERQFVQLGDEAWLVACAWPPFPYRYTWDFGTEEAAPTRARGPEVTFIYRDPGSYLVTVTASNNISAANDSALVEVQEPVLVTSIKVNGSLGLELQQPYLFSAVGRGRPASYLWDLGDGGWLEGPEVTHAYNSTGDFTVRVAGWNEVSRSEAWLNVTVKRRVRGLVVNASRTVVPLNGSVSFSTSLEAGSDVRYSWVLCDRCTPIPGGPTISYTFRSVGTFNIIVTAENEVGSAQDSIFVYVLQLIEGLQVVGGGRYFPTNHTVQLQAVVRDGTNVSYSWTAWRDRGPALAGSGKGFSLTVLEAGTYHVQLRATNMLGSAWADCTMDFVEPVGWLMVAASPNPAAVNTSVTLSAELAGGSGVVYTWSLEEGLSWETSEPFTTHSFPTPGLHLVTMTAGNPLGSANATVEVDVQVPVSGLSIRASEPGGSFVAAGSSVPFWGQLATGTNVSWCWAVPGGSSKRGPHVTMVFPDAGTFSIRLNASNAVSWVSATYNLTAEEPIVGLVLWASSKVVAPGQLVHFQILLAAGSAVTFRLQVGGANPEVLPGPRFSHSFPRVGDHVVSVRGKNHVSWAQAQVRIVVLEAVSGLQVPNCCEPGIATGTERNFTARVQRGSRVAYAWYFSLQKVQGDSLVILSGRDVTYTPVAAGLLEIQVRAFNALGSENRTLVLEVQDAVQYVALQSGPCFTNRSAQFEAATSPSPRRVAYHWDFGDGSPGQDTDEPRAEHSYLRPGDYRVQVNASNLVSFFVAQATVTVQVLACREPEVDVVLPLQVLMRRSQRNYLEAHVDLRDCVTYQTEYRWEVYRTASCQRPGRPARVALPGVDVSRPRLVLPRLALPVGHYCFVFVVSFGDTPLTQSIQANVTVAPERLVPIIEGGSYRVWSDTRDLVLDGSESYDPNLEDGDQTPLSFHWACVASTQREAGGCALNFGPRGSSTVTIPRERLAAGVEYTFSLTVWKAGRKEEATNQTVLIRSGRVPIVSLECVSCKAQAVYEVSRSSYVYLEGRCLNCSSGSKRGRWAARTFSNKTLVLDETTTSTGSAGMRLVLRRGVLRDGEGYTFTLTVLGRSGEEEGCASIRLSPNRPPLGGSCRLFPLGAVHALTTKVHFECTGWHDAEDAGAPLVYALLLRRCRQGHCEEFCVYKGSLSSYGAVLPPGFRPHFEVGLAVVVQDQLGAAVVALNRSLAITLPEPNGSATGLTVWLHGLTASVLPGLLRQADPQHVIEYSLALVTVLNEYERALDVAAEPKHERQHRAQIRKNITETLVSLRVHTVDDIQQIAAALAQCMGPSRELVCRSCLKQTLHKLEAMMLILQAETTAGTVTPTAIGDSILNITGDLIHLASSDVRAPQPSELGAESPSRMVASQAYNLTSALMRILMRSRVLNEEPLTLAGEEIVAQGKRSDPRSLLCYGGAPGPGCHFSIPEAFSGALANLSDVVQLIFLVDSNPFPFGYISNYTVSTKVASMAFQTQAGAQIPIERLASERAITVKVPNNSDWAARGHRSSANSANSVVVQPQASVGAVVTLDSSNPAAGLHLQLNYTLLDGHYLSEEPEPYLAVYLHSEPRPNEHNCSASRRIRPESLQGADHRPYTFFISPGSRDPAGSYHLNLSSHFRWSALQVSVGLYTSLCQYFSEEDMVWRTEGLLPLEETSPRQAVCLTRHLTAFGASLFVPPSHVRFVFPEPTADVNYIVMLTCAVCLVTYMVMAAILHKLDQLDASRGRAIPFCGQRGRFKYEILVKTGWGRGSGTTAHVGIMLYGVDSRSGHRHLDGDRAFHRNSLDIFRIATPHSLGSVWKIRVWHDNKGLSPAWFLQHVIVRDLQTARSAFFLVNDWLSVETEANGGLVEKEVLAASDAALLRFRRLLVAELQRGFFDKHIWLSIWDRPPRSRFTRIQRATCCVLLICLFLGANAVWYGAVGDSAYSTGHVSRLSPLSVDTVAVGLVSSVVVYPVYLAILFLFRMSRSKVAGSPSPTPAGQQVLDIDSCLDSSVLDSSFLTFSGLHAEQAFVGQMKSDLFLDDSKSLVCWPSGEGTLSWPDLLSDPSIVGSNLRQLARGQAGHGLGPEEDGFSLASPYSPAKSFSASDEDLIQQVLAEGVSSPAPTQDTHMETDLLSSLSSTPGEKTETLALQRLGELGPPSPGLNWEQPQAARLSRTGLVEGLRKRLLPAWCASLAHGLSLLLVAVAVAVSGWVGASFPPGVSVAWLLSSSASFLASFLGWEPLKVLLEALYFSLVAKRLHPDEDDTLVESPAVTPVSARVPRVRPPHGFALFLAKEEARKVKRLHGMLRSLLVYMLFLLVTLLASYGDASCHGHAYRLQSAIKQELHSRAFLAITRSEELWPWMAHVLLPYVHGNQSSPELGPPRLRQVRLQEALYPDPPGPRVHTCSAAGGFSTSDYDVGWESPHNGSGTWAYSAPDLLGAWSWGSCAVYDSGGYVQELGLSLEESRDRLRFLQLHNWLDNRSRAVFLELTRYSPAVGLHAAVTLRLEFPAAGRALAALSVRPFALRRLSAGLSLPLLTSVCLLLFAVHFAVAEARTWHREGRWRVLRLGAWARWLLVALTAATALVRLAQLGAADRQWTRFVRGRPRRFTSFDQVAQLSSAARGLAASLLFLLLVKAAQQLRFVRQWSVFGKTLCRALPELLGVTLGLVVLGVAYAQLAILLVSSCVDSLWSVAQALLVLCPGTGLSTLCPAESWHLSPLLCVGLWALRLWGALRLGAVILRWRYHALRGELYRPAWEPQDYEMVELFLRRLRLWMGLSKVKEFRHKVRFEGMEPLPSRSSRGSKVSPDVPPPSAGSDASHPSTSSSQLDGLSVSLGRLGTRCEPEPSRLQAVFEALLTQFDRLNQATEDVYQLEQQLHSLQGRRSSRAPAGSSRGPSPGLRPALPSRLARASRGVDLATGPSRTPLRAKNKVHPSST

SEQ ID NO: 246 - protein, 855 aa, Homo sapiens
MSEARRDSTSSLQRKKPPWLKLDIPSAVPLTAEEPSFLQPLRRQAFLRSVSMPAETAHISSPHHELRRPVLQRQTSITQTIRRGTADWFGVSKDSDSTQKWQRKSIRHCSQRYGKLKPQVLRELDLPSQDNVSLTSTETPPPLYVGPCQLGMQKIIDPLARGRAFRVADDTAEGLSAPHTPVTPGAASLCSFSSSRSGFHRLPRRRKRESVAKMSFRAAAALMKGRSVRDGTFRRAQRRSFTPASFLEEDTTDFPDELDTSFFAREGILHEELSTYPDEVFESPSEAALKDWEKAPEQADLTGGALDRSELERSHLMLPLERGWRKQKEGAAAPQPKVRLRQEVVSTAGPRRGQRIAVPVRKLFAREKRPYGLGMVGRLTNRTYRKRIDSFVKRQIEDMDDHRPFFTYWLTFVHSLVTILAVCIYGIAPVGFSQHETVDSVLRNRGVYENVKYVQQENFWIGPSSEALIHLGAKFSPCMRQDPQVHSFIRSAREREKHSACCVRNDRSGCVQTSEEECSSTLAVWVKWPIHPSAPELAGHKRQFGSVCHQDPRVCDEPSSEDPHEWPEDITKWPICTKNSAGNHTNHPHMDCVITGRPCCIGTKGRCEITSREYCDFMRGYFHEEATLCSQVHCMDDVCGLLPFLNPEVPDQFYRLWLSLFLHAGILHCLVSICFQMTVLRDLEKLAGWHRIAIIYLLSGVTGNLASAIFLPYRAEVGPAGSQFGILACLFVELFQSWQILARPWRAFFKLLAVVLFLFTFGLLPWIDNFAHISGFISGLFLSFAFLPYISFGKFDLYRKRCQIIIFQVVFLGLLAGLVVLFYVYPVRCEWCEFLTCIPFTDKFCEKYELDAQLH

SEQ ID NO: 247 - protein, 862 aa, Homo sapiens
MNIQEQGFPLDLGASFTEDAPRPPVPGEEGELVSTDPRPASYSFCSGKGVGIKGETSTATPRRSDLDLGYEPEGSASPTPPYLKWAESLHSLLDDQDGISLFRTFLKQEGCADLLDFWFACTGFRKLEPCDSNEEKRLKLARAIYRKYILDNNGIVSRQTKPATKSFIKGCIMKQLIDPAMFDQAQTEIQATMEENTYPSFLKSDIYLEYTRTGSESPKVCSDQSSGSGTGKGISGYLPTLNEDEEWKCDQDMDEDDGRDAAPPGRLPQKLLLETAAPRVSSSRRYSEGREFRYGSWREPVNPYYVNAGYALAPATSANDSEQQSLSSDADTLSLTDSSVDGIPPYRIRKQHRREMQESVQVNGRVPLPHIPRTYRVPKEVRVEPQKFAEELIHRLEAVQRTREAEEKLEERLKRVRMEEEGEDGDPSSGPPGPCHKLPPAPAWHHFPPRCVDMGCAGLRDAHEENPESILDEHVQRVLRTPGRQSPGPGHRSPDSGHVAKMPVALGGAASGHGKHVPKSGAKLDAAGLHHHRHVHHHVHHSTARPKEQVEAEATRRAQSSFAWGLEPHSHGARSRGYSESVGAAPNASDGLAHSGKVGVACKRNAKKAESGKSASTEVPGASEDAEKNQKIMQWIIEGEKEISRHRRTGHGSSGTRKPQPHENSRPLSLEHPWAGPQLRTSVQPSHLFIQDPTMPPHPAPNPLTQLEEARRRLEEEEKRASRAPSKQRYVQEVMRRGRACVRPACAPVLHVVPAVSDMELSETETRSQRKVGGGSAQPCDSIVVAYYFCGEPIPYRTLVRGRAVTLGQFKELLTKKGSYRYYFKKVSDEFDCGVVFEEVREDEAVLPVFEEKIIGKVEKVD

SEQ ID NO: 248 - protein, 1134 aa, Homo sapiens
MSEPHRVQFTSLPGSLNPAFLKKSRKEEAGAGEQHQDCEPAAAAVRITLTLFEPDHKRCPEFFYPELVKNIRGKVKGLQPGDKKKDLSDPFNDEEKERHKVEALARKFEEKYGGKKRRKDRIQDLIDMGYGYDESDSFIDNSEAYDELVPASLTTKYGGFYINSGTLQFRQASESEDDFIKEKKKKSPKKRKLKEGGEKIKKKKKDDTYDKEKKSKKSKFSKAGFTALNASKEKKKKKYSGALSVKEMLKKFQKEKEAQKKREEEHKPVAVPSAEAQGLRELEGASDPLLSLFGSTSDNDLLQAATAMDSLTDLDLEHLLSESPEGSPFRDMDDGSDSLGVGLDQEFRQPSSLPEGLPAPLEKRVKELAQAARAAEGESRQKFFTQDINGILLDIEAQTRELSSQVRSGVYAYLASFLPCSKDALLKRARKLHLYEQGGRLKEPLQKLKEAIGRAMPEQMAKYQDECQAHTQAKVAKMLEEEKDKEQRDRICSDEEEDEEKGGRRIMGPRKKFQWNDEIRELLCQVVKIKLESQDLERNNKAQAWEDCVKGFLDAEVKPLWPKGWMQARTLFKESRRGHGHLTSILAKKKVMAPSKIKVKESSTKPDKKVSVPSGQIGGPIALPSDHQTGGLSIGASSRELPSQASGGLANPPPVNLEDSLDEDLIRNPASSVEAVSKELAALNSRAAGNSEFTLPAPSKAPAEKVGGVLCTEEKRNFAKPSPSAPPPASSLQSPLNFLAEQALALGQSSQEKKPESSGYKELSCQAPLNKGLPEVHQSKAKHHSLPRTSHGPQVAVPVPGPQVKVFHAGTQQQKNFTPPSPFANKLQGPKASPTQCHRSLLQLVKTAAKGQGFHPSAPATSGGLSASSSSSHKTPASSSSALSHPAKPHSVSSAGSSYKNNPFASSISKHGVSSGSSSSGGTPVQSSVSGSLVPGIQPPSVGQATSRPVPSSAGKKMPVSQKLTLVAPPGGPNGDSSGGTQGVAKLLTSPSLKPSAVSSVTSSTSLSKGASGTVLLAGSSLMASPYKSSSPKLSGAMSSNSLGIITPVPIPVHVLSFSADSSAKAGVSKDAIVTGPAPGSFHHGLGHSLLAGLHSSPPHAAPLPHAAVPTHIPQSLPGASQLHGKGPAVPRKL

SEQ ID NO: 249 - protein, 758 aa, Homo sapiens
MAEPRQEFEVMEDHAGTYGLGDRKDQGGYTMHQDQEGDTDAGLKESPLQTPTEDGSEEPGSETSDAKSTPTAEDVTAPLVDEGAPGKQAAAQPHTEIPEGTTAEEAGIGDTPSLEDEAAGHVTQEPESGKVVQEGFLREPGPPGLSHQLMSGMPGAPLLPEGPREATRQPSGTGPEDTEGGRHAPELLKHQLLGDLHQEGPPLKGAGGKERPGSKEEVDEDRDVDESSPQDSPPSKASPAQDGRPPQTAAREATSIPGFPAEGAIPLPVDFLSKVSTEIPASEPDGPSVGRAKGQDAPLEFTFHVEITPNVQKEQAHSEEHLGRAAFPGAPGEGPEARGPSLGEDTKEADLPEPSEKQPAAAPRGKPVSRVPQLKARMVSKSKDGTGSDDKKAKTSTRSSAKTLKNRPCLSPKHPTPGSSDPLIQPSSPAVCPEPPSSPKYVSSVTSRTGSSGAKEMKLKGADGKTKIATPRGAAPPGQKGQANATRIPAKTPPAPKTPPSSGEPPKSGDRSGYSSPGSPGTPGSRSRTPSLPTPPTREPKKVAVVRTPPKSPSSAKSRLQTAPVPMPDLKNVKSKIGSTENLKHQPGGGKVQIINKKLDLSNVQSKCGSKDNIKHVPGGGSVQIVYKPVDLSKVTSKCGSLGNIHHKPGGGQVEVKSEKLDFKDRVQSKIGSLDNITHVPGGGNKKIETHKLTFRENAKAKTDHGAEIVYKSPVVSGDTSPRHLSNVSSTGSIDMVDSPQLATLADEVSASLAKQGL

SEQ ID NO: 250 - protein, 196 aa, Homo sapiens
MADSAQAQKLVYLVTGGCGFLGEHVVRMLLQREPRLGELRVFDQHLGPWLEELKTGPVRVTAIQGDVTQAHEVAAAVAGAHVVIHTAGLVDVFGRASPKTIHEVNVQGTRNVIEACVQTGTRFLVYTSSMEVVGPNTKGHPFYRGNEDTPYEAVHRHPYPCSKALAEWLVLEANGRKAMLPGCTCWQPGSWSSGQP

SEQ ID NO: 251 - protein, 839 aa, Homo sapiens
MTSRLRALGGRINNIRTSELPKEKTRSEVICSIHFLDGVVQTFKVTKQDTGQVLLDMVHNHLGVTEKEYFGLQHDDDSVDSPRWLEASKAIRKQLKGGFPCTLHFRVRFFIPDPNTLQQEQTRHLYFLQLKMDICEGRLTCPLNSAVVLASYAVQSHFGDYNSSIHHPGYLSDSHFIPDQNEDFLTKVESLHEQHSGLKQSEAESCYINIARTLDFYGVELHSGRDLHNLDLMIGIASAGVAVYRKYICTSFYPWVNILKISFKRKKFFIHQRQKQAESREHIVAFNMLNYRSCKNLWKSCVEHHTFFQAKKLLPQEKNVLSQYWTMGSRNTKKSVNNQYCKKVIGGMVWNPAMRRSLSVEHLETKSLPSRSPPITPNWRSPRLRHEIRKPRHSSADNLANEMTYITETEDVFYTYKGSLAPQDSDSEVSQNRSPHQESLSENNPAQSYLTQKSSSSVSPSSNAPGSCSPDGVDQQLLDDFHRVTKGGSTEDASQYYCDKNDNGDSYLVLIRITPDEDGKFGFNLKGGVDQKMPLVVSRINPESPADTCIPKLNEGDQIVLINGRDISEHTHDQVVMFIKASRESHSRELALVIRRRAVRSFADFKSEDELNQLFPEAIFPMCPEGGDTLEGSMAQLKKGLESGTVLIQFEQLYRKKPGLAITFAKLPQNLDKNRYKDVLPYDTTRVLLQGNEDYINASYVNMEIPAANLVNKYIATQGPLPHTCAQFWQVVWDQKLSLIVMLTTLTERGRTKCHQYWPDPPDVMNHGGFHIQCQSEDCTIAYVSREMLVTNTQVSRSLRGTVEGQVLNQRPLSSQVVTLLGVHSVCTWQACQPGKNTQ

SEQ ID NO: 252 - protein, 1301 aa, Homo sapiens
MYKEDPVQGKSNGELSLSRESEGQKNVSSIPGKTGKRRGRPPKRKKLQEEILLSEKQEENSLASEPQTRHGSQGPGQGTWWLLCQTEEEWRQVTESFRERTSLRERQLYKLLSEDFLPEICNMIAQKGKRPQRTKAELHPRWMSDHLSIKPVKQEETPVLTRIEKQKRKEEEEERQILLAVQKKEQEQMLKEERKRELEEKVKAVEDRAKRRKLREERAWLLAQGKELPPELSHLDPNSPMREEKKTKDLFELDDDFTAMYKVLDVVKAHKDSWPFLEPVDESYAPNYYQIIKAPMDISSMEKKLNGGLYCTKEEFVNDMKTMFRNCRKYNGESSEYTKMSDNLERCFHRAMMKHFPGEDGDTDEEFWIREDEKREKRRSRAGRSGGSHVWTRSRDPEGSSRKQQPMENGGKSLPPTRRAPSSGDDQSSSSTQPPREVGTSNGRGFSHPLHCGGTPSQAPFLNQMRPAVPGTFGPLRGSDPATLYGSSGVPEPHPGEPVQQRQPFTMQPPVGINSLRGPRLGTPEEKQMCGGLTHLSNMGPHPGSLQLGQISGPSQDGSMYAPAQFQPGFIPPRHGGAPARPPDFPESSEIPPSHMYRSYKYLNRVHSAVWNGNHGATNQGPLGPDEKPHLGPGPSHQPRTLGHVMDSRVMRPPVPPNQWTEQSGFLPHGVPSSGYMRPPCKSAGHRLQPPPVPAPSSLFGAPAQALRGVQGGDSMMDSPEMIAMQQLSSRVCPPGVPYHPHQPAHPRLPGPFPQVAHPMSVTVSAPKPALGNPGRAPENSEAQEPENDQAEPLPGLEEKPPGVGTSEGVYLTQLPHPTPPLQTDCTRQSSPQERETVGPELKSSSSESADNCKAMKGKNPWPSDSSYPGPAAQGCVRDLSTVADRGALSENGVIGEASPCGSEGKGLGSSGSEKLLCPRGRTLQETMPCTGQNAATPPSTDPGLTGGTVSQFPPLYMPGLEYPNSAAHYHISPGLQGVGPVMGGKSPASHPQHFPPRGFQSNHPHSGGFPRYRPPQGMRYSYHPPPQPSYHHYQRTPYYACPQSFSDWQRPLHPQGSPSGPPASQPPPPRSLFSDKNAMASLQGCETLNAALTSPTRMDAVAAKVPNDGQNPGPEEEKLDESMERPESPKEFLDLDNHNAATKRQSSLSASEYLYGTPPPLSSGMGFGSSAFPPHSVMLQTGPPYTPQRPASHFQPRAYSSPVAALPPHHPGATQPNGLSQEGPIYRCQEEGLGHFQAVMMEQIGTRSGIRGPFQEMYRPSGMQMHPVQSQASFPKTPTAATSQEEVPPHKPPTLPLDQS

SEQ ID NO: 253 - protein, 643 aa, Homo sapiens
MRTLRRLKFMSSPSLSDLGKREPAAAADERGTQQRRACANATWNSIHNGVIAVFQRKGLPDQELFSLNEGVRQLLKTELGSFFTEYLQNQLLTKGMVILRDKIRFYEGQKLLDSLAETWDFFFSDVLPMLQAIFYPVQGKEPSVRQLALLHFRNAITLSVKLEDALARAHARVPPAIVQMLLVLQGVHESRGVTEDYLRLETLVQKVVSPYLGTYGLHSSEGPFTHSCILELQRDKAAAAAVLGAVRKRPSVVPMAGQDPALSTSHPFYDVARHGILQVAGDDRFGRRVVTFSCCRMPPSHELDHQRLLEYKKNLKALYVVHPTSFIKVLWNILKPLISHKFGKKVIYFNYLSELHEHLKYDQLVIPPEVLRYDEKLQSLHEGRTPPPTKTPPPRPPLPTQQFGVSLQYLKDKNQGELIPPVLRFTVTYLREKGLRTEGLFRRSASVQTVREIQRLYNQGKPVNFDDYGDIHIPAVILKTFLRELPQPLLTFQAYEQILGITCVESSLRVTGCRQILRSLPEHNYVVLRYLMGFLHAVSRESIFNKMNSSNLACVFGLNLIWPSQGVSSLSALVPLNMFTELLIEYYEKIFSTPEAPGEHGLAPWEQGSRAAPLQEAVPRTQATGLTKPTLPPSPLMAARRRL

SEQ ID NO: 254 - protein, 939 aa, Homo sapiens
MATSQYFDFAQGGGPQYSAQPPTLPLPTVGASYTAQPTPGMDPAVNPAFPPAAPAGYGGYQPHSGQDFAYGSRPQEPVPTATTMATYQDSYSYGQSAAARSYEDRPYFQSAALQSGRMTAADSGQPGTQEACGQPSPHGSHSHAQPPQQAPIVESGQPASTLSSGYTYPTATGVQPESSASIVTSYPPPSYNPTCTAYTAPSYPNYDASVYSAASPFYPPAQPPPPPGPPQQLPPPPAPAGSGSSPRADSKPPLPSKLPRPKAGPRQLQLHYCDICKISCAGPQTYREHLGGQKHRKKEAAQKTGVQPNGSPRGVQAQLHCDLCAVSCTGADAYAAHIRGSKHQKVFKLHAKLGKPIPTLEPALATESPPGAEAKPTSPTGPSVCASSRPALAKRPVASKALCEGPPEPQAAGCRPQWGKPAQPKLEGPGAPTQGGSKEAPAGCSDAQPVGPEYVEEVFSDEGRVLRFHCKLCECSFNDLNAKDLHVRGRRHRLQYRKKVNPDLPIATEPSSRARKVLEERMRKQRHLAEERLEQLRRWHAERRRLEEEPPQDVPPHAPPDWAQPLLMGRPESPASAPLQPGRRPASSDDRHVMCKHATIYPTEQELLAVQRAVSHAERALKLVSDTLAEEDRGRREEEGDKRSSVAPQTRVLKGVMRVGILAKGLLLRGDRNVRLALLCSEKPTHSLLRRIAQQLPRQLQMVTEDEYEVSSDPEANIVISSCEEPRMQVTISVTSPLMREDPSTDPGVEEPQADAGDVLSPKKCLESLAALRHARWFQARASGLQPCVIVIRVLRDLCRRVPTWGALPAWAMELLVEKAVSSAAGPLGPGDAVRRVLECVATGTLLTDGPGLQDPCERDQTDALEPMTLQEREDVTASAQHALRMLAFRQTHKVLGMDLLPPRHRLGARFRKRQRGPGEGEEGAGEKKRGRRGGEGLV

SEQ ID NO: 255 - protein, 830 aa, Homo sapiens
MGLGLLLPLLLLWTRGTQGSELDPKGQHVCVASSPSAELQCCAGWRQKDQECTIPICEGPDACQKDEVCVKPGLCRCKPGFFGAHCSSRCPGQYWGPDCRESCPCHPHGQCEPATGACQCQADRWGARCEFPCACGPHGRCDPATGVCHCEPGWWSSTCRRPCQCNTAAARCEQATGACVCKPGWWGRRCSFRCNCHGSPCEQDSGRCACRPGWWGPECQQQCECVRGRCSAASGECTCPPGFRGARCELPCPAGSHGVQCAHSCGRCKHNEPCSPDTGSCESCEPGWNGTQCQQPCLPGTFGESCEQQCPHCRHGEACEPDTGHCQRCDPGWLGPRCEDPCPTGTFGEDCGSTCPTCVQGSCDTVTGDCVCSAGYWGPSCNASCPAGFHGNNCSVPCECPEGLCHPVSGSCQPGSGSRDTALIAGSLVPLLLLFLGLACCACCCWAPRSDLKDRPARDGATVSRMKLQVWGTLTSLGSTLPCRSLSSHKLPWVTVSHHDPEVPFNHSFIEPPSAGWATDDSFSSDPESGEADEVPAYCVPPQEGMVPVAQAGSSEASLAAGAFPPPEDASTPFAIPRTSSLARAKRPSVSFAEGTKFAPQSRRSSGELSSPLRKPKRLSRGAQSGPEGREAEESTGPEEAEAPESFPAAASPGDSATGHRRPPLGGRTVAEHVEAIEGSVQESSGPVTTIYMLAGKPRGSEGPVRSVFRHFGSFQKGQAEAKVKRAIPKPPRQALNRKKGSPGLASGSVGQSPNSAPKAGLPGATGPMAVRPEEAVRGLGAGTESSRRAQEPVSGCGSPEQDPQKQAEEERQEEPEYENVVPISRPPEP

SEQ ID NO: 256 - protein, 933 aa, Homo sapiens
MTATPESLFPTGDELDSSQLQMESDEVDTLKEGEDPADRMHPFLAIYELQSLKVHPLVFAPGVPVTAQVVGTERYTSGSKVGTCTLYSVRLTHGDFSWTTKKKYRHFQELHRDLLRHKVLMSLLPLARFAVAYSPARDAGNREMPSLPRAGPEGSTRHAASKQKYLENYLNRLLTMSFYRNYHAMTEFLEVSQLSFIPDLGRKGLEGMIRKRSGGHRVPGLTCCGRDQVCYRWSKRWLVVKDSFLLYMCLETGAISFVQLFDPGFEVQVGKRSTEARHGVRIDTSHRSLILKCSSYRQARWWAQEITELAQGPGRDFLQLHRHDSYAPPRPGTLARWFVNGAGYFAAVADAILRAQEEIFITDWWLSPEVYLKRPAHSDDWRLDIMLKRKAEEGVRVSILLFKEVELALGINSGYSKRALMLLHPNIKVMRHPDQVTLWAHHEKLLVVDQVVAFLGGLDLAYGRWDDLHYRLTDLGDSSESAASQPPTPRPDSPATPDLSHNQFFWLGKDYSNLITKDWVQLDRPFEDFIDRETTPRMPWRDVGVVVHGLPARDLARHFIQRWNFTKTTKAKYKTPTYPYLLPKSTSTANQLPFTLPGGQCTTVQVLRSVDRWSAGTLENSILNAYLHTIRESQHFLYIENQFFISCSDGRTVLNKVGDEIVDRILKAHKQGWCYRVYVLLPLLPGFEGDISTGGGNSIQAILHFTYRTLCRGEYSILHRLKAAMGTAWRDYISICGLRTHGELGGHPVSELIYIHSKVLIADDRTVIIGSANINDRSLLGKRDSELAVLIEDTETEPSLMNGAEYQAGRFALSLRKHCFGVILGANTRPDLDLRDPICDDFFQLWQDMAESNANIYEQIFRCLPSNATRSLRTLREYVAVEPLATVSPPLARSELTQVQGHLVHFPLKFLEDESLLPPLGSKEGMIPLEVWT

SEQ ID NO: 257 - protein, 2146 aa, Homo sapiens
MAFWTQLMLLLWKNFMYRRRQPVQLLVELLWPLFLFFILVAVRHSHPPLEHHECHFPNKPLPSAGTVPWLQGLICNVNNTCFPQLTPGEEPGRLSNFNDSLVSRLLADARTVLGGASAHRTLAGLGKLIATLRAARSTAQPQPTKQSPLEPPMLDVAELLTSLLRTESLGLALGQAQEPLHSLLEAAEDLAQELLALRSLVELRALLQRPRGTSGPLELLSEALCSVRGPSSTVGPSLNWYEASDLMELVGQEPESALPDSSLSPACSELIGALDSHPLSRLLWRRLKPLILGKLLFAPDTPFTRKLMAQVNRTFEELTLLRDVREVWEMLGPRIFTFMNDSSNVAMLQRLLQMQDEGRRQPRPGGRDHMEALRSFLDPGSGGYSWQDAHADVGHLVGTLGRVTECLSLDKLEAAPSEAALVSRALQLLAEHRFWAGVVFLGPEDSSDPTEHPTPDLGPGHVRIKIRMDIDVVTRTNKIRDRFWDPGPAADPLTDLRYVWGGFVYLQDLVERAAVRVLSGANPRAGLYLQQMPYPCYVDDVFLRVLSRSLPLFLTLAWIYSVTLTVKAVVREKETRLRDTMRAMGLSRAVLWLGWFLSCLGPFLLSAALLVLVLKLGDILPYSHPGVVFLFLAAFAVATVTQSFLLSAFFSRANLAAACGGLAYFSLYLPYVLCVAWRDRLPAGGRVAASLLSPVAFGFGCESLALLEEQGEGAQWHNVGTRPTADVFSLAQVSGLLLLDAALYGLATWYLEAVCPGQYGIPEPWNFPFRRSYWCGPRPPKSPAPCPTPLDPKVLVEEAPPGLSPGVSVRSLEKRFPGSPQPALRGLSLDFYQGHITAFLGHNGAGKTTTLSILSGLFPPSGGSAFILGHDVRSSMAAIRPHLGVCPQYNVLFDMLTVDEHVWFYGRLKGLSAAVVGPEQDRLLQDVGLVSKQSVQTRHLSGGMQRKLSVAIAFVGGSQVVILDEPTAGVDPASRRGIWELLLKYREGRTLILSTHHLDEAELLGDRVAVVAGGRLCCCGSPLFLRRHLGSGYYLTLVKARLPLTTNEKADTDMEGSVDTRQEKKNGSQGSRVGTPQLLALVQHWVPGARLVEELPHELVLVLPYTGAHDGSFATLFRELDTRLAELRLTGYGISDTSLEEIFLKVVEECAADTDMEDGSCGQHLCTGIAGLDVTLRLKMPPQETALENGEPAGSAPETDQGSGPDAVGRVQGWALTRQQLQALLLKRFLLARRSRRGLFAQIVLPALFVGLALVFSLIVPPFGHYPALRLSPTMYGAQVSFFSEDAPGDPGRARLLEALLQEAGLEEPPVQHSSHRFSAPEVPAEVAKVLASGNWTPESPSPACQCSRPGARRLLPDCPAAAGGPPPPQAVTGSGEVVQNLTGRNLSDFLVKTYPRLVRQGLKTKKWVNEVRYGGFSLGGRDPGLPSGQELGRSVEELWALLSPLPGGALDRVLKNLTAWAHSLDAQDSLKIWFNNKGWHSMVAFVNRASNAILRAHLPPGPARHAHSITTLNHPLNLTKEQLSEGALMASSVDVLVSICVVFAMSFVPASFTLVLIEERVTRAKHLQLMGGLSPTLYWLGNFLWDMCNYLVPACIVVLIFLAFQQRAYVAPANLPALLLLLLLYGWSITPLMYPASFFFSVPSTAYVVLTCINLFIGINGSMATFVLELFSDQKLQEVSRILKQVFLIFPHFCLGRGLIDMVRNQAMADAFERLGDRQFQSPLRWEVVGKNLLAMVIQGPLFLLFTLLLQHRSQLLPQPRVRSLPLLGEEDEDVARERERVVQGATQGDVLVLRNLTKVYRGQRMPAVDRLCLGIPPGECFGLLGVNGAGKTSTFRMVTGDTLASRGEAVLAGHSVAREPSAAHLSMGYCPQSDAIFELLTGREHLELLARLRGVPEAQVAQTAGSGLARLGLSWYADRPAGTYSGGNKRKLATALALVGDPAVVFLDEPTTGMDPSARRFLWNSLLAVVREGRSVMLTSHSMEECEALCSRLAIMVNGRFRCLGSPQHLKGRFAAGHTLTLRVPAARSQPAAAFVAAEFPGAELREAHGGRLRFQLPPGGRCALARVFGELAVHGAEHGVEDFSVSQTMLEEVFLYFSKDQGKDEDTEEQKEAGVGVDPAPGLQHPKRVSQFLDDPSTAETVL

SEQ ID NO: 258 - protein, 2220 aa, Homo sapiens
MIRIAALNASSTIEDDHEGSFKSHKTQTKEAQEAEAFALYHKALDLQKHDRFEESAKAYHELLEASLLREAVSSGDEKEGLKHPGLILKYSTYKNLAQLAAQREDLETAMEFYLEAVMLDSTDVNLWYKIGHVALRLIRIPLARHAFEEGLRCNPDHWPCLDNLITVLYTLSDYTTCLYFICKALEKDCRYSKGLVLKEKIFEEQPCLRKDSLRMFLKCDMSIHDVSVSAAETQAIVDEALGLRKKRQALIVREKEPDLKLVQPIPFFTWKCLGESLLAMYNHLTTCEPPRPSLGKRIDLSDYQDPSQPLESSMVVTPVNVIQPSTVSTNPAVAVAEPVVSYTSVATTSFPLHSPGLLETGAPVGDISGGDKSKKGVKRKKISEESGETAKRRSARVRNTKCKKEEKVDFQELLMKFLPSRLRKLDPEEEDDSFNNYEVQSEAKLESFPSIGPQRLSFDSATFMESEKQDVHEFLLENLTNGGILELMMRYLKAMGHKFLVRWPPGLAEVVLSVYHSWRRHSTSLPNPLLRDCSNKHIKDMMLMSLSCMELQLDQWLLTKGRSSAVSPRNCPAGMVNGRFGPDFPGTHCLGDLLQLSFASSQRDLFEDGWLEFVVRVYWLKARFLALQGDMEQALENYDICTEMLQSSTAIQVEAGAERRDIVIRLPNLHNDSVVSLEEIDKNLKSLERCQSLEEIQRLYEAGDYKAVVHLLRPTLCTSGFDRAKHLEFMTSIPERPAQLLLLQDSLLRLKDYRQCFECSDVALNEAVQQMVNSGEAAAKEEWVATVTQLLMGIEQALSADSSGSILKVSSSTTGLVRLTNNLIQVIDCSMAVQEEAKEPHVSSVLPWIILHRIIWQEEDTFHSLCHQQQLQNPAEEGMSETPMLPSSLMLLNTAHEYLGRRSWCCNSDGALLRFYVRVLQKELAASTSEDTHPYKEELETALEQCFYCLYSFPSKKSKARYLEEHSAQQVDLIWEDALFMFEYFKPKTLPEFDSYKTSTVSADLANLLKRIATIVPRTERPALSLDKVSAYIEGTSTEVPCLPEGADPSPPVVNELYYLLADYHFKNKEQSKAIKFYMHDICICPNRFDSWAGMALARASRIQDKLNSNELKSDGPIWKHATPVLNCFRRALEIDSSNLSLWIEYGTMSYALHSFASRQLKQWRGELPPELVQQMEGRRDSMLETAKHCFTSAARCEGDGDEEEWLIHYMLGKVAEKQQQPPTVYLLHYRQAGHYLHEEAARYPKKIHYHNPPELAMEALEVYFRLHASILKLLGKPDSGVGAEVLVNFMKEAAEGPFARGEEKNTPKASEKEKACLVDEDSHSSAGTLPGPGASLPSSSGPGLTSPPYTATPIDHDYVKCKKPHQQATPDDRSQDSTAVALSDSSSTQDFFNEPTSLLEGSRKSYTEKRLPILSSQAGATGKDLQGATEERGKNEESLESTEGFRAAEQGVQKPAAETPASACIPGKPSASTPTLWDGKKRGDLPGEPVAFPQGLPAGAEEQRQFLTEQCIASFRLCLSRFPQHYKSLYRLAFLYTYSKTHRNLQWARDVLLGSSIPWQQLQHMPAQGLFCERNKTNFFNGIWRIPVDEIDRPGSFAWHMNRSIVLLLKVLAQLRDHSTLLKVSSMLQRTPDQGKKYLRDADRQVLAQRAFILTVKVLEDTLSELAEGSERPGPKVCGLPGARMTTDVSHKASPEDGQEGLPQPKKPPLADGSGPGPEPGGKVGLLNHRPVAMDAGDSADQSGERKDKESPRAGPTEPMDTSEATVCHSDLERTPPLLPGRPARDRGPESRPTELSLEELSISARQQPTPLTPAQPAPAPAPATTTGTRAGGHPEEPLSRLSRKRKLLEDTESGKTLLLDAYRVWQQGQKGVAYDLGRVERIMSETYMLIKQVDEEAALEQAVKFCQVHLGAAAQRQASGDTPTTPKHPKDSRENFFPVTVVPTAPDPVPADSVQRPSDAHTKPRPALAAATTIITCPPSASASTLDQSKDPGPPRPHRPEATPSMASLGPEGEELARVAEGTSFPPQEPRHSPQVKMAPTSSPAEPHCWPAEAALGTGAEPTCSQEGKLRPEPRRDGEAQEAASETQPLSSPPTAASSKAPSSGSAQPPEGHPGKPEPSRAKSRPLPNMPKLVIPSAATKFPPEITVTPPTPTLLSPKGSISEETKQKLKSAILSAQSAANVRKESLCQPALEVLETSSQESSLESETDEDDDYMDI

SEQ ID NO: 259 - protein, 706 aa, Homo sapiens
MSPFLRIGLSNFDCGSCQSCQGEAVNPYCAVLVKEYVESENGQMYIQKKPTMYPPWDSTFDAHINKGRVMQIIVKGKNVDLISETTVELYSLAERCRKNNGKTEIWLELKPQGRMLMNARYFLEMSDTKDMNEFETEGFFALHQRRGAIKQAKVHHVKCHEFTATFFPQPTFCSVCHEFVWGLNKQGYQCRQCNAAIHKKCIDKVIAKCTGSAINSRETMFHKERFKIDMPHRFKVYNYKSPTFCEHCGTLLWGLARQGLKCDACGMNVHHRCQTKVANLCGINQKLMAEALAMIESTQQARCLRDTEQIFREGPVEIGLPCSIKNEARPPCLPTPGKREPQGISWESPLDEVDKMCHLPEPELNKERPSLQIKLKIEDFILHKMLGKGSFGKVFLAEFKKTNQFFAIKALKKDVVLMDDDVECTMVEKRVLSLAWEHPFLTHMFCTFQTKENLFFVMEYLNGGDLMYHIQSCHKFDLSRATFYAAEIILGLQFLHSKGIVYRDLKLDNILLDKDGHIKIADFGMCKENMLGDAKTNTFCGTPDYIAPEILLGQKYNHSVDWWSFGVLLYEMLIGQSPFHGQDEEELFHSIRMDNPFYPRWLEKEAKDLLVKLFVREPEKRLGVRGDIRQHPLFREINWEELERKEIDPPFRPKVKSPFDCSNFDKEFLNEKPRLSFADRALINSMDQNMFRNFSFMNPGMERLIS

SEQ ID NO: 260 - protein, 419 aa, Homo sapiens
MTTSPILQLLLRLSLCGLLLQRAETGSKGQTAGELYQRWERYRRECQETLAAAEPPSGLACNGSFDMYVCWDYAAPNATARASCPWYLPWHHHVAAGFVLRQCGSDGQWGLWRDHTQCENPEKNEAFLDQRLILERLQVMYTVGYSLSLATLLLALLILSLFRRLHCTRNYIHINLFTSFMLRAAAILSRDRLLPRPGPYLGDQALALWNQALAACRTAQIVTQYCVGANYTWLLVEGVYLHSLLVLVGGSEEGHFRYYLLLGWGAPALFVIPWVIVRYLYENTQCWERNEVKAIWWIIRTPILMTILINFLIFIRILGILLSKLRTRQMRCRDYRLRLARSTLTLVPLLGVHEVVFAPVTEEQARGALRFAKLGFEIFLSSFQGFLVSVLYCFINKEVGRDPAAAPALWRQRGVRRRL

SEQ ID NO: 261 - protein, 529 aa, Homo sapiens [sequence omitted]

SEQ ID NO: 262 - protein, 218 aa, Homo sapiens
MSFVGENSGVKMGSEDWEKDEPQCCLEDPAGSPLEPGPSLPTMNFVHTSPKVKNLNPKKFSIHDQDHKVLVLDSGNLIAVPDKNYIRPEIFFALASSLSSASAEKGSPILLGVSKGEFCLYCDKDKGQSHPSLQLKKEKLMKLAAQKESARRPFIFYRAQVGSWNMLESAAHPGWFICTSCNCNEPVGVTDKFENRKHIEFSFQPVCKAEMSPSEVSD

SEQ ID NO: 263 - protein, 197 aa, Homo sapiens
MSFVGENSGVKMGSEDWEKDEPQCCLEGPKVKNLNPKKFSIHDQDHKVLVLDSGNLIAVPDKNYIRPEIFFALASSLSSASAEKGSPILLGVSKGEFCLYCDKDKGQSHPSLQLKKEKLMKLAAQKESARRPFIFYRAQVGSWNMLESAAHPGWFICTSCNCNEPVGVTDKFENRKHIEFSFQPVCKAEMSPSEVSD

SEQ ID NO: 264 - protein, 157 aa, Homo sapiens
MSFVGENSGVKMGSEDWEKDEPQCCLEEIFFALASSLSSASAEKGSPILLGVSKGEFCLYCDKDKGQSHPSLQLKKEKLMKLAAQKESARRPFIFYRAQVGSWNMLESAAHPGWFICTSCNCNEPVGVTDKFENRKHIEFSFQPVCKAEMSPSEVSD

SEQ ID NO: 265 - protein, 206 aa, Homo sapiens
MAVKKIAIFGATGQTGLTTLAQAVQAGYEVTVLVRDSSRLPSEGPRPAHVVVGDVLQAADVDKTVAGQDAVIVLLGTRNDLSPTTVMSEGARNIVAAMKAHGVDKVVACTSAFLLWDPTKVPPRLQAVTDDHIRMHKVLRESGLKYVAVMPPHIGDQPLTGAYTVTLDGRGPSRVISKHDLGHFMLRCLTTDEYDGHSTYPSHQYQ

SEQ ID NO: 266 - protein, 252 aa, Homo sapiens
MESEMETQSARAEEGFTQVTRKGGRRAKKRQAEQLSAAGEGGDAGRMDTEEARPAKRPVFPPLCGDGLLSGKEETRKIPVPANRYTPLKENWMKIFTPIVEHLGLQIRFNLKSRNVEIRTCKETKDVSALTKAADFVKAFILGFQVEDALALIRLDDLFLESFEITDVKPLKGDHLSRAIGRIAGKGGKTKFTIENVTRTRIVLADVKVHILGSFQNIKMARTAICNLILGNPPSKVYGNIRAVASRSADRF

SEQ ID NO: 267 - protein, 409 aa, Homo sapiens
MGNSYAGQLKTTRFEEVLHNSIEASLRSNNLVPRPIFSQLYLEAEQQLAALEGGSRVDNEEEEEEGEGGLETNGPPNPFQLHPLPEGCCTTDGFCQAGKDLRLVSISNEPMDVPAGFLLVGVKSPSLPDHLLVCAVDKRFLPDDNGHNALLGFSGNCVGCGKKGFCYFTEFSNHINLKLTTQPKKQKHLKYYLVRNAQGTLTKGPLICWKGSEFRSRQIPASTCSSSLFPALESTAAFPSEPVPGTNPSILMGAQQAGPASDHPSLNAAMGPAVFNGKDSPKCQQLAKNNLLALPRPSALGILSNSGPPKKRHKGWSPESPSAPDGGCPQGGGNRAKYESAGMSCVPQVGLVGPASVTFPVVASGEPVSVPDNLLKICKAKPVIFKVFVNGATQMVALGPAEPASPRSL

SEQ ID NO: 268 - protein, 540 aa, Homo sapiens
MTTSLQDGQSAASRAAARDSPLAAQVCGAAQGRGDAHDLAPAPWLHARALLPLPDGTRGCAADRRKKKDLDVPEMPSIPNPFPELCCSPFTSVLSADLFPKANSRKKQVIKVYSEDETSRALDVPSDITARDVCQLLILKNHYIDDHSWTLFEHLPHIGVERTIEDHELVIEVLSNWGIEEENKLYFRKNYAKYEFFKNPMYFFPEHMVSFATETNGEISPTQILQMFLSSSTYPEIHGFLHAKEQGKKSWKKIYFFLRRSGLYFSTKGTSKEPRHLQFFSEFGNSDIYVSLAGKKKHGAPTNYGFCFKPNKAGGPRDLKMLCAEEEQSRTCWVTAIRLLKYGMQLYQNYMHPYQGRSGCSSQSISPMRSISENSLVAMDFSGQKSRVIENPTEALSVAVEEGLAWRKKGCLRLGTHGSPTASSQSSATNMAIHRSQPWFHHKISRDEAQRLIIQQGLVDGVFLVRDSQSNPKTFVLSMSHGQKIKHFQIIPVEDDGEMFHTLDDGHTRFTDLIQLVEFYQLNKGVLPCKLKHYCARIAL

SEQ ID NO: 269 - protein, 595 aa, Homo sapiens
MRVLLAALGLLFLGALRAFPQDRPFEDTCHGNPSHYYDKAVRRCCYRCPMGLFPTQQCPQRPTDCRKQCEPDYYLDEADRCTACVTCSRDDLVEKTPCAWNSSRVCECRPGMFCSTSAVNSCARCFFHSVCPAGMIVKFPGTAQKNTVCEPASPGVSPACASPENCKEPSSGTIPQAKPTPVSPATSSASTMPVRGGTRLAQEAASKLTRAPDSPSSVGRPSSDPGLSPTQPCPEGSGDCRKQCEPDYYLDEAGRCTACVSCSRDDLVEKTPCAWNSSRTCECRPGMICATSATNSCARCVPYPICAAETVTKPQDMAEKDTTFEAPPLGTQPDCNPTPENGEAPASTSPTQSLLVDSQASKTLPIPTSAPVALSSTGKPVLDAGPVLFWVILVLVVVVGSSAFLLCHRRACRKRIRQKLHLCYPVQTSQPKLELVDSRPRRSSTQLRSGASVTEPVAEERGLMSQPLMETCHSVGAAYLESLPLQDASPAGGPSSPRDLPEPRVSTEHTNNKIEKIYIMKADTVIVGTVKAELPEGRGLAGPAEPELEEELEADHTPHYPEQETEPPLGSCSDVMLSVEEEGKEDPLPTAASGK

SEQ ID NO: 270 - protein, 309 aa, Homo sapiens
MEAARTAVLRVKRKRSAEPAEALVLACKRLRSDAVESAAQKTSEGLERAAENNVFHLVATVCSQEEPVQPLLREVLRPSRDSQQRVRRNLRASAREVRQEGRYRVLSSRRSLGTTSSGQESEYTPGNPEAAGNSGFQLLDLVHEEGEPEAASAGSCKTSDPDVILCNSVELIRERLTVSEDGPGVRRQEEQKHDDYVYDIYYLETATPGWIENILSVQPYSQEWELVNDDQEPEDIYDDEDDENSENNWRNEYPEEESSDGDEDSRGSADYNSLSEEERGSSRQRMWSKYPLDVQKEFGYDSPHDLDSD

SEQ ID NO: 271 - protein, 2155 aa, Homo sapiens
MNYSSFLRIWVSFIFALVQHQAQPRELMYPFWQNDTKTPKVDDGSSSEIKLAIPVFFFGVPYRTVYVNNNGVVSFNVLVSQFTPESFPLTDGRAFVAPFWADVHNGIRGEIYYRETMEPAILKRATKDIRKYFKDMATFSATWVFIVTWEEVTFYGGSSTTPVNTFQAVLVSDGSYTFTLFNYYEINWTTGTASGGDPLTGLGGVMAQAGFNGGNLTNFFSLPGSRTPEIVNIQETTNVNVPGRWAFKVDGKEIDPANGCTSRGQFLRRGEVFWDDLNCTVKCRCLDFNNEIYCQEASCSPYEVCEPKGKFFYCSAVETSTCVVFGEPHYHTFDGFLFHFQGSCAYLLARQCLQTSSLPFFSVEAKNEHRRGSAVSWVKELSVEVNGYKILIPKGSYGRVKVNDLVTSLPVTLDLGTVKIYQSGISTAVETDFGLLVTFDGQHYASISVPGSYINSTCGLCGNYNKNPLDDFLRPDGRPAMSVLDLGESWRVYHADWKCDSGCVDNCTQCDAATEALYFGSDYCGFLNKTDGPLWECGTVVDPTAFVHSCVYDLCSVRDNGTLLCQAIQAYALVCQALGIPIGDWRTQTGCVSTVQCPSFSHYSVCTSSCPDTCSDLTASRNCATPCTEGCECNQGFVLSTSQCVPLHKCGCDFDGHYYTMGEFFWATANCTVQCLCEEGGDVYCFNKTCGSGEVCAVEDGYQGCFPKRETVCLLSQNQVLHTFDGASYAFPSEFSYTLLKTCPERPEYLEIDINKKKPDAGPAWLRGLRILVADQEVKIGGIGASEVKLNGQEVELPFFHPSGKLEIYRNKNSTTVESKGVVTVQYSDIGLLYIRLSTTYFNCTGGLCGFYNANASDEFCLPNGKCTDNLAVFLESWTTFEEICNGECGDLLKACNNDSELLKFYRSRSRCGIINDPSNSSFLECHGVVNVTAYYRTCLFRLCQSGGNESELCDSVARYASACKNADVEVGPWRTYDFCPLECPENSHFEECITCTETCETLTLGPICVDSCSEGCQCDEGYALLGSQCVTRSECGCNFEGHQLATNETFWVDLDCQIFCYCSGTDNRVHCETIPCKDDEYCMEEGGLYYCQARTDASCIVSGYGHYLTFDGFPFDFQTSCPLILCTTGSRPSSDSFPKFVVTAKNEDRDPSLALWVKQVDVTVFGYSIVIHRAYKHTVLVNSERLYLPLKLGQGKINIFSFGFHVVVETDFGLKVVYDWKTFLSITVPRSMQNSTYGLCGRYNGNPDDDLEMPMGLLASSVNEFGQSWVKRDTFCQVGCGDRCPSCAKVEGFSKVQQLCSLIPNQNAAFSKCHSKVNPTFFYKNCLFDSCIDGGAVQTACSWLQNYASTCQTQGITVTGWRNYTSCTVTCPPNSHYESCVSVCQPRCAAIRLKSDCSHYCVEGCHCDAGYVLNGKSCILPHSCGCYSDGKYYEPKQLFWNSDCTRRCRCFRRNVIQCDPRQCKSDEECALRNGVRGCFSTKTSYCLAAGGGVFRTFDGAFLRFPANCAFVLSTICQKLPDISFQLIINFDKWSAPNLTIISPVYFYINEEQILINDRNTVKVNGTQVNVPFITGLATKIYSSEGFLVIDTSPDIQIYYNGFNVIKISISERLQNKVCGLCGNFNGDLTDDYVTLRGKPVVSSVVLAQSWKTNGMQKRPLAPSCNELQFSQYAAMCDNVHIQKMQGDGYCLKLTDMKGFFQPCYGLLDPLPFYESCYLDGCYSHKKFQLCGSLAAYGEACRSFGILSTEWIEKENCSGVVEDPCVGADCPNRTCELGNGRELCGCIEPPPYGNNSHDIIDAEVTCKAAQMEVSISKCKLFQLGFEREGVRINDRQCTGIEGEDFISFQINNTKGNCGNIVQSNGTHIMYKNTLWIESANNTGNIITRDRTINVEFSCAYELDIKISLDSVVKPMLSVINLTVPTQEGSFITKMALYKNASYKHPYRQGEVVLTTRDVLYVGVFVVGADATHLILTLNKCYATPTRDSNDKLRYFIIEGGCQNLKDNTIGIEENAVSLTCRFHVTVFKFIGDYDEVHLHCAVSLCDSEKYSCKITCPHNSRIATDYTKEPKEQIISVGPIRRKRLDWCEDNGGCEQICTSRVDGPLCSCVTGTLQEDGKSCRASNSSMELQVWTLLLIMIQISLWHFVYKSGTTS

SEQ ID NO: 272 - protein, 1054 aa, Homo sapiens
MGEIEGTYRVLQTAGMRLGAQTPVGVSTLEPGQTLLPRMQEKHLHLRVKLLDNTMEIFDIEPKCDGQVLLTQVWKRLNLVECDYFGMEFQNTQSYWIWLEPMKPIIRQIRRPKNVVLRLAVKFFPPDPGQLQEEYTRYLFALQLKRDLLEERLTCADTTAALLTSHLLQSEIGDYDETLDREHLKVNEYLPGQQHCLEKILEFHQKHVGQTPAESDFQVLEIARKLEMYGIRFHMASDREGTKIQLAVSHMGVLVFQGTTKINTFNWSKVRKLSFKRKRFLIKLHPEVHGPYQDTLEFLLGSRDECKNFWKICVEYHTFFRLLDQPKPKAKAVFFSRGSSFRYSGRTQKQLVDYFKDSGMKRIPYERRHSKTHTSVRALTADLPKQSISFPEGLRTPASPSSANAFYSLSPSTLVPSGLPEFKDSSSSLTDPQVSYVKSPAAERRSGAVAGGPDTPSAQPLGPPALQPGPGLSTKSPQPSPSSRKSPLSLSPAFQVPLGPAEQGSSPLLSPVLSDAGGAGMDCEEPRHKRVPADEAYFIVKEILATERTYLKDLEVITVWFRSAVVKEDAMPATLMTLLFSNIDPIYEFHRGFLREVEQRLALWEGPSKAHTKGSHQRIGDILLRNMRQLKEFTSYFQRHDEVLTELEKATKRCKKLEAVYKEFELQKVCYLPLNTFLLKPIQRLLHYRLLLRRLCGHYSPGHHDYADCHDALKAITEVTTTLQHILIRLENLQKLTELQRDLVGIENLIAPGREFIREGCLHKLTKKGLQQRMFFLFSDMLLYTSKGVAGTSHFRIRGLLPLQGMLVEESDNEWSVPHCFTIYAAQKTIVVAASTRLEKEKWMLDLNSAIQAAKSGGDTAPALPGRTVCTRPPRSPNEVSLEQESEDDARGVRSSLEGHGQHRANTTMHVCWYRNTSVSRADHSAAVENQLSGYLLRKFKNSHGWQKLWVVFTNFCLFFYKTHQDDYPLASLPLLGYSVSIPREADGIHKDYVFKLQFKSHVYFFRAESKYTFERWMEVIQGASSSAGRAPSIVQDGPQPSSGLEGMVRGKEE

SEQ ID NO: 273 - protein, 2590 aa, Homo sapiens
MNLLRRSGKRRRSESGSDSFSGSGGDSSASPQFLSGSVLSPPPGLGRCLKAAAAGECKPTVPDYERDKLLLANWGLPKAVLEKYHSFGVKKMFEWQAECLLLGQVLEGKNLVYSAPTSAGKTLVAELLILKRVLEMRKKALFILPFVSVAKEKKYYLQSLFQEVGIKVDGYMGSTSPSRHFSSLDIAVCTIERANGLINRLIEENKMDLLGMVVVDELHMLGDSHRGYLLELLLTKICYITRKSASCQADLASSLSNAVQIVGMSATLPNLELVASWLNAELYHTDFRPVPLLESVKVGNSIYDSSMKLVREFEPMLQVKGDEDHVVSLCYETICDNHSVLLFCPSKKWCEKLADIIAREFYNLHHQAEGLVKPSECPPVILEQKELLEVMDQLRRLPSGLDSVLQKTVPWGVAFHHAGLTFEERDIIEGAFRQGLIRVLAATSTLSSGVNLPARRVIIRTPIFGGRPLDILTYKQMVGRAGRKGVDTVGESILICKNSEKSKGIALLQGSLKPVRSCLQRREGEEVTGSMIRAILEIIVGGVASTSQDMHTYAACTFLAASMKEGKQGIQRNQESVQLGAIEACVMWLLENEFIQSTEASDGTEGKVYHPTHLGSATLSSSLSPADTLDIFADLQRAMKGFVLENDLHILYLVTPMFEDWTTIDWYRFFCLWEKLPTSMKRVAELVGVEEGFLARCVKGKVVARTERQHRQMAIHKRFFTSLVLLDLISEVPLREINQKYGCNRGQIQSLQQSAAVYAGMITVFSNRLGWHNMELLLSQFQKRLTFGIQRELCDLVRVSLLNAQRARVLYASGFHTVADLARANIVEVEVILKNAVPFKSARKAVDEEEEAVEERRNMRTIWVTGRKGLTEREAAALIVEEARMILQQDLVEMGVQWNPCALLHSSTCSLTHSESEVKEHTFISQTKSSYKKLTSKNKSNTIFSDSYIKHSPNIVQDLNKSREHTSSFNCNFQNGNQEHQTCSIFRARKRASLDINKEKPGASQNEGKTSDKKVVQTFSQKTKKAPLNFNSEKMSRSFRSWKRRKHLKRSRDSSPLKDSGACRIHLQGQTLSNPSLCEDPFTLDEKKTEFRNSGPFAKNVSLSGKEKDNKTSFPLQIKQNCSWNITLTNDNFVEHIVTGSQSKNVTCQATSVVSEKGRGVAVEAEKINEVLIQNGSKNQNVYMKHHDIHPINQYLRKQSHEQTSTITKQKNIIERQMPCEAVSSYINRDSNVTINCERIKLNTEENKPSHFQALGDDISRTVIPSEVLPSAGAFSKSEGQHENFLNISRLQEKTGTYTTNKTKNNHVSDLGLVLCDFEDSFYLDTQSEKIIQQMATENAKLGAKDTNLAAGIMQKSLVQQNSMNSFQKECHIPFPAEQHPLGATKIDHLDLKTVGTMKQSSDSHGVDILTPESPIFHSPILLEENGLFLKKNEVSVTDSQLNSFLQGYQTQETVKPVILLIPQKRTPTGVEGECLPVPETSLNMSDSLLFDSFSDDYLVKEQLPDMQMKEPLPSEVTSNHFSDSLCLQEDLIKKSNVNENQDTHQQLTCSNDESIIFSEMDSVQMVEALDNVDIFPVQEKNHTVVSPRALELSDPVLDEHHQGDQDGGDQDERAEKSKLTGTRQNHSFIWSGASFDLSPGLQRILDKVSSPLENEKLKSMTINFSSLNRKNTELNEEQEVISNLETKQVQGISFSSNNEVKSKIEMLENNANHDETSSLLPRKESNIVDDNGLIPPTPIPTSASKLTFPGILETPVNPWKTNNVLQPGESYLFGSPSDIKNHDLSPGSRNGFKDNSPISDTSFSLQLSQDGLQLTPASSSSESLSIIDVASDQNLFQTFIKEWRCKKRFSISLACEKIRSLTSSKTATIGSRFKQASSPQEIPIRDDGFPIKGCDDTLVVGLAVCWGGRDAYYFSLQKEQKHSEISASLVPPSLDPSLTLKDRMWYLQSCLRKESDKECSVVIYDFIQSYKILLLSCGISLEQSYEDPKVACWLLDPDSQEPTLHSIVTSFLPHELPLLEGMETSQGIQSLGLNAGSEHSGRYRASVESILIFNSMNQLNSLLQKENLQDVFRKVEMPSQYCLALLELNGIGFSTAECESQKHIMQAKLDAIETQAYQLAGHSFSFTSSDDIAEVLFLELKLPPNREMKNQGSKKTLGSTRRGIDNGRKLRLGRQFSTSKDVLNKLKALHPLPGLILEWRRITNAITKVVFPLQREKCLNPFLGMERIYPVSQSHTATGRITFTEPNIQNVPRDFEIKMPTLVGESPPSQAVGKGLLPMGRGKYKKGFSVNPRCQAQMEERAADRGMPFSISMRHAFVPFPGGSILAADYSQLELRILAHLSHDRRLIQVLNTGADVFRSIAAEWKMIEPESVGDDLRQQAKQICYGIIYGMGAKSLGEQMGIKENDAACYIDSFKSRYTGINQFMTETVKNCKRDGFVQTILGRRRYLPGIKDNNPYRKAHAERQAINTIVQGSAADIVKIATVNIQKQLETFHSTFKSHGHREGMLQSDQTGLSRKRKLQGMFCPIRGGFFILQLHDELLYEVAEEDVVQVAQIVKNEMESAVKLSVKLKVKVKIGASWGELKDFDV

SEQ ID NO: 274 - protein, 1444 aa, Homo sapiens
MKNKGAKQKLKRKGAASAFGCDLTEYLESSGQDVPYVLKSCAEFIETHGIVDGIYRLSGVTSNIQRLRQEFGSDQCPDLTREVYLQDIHCVGSLCKLYFRELPNPLLTYELYEKFTEAVSHCPEEGQLARIQNVIQELPPSHYRTLEYLIRHLAHIASFSSKTNMHARNLALVWAPNLLRSKEIEATGCNGDAAFLAVRVQQVVIEFILNHVDQIFNNGAPGSLENDENRPIMKSLTLPALSLPMKLVSLEEAQARSLATNHPARKERRENSLPEIVPPMGTLFHTVLELPDNKRKLSSKSKKWKSIFNLGRSGSDSKSKLSRNGSVFVRGQRLSVEKATIRPAKSMDSLCSVPVEGKETKGNFNRTVTTGGFFIPATKMHSTGTGSSCDLTKQEGEWGQEGMPPGAEGGFDVSSDRSHLQGAQARPPPEQLKVFRPVEDPESEQTAPKMLGMFYTSNDSPSKSVFTSSLFQMEPSPRNQRKALNISEPFAVSVPLRVSAVISTNSTPCRTPPKELQSLSSLEEFSFHGSESGGWPEEEKPLGAETSAASVPKKAGLEDAKAVPEAPGTVECSKGLSQEPGAHLEEKKTPESSLSSQHLNELEKRPNPEKVVEEGREAGEMESSTLQESPRARAEAVLLHEMDEDDLANALIWPEIQQELKIIESEEELSSLPPPALKTSPIQPILESSLGPFIPSEPPGSLPCGSFPAPVSTPLEVWTRDPANQSTQGASTAASREKPEPEQGLHPDLASLAPLEIVPFEKASPQATVEVGGPGNLSPPLPPAPPPPTPLEESTPVLLSKGGPEREDSSRKLRTDLYIDQLKSQDSPEISSLCQGEEATPRHSDKQNSKNAASEGKGCGFPSPTREVEIVSQEEEDVTHSVQEPSDCDEDDTVTDIAQHGLEMVEPWEEPQWVTSPLHSPTLKDAHKAQVQGLQGHQLEKRLSHRPSLRQSHSLDSKPTVKSQWTLEVPSSSSCANLETERNSDPLQPQAPRREITGWDEKALRSFREFSGLKGAEAPPNQKGPSGVQPNPAETSPISLAEGKELGTHLGHSSPQIRQGGVPGPESSKESSPSVQDSTSPGEHPAKLQLKSTECGPPKGKNRPSSLNLDPAIPIADLFWFENVASFSSPGMQVSEPGDPKVTWMTSSYCKADPWRVYSQDPQDLDIVAHALTGRRNSAPVSVSAVRTSFMVKMCQARAVPVIPPKIQYTQIPQPLPSQSSGENGVQPLERSQEGPSSTSGTTQKPAKDDSPSSLESSKEEKPKQDPGAIKSSPVDATAPCMCEGPTLSPEPGSSNLLSTQDAVVQCRKRMSETEPSGDNLLSSKLERPSGGSKPFHRSRPGRPQSLILFSPPFPIMDHLPPSSTVTDSKVLLSPIRSPTQTVSPGLLCGELAENTWVTPEGVTLRNKMTIPKNGQRLETSTSCFYQPQRRSVILDGRSGRQIE

SEQ ID NO: 275 - protein, 1023 aa, Homo sapiens
MGAGALAICQSKAAVRLKEDMKKIVAVPLNEQKDFTYQKLFGVSLQELERQGLTENGIPAVVWNIVEYLTQHGLTQEGLFRVNGNVKVVEQLRLKFESGVPVELGKDGDVCSAASLLKLFLRELPDSLITSALQPRFIQLFQDGRNDVQESSLRDLIKELPDTHYCLLKYLCQFLTKVAKHHVQNRMNVHNLATVFGPNCFHVPPGLEGMKEQDLCNKIMAKILENYNTLFEVEYTENDHLRCENLARLIIVKEVYYKNSLPILLTRGLERDMPKPPPKTKIPKSRSEGSIQAHRVLQPELSDGIPQLSLRLSYRKACLEDMNSAEGAISAKLVPSSQEDERPLSPFYLSAHVPQVSNVSATGELLERTIRSAVEQHLFDVNNSGGQSSEDSESGTLSASSATSARQRRRQSKEQDEVRHGRDKGLINKENTPSGFNHLDDCILNTQEVEKVHKNTFGCAGERSKPKRQKSSTKLSELHDNQDGLVNMESLNSTRSHERTGPDDFEWMSDERKGNEKDGGHTQHFESPTMKIQEHPSLSDTKQQRNQDAGDQEESFVSEVPQSDLTALCDEKNWEEPIPAFSSWQRENSDSDEAHLSPQAGRLIRQLLDEDSDPMLSPRFYAYGQSRQYLDDTEVPPSPPNSHSFMRRRSSSLGSYDDEQEDLTPAQLTRRIQSLKKKIRKFEDRFEEEKKYRPSHSDKAANPEVLKWTNDLAKFRRQLKESKLKISEEDLTPRMRQRSNTLPKSFGSQLEKEDEKKQELVDKAIKPSVEATLESIQRKLQEKRAESSRPEDIKDMTKDQIANEKVALQKALLYYESIHGRPVTKNERQVMKPLYDRYRLVKQILSRANTIPIIGSPSSKRRSPLLQPIIEGETASFFKEIKEEEEGSEDDSNVKPDFMVTLKTDFSARCFLDQFEDDADGFISPMDDKIPSKCSQDTGLSNLHAASIPELLEHLQEMREEKKRIRKKLRDFEDNFFRQNGRNVQKEDRTPMAEEYSEYKHIKAKLRLLEVLISKRDTDSKSM

SEQ ID NO: 276 - protein, 275 aa, Homo sapiens
MGLSNILFVMAFLLSGAAPLKIQAYFNETADLPCQFANSQNQSLSELVVFWQDQENLVLNEVYLGKEKFDSVHSKYMGRTSFDSDSWTLRLHNLQIKDKGLYQCIIHHKKPTGMIRIHQMNSELSVLANFSQPEIVPISNITENVYINLTCSSIHGYPEPKKMSVLLRTKNSTIEYDGVMQKSQDNVTELYDVSISLSVSFPDVTSNMTIFCILETDKTRLLSSPFSIGTNTMEREESEQTKKREKIHIPERSDEAQRVFKSSKTSSCDKSDTCF

SEQ ID NO: 277 - protein, 1079 aa, Homo sapiens
MEDEAVLDRGASFLKHVCDEEEVEGHHTIYIGVHVPKSYRRRRRHKRKTGHKEKKEKERISENYSDKSDIENADESSSSILKPLISPAAERIRFILGEEDDSPAPPQLFTELDELLAVDGQEMEWKETARWIKFEEKVEQGGERWSKPHVATLSLHSLFELRTCMEKGSIMLDREASSLPQLVEMIVDHQIETGLLKPELKDKVTYTLLRKHRHQTKKSNLRSLADIGKTVSSASRMFTNPDNGSPAMTHRNLTSSSLNDISDKPEKDQLKNKFMKKLPRDAEASNVLVGEVDFLDTPFIAFVRLQQAVMLGALTEVPVPTRFLFILLGPKGKAKSYHEIGRAIATLMSDEVFHDIAYKAKDRHDLIAGIDEFLDEVIVLPPGEWDPAIRIEPPKSLPSSDKRKNMYSGGENVQMNGDTPHDGGHGGGGHGDCEELQRTGRFCGGLIKDIKRKAPFFASDFYDALNIQALSAILFIYLATVTNAITFGGLLGDATDNMQGVLESFLGTAVSGAIFCLFAGQPLTILSSTGPVLVFERLLFNFSKDNNFDYLEFRLWIGLWSAFLCLILVATDASFLVQYFTRFTEEGFSSLISFIFIYDAFKKMIKLADYYPINSNFKVGYNTLFSCTCVPPDPANISISNDTTLAPEYLPTMSSTDMYHNTTFDWAFLSKKECSKYGGNLVGNNCNFVPDITLMSFILFLGTYTSSMALKKFKTSPYFPTTARKLISDFAIILSILIFCVIDALVGVDTPKLIVPSEFKPTSPNRGWFVPPFGENPWWVCLAAAIPALLVTILIFMDQQITAVIVNRKEHKLKKGAGYHLDLFWVAILMVICSLMALPWYVAATVISIAHIDSLKMETETSAPGEQPKFLGVREQRVTGTLVFILTGLSVFMAPILKFIPMPVLYGVFLYMGVASLNGVQFMDRLKLLLMPLKHQPDFIYLRHVPLRRVHLFTFLQVLCLALLWILKSTVAAIIFPVMILALVAVRKGMDYLFSQHDLSFLDDVIPEKDKKKKEDEKKKKKKKGSLDSDNDDSDCPYSEKVPSIKIPMDIMEQQPFLSDSKPSDRERSPTFLERHTSC

SEQ ID NO: 278 - protein, 715 aa, Homo sapiens
MDLILNRMDYLQVGVTSQKTMKLIPASRHRATQKVVIGDHDGVVMCFGMKKGEAAAVFKTLPGPKIARLELGGVINTPQEKIFIAAASEIRGFTKRGKQFLSFETNLTESIKAMHISGSDLFLSASYIYNHYCDCKDQHYYLSGDKINDVICLPVERLSRITPVLACQDRVLRVLQGSDVMYAVEVPGPPTVLALHNGNGGDSGEDLLFGTSDGKLALIQITTSKPVRKWEIQNEKKRGGILCIDSFDIVGDGVKDLLVGRDDGMVEVYSFDNANEPVLRFDQMLSESVTSIQGGCVGKDSYDEIVVSTYSGWVTGLTTEPIHKESGPGEELKINQEMQNKISSLRNELEHLQYKVLQERENYQQSSQSSKAKSAVPSFGINDKFTLNKDDASYSLILEVQTAIDNVLIQSDVPIDLLDVDKNSAVVSFSSCDSESNDNFLLATYRCQADTTRLELKIRSIEGQYGTLQAYVTPRIQPKTCQVRQYHIKPLSLHQRTHFIDHDRPMNTLTLTGQFSFAEVHSWVVFCLPEVPEKPPAGECVTFYFQNTFLDTQLESTYRKGEGVFKSDNISTISILKDVLSKEATKRKINLNISYEINEVSVKHTLKLIHPKLEYQLLLAKKVQLIDALKELQIHEGNTNFLIPEYHCILEEADHLQEEYKKQPAHLERLYGMITDLFIDKFKFKGTNVKTKVPLLLEILDSYDQNALISFFDAA

SEQ ID NO: 279 - protein, 199 aa, Homo sapiens
MNCVCRLVLVVLSLWPDTAVAPGPPPGPPRVSPDPRAELDSTVLLTRSLLADTRQLAAQLRDKFPADGDHNLDSLPTLAMSAGALGALQLPGVLTRLRADLLSYLRHVQWLRRAGGSSLKTLEPELGTLQARLDRLLRRLQLLMSRLALPQPPPDPPAPPLAPPSSAWGGIRAAHAILGGLHLTLDWAVRGLLLLKTRL

SEQ ID NO: 280 - protein, 600 aa, Homo sapiens
MGKKLDLSKLTDEEAQHVLEVVQRDFDLRRKEEERLEALKGKIKKESSKRELLSDTAHLNETHCARCLQPYQLLVNSKRQCLECGLFTCKSCGRVHPEEQGWICDPCHLARVVKIGSLEWYYEHVKARFKRFGSAKVIRSLHGRLQGGAGPELISEERSGDSDQTDEDGEPGSEAQAQAQPFGSKKKRLLSVHDFDFEGDSDDSTQPQGHSLHLSSVPEARDSPQSLTDESCSEKAAPHKAEGLEEADTGASGCHSHPEEQPTSISPSRHGALAELCPPGGSHRMALGTAAALGSNVIRNEQLPLQYLADVDTSDEESIRAHVMASHHSKRRGRASSESQIFELNKHISAVECLLTYLENTVVPPLAKGLGAGVRTEADVEEEALRRKLEELTSNVSDQETSSEEEEAKDEKAEPNRDKSVGPLPQADPEVGTAAHQTNRQEKSPQDPGDPVQYNRTTDEELSELEDRVAVTASEVQQAESEVSDIESRIAALRAAGLTVKPSGKPRRKSNLPIFLPRVAGKLGKRPEDPNADPSSEAKAMAVPYLLRRKFSNSLKSQGKDDDSFDRKSVYRGSLTQRNPNARKGMASHTFAKPVVAHQS

SEQ ID NO: 281 - protein, 1384 aa, Homo sapiens
MMHLRLFCILLAAVSGAEGWGYYGCDEELVGPLYARSLGASSYYSLLTAPRFARLHGISGWSPRIGDPNPWLQIDLMKKHRIRAVATQGSFNSWDWVTRYMLLYGDRVDSWTPFYQRGHNSTFFGNVNESAVVRHDLHFHFTARYIRIVPLAWNPRGKIGLRLGLYGCPYKADILYFDGDDAISYRFPRGVSRSLWDVFAFSFKTEEKDGLLLHAEGAQGDYVTLELEGAHLLLHMSLGSSPIQPRPGHTTVSAGGVLNDQHWHYVRVDRFGRDVNFTLDGYVQRFILNGDFERLNLDTEMFIGGLVGAARKNLAYRHNFRGCIENVIFNRVNIADLAVRRHSRITFEGKVAFRCLDPVPHPINFGGPHNFVQVPGFPRRGRLAVSFRFRTWDLTGLLLFSRLGDGLGHVELTLSEGQVNVSIAQSGRKKLQFAAGYRLNDGFWHEVNFVAQENHAVISIDDVEGAEVRVSYPLLIRTGTSYFFGGCPKPASRWDCHSNQTAFHGCMELLKVDGQLVNLTLVEGRRLGFYAEVLFDTCGITDRCSPNMCEHDGRCYQSWDDFICYCELTGYKGETCHTPLYKESCEAYRLSGKTSGNFTIDPDGSGPLKPFVVYCDIRENRAWTVVRHDRLWTTRVTGSSMERPFLGAIQYWNASWEEVSALANASQHCEQWIEFSCYNSRLLNTAGGYPYSFWIGRNEEQHFYWGGSQPGIQRCACGLDRSCVDPALYCNCDADQPQWRTDKGLLTFVDHLPVTQVVIGDTNRSTSEAQFFLRPLRCYGDRNSWNTISFHTGAALRFPPIRANHSLDVSFYFRTSAPSGVFLENMGGPYCQWRRPYVRVELNTSRDVVFAFDVGNGDENLTVHSDDFEFNDDEWHLVRAEINVKQARLRVDHRPWVLRPMPLQTYIWMEYDQPLYVGSAELKRRPFVGCLRAMRLNGVTLNLEGRANASEGTSPNCTGHCAHPRLPCFHGGRCVERYSYYTCDCDLTAFDGPYCNHDIGGFFEPGTWMRYNLQSALRSAAREFSHMLSRPVPGYEPGYIPGYDTPGYVPGYHGPGYRLPDYPRPGRPVPGYRGPVYNVTGEEVSFSFSTSSAPAVLLYVSSFVRDYMAVLIKDDGTLQLRYQLGTSPYVYQLTTRPVTDGQPHSINITRVYRNLFIQVDYFPLTEQKFSLLVDSQLDSPKALYLGRVMETGVIDPEIQRYNTPGFSGCLSGVRFNNVAPLKTHFRTPRPMTAELAEALRVQGELSESNCGAMPRLVSEVPPELDPWYLPPDFPYYHDEGWVAILLGFLVAFLLLGLVGMLVLFYLQNHRYKGSYHTNEPKAAHEYHPGSKPPLPTSGPAQVPTPTAAPNQAPASAPAPAPTPAPAPGPRDQNLPQILEESRSE

SEQ ID NO: 282 - protein, 1086 aa, Homo sapiens
MANLLKTVVTGCSCPLLSNLGSCKGLRVKKDFLRTFYTHQELWCKAPVKPGIPYKQLTVGVPKEIFQNEKRVALSPAGVQNLVKQGFNVVVESGAGEASKFSDDHYRVAGAQIQGAKEVLASDLVVKVRAPMVNPTLGVHEADLLKTSGTLISFIYPAQNPELLNKLSQRKTTVLAMDQVPRVTIAQGYDALSSMANIAGYKAVVLAANHFGRFFTGQITAAGKVPPAKILIVGGGVAGLASAGAAKSMGAIVRGFDTRAAALEQFKSLGAEPLEVDLKESGEGQGGYAKEMSKEFIEAEMKLFAQQCKEVDILISTALIPGKKAPVLFNKEMIESMKEGSVVVDLAAEAGGNFETTKPGELYIHKGITHIGYTDLPSRMATQASTLYSNNITKLLKAISPDKDNFYFDVKDDFDFGTMGHVIRGTVVMKDGKVIFPAPTPKNIPQGAPVKQKTVAELEAEKAATITPFRKTMSTASAYTAGLTGILGLGIAAPNLAFSQMVTTFGLAGIVGYHTVWGVTPALHSPLMSVTNAISGLTAVGGLALMGGHLYPSTTSQGLAALAAFISSVNIAGGFLVTQRMLDMFKRPTDPPEYNYLYLLPAGTFVGGYLAALYSGYNIEQIMYLGSGLCCVGALAGLSTQGTARLGNALGMIGVAGGLAATLGVLKPGPELLAQMSGAMALGGTIGLTIAKRIQISDLPQLVAAFHSLVGLAAVLTCIAEYIIEYPHFATDAAANLTKIVAYLGTYIGGVTFSGSLIAYGKLQGLLKSAPLLLPGRHLLNAGLLAASVGGIIPFMVDPSFTTGITCLGSVSALSAVMGVTLTAAIGGADMPVVITVLNSYSGWALCAEGFLLNNNLLTIVGALIGSSGAILSYIMCVAMNRSLANVILGGYGTTSTAGGKPMEISGTHTEINLDNAIDMIREANSIIITPGYGLCAAKAQYPIADLVKMLTEQGKKVRFGIHPVAGRMPGQLNVLLAEAGVPYDIVLEMDEINHDFPDTDLVLVIGANDTVNSAAQEDPNSIIAGMPVLEVWKSKQVIVMKRSLGVGYAAVDNPIFYKPNTAMLLGDAKKTCDALQAKVRESYQK

SEQ ID NO: 283 - protein, 638 aa, Homo sapiens
MILFKQATYFISLFATVSCGCLTQLYENAFFRGGDVASMYTPNAQYCQMRCTFHPRCLLFSFLPASSINDMEKRFGCFLKDSVTGTLPKVHRTGAVSGHSLKQCGHQISACHRDIYKGVDMRGVNFNVSKVSSVEECQKRCTSNIRCQFFSYATQTFHKAEYRNNCLLKYSPGGTPTAIKVLSNVESGFSLKPCALSEIGCHMNIFQHLAFSDVDVARVLTPDAFVCRTICTYHPNCLFFTFYTNVWKIESQRNVCLLKTSESGTPSSSTPQENTISGYSLLTCKRTLPEPCHSKIYPGVDFGGEELNVTFVKGVNVCQETCTKMIRCQFFTYSLLPEDCKEEKCKCFLRLSMDGSPTRIAYGTQGSSGYSLRLCNTGDNSVCTTKTSTRIVGGTNSSWGEWPWQVSLQVKLTAQRHLCGGSLIGHQWVLTAAHCFDGLPLQDVWRIYSGILNLSDITKDTPFSQIKEIIIHQNYKVSEGNHDIALIKLQAPLNYTEFQKPICLPSKGDTSTIYTNCWVTGWGFSKEKGEIQNILQKVNIPLVTNEECQKRYQDYKITQRMVCAGYKEGGKDACKGDSGGPLVCKHNGMWRLVGITSWGEGCARREQPGVYTKVAEYMDWILEKTQSSDGKAQMQSPA

SEQ ID NO: 284 - protein, 625 aa, Homo sapiens
MPGTKRFQHVIETPEPGKWELSGYEAAVPITEKSNPLTQDLDKADAENIVRLLGQCDAEIFQEEGQALSTYQRLYSESILTTMVQVAGKVQEVLKEPDGGLVVLSGGGTSGRMAFLMSVSFNQLMKGLGQKPLYTYLIAGGDRSVVASREGTEDSALHGIEELKKVAAGKKRVIVIGISVGLSAPFVAGQMDCCMNNTAVFLPVLVGFNPVSMARNDPIEDWSSTFRQVAERMQKMQEKQKAFVLNPAIGPEGLSGSSRMKGGSATKILLETLLLAAHKTVDQGIAASQRCLLEILRTFERAHQVTYSQSPKIATLMKSVSTSLEKKGHVYLVGWQTLGIIAIMDGVECIHTFGADFRDVRGFLIGDHSDMFNQKAELTNQGPQFTFSQEDFLTSILPSLTEIDTVVFIFTLDDNLTEVQTIVEQVKEKTNHIQALAHSTVGQTLLIPLKKLFPSIISITWPLLFFEYEGNFIQKFQRELSTKWVLNTVSTGAHVLLGKILQNHMLDLRISNSKLFWRALAMLQRFSGQSKARCIESLLRAIHFPQPLSDDIRAAPISCHVQVAHEKEQVIPIALLSLLFRCSITEAQAHLAAAPSVCEAVRSALAGPGQKRTADPLEILEPDVQ

SEQ ID NO: 285 - protein, 388 aa, Homo sapiens
MRCLYGRVGGARRKMAASAAAAELQASGGPRHPVCLLVLGMAGSGKTTFVQRLTGHLHAQGTPPYVINLDPAVHEVPFPANIDIRDTVKYKEVMKQYGLGPNGGIVTSLNLFATRFDQVMKFIEKAQNMSKYVLIDTPGQIEVFTWSASGTIITEALASSFPTVVIYVMDTSRSTNPVTFMSNMLYACSILYKTKLPFIVVMNKTDIIDHSFAVEWMQDFEAFQDALNQETTYVSNLTRSMSLVLDEFYSSLRVVGVSAVLGTGLDELFVQVTSAAEEYEREYRPEYERLKKSLANAESQQQREQLERLRKDMGSVALDAGTAKDSLSPVLHPSDLILTRGTLDEEDEEADSDTDDIDHRVTEESHEEPAFQNFMQESMAQYWKRNNK

SEQ ID NO: 286 - protein, 539 aa, Homo sapiens
MGRAGGGGPGRGPPPLLLFLGAALVLASGAVPAREAGSAVEAEELVKGSPAWEPPANDTREEAGPPAAGEDEASWTAPGGELAGPEEVLQESAAVTGTAWLEADSPGLGGVTAEAGSGDAQALPATLQAPHEVLGQSIMPPAIPEATEASGPPSPTPGDKLSPASELPKESPLEVWLNLGGSTPDPQGPELTYPFQGTLEPQPASDIIDIDYFEGLDGEGRGADLGSFPGSPGTSENHPDTEGETPSWSLLDLYDDFTPFDESDFYPTTSFYDDLDEEEEEEEDDKDAVGGGDLEDENELLVPTGKPGLGPGTGQPTSRWHAVPPQHTLGSVPGSSIALRPRPGEPGRDLASSENGTECRSGFVRHNGSCRSVCDLFPSYCHNGGQCYLVENIGAFCRCNTQDYIWHKGMRCESIITDFQVMCVAVGSAALVLLLLFMMTVFFAKKLYLLKTENTKLRRTNKFRTPSELHNDNFSLSTIAEGSHPNDDPSAPHKIQEVLKSCLKEEESFNIQNSMSPKLEGGKGDQADLDVNCLQNNLT

SEQ ID NO: 287 - protein, 546 aa, Homo sapiens
MELENIVANSLLLKARQEKDYSSLCDKQPIGRRLFRQFCDTKPTLKRHIEFLDAVAEYEVADDEDRSDCGLSILDRFFNDKLAAPLPEIPPDVVTECRLGLKEENPSKKAFEECTRVAHNYLRGEPFEEYQESSYFSQFLQWKWLERQPVTKNTFRHYRVLGKGGFGEVCACQVRATGKMYACKKLQKKRIKKRKGEAMALNEKRILEKVQSRFVVSLAYAYETKDALCLVLTIMNGGDLKFHIYNLGNPGFDEQRAVFYAAELCCGLEDLQRERIVYRDLKPENILLDDRGHIRISDLGLATEIPEGQRVRGRVGTVGYMAPEVVNNEKYTFSPDWWGLGCLIYEMIQGHSPFKKYKEKVKWEEVDQRIKNDTEEYSEKFSEDAKSICRMLLTKNPSKRLGCRGEGAAGVKQHPVFKDINFRRLEANMLEPPFCPDPHAVYCKDVLDIEQFSVVKGIYLDTADEDFYARFATGCVSIPWQNEMIESGCFKDINKSESEEALPLDLDKNIHTPVSRPNRGFFYRLFRRGGCLTMVPSEKEVEPKQC

SEQ ID NO: 288 - protein, 504 aa, Homo sapiens
MSQPRTPEQALDTPGDCPPGRRDEDAGEGIQCSQRMLSFSDALLSIIATVMILPVTHTEISPEQQFDRSVQRLLATRIAVYLMTFLIVTVAWAAHTRLFQVVGKTDDTLALLNLACMMTITFLPYTFSLMVTFPDVPLGIFLFCVCVIAIGVVQALIVGYAFHFPHLLSPQIQRSAHRALYRRHVLGIVLQGPALCFAAAIFSLFFVPLSYLLMVTVILLPYVSKVTGWCRDRLLGHREPSAHPVEVFSFDLHEPLSKERVEAFSDGVYAIVATLLILDICEDNVPDPKDVKERFSGSLVAALSATGPRFLAYFGSFATVGLLWFAHHSLFLHVRKATRAMGLLNTLSLAFVGGLPLAYQQTSAFARQPRDELERVRVSCTIIFLASIFQLAMWTTALLHQAETLQPSVWFGGREHVLMFAKLALYPCASLLAFASTCLLSRFSVGIFHLMQIAVPCAFLLLRLLVGLALATLRVLRGLARPEHPPPAPTGQDDPQSQLLPAPC

SEQ ID NO: 289 - protein, 540 aa, Homo sapiens
MARKQNRNSKELGLVPLTDDTSHAGPPGPGRALLECDHLRSGVPGGRRRKDWSCSLLVASLAGAFGSSFLYGYNLSVVNAPTPYIKAFYNESWERRHGRPIDPDTLTLLWSVTVSIFAIGGLVGTLIVKMIGKVLGRKHTLLANNGFAISAALLMACSLQAGAFEMLIVGRFIMGIDGGVALSVLPMYLSEISPKEIRGSLGQVTAIFICIGVFTGQLLGLPELLGKESTWPYLFGVIVVPAVVQLLSLPFLPDSPRYLLLEKHNEARAVKAFQTFLGKADVSQEVEEVLAESRVQRSIRLVSVLELLRAPYVRWQVVTVIVTMACYQLCGLNAIWFYTNSIFGKAGIPPAKIPYVTLSTGGIETLAAVFSGLVIEHLGRRPLLIGGFGLMGLFFGTLTITLTLQDHAPWVPYLSIVGILAIIASFCSGPGGIPFILTGEFFQQSQRPAAFIIAGTVNWLSNFAVGLLFPFIQKSLDTYCFLVFATICITGAIYLYFVLPETKNRTYAEISQAFSKRNKAYPPEEKIDSAVTDGKINGRP

SEQ ID NO: 290 - protein, 1187 aa, Homo sapiens
MPLRHWGMARGSKPVGDGAQPMAAMGGLKVLLHWAGPGGGEPWVTFSESSLTAEEVCIHIAHKVGITPPCFNLFALFDAQAQVWLPPNHILEIPRDASLMLYFRIRFYFRNWHGMNPREPAVYRCGPPGTEASSDQTAQGMQLLDPASFEYLFEQGKHEFVNDVASLWELSTEEEIHHFKNESLGMAFLHLCHLALRHGIPLEEVAKKTSFKDCIPRSFRRHIRQHSALTRLRLRNVFRRFLRDFQPGRLSQQMVMVKYLATLERLAPRFGTERVPVCHLRLLAQAEGEPCYIRDSGVAPTDPGPESAAGPPTHEVLVTGTGGIQWWPVEEEVNKEEGSSGSSGRNPQASLFGKKAKAHKAVGQPADRPREPLWAYFCDFRDITHVVLKEHCVSIHRQDNKCLELSLPSRAAALSFVSLVDGYFRLTADSSHYLCHEVAPPRLVMSIRDGIHGPLLEPFVQAKLRPEDGLYLIHWSTSHPYRLILTVAQRSQAPDGMQSLRLRKFPIEQQDGAFVLEGWGRSFPSVRELGAALQGCLLRAGDDCFSLRRCCLPQPGETSNLIIMRGARASPRTLNLSQLSFHRVDQKEITQLSHLGQGTRTNVYEGRLRVEGSGDPEEGKMDDEDPLVPGRDRGQELRVVLKVLDPSHHDIALAFYETASLMSQVSHTHLAFVHGVCVRGPENIMVTEYVEHGPLDVWLRRERGHVPMAWKMVVAQQLASALSYLENKNLVHGNVCGRNILLARLGLAEGTSPFIKLSDPGVGLGALSREERVERIPWLAPECLPGGANSLSTAMDKWGFGATLLEICFDGEAPLQSRSPSEKEHFYQRQHRLPEPSCPQLATLTSQCLTYEPTQRPSFRTILRDLTRLQPHNLADVLTVNPDSPASDPTVFHKRYLKKIRDLGEGHFGKVSLYCYDPTNDGTGEMVAVKALKADCGPQHRSGWKQEIDILRTLYHEHIIKYKGCCEDQGEKSLQLVMEYVPLGSLRDYLPRHSIGLAQLLLFAQQICEGMAYLHAQHYIHRDLAARNVLLDNDRLVKIGDFGLAKAVPEGHEYYRVREDGDSPVFWYAPECLKEYKFYYASDVWSFGVTLYELLTHCDSSQSPPTKFLELIGIAQGQMTVLRLTELLERGERLPRPDKCPCEVYHLMKNCWETEASFRPTFENLIPILKTVHEKYQGQAPSVFSVC

SEQ ID NO: 291 - protein, 362 aa, Homo sapiens
MATAETALPSISTLTALGPFPDTQDDFLKWWRSEEAQDMGPGPPDPTEPPLHVKSEDQPGEEEDDERGADATWDLDLLLTNFSGPEPGGAPQTCALAPSEASGAQYPPPPETLGAYAGGPGLVAGLLGSEDHSGWVRPALRARAPDAFVGPALAPAPAPEPKALALQPVYPGPGAGSSGGYFPRTGLSVPAASGAPYGLLSGYPAMYPAPQYQGHFQLFRGLQGPAPGPATSPSFLSCLGPGTVGTGLGGTAEDPGVIAETAPSKRGRRSWARKRQAAHTCAHPGCGKSYTKSSHLKAHLRTHTGEKPYACTWEGCGWRFARSDELTRHYRKHTGQRPFRCQLCPRAFSRSDHLALHMKRHL

SEQ ID NO: 292 - protein, 732 aa, Homo sapiens
MSETSRTAFGGRRAVPPNNSNAAEDDLPTVELQGVVPRGVNLQEFLNVTSVHLFKERWDTNKVDHHTDKYENNKLIVRRGQSFYVQIDFSRPYDPRRDLFRVEYVIGRYPQENKGTYIPVPIVSELQSGKWGAKIVMREDRSVRLSIQSSPKCIVGKFRMYVAVWTPYGVLRTSRNPETDTYILFNPWCEDDAVYLDNEKEREEYVLNDIGVIFYGEVNDIKTRSWSYGQFEDGILDTCLYVMDRAQMDLSGRGNPIKVSRVGSAMVNAKDDEGVLVGSWDNIYAYGVPPSAWTGSVDILLEYRSSENPVRYGQCWVFAGVFNTFLRCLGIPARIVTNYFSAHDNDANLQMDIFLEEDGNVNSKLTKDSVWNYHCWNEAWMTRPDLPVGFGGWQAVDSTPQENSDGMYRCGPASVQAIKHGHVCFQFDAPFVFAEVNSDLIYITAKKDGTHVVENVDATHIGKLIVTKQIGGDGMMDITDTYKFQEGQEEERLALETALMYGAKKPLNTEGVMKSRSNVDMDFEVENAVLGKDFKLSITFRNNSHNRYTITAYLSANITFYTGVPKAEFKKETFDVTLEPLSFKKEAVLIQAGEYMGQLLEQASLHFFVTARINETRDVLAKQKSTVLTIPEIIIKVRGTQVVGSDMTVTVEFTNPLKETLRNVWVHLDGPGVTRPMKKMFREIRPNSTVQWEEVCRPWVSGHRKLIASMSSDSLRHVYGELDVQIQRRPSM

SEQ ID NO: 293 - protein, 382 aa, Homo sapiens
MGLLLPLALCILVLCCGAMSPPQLALNPSALLSRGCNDSDVLAVAGFALRDINKDRKDGYVLRLNRVNDAQEYRRGGLGSLFYLTLDVLETDCHVLRKKAWQDCGMRIFFESVYGQCKAIFYMNNPSRVLYLAAYNCTLRPVSKKKIYMTCPDCPSSIPTDSSNHQVLEAATESLAKYNNENTSKQYSLFKVTRASSQWVVGPSYFVEYLIKESPCTKSQASSCSLQSSDSVPVGLCKGSLTRTHWEKFVSVTCDFFESQAPATGSENSAVNQKPTNLPKVEESQQKNTPPTDSPSKAGPRGSVQYLPDLDDKNSQEKGPQEAFPVHLDLTTNPQGETLDISFLFLEPMEEKLVVLPFPKEKARTAECPGPAQNASPLVLPP

SEQ ID NO: 294 - protein, 723 aa, Homo sapiens
MFEEKASSPSGKMGGEEKPIGAGEEKQKEGGKKKNKEGSGDGGRAELNPWPEYIYTRLEMYNILKAEHDSILAEKAEKDSKPIKVTLPDGKQVDAESWKTTPYQIACGISQGLADNTVIAKVNNVVWDLDRPLEEDCTLELLKFEDEEAQAVYWHSSAHIMGEAMERVYGGCLCYGPPIENGFYYDMYLEEGGVSSNDFSSLEALCKKIIKEKQAFERLEVKKETLLAMFKYNKFKCRILNEKVNTPTTTVYRCGPLIDLCRGPHVRHTGKIKALKIHKNSSTYWEGKADMETLQRIYGISFPDPKMLKEWEKFQEEAKNRDHRKIGRDQELYFFHELSPGSCFFLPKGAYIYNALIEFIRSEYRKRGFQEVVTPNIFNSRLWMTSGHWQHYSENMFSFEVEKELFALKPMNCPGHCLMFDHRPRSWRELPLRLADFGVLHRNELSGALTGLTRVRRFQQDDAHIFCAMEQIEDEIKGCLDFLRTVYSVFGFSFKLNLSTRPEKFLGDIEVWDQAEKQLENSLNEFGEKWELNSGDGAFYGPKIDIQIKDAIGRYHQCATIQLDFQLPIRFNLTYVSHDGDDKKRPVIVHRAILGSVERMIAILTENYGGKWPFWLSPRQVMVVPVGPTCDEYAQKVRQQFHDAKFMADIDLDPGCTLNKKIRNAQLAQYNFILVVGEKEKISGTVNIRTRDNKVHGERTISETIERLQQLKEFRSKQAEEEF

SEQ ID NO: 295 - protein, 824 aa, Homo sapiens
MNGEYRGRGFGRGRFQSWKRGRGGGNFSGKWREREHRPDLSKTTGKRTSEQTPQFLLSTKTPQSMQSTLDRFIPYKGWKLYFSEVYSDSSPLIEKIQAFEKFFTRHIDLYDKDEIERKGSILVDFKELTEGGEVTNLIPDIATELRDAPEKTLACMGLAIHQVLTKDLERHAAELQAQEGLSNDGETMVNVPHIHARVYNYEPLTQLKNVRANYYGKYIALRGTVVRVSNIKPLCTKMAFLCAACGEIQSFPLPDGKYSLPTKCPVPVCRGRSFTALRSSPLTVTMDWQSIKIQELMSDDQREAGRIPRTIECELVHDLVDSCVPGDTVTITGIVKVSNAEEANSISNSKGQKTKSSEDGCKHGMLMEFSLKDLYAIQEIQAEENLFKLIVNSLCPVIFGHELVKAGLALALFGGSQKYADDKNRIPIRGDPHILVVGDPGLGKSQMLQAACNVAPRGVYVCGNTTTTSGLTVTLSKDSSSGDFALEAGALVLGDQGICGIDEFDKMGNQHQALLEAMEQQSISLAKAGVVCSLPARTSIIAAANPVGGHYNKAKTVSENLKMGSALLSRFDLVFILLDTPNEHHDHLLSEHVIAIRAGKQRTISSATVARMNSQDSNTSVLEVVSEKPLSERLKVVPGETIDPIPHQLLRKYIGYARQYVYPRLSTEAARVLQDFYLELRKQSQRLNSSPITTRQLESLIRLTEARARLELREEATKEDAEDIVEIMKYSMLGTYSDEFGNLDFERSQHGSGMSNRSTAKRFISALNNVAERTYNNIFQFHQLRQIAKELNIQVADFENFIGSLNDQGYLLKKGPKVYQLQTM

SEQ ID NO: 296 - protein, 605 aa, Homo sapiens
MEADIITNLRCRLKEAEEERLKAAQYGLQLVESQNELQNQLDKCRNEMMTMTESYEQEKYTLQREVELKSRMLESLSCECEAIKQQQKMHLEKLEEQLSRSHGQEVNELKTKIEKLKVELDEARLSEKQLKHQVDHQKELLSCKSEELRVMSERVQESMSSEMLALQIELTEMESMKTTLKEEVNELQYRQEQLELLITNLMRQVDRLKEEKEEREKEAVSYYNALEKARVANQDLQVQLDQALQQALDPNSKGNSLFAEVEDRRAAMERQLISMKVKYQSLKKQNVFNREQMQRMKLQIATLLQMKGSQTEFEQQERLLAMLEQKNGEIKHLLGEIRNLEKFKNLYDSMESKPSVDSGTLEDNTYYTDLLQMKLDNLNKEIESTKGELSIQRMKALFESQRALDIERKLFANERCLQLSESENMKLRAKLDELKLKYEPEETVEVPVLKKRREVLPVDITTAKDACVNNSALGGEVYRLPPQKEETQSCPNSLEDNNLQLEKSVSIYTPVVSLSPHKNLPVDMQLKKEKKCVKLIGVPADAEALSERSGNTPNSPRLAAESKLQTEVKEGKETSSKLEKETCKKLHPILYVSSKSTPETQCPQQ

SEQ ID NO: 297 - protein, 923 aa, Homo sapiens
MERGLPLLCAVLALVLAPAGAFRNDKCGDTIKIESPGYLTSPGYPHSYHPSEKCEWLIQAPDPYQRIMINFNPHFDLEDRDCKYDYVEVFDGENENGHFRGKFCGKIAPPPVVSSGPFLFIKFVSDYETHGAGFSIRYEIFKRGPECSQNYTTPSGVIKSPGFPEKYPNSLECTYIVFVPKMSEIILEFESFDLEPDSNPPGGMFCRYDRLEIWDGFPDVGPHIGRYCGQKTPGRIRSSSGILSMVFYTDSAIAKEGFSANYSVLQSSVSEDFKCMEALGMESGEIHSDQITASSQYSTNWSAERSRLNYPENGWTPGEDSYREWIQVDLGLLRFVTAVGTQGAISKETKKKYYVKTYKIDVSSNGEDWITIKEGNKPVLFQGNTNPTDVVVAVFPKPLITRFVRIKPATWETGISMRFEVYGCKITDYPCSGMLGMVSGLISDSQITSSNQGDRNWMPENIRLVTSRSGWALPPAPHSYINEWLQIDLGEEKIVRGIIIQGGKHRENKVFMRKFKIGYSNNGSDWKMIMDDSKRKAKSFEGNNNYDTPELRTFPALSTRFIRIYPERATHGGLGLRMELLGCEVEAPTAGPTTPNGNLVDECDDDQANCHSGTGDDFQLTGGTTVLATEKPTVIDSTIQSEFPTYGFNCEFGWGSHKTFCHWEHDNHVQLKWSVLTSKTGPIQDHTGDGNFIYSQADENQKGKVARLVSPVVYSQNSAHCMTFWYHMSGSHVGTLRVKLRYQKPEEYDQLVWMAIGHQGDHWKEGRVLLHKSLKLYQVIFEGEIGKGNLGGIAVDDISINNHISQEDCAKPADLDKKNPEIKIDETGSTPGYEGEGEGDKNISRKPGNVLKTLDPILITIIAMSALGVLLGAVCGVVLYCACWHNGMSERNLSALENYNFELVDGVKLKKDKLNTQSTYSEA

SEQ ID NO: 298 - protein, 2611 aa, Homo sapiens
MKILLIIFVLIIWTETLADQSPGPGPVYADVVFLVDSSDHLGPKSFPFVKTFINKMINSLPIEANKYRVALAQYSDEFHSEFHLSTFKGRSPMLNHLKKNFQFIGGSLQIGKALQEAHRTYFSAPINGRDRKQFPPILVVLASAESEDEVEEASKALQKDGVKIISVGVQKASEENLKAMATSHFHFNLRTIRDLSTFSQNMTQIIKDVTKYKEGAVDADMQVHFPISCQKDSLADLVFLVDESLGTGGNLRHLQTFLENITSSMDVKENCMRLGLMSYSNSAKTISFLKSSTTQSEFQQQIKNLSIQVGKSNTGAAIDQMRRDGFSESYGSRRAQGVPQIAVLVTHRPSDDEVHDAALNLRLEDVNVFALSIQGANNTQLEEIVSYPPEQTISTLKSYADLETYSTKFLKKLQNEIWSQISTYAEQRNLDKTGCVDTKEADIHFLIDGSSSIQEKQFEQIKRFMLEVTEMFSIGPDKVRVGVVQYSDDTEVEFYITDYSNDIDLRKAIFNIKQLTGGTYTGKALDYILQIIKNGMKDRMSKVPCYLIVLTDGMSTDRVVEPAKRLRAEQITVHAVGIGAANKIELQEIAGKEERVSFGQNFDALKSIKNEVVREICAEKGCEDMKADIMFLVDSSWSIGNENFRKMKIFMKNLLTKIQIGADKTQIGVVQFSDKTKEEFQLNRYFTQQEISDAIDRMSLINEGTLTGKALNFVGQYFTHSKGARLGAKKFLILITDGVAQDDVRDPARILRGKDVTIFSVGVYNANRSQLEEISGDSSLVFHVENFDHLKALERKLIFRVCALHDCKRITLLDVVFVLDHSGSIKKQYQDHMINLTIHLVKKADVGRDRVQFGALKYSDQPNILFYLNTYSNRSAIIENLRKRRDTGGNTYTAKALKHANALFTEEHGSRIKQNVKQMLIVITDGESHDHDQLNDTALELRNKGITIFAVGVGKANQKELEGMAGNKNNTIYVDNFDKLKDVFTLVQERMCTEAPEVCHLQEADVIFLCDGSDRVSNSDFVTMTTFLSDLIDNFDIQSQRMKIGMAQFGSNYQSIIELKNSLTKTQWKTQIQNVSKSGGFPRIDFALKKVSNMFNLHAGGRRNAGVPQTLVVITSGDPRYDVADAVKTLKDLGICVLVLGIGDVYKEHLLPITGNSEKIITFQDFDKLKNVDVKKRIIREICQSCGKTNCFMDIVVGFDISTHVQGQPLFQGHPQLESYLPGILEDISSIKGVSCGAGTEAQVSLAFKVNSDQGFPAKFQIYQKAVFDSLLQVNVSGPTHLNAQFLRSLWDTFKDKSASRGQVLLIFSDGLQSESNIMLENQSDRLREAGLDALLVVSLNTTAHHEFSSFEFGKRFDYRTHLTIGMRELGKKLSQYLGNIAERTCCCTFCKCPGIPGPHGTRGLQAMKGSQGLKGSRGHRGEDGNPGVRGDTGPQGDKGIAGCPGAWGQKGLKGFSGPKGGHGDDGIDGLDGEEGCHGFPGIKGEKGDPGSQGSPGSRGAPGQYGEKGFPGDPGNPGQNNNIKGQKGSKGEQGRQGRSGQKGVQGSPSSRGSRGREGQRGLRGVSGEPGNPGPTGTLGAEGLQGPQGSQGNPGRKGEKGSQGQKGPQGSPGLMGAKGSTGRPGLLGKKGEPGLPGDLGPVGQTGQRGRQGDSGIPGYGQMGRKGVKGPRGFPGDAGQKGDIGNPGIPGGPGPKGFRGLALTVGLKGEEGSRGLPGPPGQRGIKGMAGQPVYSQCDLIRFLREHSLFKNAYPTELVFALDNSYDVTEESFNKTRDIITSIVNDLNIRENNCPVGARVAMVSYNSGTSYLIRWSDYNRKKQLLQQLSQIKYQDTTEPRDVGNAMRFVTRNVFKRTYAGANVRRVAVFFSNGQTASRSSIITATMEFSALDISPTVFAFDERVFLEAFGFDNTGTFQVIPVPPNGENQTLERLRRCALCYDKCFPNACIREAFLPEDSYMDVVFLIDNSRNIAKDEFKAVKALVSSVIDNFNIASDPLISDSGDRIALLSYSPWESSRRKMGTVKTEFDFITYDNQLLMKNHIQTSFQQLNGEATIGRALLWTTENLFPETPYLRKHKVIFVVSAGENYERKEFVKMMALRAKCQGYVIFVISLGSTRKDDMEELASYPLDQHLIQLGRIHKPDLNYIAKFLKPFLYSVRRGFNQYPPPMLEDACRLINLGGENIQNDGFQFVTELQEDFLGGNGFIGQELNSGRESPFVKTEDNGSDYLVYLPSQMFEPQKLMINYEKDQKSAEIASLTSGHENYGRKEEPDHTYEPGDVSLQEYYMDVAFLIDASQRVGSDEFKEVKAFITSVLDYFHIAPTPLTSTLGDRVAVLSYSPPGYMPNTEECPVYLEFDLVTYNSIHQMKHHLQDSQQLNGDVFIGHALQWTIDNVFVGTPNLRKNKVIFVISAGETNSLDKDVLRNVSLRAKCQGYSIFVFSFGPKHNDKELEELASHPLDHHLVQLGRTHKPDWNYIIKFVKPFVHLIRRAINKYPTEDMKATCVNMTSPNPENGGTENTVLLLPGIYEIKTENGDLFDEFDSQAQHLLVLGNNHSSGSETATDLMQKLYLLFSTEKLAMKDKEKAHLEEISALVVDKQQEKEDKEMEATDI

SEQ ID NO: 299 - protein, 476 aa, Homo sapiens
MVGAMWKVIVSLVLLMPGPCDGLFRSLYRSVSMPPKGDSGQPLFLTPYIEAGKIQKGRELSLVGPFPGLNMKSYAGFLTVNKTYNSNLFFWFFPAQIQPEDAPVVLWLQGGPGGSSMFGLFVEHGPYVVTSNMTLRDRDFPWTTTLSMLYIDNPVGTGFSFTDDTHGYAVNEDDVARDLYSALIQFFQIFPEYKNNDFYVTGESYAGKYVPAIAHLIHSLNPVREVKINLNGIAIGDGYSDPESIIGGYAEFLYQIGLLDEKQKKYFQKQCHECIEHIRKQNWFEAFEILDKLLDGDLTSDPSYFQNVTGCSNYYNFLRCTEPEDQLYYVKFLSLPEVRQAIHVGNQTFNDGTIVEKYLREDTVQSVKPWLTEIMNNYKVLIYNGQLDIIVAAALTERSLMGMDWKGSQEYKKAEKKVWKIFKSDSEVAGYIRQAGDFHQVIIRGGGHILPYDQPLRAFDMINRFIYGKGWDPYVG

SEQ ID NO: 300 - protein, 472 aa, Homo sapiens
MPPIGLDNVATYAGQFNQDYLSGMAANMSGTFGGANMPNLYPGAPGAGYPPVPPGGFGQPPSAQQPVPPYGMYPPPGGNPPSRMPSYPPYPGAPVPGQPMPPPGQQPPGAYPGQPPVTYPGQPPVPLPGQQQPVPSYPGYPGSGTVTPAVPPTQFGSRGTITDAPGFDPLRDAEVLRKAMKGFGTDEQAIIDCLGSRSNKQRQQILLSFKTAYGKDLIKDLKSELSGNFEKTILALMKTPVLFDIYEIKEAIKGVGTDEACLIEILASRSNEHIRELNRAYKAEFKKTLEEAIRSDTSGHFQRLLISLSQGNRDESTNVDMSLAQRDAQELYAAGENRLGTDESKFNAVLCSRSRAHLVAVFNEYQRMTGRDIEKSICREMSGDLEEGMLAVVKCLKNTPAFFAERLNKAMRGAGTKDRTLIRIMVSRSETDLLDIRSEYKRMYGKSLYHDISGDTSGDYRKILLKICGGND

SEQ ID NO: 301 - protein, 1712 aa, Homo sapiens
MASGSRWRPTPPPLLLLLLLALAARADGLEFGGGPGQWARYARWAGAASSGELSFSLRTNATRALLLYLDDGGDCDFLELLLVDGRLRLRFTLSCAEPATLQLDTPVADDRWHMVLLTRDARRTALAVDGEARAAEVRSKRREMQVASDLFVGGIPPDVRLSALTLSTVKYEPPFRGLLANLKLGERPPALLGSQGLRGATADPLCAPARNPCANGGLCTVLAPGEVGCDCSHTGFGGKFCSEEEHPMEGPAHLTLNSEVGSLLFSEGGAGRGGAGDVHQPTKGKEEFVATFKGNEFFCYDLSHNPIQSSTDEITLAFRTLQRNGLMLHTGKSADYVNLSLKSGAVWLVINLGSGAFEALVEPVNGKFNDNAWHDVRVTRNLRQHAGIGHAMVNKLHYLVTISVDGILTTTGYTQEDYTMLGSDDFFYIGGSPNTADLPGSPVSNNFMGCLKDVVYKNNDFKLELSRLAKEGDPKMKLQGDLSFRCEDVAALDPVTFESPEAFVALPRWSAKRTGSISLDFRTTEPNGLLLFSQGRRAGGGAGSHSSAQRADYFAMELLDGHLYLLLDMGSGGIKLRASSRKVNDGEWCHVDFQRDGRKGSISVNSRSTPFLATGDSEILDLESELYLGGLPEGGRVDLPLPPEVWTAALRAGYVGCVRDLFIDGRSRDLRGLAEAQGAVGVAPFCSRETLKQCASAPCRNGGVCREGWNRFICDCIGTGFLGRVCEREATVLSYDGSMYMKIMLPNAMHTEAEDVSLRFMSQRAYGLMMATTSRESADTLRLELDGGQMKLTVNLDCLRVGCAPSKGPETLFAGHKLNDNEWHTVRVVRRGKSLQLSVDNVTVEGQMAGAHMRLEFHNIETGIMTERRFISVVPSNFIGHLSGLVFNGQPYMDQCKDGDITYCELNARFGLRAIVADPVTFKSRSSYLALATLQAYASMHLFFQFKTTAPDGLLLFNSGNGNDFIVIELVKGYIHYVFDLGNGPSLMKGNSDKPVNDNQWHNVVVSRDPGNVHTLKIDSRTVTQHSNGARNLDLKGELYIGGLSKNMFSNLPKLVASRDGFQGCLASVDLNGRLPDLIADALHRIGQVERGCDGPSTTCTEESCANQGVCLQQWDGFTCDCTMTSYGGPVCNDPGTTYIFGKGGALITYTWPPNDRPSTRMDRLAVGFSTHQRSAVLVRVDSASGLGDYLQLHIDQGTVGVIFNVGTDDITIDEPNAIVSDGKYHVVRFTRSGGNATLQVDSWPVNERYPAGNFDNERLAIARQRIPYRLGRVVDEWLLDKGRQLTIFNSQAAIKIGGRDQGRPFQGQVSGLYYNGLKVLALAAESDPNVRTEGHLRLVGEGPSVLLSAETTATTLLADMATTIMETTTTMATTTTRRGRSPTLRDSTTQNTDDLLVASAECPSDDEDLEECEPSTGGELILPIITEDSLDPPPVATRSPFVPPPPTFYPFLTGVGATQDTLPPPAARRPPSGGPCQAERDDSDCEEPIEASGFASGEVFDSSLPPTDDEDFYTTFPLVTDRTTLLSPRKPAPRPNLRTDGATGAPGVLFAPSAPAPNLPAGKMNHRDPLQPLLENPPLGPGAPTSFEPRRPPPLRPGVTSAPGFPHLPTANPTGPGERGPPGAVEVIRESSSTTGMVVGIVAAAALCILILLYAMYKYRNRDEGSYQVDQSRNYISNSAQSNGAVVKEKAPAAPKTPSKAKKNKDKEYYV

SEQ ID NO: 302 - protein, 1111 aa, Homo sapiens
MHWLPAGHDINGALEPSNIDTSILEEYISKEDASDLCFPDISAPASSASYSHGQPAMPGSSGVHHLSPPGGGPSPGRHGPLPPPGYGTPLNCNNNNGMGAAPKPFPGGTGPPIKAEPKAPYAPGTLPDSPPDSGSEAYSPQQVNEPHLLRTITPETLCHVGVPSRLEHPPPPPAHLPGPPPPPPPPPHYPVLQRDLYMKAEPPIPHYAAMGQGLVPTDLHHTQQSQMLHQLLQQHGAELPTHPSKKRKHSESPPSTLNAQMLNGMIKQEPGTVTALPLHPTRAPSPPWPPQGPLSPGPGSLPLSIARVQTPPWHPPGAPSPGLLQDSDSLSGSYLDPNYQSIKWQPHQQNKWATLYDANYKELPMLTYRVDADKGFNFSVGDDAFVCQKKNHFQVTVYIGMLGEPKYVKTPEGLKPLDCFYLKLHGVKLEALNQSINIEQSQSDRSKRPFNPVTVNLPPEQVTKVTVGRLHFSETTANNMRKKGKPNPDQRYFMLVVALQAHAQNQNYTLAAQISERIIVRASNPGQFESDSDVLWQRAQVPDTVFHHGRVGINTDRPDEALVVHGNVKVMGSLMHPSDLRAKEHVQEVDTTEQLKRISRMRLVHYRYKPEFAASAGIEATAPETGVIAQEVKEILPEAVKDTGDMVFANGKTIENFLVVNKERIFMENVGAVKELCKLTDNLETRIDELERWSHKLAKLRRLDSLKSTGSSGAFSHAGSQFSRAGSVPHKKRPPKVASKSSSVVPDQACISQRFLQGTIIALVVVMAFSVVSMSTLYVLSLRTEEDLVDTDGRSSQSFGTTQLRQSPLTTGLPGIQPSLLLVTTSLTSSAPGSAVRTLDMCSSHPCPVICCSSPTTNPTTGPSLGPSFNPGHVLSPSPSPSTNRSGPSQMALLPVTNIRAKSWGLSVNGIGHSKHHKSLEPLASPAVPFPGGQGKAKNSPSLGFHGRARRGALQSSVGPAEPTWAQGQSEPVPSLTSIQVLENSMSITSQYCAPGDACRPGNFTYHIPVSSGTPLHLSLTLQMNSSSPVSVVLCSLRSKEEPCEEGSLPQSLHTHQDTQGTSHRWPITILSFREFTYHFRVALLGQANCSSEALAQPATDYHFHFYRLCD

SEQ ID NO: 303 - protein, 894 aa, Homo sapiens
MILLAVLFLCFISSYSASVKGHTTGLSLNNDRLYKLTYSTEVLLDRGKGKLQDSVGYRISSNVDVALLWRNPDGDDDQLIQITMKDVNVENVNQQRGEKSIFKGKSPSKIMGKENLEALQRPTLLHLIHGKVKEFYSYQNEAVAIENIKRGLASLFQTQLSSGTTNEVDISGNCKVTYQAHQDKVIKIKALDSCKIARSGFTTPNQVLGVSSKATSVTTYKIEDSFVIAVLAEETHNFGLNFLQTIKGKIVSKQKLELKTTEAGPRLMSGKQAAAIIKAVDSKYTAIPIVGQVFQSHCKGCPSLSELWRSTRKYLQPDNLSKAEAVRNFLAFIQHLRTAKKEEILQILKMENKEVLPQLVDAVTSAQTSDSLEAILDFLDFKSDSSIILQERFLYACGFASHPNEELLRALISKFKGSIGSSDIRETVMIITGTLVRKLCQNEGCKLKAVVEAKKLILGGLEKAEKKEDTRMYLLALKNALLPEGIPSLLKYAEAGEGPISHLATTALQRYDLPFITDEVKKTLNRIYHQNRKVHEKTVRTAAAAIILNNNPSYMDVKNILLSIGELPQEMNKYMLAIVQDILRFEMPASKIVRRVLKEMVAHNYDRFSRSGSSSAYTGYIERSPRSASTYSLDILYSGSGILRRSNLNIFQYIGKAGLHGSQVVIEAQGLEALIAATPDEGEENLDSYAGMSAILFDVQLRPVTFFNGYSDLMSKMLSASGDPISVVKGLILLIDHSQELQLQSGLKANIEVQGGLAIDISGAMEFSLWYRESKTRVKNRVTVVITTDITVDSSFVKAGLETSTETEAGLEFISTVQFSQYPFLVCMQMDKDEAPFRQFEKKYERLSTGRGYVSQKRKESVLAGCEFPLHQENSEMCKVVFAPQPDSTSSGWF

SEQ ID NO: 304 - protein, 790 aa, Homo sapiens
MGTRKKVHAFVRVKPTDDFAHEMIRYGDDKRSIDIHLKKDIRRGVVNNQQTDWSFKLDGVLHDASQDLVYETVAKDVVSQALDGYNGTIMCYGQTGAGKTYTMMGATENYKHRGILPRALQQVFRMIEERPTHAITVRVSYLEIYNESLFDLLSTLPYVGPSVTPMTIVENPQGVFIKGLSVHLTSQEEDAFSLLFEGETNRIIASHTMNKNSSRSHCIFTIYLEAHSRTLSEEKYITSKINLVDLAGSERLGKSGSEGQVLKEATYINKSLSFLEQAIIALGDQKRDHIPFRQCKLTHALKDSLGGNCNMVLVTNIYGEAAQLEETLSSLRFASRMKLVTTEPAINEKYDAERMVKNLEKELALLKQELAIHDSLTNRTFVTYDPMDEIQIAEINSQVRRYLEGTLDEIDIISLRQIKEVFNQFRVVLSQQEQEVESTLRRKYTLIDRNDFAAISAIQKAGLVDVDGHLVGEPEGQNFGLGVAPFSTKPGKKAKSKKTFKEPLSSLARKEGASSPVNGKDLDYVSTSKTQLVPSSKDGDVKDMLSRDRETSSIEPLPSDSPKEELRPIRPDTPPSKPVAFEEFKNEQGSEINRIFKENKSILNERRKRASETTQHINAIKREIDVTKEALNFQKSLREKQGKYENKGLMIIDEEEFLLILKLKDLKKQYRSEYQDLRDLRAEIQYCQHLVDQCRHRLLMEFDIWYNESFVIPEDMQMALKPGGSIRPGMVPVNRIVSLGEDDQDKFSQLQQRVLPEGPDSISFYNAKVKIEQKHNYLKTMMGLQQAHRK

SEQ ID NO: 305 - protein, 1636 aa, Homo sapiens
MEAVPRMPMIWLDLKEAGDFHFQPAVKKFVLKNYGENPEAYNEELKKLELLRQNAVRVPRDFEGCSVLRKYLGQLHYLQSRVPMGSGQEAAVPVTWTEIFSGKSVAHEDIKYEQACILYNLGALHSMLGAMDKRVSEEGMKVSCTHFQCAAGAFAYLREHFPQAYSVDMSRQILTLNVNLMLGQAQECLLEKSMLDNRKSFLVARISAQVVDYYKEACRALENPDTASLLGRIQKDWKKLVQMKIYYFAAVAHLHMGKQAEEQQKFGERVAYFQSALDKLNEAIKLAKGQPDTVQDALRFTMDVIGGKYNSAKKDNDFIYHEAVPALDTLQPVKGAPLVKPLPVNPTDPAVTGPDIFAKLVPMAAHEASSLYSEEKAKLLREMMAKIEDKNEVLDQFMDSMQLDPETVDNLDAYSHIPPQLMEKCAALSVRPDTVRNLVQSMQVLSGVFTDVEASLKDIRDLLEEDELLEQKFQEAVGQAGAISITSKAELAEVRREWAKYMEVHEKASFTNSELHRAMNLHVGNLRLLSGPLDQVRAALPTPALSPEDKAVLQNLKRILAKVQEMRDQRVSLEQQLRELIQKDDITASLVTTDHSEMKKLFEEQLKKYDQLKVYLEQNLAAQDRVLCALTEANVQYAAVRRVLSDLDQKWNSTLQTLVASYEAYEDLMKKSQEGRDFYADLESKVAALLERTQSTCQAREAARQQLLDRELKKKPPPRPTAPKPLLPRREESEAVEAGDPPEELRSLPPDMVAGPRLPDTFLGSATPLHFPPSPFPSSTGPGPHYLSGPLPPGTYSGPTQLIQPRAPGPHAMPVAPGPALYPAPAYTPELGLVPRSSPQHGVVSSPYVGVGPAPPVAGLPSAPPPQFSGPELAMAVRPATTTVDSIQAPIPSHTAPRPNPTPAPPPPCFPVPPPQPLPTPYTYPAGAKQPIPAQHHFSSGIPAGFPAPRIGPQPQPHPQPHPSQAFGPQPPQQPLPLQHPHLFPPQAPGLLPPQSPYPYAPQPGVLGQPPPPLHTQLYPGPAQDPLPAHSGALPFPSPGPPQPPHPPLAYGPAPSTRPMGPQAAPLTIRGPSSAGQSTPSPHLVPSPAPSPGPGPVPPRPPAAEPPPCLRRGAAAADLLSSSPESQHGGTQSPGGGQPLLQPTKVDAAEGRRPQALRLIERDPYEHPERLRQLQQELEAFRGQLGDVGALDTVWRELQDAQEHDARGRSIAIARCYSLKNRHQDVMPYDSNRVVLRSGKDDYINASCVEGLSPYCPPLVATQAPLPGTAADFWLMVHEQKVSVIVMLVSEAEMEKQKVARYFPTERGQPMVHGALSLALSSVRSTETHVERVLSLQFRDQSLKRSLVHLHFPTWPELGLPDSPSNLLRFIQEVHAHYLHQRPLHTPIIVHCSSGVGRTGAFALLYAAVQEVEAGNGIPELPQLVRRMRQQRKHMLQEKLHLRFCYEAVVRHVEQVLQRHGVPPPCKPLASASISQKNHLPQDSQDLVLGGDVPISSIQATIAKLSIRPPGGLESPVASLPGPAEPPGLPPASLPESTPIPSSSPPPLSSPLPEAPQPKEEPPVPEAPSSGPPSSSLELLASLTPEAFSLDSSLRGKQRMSKHNFLQAHNGQGLRATRPSDDPLSLLDPLWTLNKT

SEQ ID NO: 306 - protein, 1279 aa, Homo sapiens
MTLTERLREKISRAFYNHGLLCASYPIPIILFTGFCILACCYPLLKLPLPGTGPVEFTTPVKDYSPPPVDSDRKQGEPTEQPEWYVGAPVAYVQQIFVKSSVFPWHKNLLAVDVFRSPLSRAFQLVEEIRNHVLRDSSGIRSLEELCLQVTDLLPGLRKLRNLLPEHGCLLLSPGNFWQNDWERFHADPDIIGTIHQHEPKTLQTSATLKDLLFGVPGKYSGVSLYTRKRMVSYTITLVFQHYHAKFLGSLRARLMLLHPSPNCSLRAESLVHVHFKEEIGVAELIPLVTTYIILFAYIYFSTRKIDMVKSKWGLALAAVVTVLSSLLMSVGLCTLFGLTPTLNGGEIFPYLVVVIGLENVLVLTKSVVSTPVDLEVKLRIAQGLSSESWSIMKNMATELGIILIGYFTLVPAIQEFCLFAVVGLVSDFFLQMLFFTTVLSIDIRRMELADLNKRLPPEACLPSAKPVGQPTRYERQLAVRPSTPHTITLQPSSFRNLRLPKRLRVVYFLARTRLAQRLIMAGTVVWIGILVYTDPAGLRNYLAAQVTEQSPLGEGALAPMPVPSGMLPPSHPDPAFSIFPPDAPKLPENQTSPGESPERGGPAEVVHDSPVPEVTWGPEDEELWRKLSFRHWPTLFSYYNITLAKRYISLLPVIPVTLRLNPREALEGRHPQDGRSAWPPPGPIPAGHWEAGPKGPGGVQAHGDVTLYKVAALGLATGIVLVLLLLCLYRVLCPRNYGQLGGGPGRRRRGELPCDDYGYAPPETEIVPLVLRGHLMDIECLASDGMLLVSCCLAGHVCVWDAQTGDCLTRIPRPGRQRRDSGVGSGLEAQESWERLSDGGKAGPEEPGDSPPLRHRPRGPPPPSLFGDQPDLTCLIDTNFSAQPRSSQPTQPEPRHRAVCGRSRDSPGYDFSCLVQRVYQEEGLAAVCTPALRPPSPGPVLSQAPEDEGGSPEKGSPSLAWAPSAEGSIWSLELQGNLIVVGRSSGRLEVWDAIEGVLCCSSEEVSSGITALVFLDKRIVAARLNGSLDFFSLETHTALSPLQFRGTPGRGSSPASPVYSSSDTVACHLTHTVPCAHQKPITALKAAAGRLVTGSQDHTLRVFRLEDSCCLFTLQGHSGAITTVYIDQTMVLASGGQDGAICLWDVLTGSRVSHVFAHRGDVTSLTCTTSCVISSGLDDLISIWDRSTGIKFYSIQQDLGCGASLGVISDNLLVTGGQGCVSFWDLNYGDLLQTVYLGKNSEAQPARQILVLDNAAIVCNFGSELSLVYVPSVLEKLD

SEQ ID NO: 307 - protein, 725 aa, Homo sapiens
MAAASAVSVLLVAAERNRWHRLPSLLLPPRTWVWRQRTMKYTTATGRNITKVLIANRGEIACRVMRTAKKLGVQTVAVYSEADRNSMHVDMADEAYSIGPAPSQQSYLSMEKIIQVAKTSAAQAIHPGCGFLSENMEFAELCKQEGIIFIGPPPSAIRDMGIKSTSKSIMAAAGVPVVEGYHGEDQSDQCLKEHARRIGYPVMIKAVRGGGGKGMRIVRSEQEFQEQLESARREAKKSFNDDAMLIEKFVDTPRHVEVQVFGDHHGNAVYLFERDCSVQRRHQKIIEEAPAPGIKSEVRKKLGEAAVRAAKAVNYVGAGTVEFIMDSKHNFCFMEMNTRLQVEHPVTEMITGTDLVEWQLRIAAGEKIPLSQEEITLQGHAFEARIYAEDPSNNFMPVAGPLVHLSTPRADPSTRIETGVRQGDEVSVHYDPMIAKLVVWAADRQAALTKLRYSLRQYNIVGLHTNIDFLLNLSGHPEFEAGNVHTDFIPQHHKQLLLSRKAAAKESLCQAALGLILKEKAMTDTFTLQAHDQFSPFSSSSGRRLNISYTRNMTLKDGKNNVAIAVTYNHDGSYSMQIEDKTFQVLGNLYSEGDCTYLKCSVNGVASKAKLIILENTIYLFSKEGSIEIDIPVPKYLSSVSSQETQGGPLAPMTGTIEKVFVKAGDKVKAGDSLMVMIAMKMEHTIKSPKDGTVKKVFYREGAQANRHTPLVEFEEEESDKRESE

SEQ ID NO: 308 - protein, 664 aa, Homo sapiens
MPLRDKYCQTDHHHHGCCEPVYILEPGDPPLLQQPLQTSKSGIQQIIECFRSGTKQLKHILLKDVDTIFECKLCRSLFRGLPNLITHKKFYCPPSLQMDDNLPDVNDKQSQAINDLLEAIYPSVDKREYIIKLEPIETNQNAVFQYISRTDNPIEVTESSSTPEQTEVQIQETSTEQSKTVPVTDTEVETVEPPPVEIVTDEVAPTSDEQPQESQADLETSDNSDFGHQLICCLCRKEFNSRRGVRRHIRKVHKKKMEELKKYIETRKNPNQSSKGRSKNVLVPLSRSCPVCCKSFATKANVRRHFDEVHRGLRRDSITPDIATKPGQPLFLDSISPKKSFKTRKQKSSSKAEYNLTACKCLLCKRKYSSQIMLKRHMQIVHKITLSGTNSKREKGPNNTANSSEIKVKVEPADSVESSPPSITHSPQNELKGTNHSNEKKNTPAAQKNKVKQDSESPKSTSPSAAGGQQKTRKPKLSAGFDFKQLYCKLCKRQFTSKQNLTKHIELHTDGNNIYVKFYKCPLCTYETRRKRDVIRHITVVHKKSSRYLGKITASLEIRAIKKPIDFVLNKVAKRGPSRDEAKHSDSKHDGTSNSPSKKYEVADVGIEVKVTKNFSLHRCNKCGKAFAKKTYLEHHKKTHKANASNSPEGNKTKGRSTRSKALV

SEQ ID NO: 309 - protein, 986 aa, Homo sapiens
MERMNWLSRLASRGPGHRIPQGANLQTPVMADPETCLMVFKNHWSQVVRILERQGPRAAPGGADDLSAVRNHTYQMLTLLAEDRAVPSAPTGPGPLLEFALHEDLLTRVLTWQLQWDELGDGVEERRAEQLKLFEMLVSEARQPLLRHGPVREALLTLLDACGRPVPSSPALDEGLVLLLSQLCVCVAQEPSLLEFFLQPPPEPGAAPRLLLFSRLVPFVHREGTLGQQARDALLLLMALSAGSPTVGRYIADHSYFCPVLATGLSALYSSLPRKIEVPGDDWHCLRREDWLGVPALALFMSSLEFCNAVIQVAHPLVQKQLVDYIHNGFLVPVMGPALHKTSVEEMIASTAYLELFLRSISEPALLRTFLRFLLLHRHDTHTILDTLVARIGSNSRLCMVSLSLFRTLLNLSCEDVLLQLVLRYLVPCNHVMLSQKPAVRDVDLYGRAADKFLSLIPRCCRHHAPSPPRPEHASWARGGPSRETGRREDITGPGSPSVDSSSVTTVPRPSTPSRLALFLRQQSLGGSESPGPAPCSPGLSASPASSPGRRPTPAEEPGELEDNYLEYLREARRGVDRCVRACRTWSAPYDGERPSPEPSPFGSRTKKRSLLPEEDRNNVGEGEEEELGRRGRAGGAGEGPGHLPPPQLNGVPGSWPEGAKKVRLVPKEGAGELLEGISEGMAGLEGFGQELRELEVALSNGGTGSESPLEPPLPLEEEEAYESFTCPPEPPGPFLSSPLRTLNQLPSQPFTGPFMAVLFAKLENMLQNSVYVNFLLTGLVAQLACHPQPLLRSFLLNTNMVFQPSVKSLLQVLGSVKNKIENFAASQEDFPALLSKAKKYLIARGKLDWAEGPAAGPAPRRSDPLVKSRRPSLGELLLRHAHSPTRARQAAQLVLQPGRDGAGLGLSGGSPGASTPVLLTRGGAPERQGEALRVKNAVYCAVIFPEFLKELAAISQAHAVTSPFLLETSEEGSGPLISGCGPLNP

SEQ ID NO: 310 - protein, 930 aa, Homo sapiens
MKPPRPVRTCSKVLVLLSLLAIHQTTTAEKNGIDIYSLTVDSRVSSRFAHTVVTSRVVNRANTVQEATFQMELPKKAFITNFSMIIDGMTYPGIIKEKAEAQAQYSAAVAKGKSAGLVKATGRNMEQFQVSVSVAPNAKITFELVYEELLKRRLGVYELLLKVRPQQLVKHLQMDIHIFEPQGISFLETESTFMTNQLVDALTTWQNKTKAHIRFKPTLSQQQKSPEQQETVLDGNLIIRYDVDRAISGGSIQIENGYFVHYFAPEGLTTMPKNVVFVIDKSGSMSGRKIQQTREALIKILDDLSPRDQFNLIVFSTEATQWRPSLVPASAENVNKARSFAAGIQALGGTNINDAMLMAVQLLDSSNQEERLPEGSVSLIILLTDGDPTVGETNPRSIQNNVREAVSGRYSLFCLGFGFDVSYAFLEKLALDNGGLARRIHEDSDSALQLQDFYQEVANPLLTAVTFEYPSNAVEEVTQNNFRLLFKGSEMVVAGKLQDRGPDVLTATVSGKLPTQNITFQTESSVAEQEAEFQSPKYIFHNFMERLWAYLTIQQLLEQTVSASDADQQALRNQALNLSLAYSFVTPLTSMVVTKPDDQEQSQVAEKPMEGESRNRNVHSGSTFFKYYLQGAKIPKPEASFSPRRGWNRQAGAAGSRMNFRPGVLSSRQLGLPGPPDVPDHAAYHPFRRLAILPASAPPATSNPDPAVSRVMNMKIEETTMTTQTPAPIQAPSAILPLPGQSVERLCVDPRHRQGPVNLLSDPEQGVEVTGQYEREKAGFSWIEVTFKNPLVWVHASPEHVVVTRNRRSSAYKWKETLFSVMPGLKMTMDKTGLLLLSDPDKVTIGLLFWDGRGEGLRLLLRDTDRFSSHVGGTLGQFYQEVLWGSPAASDDGRRTLRVQGNDHSATRERRLDYQEGPPGVEISCWSVEL

SEQ ID NO: 311 - protein, 375 aa, Homo sapiens
MMCQSEARQGPELRAAKWLHFPQLALRRRLGQLSCMSRPALKLRSWPLTVLYYLLPFGALRPLSRVGWRPVSRVALYKSVPTRLLSRAWGRLNQVELPHWLRRPVYSLYIWTFGVNMKEAAVEDLHHYRNLSEFFRRKLKPQARPVCGLHSVISPSDGRILNFGQVKNCEVEQVKGVTYSLESFLGPRMCTEDLPFPPAASCDSFKNQLVTREGNELYHCVIYLAPGDYHCFHSPTDWTVSHRRHFPGSLMSVNPGMARWIKELFCHNERVVLTGDWKHGFFSLTAVGATNVGSIRIYFDRDLHTNSPRHSKGSYNDFSFVTHTNREGVPMRKGEHLGEFNLGSTIVLIFEAPKDFNFQLKTGQKIRFGEALGSL

SEQ ID NO: 312 - protein, 1392 aa, Homo sapiens
MVEPGQDLLLAALSESGISPNDLFDIDGGDAGLATPMPTPSVQQSVPLSALELGLETEAAVPVKQEPETVPTPALLNVRQPPSTTTFVLNQINHLPPLGSTIVMTKTPPVTTNRQTITLTKFIQTTASTRPSVSAPTVRNAMTSAPSKDQVQLKDLLKNNSLNELMKLKPPANIAQPVATAATDVSNGTVKKESSNKEGARMWINDMKMRSFSPTMKVPVVKEDDEPEEEDEEEMGHAETYAEYMPIKLKIGLRHPDAVVETSSLSSVTPPDVWYKTSISEETIDNGWLSALQLEAITYAAQQHETFLPNGDRAGFLIGDGAGVGKGRTIAGIIYENYLLSRKRALWFSVSNDLKYDAERDLRDIGAKNILVHSLNKFKYGKISSKHNGSVKKGVIFATYSSLIGESQSGGKYKTRLKQLLHWCGDDFDGVIVFDECHKAKNLCPVGSSKPTKTGLAVLELQNKLPKARVVYASATGASEPRNMAYMNRLGIWGEGTPFREFSDFIQAVERRGVGAMEIVAMDMKLRGMYIARQLSFTGVTFKIEEVLLSQSYVKMYNKAVKLWVIARERFQQAADLIDAEQRMKKSMWGQFWSAHQRFFKYLCIASKVKRVVQLAREEIKNGKCVVIGLQSTGEARTLEALEEGGGELNDFVSTAKGVLQSLIEKHFPAPDRKKLYSLLGIDLTAPSNNSSPRDSPCKENKIKKRKGEEITREAKKARKVGGLTGSSSDDSGSESDASDNEESDYESSKNMSSGDDDDFNPFLDESNEDDENDPWLIRKDHKKNKEKKKKKSIDPDSIQSALLASGLGSKRPSFSSTPVISPAPNSTPANSNTNSNSSLITSQDAVERAQQMKKDLLDKLEKLAEDLPPNTLDELIDELGGPENVAEMTGRKGRVVSNDDGSISYESRSELDVPVEILNITEKQRFMDGDKNIAIISEAASSGISLQADRRAKNQRRRVHMTLELPWSADRAIQQFGRTHRSNQVTAPEYVFLISELAGEQRFASIVAKRLESLGALTHGDRRATESRDLSRFNFDNKYGRNALEIVMKSIVNLDSPMVSPPPDYPGEFFKDVRQGLIGVGLINVEDRSGILTLDKDYNNIGKFLNRILGMEVHQQNALFQYFADTLTAVVQNAKKNGRYDMGILDLGSGDEKVRKSDVKKFLTPGYSTSGHVELYTISVERGMSWEEATKIWAELTGPDDGFYLSLQIRNNKKTAILVKEVNPKKKLFLVYRPNTGKQLKLEIYADLKKKYKKVVSDDALMHWLDQYNSSADTCTHAYWRGNCKKASLGLVCEIGLRCRTYYVLCGSVLSVWTKVEGVLASVSGTNVKMQIVRLRTEDGQRIVGLIIPANCVSPLVNLLSTSDQSQQLAVQQKQLWQQHHPQSITNLSNA

SEQ ID NO: 313 - protein, 234 aa, Homo sapiens
MRKPDSKIVLLGDMNVGKTSLLQRYMERRFPDTVSTVGGAFYLKQWRSYNISIWDTAGREQFHGLGSMYCRGAAAIILTYDVNHRQSLVELEDRFLGLTDTASKDCLFAIVGNKVDLTEEGALAGQEKEECSPNMDAGDRVSPRAPKQVQLEDAVALYKKILKYKMLDEQDVPAAEQMCFETSAKTGYNVDLLFETLFDLVVPMILQQRAERPSHTVDISSHKPPKRTRSGCCA

SEQ ID NO: 314 - protein, 636 aa, Homo sapiens
MGQGPRSPHKVGRRFPAGGKRGRGAKGSGRPLPGRKRQPWPPPDGRSEPAPDSHPHLSPEALGYFRRALSALKEAPETGEERDLMVHNIMKEVETQALALSTNRTGSEMLQELLGFSPLKPLCRVWAALRSNLRTVACHRCGVHVLQSALLQLPRLLGSAAEEEEEEEEDGKDGPTETLEELVLGLAAEVCDDFLVYCGDTHGSFVVRTLLQVLGGTILESERARPRGSQSSEAQKTPAQECKPADFEVPETFLNRLQDLSSSFLKDIAVFITDKISSFCLQVALQVLHRKLPQFCAHLCNAVIGYLSTRGSSVDGSPLLLFLRDQTSSRLLEQVLLVLEPPRLQSLFEEHLQGQLQTLAAHPIANFPLQRLLDAVTTPELLSPVFEELSPVLEAVLAQGHPGVVIALVGACRRVGAYQAKVLQLLLEAFHCAEPSSRQVACVPLFATLMAYEVYYGLTEEEGAVPAEHQVAMAAARALGDVTVLGSLLLQHLLHFSTPGLVLRSLGALTGPQLLSLAQSPAGSHVLDAILTSPSVTRKLRRRVLQNLKGQYVALACSRHGSRVLDAIWSGAALRARKEIAAELGEQNQELIRDPFGHHVARNVALTTFLKRREAWEQQQGAVAKRRRALNSILED

SEQ ID NO: 315 - protein, 354 aa, Homo sapiens
MPLEERRSSGERNDAAPTNHRRPGEKRASTAKQVSSVPFLGAAGHQQSLPSSWKASCSGPLVMASDSDVKMLLNFVNLASSDIKAALDKSAPCRRSVDHRKYLQKQLKRFSQKYSRLPRGLPGRAAEPYLKRGSEDRPRRLLLDLGPDSSPGGGGGCKEKVLRNPYREECLAKEQLPQRQHPEAAQPGQVPMRKRQLPASFWEEPRPTHSYHVGLEGGLGPREGPPYEGKKNCKGLEPLGPETTLVSMSPRALAEKEPLKMPGVSLVGRVNAWSCCPFQYHGQPIYPGPLGALPQSPVPSLGLWRKSPAFPGELAHLCKDVDGLGQKVCRPVVLKPIPTKPAVPPPIFNVFGYL

SEQ ID NO: 316 - protein, 466 aa, Homo sapiens
MLRSTSTVTLLSGGAARTPGAPSRRANVCRLRLTVPPESPVPEQCEKKIERKEQLLDLSNGEPTRKLPQGVVYGVVRRSDQNQQKEMVVYGWSTSQLKEEMNYIKDVRATLEKVRKRMYGDYDEMRQKIRQLTQELSVSHAQQEYLENHIQTQSSALDRFNAMNSALASDSIGLQKTLVDVTLENSNIKDQIRNLQQTYEASMDKLREKQRQLEVAQVENQLLKMKVESSQEANAEVMREMTKKLYSQYEEKLQEEQRKHSAEKEALLEETNSFLKAIEEANKKMQAAEISLEEKDQRIGELDRLIERMEKERHQLQLQLLEHETEMSGELTDSDKERYQQLEEASASLRERIRHLDDMVHCQQKKVKQMVEEIESLKKKLQQKQLLILQLLEKISFLEGENNELQSRLDYLTETQAKTEVETREIGVGCDLLPSQTGRTREIVMPSRNYTPYTRVLELTMKKTLT

SEQ ID NO: 317 - protein, 519 aa, Homo sapiens
MAEERVATRTQFPVSTESQKPRQKKAPEFPILEKQNWLIHLHYIRKDYEACKAVIKEQLQETQGLCEYAIYVQALIFRLEGNIQESLELFQTCAVLSPQSADNLKQVARSLFLLGKHKAAIEVYNEAAKLNQKDWEISHNLGVCYIYLKQFNKAQDQLHNALNLNRHDLTYIMLGKIHLLEGDLDKAIEVYKKAVEFSPENTELLTTLGLLYLQLGIYQKAFEHLGNALTYDPTNYKAILAAGSMMQTHGDFDVALTKYRVVACAVPESPPLWNNIGMCFFGKKKYVAAISCLKRANYLAPFDWKILYNLGLVHLTMQQYASAFHFLSAAINFQPKMGELYMLLAVALTNLEDIENAKRAYAEAVHLDKCNPLVNLNYAVLLYNQGEKKNALAQYQEMEKKVSLLKDNSSLEFDSEMVEMAQKLGAALQVGEALVWTKPVKDPKSKHQTTSTSKPASFQQPLGSNQALGQAMSSAAAYRTLPSGAGGTSQFTKPPSLPLEPEPAVESSPTETSEQIREK

SEQ ID NO: 318 - protein, 882 aa, Homo sapiens
MEPAPARSPRPQQDPARPQEPTMPPPETPSEGRQPSPSPSPTERAPASEEEFQFLRCQQCQAEAKCPKLLPCLHTLCSGCLEASGMQCPICQAPWPLGADTPALDNVFFESLQRRLSVYRQIVDAQAVCTRCKESADFWCFECEQLLCAKCFEAHQWFLKHEARPLAELRNQSVREFLDGTRKTNNIFCSNPNHRTPTLTSIYCRGCSKPLCCSCALLDSSHSELKCDISAEIQQRQEELDAMTQALQEQDSAFGAVHAQMHAAVGQLGRARAETEELIRERVRQVVAHVRAQERELLEAVDARYQRDYEEMASRLGRLDAVLQRIRTGSALVQRMKCYASDQEVLDMHGFLRQALCRLRQEEPQSLQAAVRTDGFDEFKVRLQDLSSCITQGKDAAVSKKASPEAASTPRDPIDVDLPEEAERVKAQVQALGLAEAQPMAVVQSVPGAHPVPVYAFSIKGPSYGEDVSNTTTAQKRKCSQTQCPRKVIKMESEEGKEARLARSSPEQPRPSTSKAVSPPHLDGPPSPRSPVIGSEVFLPNSNHVASGAGEAEERVVVISSSEDSDAENSSSRELDDSSSESSDLQLEGPSTLRVLDENLADPQAEDRPLVFFDLKIDNETQKISQLAAVNRESKFRVVIQPEAFFSIYSKAVSLEVGLQHFLSFLSSMRRPILACYKLWGPGLPNFFRALEDINRLWEFQEAISGFLAALPLIRERVPGASSFKLKNLAQTYLARNMSERSAMAAVLAMRDLCRLLEVSPGPQLAQHVYPFSSLQCFASLQPLVQAAVLPRAEARLLALHNVSFMELLSAHRRDRQGGLKKYSRYLSLQTTTLPPAQPAFNLQALGTYFEGLLEGPALARAEGVSTPLAGRGLAERASQQS

SEQ ID NO: 319 - protein, 829 aa, Homo sapiens
MEPAPARSPRPQQDPARPQEPTMPPPETPSEGRQPSPSPSPTERAPASEEEFQFLRCQQCQAEAKCPKLLPCLHTLCSGCLEASGMQCPICQAPWPLGADTPALDNVFFESLQRRLSVYRQIVDAQAVCTRCKESADFWCFECEQLLCAKCFEAHQWFLKHEARPLAELRNQSVREFLDGTRKTNNIFCSNPNHRTPTLTSIYCRGCSKPLCCSCALLDSSHSELKCDISAEIQQRQEELDAMTQALQEQDSAFGAVHAQMHAAVGQLGRARAETEELIRERVRQVVAHVRAQERELLEAVDARYQRDYEEMASRLGRLDAVLQRIRTGSALVQRMKCYASDQEVLDMHGFLRQALCRLRQEEPQSLQAAVRTDGFDEFKVRLQDLSSCITQGKDAAVSKKASPEAASTPRDPIDVDLPEEAERVKAQVQALGLAEAQPMAVVQSVPGAHPVPVYAFSIKGPSYGEDVSNTTTAQKRKCSQTQCPRKVIKMESEEGKEARLARSSPEQPRPSTSKAVSPPHLDGPPSPRSPVIGSEVFLPNSNHVASGAGEAEERVVVISSSEDSDAENSCMEPMETAEPQSSPAHSSPAHSSPAHSSPVQSLLRAQGASSLPCGTYHPPAWPPHQPAEQAATPDAEPHSEPPDHQERPAVHRGIRYLLYRAQRAIRLRHALRLHPQLHRAPIRTWSPHVVQASTPAITGPLNHPANAQEHPAQLQRGISPPHRIRGAVRSRSRSLRGSSHLSQWLNNFFALPFSSMASQLDMSSVVGAGESRAQTLGAGVPPGDSVRGSMEASQVQVPLEASPITFPPPCAPERPPISPVPGARQAGL

SEQ ID NO: 320 - protein, 1095 aa, Homo sapiens
MCDGALLPPLVLPVLLLLVWGLDPGTAVGDAAADVEVVLPWRVRPDDVHLPPLPAAPGPRRRRRPRTPPAAPRARPGERALLLHLPAFGRDLYLQLRRDLRFLSRGFEVEEAGAARRRGRPAELCFYSGRVLGHPGSLVSLSACGAAGGLVGLIQLGQEQVLIQPLNNSQGPFSGREHLIRRKWSLTPSPSAEAQRPEQLCKVLTEKKKPTWGRPSRDWRERRNAIRLTSEHTVETLVVADADMVQYHGAEAAQRFILTVMNMVYNMFQHQSLGIKINIQVTKLVLLRQRPAKLSIGHHGERSLESFCHWQNEEYGGARYLGNNQVPGGKDDPPLVDAAVFVTRTDFCVHKDEPCDTVGIAYLGGVCSAKRKCVLAEDNGLNLAFTIAHELGHNLGMNHDDDHSSCAGRSHIMSGEWVKGRNPSDLSWSSCSRDDLENFLKSKVSTCLLVTDPRSQHTVRLPHKLPGMHYSANEQCQILFGMNATFCRNMEHLMCAGLWCLVEGDTSCKTKLDPPLDGTECGADKWCRAGECVSKTPIPEHVDGDWSPWGAWSMCSRTCGTGARFRQRKCDNPPPGPGGTHCPGASVEHAVCENLPCPKGLPSFRDQQCQAHDRLSPKKKGLLTAVVVDDKPCELYCSPLGKESPLLVADRVLDGTPCGPYETDLCVHGKCQKIGCDGIIGSAAKEDRCGVCSGDGKTCHLVKGDFSHARGTALKDSGKGSINSDWKIELPGEFQIAGTTVRYVRRGLWEKISAKGPTKLPLHLMVLLFHDQDYGIHYEYTVPVNRTAENQSEPEKPQDSLFIWTHSGWEGCSVQCGGGERRTIVSCTRIVNKTTTLVNDSDCPQASRPEPQVRRCNLHPCQSRWVAGPWSPCSATCEKGFQHREVTCVYQLQNGTHVATRPLYCPGPRPAAVQSCEGQDCLSIWEASEWSQCSASCGKGVWKRTVACTNSQGKCDASTRPRAEEACEDYSGCYEWKTGDWSTCSSTCGKGLQSRVVQCMHKVTGRHGSECPALSKPAPYRQCYQEVCNDRINANTITSPRLAALTYKCTRDQWTVYCRVIREKNLCQDMRWYQRCCQTCRDFYANKMRQPPPNS

SEQ ID NO: 321 - protein, 1227 aa, Homo sapiens
MGDTSEDASIHRLEGTDLDCQVGGLICKSKSAASEQHVFKAPAPRPSLLGLDLLASLKRREREEKDDGEDKKKSKVSSYKDWEESKDDQKDAEEEGGDQAGQNIRKDRHYRSARVETPSHPGGVSEEFWERSRQRERERREHGVYASSKEEKDWKKEKSRDRDYDRKRDRDERDRSRHSSRSERDGGSERSSRRNEPESPRHRPKDAATPSRSTWEEEDSGYGSSRRSQWESPSPTPSYRDSERSHRLSTRDRDRSVRGKYSDDTPLPTPSYKYNEWADDRRHLGSTPRLSRGRGRREEGEEGISFDTEEERQQWEDDQRQADRDWYMMDEGYDEFHNPLAYSSEDYVRRREQHLHKQKQKRISAQRRQINEDNERWETNRMLTSGVVHRLEVDEDFEEDNAAKVHLMVHNLVPPFLDGRIVFTKQPEPVIPVKDATSDLAIIARKGSQTVRKHREQKERKKAQHKHWELAGTKLGDIMGVKKEEEPDKAVTEDGKVDYRTEQKFADHMKRKSEASSEFAKKKSILEQRQYLPIFAVQQELLTIIRDNSIVIVVGETGSGKTTQLTQYLHEDGYTDYGMIGCTQPRRVAAMSVAKRVSEEMGGNLGEEVGYAIRFEDCTSENTLIKYMTDGILLRESLREADLDHYSAIIMDEAHERSLNTDVLFGLLREVVARRSDLKLIVTSATMDAEKFAAFFGNVPIFHIPGRTFPVDILFSKTPQEDYVEAAVKQSLQVHLSGAPGDILIFMPGQEDIEVTSDQIVEHLEELENAPALAVLPIYSQLPSDLQAKIFQKAPDGVRKCIVATNIAETSLTVDGIMFVIDSGYCKLKVFNPRIGMDALQIYPISQANANQRSGRAGRTGPGQCFRLYTQSAYKNELLTTTVPEIQRTNLANVVLLLKSLGVQDLLQFHFMDPPPEDNMLNSMYQLWILGALDNTGGLTSTGRLMVEFPLDPALSKMLIVSCDMGCSSEILLIVSMLSVPAIFYRPKGREEESDQIREKFAVPESDHLTYLNVYLQWKNNNYSTIWCNDHFIHAKAMRKVREVRAQLKDIMVQQRMSLASCGTDWDIVRKCICAAYFHQAAKLKGIGEYVNIRTGMPCHLHPTSSLFGMGYTPDYIVYHELVMTTKEYMQCVTAVDGEWLAELGPMFYSVKQAGKSRQENRRRAKEEASAMEEEMALAEEQLRARRQEQEKRSPLGSVRSTKIYTPGRKEQGEPMTPRRTPARFGL

SEQ ID NO: 322 - protein, 3703 aa, Homo sapiens
MEGCDSPVVSGKDNGCGIPQHQQWTELNSTHLPDKPSSMEQSTGESHGPLDSLRAPFNERLAESTASAGPPSEPASKEVTCNECSASFASLQTYMEHHCPSARPPPPLREESASDTGEEGDEESDVENLAGEIVYQPDGSAYIVESLSQLTQGGGACGSGSGSGPLPSLFLNSLPGAGGKQGDPSCAAPVYPQIINTFHIASSFGKWFEGPDQAFPNTSALAGLSPVLHSFRVFDVRHKSNKDYLNSDGSAKSSCVSKDVPNNVDLSKFDGFVLYGKRKPILMCFLCKLSFGYVRSFVTHAVHDHRMTLSEDERKILSNKNISAIIQGIGKDKEPLVSFLEPKNKNFQHPLVSTANLIGPGHSFYGKFSGIRMEGEEALPAGSAAGPEQPQAGLLTPSTLLNLGGLTSSVLKTPITSVPLGPLASSPTKSSEGKDSGAAEGEKQEVGDGDCFSEKVEPAEEEAEEEEEEEEAEEEEEEEEEEEEEEEDEGCKGLFPSELDEELEDRPHEEPGAAAGSSSKKDLALSNQSISNSPLMPNVLQTLSRGTASTSSNSASSFVVFDGANRRNRLSFNSEGVRANVAEGGRRLDFADESANKDNATAPEPNESTEGDDGGFVPHHQHAGSLCELGVGECPSGSGVECPKCDTVLGSSRSLGGHMTMMHSRNSCKTLKCPKCNWHYKYQQTLEAHMKEKHPEPGGSCVYCKSGQPHPRLARGESYTCGYKPFRCEVCNYSTTTKGNLSIHMQSDKHLNNMQNLQNGGGEQVFSHTAGAAAAAVAAAAAAANISSSCGAPSPTKPKTKPTWRCEVCDYETNVARNLRIHMTSEKHMHNMMLLQQNMTQIQHNRHLGLGSLPSPAEAELYQYYLAQNMNLPNLKMDSAASDAQFMMSGFQLDPAGPMAAMTPALVGGEIPLDMRLGGGQLVSEELMNLGESFIQTNDPSLKLFQCAVCNKFTTDNLDMLGLHMNVERSLSEDEWKAVMGDSYQCKLCRYNTQLKANFQLHCKTDKHVQKYQLVAHIKEGGKANEWRLKCVAIGNPVHLKCNACDYYTNSLEKLRLHTVNSRHEASLKLYKHLQQHESGVEGESCYYHCVLCNYSTKAKLNLIQHVRSMKHQRSESLRKLQRLQKGLPEEDEDLGQIFTIRRCPSTDPEEAIEDVEGPSETAADPEELAKDQEGGASSSQAEKELTDSPATSKRISFPGSSESPLSSKRPKTAEEIKPEQMYQCPYCKYSNADVNRLRVHAMTQHSVQPMLRCPLCQDMLNNKIHLQLHLTHLHSVAPDCVEKLIMTVTTPEMVMPSSMFLPAAVPDRDGNSNLEEAGKQPETSEDLGKNILPSASTEQSGDLKPSPADPGSVREDSGFICWKKGCNQVFKTSAALQTHFNEVHAKRPQLPVSDRHVYKYRCNQCSLAFKTIEKLQLHSQYHVIRAATMCCLCQRSFRTFQALKKHLETSHLELSEADIQQLYGGLLANGDLLAMGDPTLAEDHTIIVEEDKEEESDLEDKQSPTGSDSGSVQEDSGSEPKRALPFRKGPNFTMEKFLDPSRPYKCTVCKESFTQKNILLVHYNSVSHLHKLKRALQESATGQPEPTSSPDNKPFKCNTCNVAYSQSSTLEIHMRSVLHQTKARAAKLEAASGSSNGTGNSSSISLSSSTPSPVSTSGSNTFTTSNPSSAGIAPSSNLLSQVPTESVGMPPLGNPIGANIASPSEPKEANRKKLADMIASRQQQQQQQQQQQQQQQQQQQAQTLAQAQAQVQAHLQQELQQQAALIQSQLFNPTLLPHFPMTTETLLQLQQQQHLLFPFYIPSAEFQLNPEVSLPVTSGALTLTGTGPGLLEDLKAQVQVPQQSHQQILPQQQQNQLSIAQSHSALLQPSQHPEKKNKLVIKEKEKESQRERDSAEGGEGNTGPKETLPDALKAKEKKELAPGGGSEPSMLPPRIASDARGNATKALLENFGFELVIQYNENKQKVQKKNGKTDQGENLEKLECDSCGKLFSNILILKSHQEHVHQNYFPFKQLERFAKQYRDHYDKLYPLRPQTPEPPPPPPPPPPPPLPAAPPQPASTPAIPASAPPITSPTIAPAQPSVPLTQLSMPMELPIFSPLMMQTMPLQTLPAQLPPQLGPVEPLPADLAQLYQHQLNPTLLQQQNKRPRTRITDDQLRVLRQYFDINNSPSEEQIKEMADKSGLPQKVIKHWFRNTLFKERQRNKDSPYNFSNPPITSLEELKIDSRPPSPEPPKQEYWGSKRSSRTRFTDYQLRVLQDFFDANAYPKDDEFEQLSNLLNLPTRVIVVWFQNARQKARKNYENQGEGKDGERRELTNDRYIRTSNLNYQCKKCSLVFQRIFDLIKHQKKLCYKDEDEEGQDDSQNEDSMDAMEILTPTSSSCSTPMPSQAYSAPAPSANNTASSAFLQLTAEAEELATFNSKTEAGDEKPKLAEAPSAQPNQTQEKQGQPKPELQQQEQPEQKTNTPQQKLPQLVSLPSLPQPPPQAPPPQCPLPQSSPSPSQLSHLPLKPLHTSTPQQLANLPPQLIPYQCDQCKLAFPSFEHWQEHQQLHFLSAQNQFIHPQFLDRSLDMPFMLFDPSNPLLASQLLSGAIPQIPASSATSPSTPTSTMNTLKRKLEEKASASPGENDSGTGGEEPQRDKRLRTTITPEQLEILYQKYLLDSNPTRKMLDHIAHEVGLKKRVVQVWFQNTRARERKGQFRAVGPAQAHRRCPFCRALFKAKTALEAHIRSRHWHEAKRAGYNLTLSAMLLDCDGGLQMKGDIFDGTSFSHLPPSSSDGQGVPLSPVSKTMELSPRTLLSPSSIKVEGIEDFESPSMSSVNLNFDQTKLDNDDCSSVNTAITDTTTGDEGNADNDSATGIATETKSSSAPNEGLTKAAMMAMSEYEDRLSSGLVSPAPSFYSKEYDNEGTVDYSETSSLADPCSPSPGASGSAGKSGDSGDRPGQKRFRTQMTNLQLKVLKSCFNDYRTPTMLECEVLGNDIGLPKRVVQVWFQNARAKEKKSKLSMAKHFGINQTSYEGPKTECTLCGIKYSARLSVRDHIFSQQHISKVKDTIGSQLDKEKEYFDPATVRQLMAQQELDRIKKANEVLGLAAQQQGMFDNTPLQALNLPTAYPALQGIPPVLLPGLNSPSLPGFTPSNTALTSPKPNLMGLPSTTVPSPGLPTSGLPNKPSSASLSSPTPAQATMAMGPQQPPQQQQQQQQPQVQQPPPPPAAQPPPTPQLPLQQQQQRKDKDSEKVKEKEKAHKGKGEPLPVPKKEKGEAPTATAATISAPLPTMEYAVDPAQLQALQAALTSDPTALLTSQFLPYFVPGFSPYYAPQIPGALQSGYLQPMYGMEGLFPYSPALSQALMGLSPGSLLQQYQQYQQSLQEAIQQQQQRQLQQQQQQKVQQQQPKASQTPVPPGAPSPDKDPAKESPKPEEQKNTPREVSPLLPKLPEEPEAESKSADSLYDPFIVPKVQYKLVCRKCQAGFSDEEAARSHLKSLCFFGQSVVNLQEMVLHVPTGGGGGGSGGGGGGGGGGGGGGSYHCLACESALCGEEALSQHLESALHKHRTITRAARNAKEHPSLLPHSACFPDPSTASTSQSAAHSNDSPPPPSAAAPSSASPHASRKSWPQVVSRASAAKPPSFPPLSSSSTVTSSSCSTSGVQPSMPTDDYSEESDTDLSQKSDGPASPVEGPKDPSCPKDSGLTSVGTDTFRL

SEQ ID NO: 323 - protein, 949 aa, Homo sapiens
MASNHPAFSFHQKQVLRQELTQIQSSLNGGGGHGGKGAPGPGGALPTCPACHKITPRTEAPVSSVSNSLENALHTSAHSTEESLPKRPLGKHSKVSVEKIDLKGLSHTKNDRNVECSFEVLWSDSSITSVTKSSSEVTEFISKLCQLYPEENLEKLIPCLAGPDAFYVERNHVDLDSGLRYLASLPSHVLKNDHVRRFLSTSSPPQQLQSPSPGNPSLSKVGTVMGVSGRPVCGVAGIPSSQSGAQHHGQHPAGSAAPLPHCSHAGSAGSALAYRTQMDTSPAILMPSSLQTPQTQEQNGILDWLRKLRLHKYYPVFKQLSMEKFLSLTEEDLNKFESLTMGAKKKLKTQLELEKEKSERRCLNPSAPPLVTSSGVARVPPTSHVGPVQSGRGSHAAELRVEVEQPHHQLPREGSSSEYSSSSSSPMGVQAREESSDSAEENDRRVEIHLESSDKEKPVMLLNHFTSSSARPTAQVLPVQNEASSNPSGHHPLPPQMLSAASHITPIRMLNSVHKPERGSADMKLLSSSVHSLLSLEERNKGSGPRSSMKVDKSFGSAMMDVLPASAPHQPVQVLSGLSESSSMSPTVSFGPRTKVVHASTLDRVLKTAQQPALVVETSTAATGTPSTVLHAARPPIKLLLSSSVPADSAISGQTSCPNNVQISVPPAIINPRTALYTANTKVAFSAMSSMPVGPLQGGFCANSNTASPSSHPSTSFANMATLPSCPAPSSSPALSSVPESSFYSSSGGGGSTGNIPASNPNHHHHHHHQQPPAPPQPAPPPPGCIVCTSCGCSGSCGSSGLTVSYANYFQHPFSGPSVFTFPFLPFSPMCSSGYVSAQQYGGGSTFPVVHAPYSSSGTPDPVLSGQSTFAVPPMQNFMAGTAGVYQTQGLVGSSNGSSHKKSGNLSCYNCGATGHRAQDCKQPSMDFNRPGTFRLKYAPPAESLDSTD

SEQ ID NO: 324 - protein, 407 aa, Homo sapiens
MSHRKFSAPRHGHLGFLPHKRSHRHRGKVKTWPRDDPSQPVHLTAFLGYKAGMTHTLREVHRPGLKISKREEVEAVTIVETPPLVVVGVVGYVATPRGLRSFKTIFAEHLSDECRRRFYKDWHKSKKKAFTKACKRWRDTDGKKQLQKDFAAMKKYCKVIRVIVHTQMKLLPFRQKKAHIMEIQLNGGTVAEKVAWAQARLEKQVPVHSVFSQSEVIDVIAVTKGRGVKGVTSRWHTKKLPRKTHKGLRKVACIGAWHPARVGCSIARAGQKGYHHRTELNKKIFRIGRGPHMEDGKLVKNNASTSYDVTAKSITPLGGFPHYGEVNNDFVMLKGCIAGTKKRVITLRKSLLVHHSRQAVENIELKFIDTTSKFGHGRFQTAQEKRAFMGPQKKHLEKETPETSGDL

SEQ ID NO: 325 - protein, 633 aa, Homo sapiens
MSAGSERGAAATPGGLPAPCASKVELRLSCRHLLDRDPLTKSDPSVALLQQAQGQWVQVGRTEVVRSSLHPVFSKVFTVDYYFEEVQRLRFEVYDTHGPSGFSCQEDDFLGGMECTLGQPAQKWLLQVVMRVSVDVLGPAGHCAKHFLCCTESSHLARTGPSFLLRYDDLCLPWATAGAVRWWTCRGGHTQGWQIVAQKKVTRPLLLKFGRNAGKSTITVIAEDISGNNGYVELSFRARKLDDKDLFSKSDPFLELYRVNDDQGLQLVYRTEVVKNNLNPVWEAFKVSLSSLCSCEETRPLKCLVWDYDSRGKHDFIGEFSTTFEEMQKAFEEGQAQWDCVNPKYKQKRRSYKNSGVVVLADLKFHRVYSFLDYIMGGCQIHFTVAIDFTASNGDPRNSCSLHYINPYQPNEYLKALVSVGEICQDYDSDKRFSALGFGARIPPKYEVSHDFAINFNPEDDECEGIQGVVEAYQNCLPRVQLYGPTNVAPIISKVARVAAAEESTGKASQYYILLILTDGVVTDMADTREAIVRASRLPMSIIIVGVGNADFTDMQVLDGDDGVLRSPRGEPALRDIVQFVPFRELKNASPAALAKCVLAEVPKQVVEYYSHRGLPPRSLGVPAGEASPGCTP

SEQ ID NO: 326 - protein, 692 aa, Homo sapiens
MEKYERIRVVGRGAFGIVHLCLRKADQKLVIIKQIPVEQMTKEERQAAQNECQVLKLLNHPNVIEYYENFLEDKALMIAMEYAPGGTLAEFIQKRCNSLLEEETILHFFVQILLALHHVHTHLILHRDLKTQNILLDKHRMVVKIGDFGISKILSSKSKAYTVVGTPCYISPELCEGKPYNQKSDIWALGCVLYELASLKRAFEAANLPALVLKIMSGTFAPISDRYSPELRQLVLSLLSLEPAQRPPLSHIMAQPLCIRALLNLHTDVGSVRMRRAEKSVAPSNTGSRTTSVRCRGIPRGPVRPAIPPPLSSVYAWGGGLGTPLRLPMLNTEVVQVAAGRTQKAGVTRSGRLILWEAPPLGAGGGSLLPGAVEQPQPQFISRFLEGQSGVTIKHVACGDFFTACLTDRGIIMTFGSGSNGCLGHGSLTDISQPTIVEALLGYEMVQVACGASHVLALSTERELFAWGRGDSGRLGLGTRESHSCPQQVPMPPGQEAQRVVCGIDSSMILTVPGQALACGSNRFNKLGLDHLSLGEEPVPHQQVEEALSFTLLGSAPLDQEPLLSIDLGTAHSAAVTASGDCYTFGSNQHGQLGTNTRRGSRAPCKVQGLEGIKMAMVACGDAFTVAIGAESEVYSWGKGARGRLGRRDEDAGLPRPVQLDETHPYTVTSVSCCHGNTLLAVRSVTDEPVPP

SEQ ID NO: 327 - protein, 1797 aa, Homo sapiens
MEQLTTLPRPGDPGAMEPWALPTWHSWTPGRGGEPSSAAPSIADTPPAALQLQELRSEESSKPKGDGSSRPVGGTDPEGAEACLPSLGQQASSSGPACQRPEDEEVEAFLKAKLNMSFGDRPNLELLRALGELRQRCAILKEENQMLRKSSFPETEEKVRRLKRKNAELAVIAKRLEERARKLQETNLRVEGPQWLHVRDFDRLLRESQREVLRLQRQIALRNQRETLPLPPSWPPGPALQARAGAPAPGAPGEATPQEDADNLPVILGEPEKEQRVQQLESELSKKRKKCESLEQEARKKQRRCEELELQLRQAQNENARLVEENSRLSGRATEKEQVEWENAELRGQLLGVTQERDSALRKSQGLQSKLESLEQVLKHMREVAQRRQQLEVEHEQARLSLREKQEEVRRLQQAQAEAQREHEGAVQLLESTLDSMQARVRELEEQCRSQTEQFSLLAQELQAFRLHPGPLDLLTSALDCGSLGDCPPPPCCCSIPQPCRGSGPKDLDLPPGSPGRCTPKSSEPAPATLTGVPRRTAKKAESLSNSSHSESIHNSPKSCPTPEVDTASEVEELEADSVSLLPAAPEGSRGGARIQVFLARYSYNPFEGPNENPEAELPLTAGEYIYIYGNMDEDGFFEGELMDGRRGLVPSNFVERVSDDDLLTSLPPELADLSHSSGPELSFLSVGGGGSSSGGQSSVGRSQPRPEEEDAGDELSLSPSPEGLGEPPAVPYPRRLVVLKQLAHSVVLAWEPPPEQVELHGFHICVNGELRQALGPGAPPKAVLENLDLWAGPLHISVQALTSRGSSDPLRCCLAVGARAGVVPSQLRVHRLTATSAEITWVPGNSNLAHAIYLNGEECPPASPSTYWATFCHLRPGTPYQAQVEAQLPPQGPWEPGWERLEQRAATLQFTTLPAGPPDAPLDVQIEPGPSPGILIISWLPVTIDAAGTSNGVRVTGYAIYADGQKIMEVASPTAGSVLVELSQLQLLQVCREVVVRTMSPHGESADSIPAPITPALAPASLPARVSCPSPHPSPEARAPLASASPGPGDPSSPLQHPAPLGTQEPPGAPPASPSREMAKGSHEDPPAPCSQEEAGAAVLGTSEERTASTSTLGEKDPGPAAPSLAKQEAEWTAGEACPASSSTQGARAQQAPNTEMCQGGDPGSGLRPRAEKEDTAELGVHLVNSLVDHGRNSDLSDIQEEEEEEEEEEEEELGSRTCSFQKQVAGNSIRENGAKSQPDPFCETDSDEEILEQILELPLQQFCSKKLFSIPEEEEEEEEDEEEEKSGAGCSSRDPGPPEPALLGLGCDSGQPRRPGQCPLSPESSRAGDCLEDMPGLVGGSSRRRGGGSPEKPPSRRRPPDPREHCSRLLSNNGPQASGRLGPTRERGGLPVIEGPRTGLEASGRGRLGPSRRCSRGRALEPGLASCLSPKCLEISIEYDSEDEQEAGSGGISITSSCYPGDGEAWGTATVGRPRGPPKANSGPKPYPRLPAWEKGEPERRGRSATGRAKEPLSRATETGEARGQDGSGRRGPQKRGVRVLRPSTAELVPARSPSETLAYQHLPVRIFVALFDYDPVSMSPNPDAGEEELPFREGQILKVFGDKDADGFYQGEGGGRTGYIPCNMVAEVAVDSPAGRQQLLQRGYLSPDILLEGSGNGPFVYSTAHTTGPPPKPRRSKKAESEGPAQPCPGPPKLVPSADLKAPHSMVAAFDYNPQESSPNMDVEAELPFRAGDVITVFGGMDDDGFYYGELNGQRGLVPSNFLEGPGPEAGGLDREPRTPQAESQRTRRRRVQC

SEQ ID NO: 328 - protein, 1581 aa, Homo sapiens
MRKRKISVCQQTWALLCKNFLKKWRMKRESLMEWLNSLLLLLCLYIYPHSHQVNDFSSLLTMDLGRVDTFNESRFSVVYTPVTNTTQQIMNKVASTPFLAGKEVLGLPDEESIKEFTANYPEEIVRVTFTNTYSYHLKFLLGHGMPAKKEHKDHTAHCYETNEDVYCEVSVFWKEGFVALQAAINAAIIEITTNHSVMEELMSVTGKNMKMHSFIGQSGVITDLYLFSCIISFSSFIYYASVNVTRERKRMKALMTMMGLRDSAFWLSWGLLYAGFIFIMALFLALVIRSTQFIILSGFMVVFSLFLLYGLSLVALAFLMSILVKKSFLTGLVVFLLTVFWGCLGFTSLYRHLPASLEWILSLLSPFAFMLGMAQLLHLDYDLNSNAFPHPSDGSNLIVATNFMLAFDTCLYLALAIYFEKILPNEYGHRRPPLFFLKSSFWSQTQKTDHVALEDEMDADPSFHDSFEQAPPEFQGKEAIRIRNVTKEYKGKPDKIEALKDLVFDIYEGQITAILGHSGAGKSTLLNILSGLSVPTKGSVTIYNNKLSEMADLENLSKLTGVCPQSNVQFDFLTVRENLRLFAKIKGILPQEVDKEIFLLDEPTAGLDPFSRHQVWNLLKERKTDRVILFSTQFMDEADILADRKVFLSQGKLKCAGSSLFLKKKWGIGYHLSLQLNEICVEENITSLVKQHIPDAKLSAKSEGKLIYTLPLERTNKFPELYKDLDSYPDLGIENYGVSMTTLNEVFLKLEGKSTINESDIAILGEVQAEKADDTERLVEMEQVLSSLNKMRKTIGGVALWRQQICAIARVRLLKLKHERKALLALLLILMAGFCPLLVEYTMVKIYQNSYTWELSPHLYFLAPGQQPHDPLTQLLIINKTGASIDDFIQSVEHQNIALEVDAFGTRNGTDDPSYNGAITVCCNEKNYSFSLACNAKRLNCFPVLMDIVSNGLLGMVKPSVHIRTERSTFLENGQDNPIGFLAYIMFWLVLTSSCPPYIAMSSIDDYKNRARSQLRISGLSPSAYWFGQALVDVSLYFLVFVFIYLMSYISNFEDMLLTIIHIIQIPCAVGYSFSLIFMTYVISFIFRKGRKNSGIWSFCFYVVTVFSVAGFAFSIFESDIPFIFTFLIPPATMIGCLFLSSHLLFSSLFSEERMDVQPFLVFLIPFLHFIIFLFTLRCLEWKFGKKSMRKDPFFRISPRSSDVCQNPEEPEGEDEDVQMERVRTANALNSTNFDEKPVIIASCLRKEYAGKRKGCFSKRKNKIATRNVSFCVRKGEVLGLLGHNGAGKSTSIKVITGDTKPTAGQVLLKGSGGGDALEFLGYCPQENALWPNLTVRQHLEVYAAVKGLRKGDAEVAITRLVDALKLQDQLKSPVKTLSEGIKRKLCFVLSILGNPSVVLLDEPSTGMDPEGQQQMWQAIRATFRNTERGALLTTHYMAEAEAVCDRVAIMVSGRLRCIGSIQHLKSKFGKDYLLEMKVKNLAQVEPLHAEILRLFPQAARQERYSSLMVYKLPVEDVQPLAQAFFKLEKVKQSFDLEEYSLSQSTLEQVFLELSKEQELGDFEEDFDPSVKWKLLPQEEP

SEQ ID NO: 329 - protein, 1543 aa, Homo sapiens
MNKMALASFMKGRTVIGTPDEETMDIELPKKYHEMVGVIFSDTFSYRLKFNWGYRIPVIKEHSEYTEHCWAMHGEIFCYLAKYWLKGFVAFQAAINAAIIEVTTNHSVMEELTSVIGINMKIPPFISKGEIMNEWFHFTCLVSFSSFIYFASLNVARERGKFKKLMTVMGLRESAFWLSWGLTYICFIFIMSIFMALVITSIPIVFHTGFMVIFTLYSLYGLSLIALAFLMSVLIRKPMLAGLAGFLFTVFWGCLGFTVLYRQLPLSLGWVLSLLSPFAFTAGMAQITHLDNYLSGVIFPDPSGDSYKMIATFFILAFDTLFYLIFTLYFERVLPDKDGHGDSPLFFLKSSFWSKHQNTHHEIFENEINPEHSSDDSFEPVSPEFHGKEAIRIRNVIKEYNGKTGKVEALQGIFFDIYEGQITAILGHNGAGKSTLLNILSGLSVSTEGSATIYNTQLSEITDMEEIRKNIGFCPQFNFQFDFLTVRENLRVFAKIKGIQPKEVEQEVKRIIMELDMQSIQDIIAKKLSGGQKRKLTLGIAILGDPQVLLLDEPTAGLDPFSRHRVWSLLKEHKVDRLILFSTQFMDEADILADRKVFLSNGKLKCAGSSLFLKRKWGIGYHLSLHRNEMCDTEKITSLIKQHIPDAKLTTESEEKLVYSLPLEKTNKFPDLYSDLDKCSDQGIRNYAVSVTSLNEVFLNLEGKSAIDEPDFDIGKQEKIHVTRNTGDESEMEQVLCSLPETRKAVSSAALWRRQIYAVATLRFLKLRRERRALLCLLLVLGIAFIPIILEKIMYKVTRETHCWEFSPSMYFLSLEQIPKTPLTSLLIVNNTGSNIEDLVHSLKCQDIVLEIDDFRNRNGSDDPSYNGAIIVSGDQKDYRFSVACNTKKLNCFPVLMGIVSNALMGIFNFTELIQMESTSFSRDDIVLDLGFIDGSIFLLLITNCVSPFIGMSSISDYKKNVQSQLWISGLWPSAYWCGQALVDIPLYFLILFSIHLIYYFIFLGFQLSWELMFVLVVCIIGCAVSLIFLTYVLSFIFRKWRKNNGFWSFGFFIILICVSTIMVSTQYEKLNLILCMIFIPSFTLLGYVMLLIQLDFMRNLDSLDNRINEVNKTILLTTLIPYLQSVIFLFVIRCLEMKYGNEIMNKDPVFRISPRSRETHPNPEEPEEEDEDVQAERVQAANALTAPNLEEEPVITASCLHKEYYETKKSCFSTRKKKIAIRNVSFCVKKGEVLGLLGHNGAGKSTSIKMITGCTKPTAGVVVLQGSRASVRQQHDNSLKFLGYCPQENSLWPKLTMKEHLELYAAVKGLGKEDAALSISRLVEALKLQEQLKAPVKTLSEGIKRKLCFVLSILGNPSVVLLDEPFTGMDPEGQQQMWQILQATVKNKERGTLLTTHYMSEAEAVCDRMAMMVSGTLRCIGSIQHLKNKFGRDYLLEIKMKEPTQVEALHTEILKLFPQAAWQERYSSLMAYKLPVEDVHPLSRAFFKLEAMKQTFNLEEYSLSQATLEQVFLELCKEQELGNVDDKIDTTVEWKLLPQEDP

SEQ ID NO: 330 - protein, 110 aa, Homo sapiens
MVKKFKDSKSVLLITCKTCNRTVKHHGKSRSFVSTLKSNPATPTSKLSLKTPERRTANPNHDMSGSKGKSPASVFRTPTSGQSVSTCSSKNTSKTKKHFSQLKMLLSQNE

SEQ ID NO: 331 - protein, 1278 aa, Homo sapiens
MTARGLALGLLLLLLCPAQVFSQSCVWYGECGIAYGDKRYNCEYSGPPKPLPKDGYDLVQELCPGFFFGNVSLCCDVRQLQTLKDNLQLPLQFLSRCPSCFYNLLNLFCELTCSPRQSQFLNVTATEDYVDPVTNQTKTNVKELQYYVGQSFANAMYNACRDVEAPSSNDKALGLLCGKDADACNATNWIEYMFNKDNGQAPFTITPVFSDFPVHGMEPMNNATKGCDESVDEVTAPCSCQDCSIVCGPKPQPPPPPAPWTILGLDAMYVIMWITYMAFLLVFFGAFFAVWCYRKRYFVSEYTPIDSNIAFSVNASDKGEASCCDPVSAAFEGCLRRLFTRWGSFCVRNPGCVIFFSLVFITACSSGLVFVRVTTNPVDLWSAPSSQARLEKEYFDQHFGPFFRTEQLIIRAPLTDKHIYQPYPSGADVPFGPPLDIQILHQVLDLQIAIENITASYDNETVTLQDICLAPLSPYNTNCTILSVLNYFQNSHSVLDHKKGDDFFVYADYHTHFLYCVRAPASLNDTSLLHDPCLGTFGGPVFPWLVLGGYDDQNYNNATALVITFPVNNYYNDTEKLQRAQAWEKEFINFVKNYKNPNLTISFTAERSIEDELNRESDSDVFTVVISYAIMFLYISLALGHMKSCRRLLVDSKVSLGIAGILIVLSSVACSLGVFSYIGLPLTLIVIEVIPFLVLAVGVDNIFILVQAYQRDERLQGETLDQQLGRVLGEVAPSMFLSSFSETVAFFLGALSVMPAVHTFSLFAGLAVFIDFLLQITCFVSLLGLDIKRQEKNRLDIFCCVRGAEDGTSVQASESCLFRFFKNSYSPLLLKDWMRPIVIAIFVGVLSFSIAVLNKVDIGLDQSLSMPDDSYMVDYFKSISQYLHAGPPVYFVLEEGHDYTSSKGQNMVCGGMGCNNDSLVQQIFNAAQLDNYTRIGFAPSSWIDDYFDWVKPQSSCCRVDNITDQFCNASVVDPACVRCRPLTPEGKQRPQGGDFMRFLPMFLSDNPNPKCGKGGHAAYSSAVNILLGHGTRVGATYFMTYHTVLQTSADFIDALKKARLIASNVTETMGINGSAYRVFPYSVFYVFYEQYLTIIDDTIFNLGVSLGAIFLVTMVLLGCELWSAVIMCATIAMVLVNMFGVMWLWGISLNAVSLVNLVMSCGISVEFCSHITRAFTVSMKGSRVERAEEALAHMGSSVFSGITLTKFGGIVVLAFAKSQIFQIFYFRMYLAMVLLGATHGLIFLPVLLSYIGPSVNKAKSCATEERYKGTERERLLNF

SEQ ID NO: 332 - protein, 291 aa, Homo sapiens
MTKEYQDLQHLDNEESDHHQLRKGPPPPQPLLQRLCSGPRLLLLSLGLSLLLLVVVCVIGSQNSQLQEELRGLRETFSNFTASTEAQVKGLSTQGGNVGRKMKSLESQLEKQQKDLSEDHSSLLLHVKQFVSDLRSLSCQMAALQGNGSERTCCPVNWVEHERSCYWFSRSGKAWADADNYCRLEDAHLVVVTSWEEQKFVQHHIGPVNTWMGLHDQNGPWKWVDGTDYETGFKNWRPEQPDDWYGHGLGGGEDCAHFTDDGRWNDDVCQRPYRWVCETELDKASQEPPLL

SEQ ID NO: 333 - protein, 393 aa, Homo sapiens [sequence omitted]

SEQ ID NO: 334 - protein, 517 aa, Homo sapiens
MAAQLLEEKLTCAICLGLYQDPVTLPCGHNFCGACIRDWWDRCGKACPECREPFPDGAELRRNVALSGVLEVVRAGPARDPGPDPGPGPDPAARCPRHGRPLELFCRTEGRCVCSVCTVRECRLHERALLDAERLKREAQLRASLEVTQQQATQAEGQLLELRKQSSQIQNSACILASWVSGKFSSLLQALEIQHTTALRSIEVAKTQALAQARDEEQRLRVHLEAVARHGCRIRELLEQVDEQTFLQESQLLQPPGPLGPLTPLQWDEDQQLGDLKQLLSRLCGLLLEEGSHPGAPAKPVDLAPVEAPGPLAPVPSTVCPLRRKLWQNYRNLTFDPVSANRHFYLSRQDQQVKHCRQSRGPGGPGSFELWQVQCAQSFQAGHHYWEVRASDHSVTLGVSYPQLPRCRLGPHTDNIGRGPCSWGLCVQEDSLQAWHNGEAQRLPGVSGRLLGMDLDLASGCLTFYSLEPQTQPLYTFHALFNQPLTPVFWLLEGRTLTLCHQPGAVFPLGPQEEVLS

SEQ ID NO: 335 - protein, 389 aa, Homo sapiens
MELSAVGERVFAAEALLKRRIRKGRMEYLVKWKGWSQKYSTWEPEENILDARLLAAFEEREREMELYGPKKRGPKPKTFLLKAQAKAKAKTYEFRSDSARGIRIPYPGRSPQDLASTSRAREGLRNMGLSPPASSTSTSSTCRAEAPRDRDRDRDRDRERDRERERERERERERERERERGTSRVDDKPSSPGDSSKKRGPKPRKELPDPSQRPLGEPSAGLGEYLKGRKLDDTPSGAGKFPAGHSVIQLARRQDSDLVQCGVTSPSSAEATGKLAVDTFPARVIKHRAAFLEAKGQGALDPNGTRVRHGSGPPSSGGGLYRDMGAQGGRPSLIARIPVARILGDPEEESWSPSLTNLEKVVVTDVTSNFLTVTIKESNTDQGFFKEKR

SEQ ID NO: 336 - protein, 179 aa, Homo sapiens
MGQLIAKLMSIFGNQEHTVIIVGLDNEGKTTILYRFLTNEVVHMCPTIGSNVEEIILPKTHFFMWDIVRPEALSFIWNTYYSNTEFIILVIDSTDRDRLLTTREELYKMLAHEALQDASVLIFANKQDVKDSMRMVEISHFLTLSTIKDHSWHIQGCCALTREGLPARLQWMESQAAAN

SEQ ID NO: 337 - protein, 516 aa, Homo sapiens
MDAMKRGLCCVLLLCGAVFVSPSQEIHARFRRGARSYQGCSEPRCFNGGTCQQALYFSDFVCQCPEGFAGKCCEIDTRATCYEDQGISYRGTWSTAESGAECTNWNSSALAQKPYSGRRPDAIRLGLGNHNYCRNPDRDSKPWCYVFKAGKYSSEFCSTPACSEGNSDCYFGNGSAYRGTHSLTESGASCLPWNSMILIGKVYTAQNPSAQALGLGKHNYCRNPDGDAKPWCHVLKNRRLTWEYCDVPSCSTCGLRQYSQPQFRIKGGLFADIASHPWQAAIFAKHRRSPGERFLCGGILISSCWILSAAHCFQERFPPHHLTVILGRTYRVVPGEEEQKFEVEKYIVHKEFDDDTYDNDIALLQLKSDSSRCAQESSVVRTVCLPPADLQLPDWTECELSGYGKHEALSPFYSERLKEAHVRLYPSSRCTSQHLLNRTVTDNMLCAGDTRSGGPQANLHDACQGDSGGPLVCLNDGRMTLVGIISWGLGCGQKDVPGVYTKVTNYLDWIRDNMRP

SEQ ID NO: 338 - protein, 628 aa, Homo sapiens
MEPPDAPAQARGAPRLLLLAVLLAAHPDAQAEVRLSVPPLVEVMRGKSVILDCTPTGTHDHYMLEWFLTDRSGARPRLASAEMQGSELQVTMHDTRGRSPPYQLDSQGRLVLAEAQVGDERDYVCVVRAGAAGTAEATARLNVFAKPEATEVSPNKGTLSVMEDSAQEIATCNSRNGNPAPKITWYRNGQRLEVPVEMNPEGYMTSRTVREASGLLSLTSTLYLRLRKDDRDASFHCAAHYSLPEGRHGRLDSPTFHLTLHYPTEHVQFWVGSPSTPAGWVREGDTVQLLCRGDGSPSPEYTLFRLQDEQEEVLNVNLEGNLTLEGVTRGQSGTYGCRVEDYDAADDVQLSKTLELRVAYLDPLELSEGKVLSLPLNSSAVVNCSVHGLPTPALRWTKDSTPLGDGPMLSLSSITFDSNGTYVCEASLPTVPVLSRTQNFTLLVQGSPELKTAEIEPKADGSWREGDEVTLICSARGHPDPKLSWSQLGGSPAEPIPGRQGWVSSSLTLKVTSALSRDGISCEASNPHGNKRHVFHFGTVSPQTSQAGVAVMAVAVSVGLLLLVVAVFYCVRRKGGPCCRQRREKGAPPPGEPGLSHSGSEQPEQTGLLMGGASGGARGGSGGFGDEC

SEQ ID NO: 339 - protein, 1103 aa, Homo sapiens
MAPACQILRWALALGLGLMFEVTHAFRSQDEFLSSLESYEIAFPTRVDHNGALLAFSPPPPRRQRRGTGATAESRLFYKVASPSTHFLLNLTRSSRLLAGHVSVEYWTREGLAWQRAARPHCLYAGHLQGQASSSHVAISTCGGLHGLIVADEEEYLIEPLHGGPKGSRSPEESGPHVVYKRSSLRHPHLDTACGVRDEKPWKGRPWWLRTLKPPPARPLGNETERGQPGLKRSVSRERYVETLVVADKMMVAYHGRRDVEQYVLAIMNIVAKLFQDSSLGSTVNILVTRLILLTEDQPTLEITHHAGKSLDSFCKWQKSIVNHSGHGNAIPENGVANHDTAVLITRYDICIYKNKPCGTLGLAPVGGMCERERSCSVNEDIGLATAFTIAHEIGHTFGMNHDGVGNSCGARGQDPAKLMAAHITMKTNPFVWSSCSRDYITSFLDSGLGLCLNNRPPRQDFVYPTVAPGQAYDADEQCRFQHGVKSRQCKYGEVCSELWCLSKSNRCITNSIPAAEGTLCQTHTIDKGWCYKRVCVPFGSRPEGVDGAWGPWTPWGDCSRTCGGGVSSSSRHCDSPRPTIGGKYCLGERRRHRSCNTDDCPPGSQDFREVQCSEFDSIPFRGKFYKWKTYRGGGVKACSLTCLAEGFNFYTERAAAVVDGTPCRPDTVDICVSGECKHVGCDRVLGSDLREDKCRVCGGDGSACETIEGVFSPASPGAGYEDVVWIPKGSVHIFIQDLNLSLSHLALKGDQESLLLEGLPGTPQPHRLPLAGTTFQLRQGPDQVQSLEALGPINASLIVMVLARTELPALRYRFNAPIARDSLPPYSWHYAPWTKCSAQCAGGSQVQAVECRNQLDSSAVAPHYCSAHSKLPKRQRACNTEPCPPDWVVGNWSLCSRSCDAGVRSRSVVCQRRVSAAEEKALDDSACPQPRPPVLEACHGPTCPPEWAALDWSECTPSCGPGLRHRVVLCKSADHRATLPPAHCSPAAKPPATMRCNLRRCPPARWVAGEWGECSAQCGVGQRQRSVRCTSHTGQASHECTEALRPPTTQQCEAKCDSPTPGDGPEECKDVNKVAYCPLVLKFQFCSRAYFRQMCCKTCHGH

SEQ ID NO: 340 - protein, 1276 aa, Homo sapiens
MRSKARARKLAKSDGDVVNNMYEPNRDLLASHSAEDEAEDSAMSPIPVGPPSPFPTSEDFTPKEGSPYEAPVYIPEDIPIPADFELRESSIPGAGLGVWAKRKMEAGERLGPCVVVPRAAAKETDFGWEQILTDVEVSPQEGCITKISEDLGSEKFCVDANQAGAGSWLKYIRVACSCDDQNLTMCQISEQIYYKVIKDIEPGEELLVHVKEGVYPLGTVPPGLDEEPTFRCDECDELFQSKLDLRRHKKYTCGSVGAALYEGLAEELKPEGLGGGSGQAHECKDCERMFPNKYSLEQHMVIHTEEREYKCDQCPKAFNWKSNLIRHQMSHDSGKRFECENCVKVFTDPSNLQRHIRSQHVGARAHACPDCGKTFATSSGLKQHKHIHSTVKPFICEVCHKSYTQFSNLCRHKRMHADCRTQIKCKDCGQMFSTTSSLNKHRRFCEGKNHYTPGGIFAPGLPLTPSPMMDKAKPSPSLNHASLGFNEYFPSRPHPGSLPFSTAPPTFPALTPGFPGIFPPSLYPRPPLLPPTSLLKSPLNHTQDAKLPSPLGNPALPLVSAVSNSSQGTTAAAGPEEKFESRLEDSCVEKLKTRSSDMSDGSDFEDVNTTTGTDLDTTTGTGSDLDSDVDSDPDKDKGKGKSAEGQPKFGGGLAPPGAPNSVAEVPVFYSQHSFFPPPDEQLLTATGAAGDSIKAIASIAEKYFGPGFMGMQEKKLGSLPYHSAFPFQFLPNFPHSLYPFTDRALAHNLLVKAEPKSPRDALKVGGPSAECPFDLTTKPKDVKPILPMPKGPSAPASGEEQPLDLSIGSRARASQNGGGREPRKNHVYGERKLGAGEGLPQVCPARMPQQPPLHYAKPSPFFMDPIYSRVEKRKVTDPVGALKEKYLRPSPLLFHPQMSAIETMTEKLESFAAMKADSGSSLQPLPHHPFNFRSPPPTLSDPILRKGKERYTCRYCGKIFPRSANLTRHLRTHTGEQPYRCKYCDRSFSISSNLQRHVRNIHNKEKPFKCHLCNRCFGQQTNLDRHLKKHEHENAPVSQHPGVLTNHLGTSASSPTSESDNHALLDEKEDSYFSEIRNFIANSEMNQASTRTEKRADMQIVDGSAQCPGLASEKQEDVEEEDDDDLEEDDEDSLAGKSQDDTVSPAPEPQAAYEDEEDEEPAASLAVGFDHTRRCAEDHEGGLLALEPMPTFGKGLDLRRAAEEAFEVKDVLNSTLDSEALKHTLCRQAKNQAYAMMLSLSEDTPLHTPSQGSLDAWLKVTGATSESGAFHPINHL

SEQ ID NO: 341 - protein, 802 aa, Homo sapiens
MDCGPPATLQPHLTGPPGTAHHPVAVCQQESLSFAELPALKPPSPVCLDLFPVAPEELRAPGSRWSLGTPAPLQGLLWPLSPGGSDTEITSGGMRPSRAGSWPHCPGAQPPALEGPWSPRHTQPQRRASHGSEKKSAWRKMRVYQREEVPGCPEAHAVFLEPGQVVQEQALSTEEPRVELSGSTRVSLEGPERRRFSASELMTRLHSSLRLGRNSAARALISGSGTGAAREGKASGMEARSVEMSGDRVSRPAPGDSREGDWSEPRLDTQEEPPLGSRSTNERRQSRFLLNSVLYQEYSDVASARELRRQQREEEGPGDEAEGAEEGPGPPRANLSPSSSFRAQRSARGSTFSLWQDIPDVRGSGVLATLSLRDCKLQEAKFELITSEASYIHSLSVAVGHFLGSAELSECLGAQDKQWLFSKLPEVKSTSERFLQDLEQRLEADVLRFSVCDVVLDHCPAFRRVYLPYVTNQAYQERTYQRLLLENPRFPGILARLEESPVCQRLPLTSFLILPFQRITRLKMLVENILKRTAQGSEDEDMATKAFNALKELVQECNASVQSMKRTEELIHLSKKIHFEGKIFPLISQARWLVRHGELVELAPLPAAPPAKLKLSSKAVYLHLFNDCLLLSRRKELGKFAVFVHAKMAELQVRDLSLKLQGIPGHVFLLQLLHGQHMKHQFLLRARTESEKQRWISALCPSSPQEDKEVISEGEDCPQVQCVRTYKALHPDELTLEKTDILSVRTWTSDGWLEGVRLADGEKGWVPQAYVEEISSLSARLRNLRENKRVTSATSKLGEAPV

SEQ ID NO: 342 - protein, 268 aa, Homo sapiens
MKRRNLFALETGVPPWGLLWVRSRRVGMDEMTFHIWYPQVRAPGQQPQAQLAMALCLKQVFAKDKTFRPRKRFEPGTQRFELYKKAQASLKSGLDLRSVVRLPPGENIDDWIAVHVVDFFNRINLIYGTMAERCSETSCPVMAGGPRYEYRWQDERQYRRPAKLSAPRYMALLMDWIEGLINDEEVFPTRVGVPFPKNFQQVCTKILTRLFRVFVHVYIHHFDSILSMGAEAHVNTCYKHFYYFIREFSLVDQRELEPLREMTERICH

SEQ ID NO: 343 - protein, 2923 aa, Homo sapiens
MRSPATGVPLPTPPPPLLLLLLLLLPPPLLGDQVGPCRSLGSRGRGSSGACAPMGWLCPSSASNLWLYTSRCRDAGTELTGHLVPHHDGLRVWCPESEAHIPLPPAPEGCPWSCRLLGIGGHLSPQGKLTLPEEHPCLKAPRLRCQSCKLAQAPGLRAGERSPEESLGGRRKRNVNTAPQFQPPSYQATVPENQPAGTPVASLRAIDPDEGEAGRLEYTMDALFDSRSNQFFSLDPVTGAVTTAEELDRETKSTHVFRVTAQDHGMPRRSALATLTILVTDTNDHDPVFEQQEYKESLRENLEVGYEVLTVRATDGDAPPNANILYRLLEGSGGSPSEVFEIDPRSGVIRTRGPVDREEVESYQLTVEASDQGRDPGPRSTTAAVFLSVEDDNDNAPQFSEKRYVVQVREDVTPGAPVLRVTASDRDKGSNAVVHYSIMSGNARGQFYLDAQTGALDVVSPLDYETTKEYTLRVRAQDGGRPPLSNVSGLVTVQVLDINDNAPIFVSTPFQATVLESVPLGYLVLHVQAIDADAGDNARLEYRLAGVGHDFPFTINNGTGWISVAAELDREEVDFYSFGVEARDHGTPALTASASVSVTVLDVNDNNPTFTQPEYTVRLNEDAAVGTSVVTVSAVDRDAHSVITYQITSGNTRNRFSITSQSGGGLVSLALPLDYKLERQYVLAVTASDGTRQDTAQIVVNVTDANTHRPVFQSSHYTVNVNEDRPAGTTVVLISATDEDTGENARITYFMEDSIPQFRIDADTGAVTTQAELDYEDQVSYTLAITARDNGIPQKSDTTYLEILVNDVNDNAPQFLRDSYQGSVYEDVPPFTSVLQISATDRDSGLNGRVFYTFQGGDDGDGDFIVESTSGIVRTLRRLDRENVAQYVLRAYAVDKGMPPARTPMEVTVTVLDVNDNPPVFEQDEFDVFVEENSPIGLAVARVTATDPDEGTNAQIMYQIVEGNIPEVFQLDIFSGELTALVDLDYEDRPEYVLVIQATSAPLVSRATVHVRLLDRNDNPPVLGNFEILFNNYVTNRSSSFPGGAIGRVPAHDPDISDSLTYSFERGNELSLVLLNASTGELKLSRALDNNRPLEAIMSVLVSDGVHSVTAQCALRVTIITDEMLTHSITLRLEDMSPERFLSPLLGLFIQAVAATLATPPDHVVVFNVQRDTDAPGGHILNVSLSVGQPPGPGGGPPFLPSEDLQERLYLNRSLLTAISAQRVLPFDDNICLREPCENYMRCVSVLRFDSSAPFIASSSVLFRPIHPVGGLRCRCPPGFTGDYCETEVDLCYSRPCGPHGRCRSREGGYTCLCRDGYTGEHCEVSARSGRCTPGVCKNGGTCVNLLVGGFKCDCPSGDFEKPYCQVTTRSFPAHSFITFRGLRQRFHFTLALSFATKERDGLLLYNGRFNEKHDFVALEVIQEQVQLTFSAGESTTTVSPFVPGGVSDGQWHTVQLKYYNKPLLGQTGLPQGPSEQKVAVVTVDGCDTGVALRFGSVLGNYSCAAQGTQGGSKKSLDLTGPLLLGGVPDLPESFPVRMRQFVGCMRNLQVDSRHIDMADFIANNGTVPGCPAKKNVCDSNTCHNGGTCVNQWDAFSCECPLGFGGKSCAQEMANPQHFLGSSLVAWHGLSLPISQPWYLSLMFRTRQADGVLLQAITRGRSTITLQLREGHVMLSVEGTGLQASSLRLEPGRANDGDWHHAQLALGASGGPGHAILSFDYGQQRAEGNLGPRLHGLHLSNITVGGIPGPAGGVARGFRGCLQGVRVSDTPEGVNSLDPSHGESINVEQGCSLPDPCDSNPCPANSYCSNDWDSYSCSCDPGYYGDNCTNVCDLNPCEHQSVCTRKPSAPHGYTCECPPNYLGPYCETRIDQPCPRGWWGHPTCGPCNCDVSKGFDPDCNKTSGECHCKENHYRPPGSPTCLLCDCYPTGSLSRVCDPEDGQCPCKPGVIGRQCDRCDNPFAEVTTNGCEVNYDSCPRAIEAGIWWPRTRFGLPAAAPCPKGSFGTAVRHCDEHRGWLPPNLFNCTSITFSELKGFAERLQRNESGLDSGRSQQLALLLRNATQHTAGYFGSDVKVAYQLATRLLAHESTQRGFGLSATQDVHFTENLLRVGSALLDTANKRHWELIQQTEGGTAWLLQHYEAYASALAQNMRHTYLSPFTIVTPNIVISVVRLDKGNFAGAKLPRYEALRGEQPPDLETTVILPESVFRETPPVVRPAGPGEAQEPEELARRQRRHPELSQGEAVASVIIYRTLAGLLPHNYDPDKRSLRVPKRPIINTPVVSISVHDDEELLPRALDKPVTVQFRLLETEERTKPICVFWNHSILVSGTGGWSARGCEVVFRNESHVSCQCNHMTSFAVLMDVSRRENGEILPLKTLTYVALGVTLAALLLTFFFLTLLRILRSNQHGIRRNLTAALGLAQLVFLLGINQADLPFACTVIAILLHFLYLCTFSWALLEALHLYRALTEVRDVNTGPMRFYYMLGWGVPAFITGLAVGLDPEGYGNPDFCWLSIYDTLIWSFAGPVAFAVSMSVFLYILAARASCAAQRQGFEKKGPVSGLQPSFAVLLLLSATWLLALLSVNSDTLLFHYLFATCNCIQGPFIFLSYVVLSKEVRKALKLACSRKPSPDPALTTKSTLTSSYNCPSPYADGRLYQPYGDSAGSLHSTSRSGKSQPSYIPFLLREESALNPGQGPPGLGDPGSLFLEGQDQQHDPDTDSDSDLSLEDDQSGSYASTHSSDSEEEEEEEEEEAAFPGEQGWDSLLGPGAERLPLHSTPKDGGPGPGKAPWPGDFGTTAKESSGNGAPEERLRENGDALSREGSLGPLPGSSAQPHKGILKKKCLPTISEKSSLLRLPLEQCTGSSRGSSASEGSRGGPPPRPPPRQSLQEQLNGVMPIAMSIKAGTVDEDSSGSEFLFFNFLH

SEQ ID NO: 344 - protein, 317 aa, Homo sapiens
MTMETQMSQNVCPRNLWLLQPLTVLLLLASADSQAAAPPKAVLKLEPPWINVLQEDSVTLTCQGARSPESDSIQWFHNGNLIPTHTQPSYRFKANNNDSGEYTCQTGQTSLSDPVHLTVLSEWLVLQTPHLEFQEGETIMLRCHSWKDKPLVKVTFFQNGKSQKFSHLDPTFSIPQANHSHSGDYHCTGNIGYTLFSSKPVTITVQVPSMGSSSPMGIIVAVVIATAVAAIVAAVVALIYCRKKRISANSTDPVKAAQFEPPGRQMIAIRKRQLEETNNDYETADGGYMTLNPRAPTDDDKNIYLTLPPNDHVNSNN

SEQ ID NO: 345 - protein, 521 aa, Homo sapiens
MGRKKIQIQRITDERNRQVTFTKRKFGLMKKAYELSVLCDCEIALIIFNHSNKLFQYASTDMDKVLLKYTEYNEPHESRTNADIIETLRKKGFNGCDSPEPDGEDSLEQSPLLEDKYRRASEELDGLFRRYGSTVPAPNFAMPVTVPVSNQSSLQFSNPSGSLVTPSLVTSSLTDPRLLSPQQPALQRNSVSPGLPQRPASAGAMLGGDLNSANGACPSPVGNGYVSARASPGLLPVANGNSLNKVIPAKSPPPPTHSTQLGAPSRKPDLRVITSQAGKGLMHHLTEDHLDLNNAQRLGVSQSTHSLTTPVVSVATPSLLSQGLPFSSMPTAYNTDYQLTSAELSSLPAFSSPGGLSLGNVTAWQQPQQPQQPQQPQPPQQQPPQPQQPQPQQPQQPQQPPQQQSHLVPVSLSNLIPGSPLPHVGAALTVTTHPHISIKSEPVSPSRERSPAPPPPAVFPAARPEPGDGLSSPAGGSYETGDRDDGRGDFGPTLGLLRPAPEPEAEGSAVKRMRLDTWTLK

SEQ ID NO: 346 - protein, 380 aa, Homo sapiens
MLQTLYDYFWWERLWLPVNLTWADLEDRDGRVYAKASDLYITLPLALLFLIVRYFFELYVATPLAALLNIKEKTRLRAPPNATLEHFYLTSGKQPKQVEVELLSRQSGLSGRQVERWFRRRRNQDRPSLLKKFREASWRFTFYLIAFIAGMAVIVDKPWFYDMKKVWEGYPIQSTIPSQYWYYMIELSFYWSLLFSIASDVKRKDFKEQIIHHVATIILISFSWFANYIRAGTLIMALHDSSDYLLESAKMFNYAGWKNTCNNIFIVFAIVFIITRLVILPFWILHCTLVYPLELYPAFFGYYFFNSMMGVLQLLHIFWAYLILRMAHKFITGKLVEDERSDREETESSEGEEAAAGGGAKSRPLANGHPILNNNHRKND

SEQ ID NO: 347 - protein, 946 aa, Homo sapiens
MAVYCYALNSLVIMNSANEMKSGGGPGPSGSETPPPPRRAVLSPGSVFSPGRGASFLFPPAESLSPEEPRSPGGWRSGRRRLNSSSGSGSGSSGSSVSSPSWAGRLRGDRQQVVAAGTLSPPGPEEAKRKLRILQRELQNVQVNQKVGMFEAHIQAQSSAIQAPRSPRLGRARSPSPCPFRSSSQPPGRVLVQGARSEERRTKSWGEQCPETSGTDSGRKGGPSLCSSQVKKGMPPLPGRAAPTGSEAQGPSAFVRMEKGIPASPRCGSPTAMEIDKRGSPTPGTRSCLAPSLGLFGASLTMATEVAARVTSTGPHRPQDLALTEPSGRARELEDLQPPEALVERQGQFLGSETSPAPERGGPRDGEPPGKMGKGYLPCGMPGSGEPEVGKRPEETTVSVQSAESSDSLSWSRLPRALASVGPEEARSGAPVGGGRWQLSDRVEGGSPTLGLLGGSPSAQPGTGNVEAGIPSGRMLEPLPCWDAAKDLKEPQCPPGDRVGVQPGNSRVWQGTMEKAGLAWTRGTGVQSEGTWESQRQDSDALPSPELLPQDPDKPFLRKACSPSNIPAVIITDMGTQEDGALEETQGSPRGNLPLRKLSSSSASSTGFSSSYEDSEEDISSDPERTLDPNSAFLHTLDQQKPRVSKSWRKIKNMVHWSPFVMSFKKKYPWIQLAGHAGSFKAAANGRILKKHCESEQRCLDRLMVDVLRPFVPAYHGDVVKDGERYNQMDDLLADFDSPCVMDCKMGIRTYLEEELTKARKKPSLRKDMYQKMIEVDPEAPTEEEKAQRAVTKPRYMQWRETISSTATLGFRIEGIKKEDGTVNRDFKKTKTREQVTEAFREFTKGNHNILIAYRDRLKAIRTTLEVSPFFKCHEVIGSSLLFIHDKKEQAKVWMIDFGKTTPLPEGQTLQHDVPWQEGNREDGYLSGLNNLVDILTEMSQDAPLA

SEQ ID NO: 348 - protein, 673 aa, Homo sapiens
MAGKAAEERGLPKGATPQDTSGLQDRLFSSESDNSLYFTYSGQPNTLEVRDLNYQVDLASQVPWFEQLAQFKMPWTSPSCQNSCELGIQNLSFKVRSGQMLAIIGSSGCGRASLLDVITGRGHGGKIKSGQIWINGQPSSPQLVRKCVAHVRQHNQLLPNLTVRETLAFIAQMRLPRTFSQAQRDKRVEDVIAELRLRQCADTRVGNMYVRGLSGGERRRVSIGVQLLWNPGILILDEPTSGLDSFTAHNLVKTLSRLAKGNRLVLISLHQPRSDIFRLFDLVLLMTSGTPIYLGAAQHMVQYFTAIGYPCPRYSNPADFYVDLTSIDRRSREQELATREKAQSLAALFLEKVRDLDDFLWKAETKDLDEDTCVESSVTPLDTNCLPSPTKMPGAVQQFTTLIRRQISNDFRDLPTLLIHGAEACLMSMTIGFLYFGHGSIQLSFMDTAALLFMIGALIPFNVILDVISKCYSERAMLYYELEDGLYTTGPYFFAKILGELPEHCAYIIIYGMPTYWLANLRPGLQPFLLHFLLVWLVVFCCRIMALAAAALLPTFHMASFFSNALYNSFYLAGGFMINLSSLWTVPAWISKVSFLRWCFEGLMKIQFSRRTYKMPLGNLTIAVSGDKILSVMELDSYPLYAIYLIVIGLSGGFMVLYYVSLRFIKQKPSQDW

SEQ ID NO: 349 - protein, 746 aa, Homo sapiens
MRREFCWDAYSKAAGSRASSPLPRQDRDSFCHQMSFCLTELHLWSLKNTLHIADRDIGIYQYYDKKDPPATEHGNLEKKQKLAESRDYPWTLKNRRPEKLRDSLKELEELMQNSRCVLSKWKNKYVCQLLFGSGVLVSLSLSGPQLEKVVIDRSLVGKLISDTISDALLTDSFIILSFLAQNKLCFIQFTKKMESSDVNKRLEKLSALDYKIFYYEIPGPINKTTERHLAINCVHDRVVCWWPLVNDDAWPWAPISSEKDRANLLLLGYAQGRLEVLSSVRTEWDPLDVRFGTKQPYQVFTVEHSVSVDKEPMADSCIYECIRNKIQCVSVTRIPLKSKAISCCRNVTEDKLILGCEDSSLILYETHRRVTLLAQTELLPSLISCHPSGAILLVGSNQGELQIFDMALSPINIQLLAEDRLPRETLQFSKLFDASSSLVQMQWIAPQVVSQKGEGSDIYDLLFLRFERGPLGVLLFKLGVFTRGQLGLIDIIFQYIHCDEIYEAINILSSMNWDTLGHQCFISMSAIVNHLLRQKLTPEREAQLETSLGTFYAPTRPLLDSTILEYRDQISKYARRFFHHLLRYQRFEKAFLLAVDVGARDLFMDIHYLALDKGELALAEVARKRASDIDAESITSGVELLGPLDRGDMLNEAFIGLSLAPQGEDSFPDNLPPSCPTHRHILQQRILNGSSNRQIIDRRNELEKDICSGFLMTNTCNAEDGELREDGREQEIRDGGSLKMIHFGLV

SEQ ID NO: 350 - protein, 227 aa, Homo sapiens
MAPCHIRKYQESDRQWVVGLLSRGMAEHAPATFRQLLKLPRTLILLLGGPLALLLVSGSWLLALVFSISLFPALWFLAKKPWTEYVDMTLCTDMSDITKSYLSERGSCFWVAESEEKVVGMVGALPVDDPTLREKRLQLFHLFVDSEHRRQGIAKALVRTVLQFARDQGYSEVILDTGTIQLSAMALYQSMGFKKTGQSFFCVWARLVALHTVHFIYHLPSSKVGSL

SEQ ID NO: 351 - protein, 290 aa, Homo sapiens
METPLDVLSRAASLVHADDEKREAALRGEPRIQTLPVASALSSHRTGPPPISPSKRKFSMEPGDEDLDCDNDHVSKMSRIFNPHLNKTANGDCRRDPRERSRSPIERAVAPTMSLHGSHLYTSLPSLGLEQPLALTKNSLDASRPAGLSPTLTPGERQQNRPSVITCASAGARNCNLSHCPIAHSGCAAPGPASYRRPPSAATTCDPVVEEHFRRSLGKNYKEPEPAPNSVSITGSVDDHFAKALGDTWLQIKAAKDGASSSPESASRRGQPASPSAHMVSHSHSPSVVS

SEQ ID NO: 352 - protein, 523 aa, Homo sapiens
MAAVGRVGSFGSSPPGLSSTYTGGPLGNEIASGNGGAAAGDDEDGQNLWSCILSEVSTRSRSKLPAGKNVLLLGEDGAGKTSLIRKIQGIEEYKKGRGLEYLYLNVHDEDRDDQTRCNVWILDGDLYHKGLLKFSLDAVSLKDTLVMLVVDMSKPWTALDSLQKWASVVREHVDKLKIPPEEMKQMEQKLIRDFQEYVEPGEDFPASPQRRNTASQEDKDDSVVLPLGADTLTHNLGIPVLVVCTKCDAISVLEKEHDYRDEHFDFIQSHIRKFCLQYGAALIYTSVKENKNIDLVYKYIVQKLYGFPYKIPAVVVEKDAVFIPAGWDNDKKIGILHENFQTLKAEDNFEDIITKPPVRKFVHEKEIMAEDDQVFLMKLQSLLAKQPPTAAGRPVDASPRVPGGSPRTPNRSVSSNVASVSPIPAGSKKIDPNMKAGATSEGVLANFFNSLLSKKTGSPGGPGVSGGSPAGGAGGGSSGLPPSTKKSGQKPVLDVHAELDRITRKPVTVSPTTPTSPTEGEAS

SEQ ID NO: 353 - protein, 1093 aa, Homo sapiens
MARPVRGGLGAPRRSPCLLLLWLLLLRLEPVTAAAGPRAPCAAACTCAGDSLDCGGRGLAALPGDLPSWTRSLNLSYNKLSEIDPAGFEDLPNLQEVYLNNNELTAVPSLGAASSHVVSLFLQHNKIRSVEGSQLKAYLSLEVLDLSLNNITEVRNTCFPHGPPIKELNLAGNRIGTLELGAFDGLSRSLLTLRLSKNRITQLPVRAFKLPRLTQLDLNRNRIRLIEGLTFQGLNSLEVLKLQRNNISKLTDGAFWGLSKMHVLHLEYNSLVEVNSGSLYGLTALHQLHLSNNSIARIHRKGWSFCQKLHELVLSFNNLTRLDEESLAELSSLSVLRLSHNSISHIAEGAFKGLRSLRVLDLDHNEISGTIEDTSGAFSGLDSLSKLTLFGNKIKSVAKRAFSGLEGLEHLNLGGNAIRSVQFDAFVKMKNLKELHISSDSFLCDCQLKWLPPWLIGRMLQAFVTATCAHPESLKGQSIFSVPPESFVCDDFLKPQIITQPETTMAMVGKDIRFTCSAASSSSSPMTFAWKKDNEVLTNADMENFVHVHAQDGEVMEYTTILHLRQVTFGHEGRYQCVITNHFGSTYSHKARLTVNVLPSFTKTPHDITIRTTTMARLECAATGHPNPQIAWQKDGGTDFPAARERRMHVMPDDDVFFITDVKIDDAGVYSCTAQNSAGSISANATLTVLETPSLVVPLEDRVVSVGETVALQCKATGNPPPRITWFKGDRPLSLTERHHLTPDNQLLVVQNVVAEDAGRYTCEMSNTLGTERAHSQLSVLPAAGCRKDGTTVGIFTIAVVSSIVLTSLVWVCIIYQTRKKSEEYSVTNTDETVVPPDVPSYLSSQGTLSDRQETVVRTEGGPQANGHIESNGVCPRDASHFPEPDTHSVACRQPKLCAGSAYHKEPWKAMEKAEGTPGPHKMEHGGRVVCSDCNTEVDCYSRGQAFHPQPVSRDSAQPSAPNGPEPGGSDQEHSPHHQCSRTAAGSCPECQGSLYPSNHDRMLTAVKKKPMASLDGKGDSSWTLARLYHPDSTELQPASSLTSGSPERAEAQYLLVSNGHLPKACDASPESTPLTGQLPGKQRVPLLLAPKS

SEQ ID NO: 354 - protein, 911 aa, Homo sapiens
MDGAMGPRGLLLCMYLVSLLILQAMPALGSATGRSKSSEKRQAVDTAVDGVFIRSLKVNCKVTSRFAHYVVTSQVVNTANEAREVAFDLEIPKTAFISDFAVTADGNAFIGDIKDKVTAWKQYRKAAISGENAGLVRASGRTMEQFTIHLTVNPQSKVTFQLTYEEVLKRNHMQYEIVIKVKPKQLVHHFEIDVDIFEPQGISKLDAQASFLPKELAAQTIKKSFSGKKGHVLFRPTVSQQQSCPTCSTSLLNGHFKVTYDVSRDKICDLLVANNHFAHFFAPQNLTNMNKNVVFVIDISGSMRGQKVKQTKEALLKILGDMQPGDYFDLVLFGTRVQSWKGSLVQASEANLQAAQDFVRGFSLDEATNLNGGLLRGIEILNQVQESLPELSNHASILIMLTDGDPTEGVTDRSQILKNVRNAIRGRFPLYNLGFGHNVDFNFLEVMSMENNGRAQRIYEDHDATQQLQGFYSQVAKPLLVDVDLQYPQDAVLALTQNHHKQYYEGSEIVVAGRIADNKQSSFKADVQAHGEGQEFSITCLVDEEEMKKLLRERGHMLENHVERLWAYLTIQELLAKRMKVDREERANLSSQALQMSLDYGFVTPLTSMSIRGMADQDGLKPTIDKPSEDSPPLEMLGPRRTFVLSALQPSPTHSSSNTQRLPDRVTGVDTDPHFIIHVPQKEDTLCFNINEEPGVILSLVQDPNTGFSVNGQLIGNKARSPGQHDGTYFGRLGIANPATDFQLEVTPQNITLNPGFGGPVFSWRDQAVLRQDGVVVTINKKRNLVVSVDDGGTFEVVLHRVWKGSSVHQDFLGFYVLDSHRMSARTHGLLGQFFHPIGFEVSDIHPGSDPTKPDATMVVRNRRLTVTRGLQKDYSKDPWHGAEVSCWFIHNNGAGLIDGAYTDYIVPDIF

SEQ ID NO: 355 - protein, 1186 aa, Homo sapiens
MKKFNFRKVLDGLTASSPGSGSSSGSNSGGGAGSGSVHPAGTAGVLREEIQETLTSEYFQICKTVRHGFPHQPTALAFDPVQKILAIGTRTGAIRILGRPGVDCYCQHESGAAVLQLQFLINEGALVSASSDDTLHLWNLRQKRPAILHSLKFNRERITYCHLPFQSKWLYVGTERGNTHIVNIESFILSGYVIMWNKAIELSTKTHPGPVVHLSDSPRDEGKLLIGYENGTVVFWDLKSKRAELRVYYDEAIHSIDWHHEGKQFMCSHSDGSLTLWNLKSPSRPFQTTIPHGKSQREGRKSESCKPILKVEYKTCKNSEPFIIFSGGLSYDKACRRPSLTIMHGKAITVLEMDHPIVEFLTLCETPYPNEFQEPYAVVVLLEKDLIVVDLTQSNFPIFENPYPMDIHESPVTCTAYFADCPPDLILVLYSIGVKHKKQGYSNKEWPISGGAWNLGAQTYPEIIITGHADGSIKFWDASAITLQMLYKLKTSKVFEKQKVGEGKQTCEIVEEDPFAIQMIYWCPESRIFCVSGVSAYVIIYKFSRHEITTEIVSLEVRLQYDVEDIITPEPETSPPFPDLSAQLPSSRSLSGSTNTVASEGVTKDSIPCLNVKTRPVRMPPGYQAELVIQLVWVDGEPPQQITSLAVSSAYGIVAFGNCNGLAVVDFIQKTVLLSMGTIDLYRSSDLYQRQPRSPRKNKQFIADNFCMRGLSNFYPDLTKRIRTSYQSLTELNDSPVPLELERCKSPTSDHVNGHCTSPTSQSCSSGKRLSSADVSKVNRWGPGRPPFRKAQSAACMEISLPVTTEENRENSYNRSRSSSISSIDKDSKEAITALYFMDSFARKNDSTISPCLFVGTSLGMVLIISLNLPLADEQRFTEPVMVLPSGTFLSLKGAVLTFSCMDRMGGLMQPPYEVWRDPNNIDENEKSWRRKVVMNSSSASQEIGDHQYTIICSEKQAKVFSLPSQTCLYVHNITETSFILQANVVVMCSSACLACFCANGHIMIMSLPSLRPMLDVNYLPLTDMRIARTFCFTNEGQALYLVSPTEIQRLTYSQEMCDNLQDMLGDLFTPIETPEAQNRGFLKGLFGGSGQTFDREELFGEASAGKASRSLAQHIPGPGSIEGMKGAAGGVMGELTRARIALDERGQRLGELEEKTAGMMTSAEAFSKHAHELMLKYKDKKWYQF

SEQ ID NO: 356 - protein, 1073 aa, Homo sapiens
MAWVKFLRKPGGNLGKVYQPGSMLSLAPTKGLLNEPGQNSCFLNSAVQVLWQLDIFRRSLRVLTGHVCQGDACIFCALKTIFAQFQHSREKALPSDNIRHALAESFKDEQRFQLGLMDDAAECFENMLERIHFHIVPSRDADMCTSKSCITHQKFAMTLYEQCVCRSCGASSDPLPFTEFVRYISTTALCNEVERMLERHERFKPEMFAELLQAANTTDDYRKCPSNCGQKIKIRRVLMNCPEIVTIGLVWDSEHSDLTEAVVRNLATHLYLPGLFYRVTDENAKNSELNLVGMICYTSQHYCAFAFHTKSSKWVFFDDANVKEIGTRWKDVVSKCIRCHFQPLLLFYANPDGTAVSTEDALRQVISWSHYKSVAENMGCEKPVIHKSDNLKENGFGDQAKQRENQKFPTDNISSSNRSHSHTGVGKGPAKLSHIDQREKIKDISRECALKAIEQKNLLSSQRKDLEKGQRKDLGRHRDLVDEDLSHFQSGSPPAPNGFKQHGNPHLYHSQGKGSYKHDRVVPQSRASAQIISSSKSQILAPGEKITGKVKSDNGTGYDTDSSQDSRDRGNSCDSSSKSRNRGWKPMRETLNVDSIFSESEKRQHSPRHKPNISNKPKSSKDPSFSNWPKENPKQKGLMTIYEDEMKQEIGSRSSLESNGKGAEKNKGLVEGKVHGDNWQMQRTESGYESSDHISNGSTNLDSPVIDGNGTVMDISGVKETVCFSDQITTSNLNKERGDCTSLQSQHHLEGFRKELRNLEAGYKSHEFHPESHLQIKNHLIKRSHVHEDNGKLFPSSSLQIPKDHNAREHIHQSDEQKLEKPNECKFSEWLNIENSERTGLPFHVDNSASGKRVNSNEPSSLWSSHLRTVGLKPETAPLIQQQNIMDQCYFENSLSTECIIRSASRSDGCQMPKLFCQNLPPPLPPKKYAITSVPQSEKSESTPDVKLTEVFKATSHLPKHSLSTASEPSLEVSTHMNDERHKETFQVRECFGNTPNCPSSSSTNDFQANSGAIDAFCQPELDSISTCPNETVSLTTYFSVDSCMTDTYRLKYHQRPKLSFPESSGFCNNSLS

SEQ ID NO: 357 - protein, 356 aa, Homo sapiens
MAATRSPTRARERERSGAPAAGSDQVHSWMLATSQALDTVWRMAKGFVMLAVSFLVAAICYFRRLHLYSGHKLKWWIGYLQRKFKRNLSVEAEVDLLSYCAREWKGETPRNKLMRKAYEELFWRHHIKCVRQVRRDNYDALRSVLFQIFSQGISFPSWMKEKDIVKLPEKLLFSQGCNWIQQYSFGPEKYTGSNVFGKLRKYVELLKTQWTEFNGIRDYHKRGSMCNTLFSDAILEYKLYEALKFIMLYQVTEVYEQMKTKKVIPSLFRLLFSRETSSDPLSFMMNHLNSVGDTCGLEQIDMFILGYSLEVKIKVFRLFKFNSRDFEVCYPEEPLRDWPEISLLTENDRHYHIPVF

SEQ ID NO: 358 - protein, 979 aa, Homo sapiens
MALFAVFQTTFFLTLLSLRTYQSEVLAERLPLTPVSLKVSTNSTRQSLHLQWTVHNLPYHQELKMVFQIQISRIETSNVIWVGNYSTTVKWNQVLHWSWESELPLECATHFVRIKSLVDDAKFPEPNFWSNWSSWEEVSVQDSTGQDILFVFPKDKLVEEGTNVTICYVSRNIQNNVSCYLEGKQIHGEQLDPHVTAFNLNSVPFIRNKGTNIYCEASQGNVSEGMKGIVLFVSKVLEEPKDFSCETEDFKTLHCTWDPGTDTALGWSKQPSQSYTLFESFSGEKKLCTHKNWCNWQITQDSQETYNFTLIAENYLRKRSVNILFNLTHRVYLMNPFSVNFENVNATNAIMTWKVHSIRNNFTYLCQIELHGEGKMMQYNVSIKVNGEYFLSELEPATEYMARVRCADASHFWKWSEWSGQNFTTLEAAPSEAPDVWRIVSLEPGNHTVTLFWKPLSKLHANGKILFYNVVVENLDKPSSSELHSIPAPANSTKLILDRCSYQICVIANNSVGASPASVIVISADPENKEVEEERIAGTEGGFSLSWKPQPGDVIGYVVDWCDHTQDVLGDFQWKNVGPNTTSTVISTDAFRPGVRYDFRIYGLSTKRIACLLEKKTGYSQELAPSDNPHVLVDTLTSHSFTLSWKDYSTESQPGFIQGYHVYLKSKARQCHPRFEKAVLSDGSECCKYKIDNPEEKALIVDNLKPESFYEFFITPFTSAGEGPSATFTKVTTPDEHSSMLIHILLPMVFCVLLIMVMCYLKSQWIKETCYPDIPDPYKSSILSLIKFKENPHLIIMNVSDCIPDAIEVVSKPEGTKIQFLGTRKSLTETELTKPNYLYLLPTEKNHSGPGPCICFENLTYNQAASDSGSCGHVPVSPKAPSMLGLMTSPENVLKALEKNYMNSLGEIPAGETSLNYVSQLASPMFGDKDSLPTNPVEAPHCSEYKMQMAVSLRLALPPPTENSSLSSITLLDPGEHYC

SEQ ID NO: 359 - protein, 378 aa, Homo sapiens
MSKEPLILWLMIEFWWLYLTPVTSETVVTEVLGHRVTLPCLYSSWSHNSNSMCWGKDQCPYSGCKEALIRTDGMRVTSRKSAKYRLQGTIPRGDVSLTILNPSESDSGVYCCRIEVPGWFNDVKINVRLNLQRASTTTHRTATTTTRRTTTTSPTTTRQMTTTPAALPTTVVTTPDLTTGTPLQMTTIAVFTTANTCLSLTPSTLPEEATGLLTPEPSKEGPILTAESETVLPSDSWSSVESTSADTVLLTSKESKVWDLPSTSHVSMWKTSDSVSSPQPGASDTAVPEQNKTTKTGQMDGIPMSMKNEMPISQLLMIIAPSLGFVLFALFVAFLLRGKLMETYCSQKHTRLDYIGDSKNVLNDVQHGREDEDGLFTL

SEQ ID NO: 360 - protein, 613 aa, Homo sapiens
MATIPDWKLQLLARRRQEEASVRGREKAERERLSQMPAWKRGLLERRRAKLGLSPGEPSPVLGTVEAGPPDPDESAVLLEAIGPVHQNRFIRQERQQQQQQQQRSEELLAERKPGPLEARERRPSPGEMRDQSPKGRESREERLSPRETRERRLGIGGAQELSLRPLEARDWRQSPGEVGDRSSRLSEAWKWRLSPGETPERSLRLAESREQSPRRKEVESRLSPGESAYQKLGLTEAHKWRPDSRESQEQSLVQLEATEWRLRSGEERQDYSEECGRKEEWPVPGVAPKETAELSETLTREAQGNSSAGVEAAEQRPVEDGERGMKPTEGWKWTLNSGKAREWTPRDIEAQTQKPEPPESAEKLLESPGVEAGEGEAEKEEAGAQGRPLRALQNCCSVPSPLPPEDAGTGGLRQQEEEAVELQPPPPAPLSPPPPAPTAPQPPGDPLMSRLFYGVKAGPGVGAPRRSGHTFTVNPRRSVPPATPATPTSPATVDAAVPGAGKKRYPTAEEILVLGGYLRLSRSCLAKGSPERHHKQLKISFSETALETTYQYPSESSVLEELGPEPEVPSAPNPPAAQPDDEEDEEELLLLQPELQGGLRTKALIVDESCRR

SEQ ID NO: 361 - protein, 933 aa, Homo sapiens
MRMAATAWAGLQGPPLPTLCPAVRTGLYCRDQAHAERWAMTSETSSGSHCARSRMLRRRAQEEDSTVLIDVSPPEAEKRGSYGSTAHASEPGGQQAAACRAGSPAKPRIADFVLVWEEDLKLDRQQDSAARDRTDMHRTWRETFLDNLRAAGLCVDQQDVQDGNTTVHYALLSASWAVLCYYAEDLRLKLPLQELPNQASNWSAGLLAWLGIPNVLLEVVPDVPPEYYSCRFRVNKLPRFLGSDNQDTFFTSTKRHQILFEILAKTPYGHEKKNLLGIHQLLAEGVLSAAFPLHDGPFKTPPEGPQAPRLNQRQVLFQHWARWGKWNKYQPLDHVRRYFGEKVALYFAWLGFYTGWLLPAAVVGTLVFLVGCFLVFSDIPTQELCGSKDSFEMCPLCLDCPFWLLSSACALAQAGRLFDHGGTVFFSLFMALWAVLLLEYWKRKSATLAYRWDCSDYEDTEERPRPQFAASAPMTAPNPITGEDEPYFPERSRARRMLAGSVVIVVMVAVVVMCLVSIILYRAIMAIVVSRSGNTLLAAWASRIASLTGSVVNLVFILILSKIYVSLAHVLTRWEMHRTQTKFEDAFTLKVFIFQFVNFYSSPVYIAFFKGRFVGYPGNYHTLFGVRNEECAAGGCLIELAQELLVIMVGKQVINNMQEVLIPKLKGWWQKFRLRSKKRKAGASAGASQGPWEDDYELVPCEGLFDEYLEMVLQFGFVTIFVAACPLAPLFALLNNWVEIRLDARKFVCEYRRPVAERAQDIGIWFHILAGLTHLAVISNAFLLAFSSDFLPRAYYRWTRAHDLRGFLNFTLARAPSSFAAAHNRTCRYRAFRDDDGHYSQTYWNLLAIRLAFVIVFEHVVFSVGRLLDLLVPDIPESVEIKVKREYYLAKQALAENEVLFGTNGTKDEQPEGSELSSHWTPFTVPKASQLQQ

SEQ ID NO: 362 - protein, 500 aa, Homo sapiens
MNQRRSESRPGNHRLQAYAEPGKGDSGGAGPLSGSARRGRGGGGAIRVRRPCWSGGAGRGGGPAWAVRLPTVTAGWTWPALRTLSSLRAGPSEPHSPGRRPPRAGRPLCQADPQPGKAARRSLEPDPAQTGPRPARAAGMSEARKGPDEAEESQYDSGIESLRSLRSLPESTSAPASGPSDGSPQPCTHPPGPVKEPQEKEDADGERADSTYGSSSLTYTLSLLGGPEAEDPAPRLPLPHVGALSPQQLEALTYISEDGDTLVHLAVIHEAPAVLLCCLALLPQEVLDIQNNLYQTALHLAVHLDQPGAVRALVLKGASRALQDRHGDTALHVACQRQHLACARCLLEGRPEPGRGTSHSLDLQLQNWQGLACLHIATLQKNQPLMELLLRNGADIDVQEGTSGKTALHLAVETQERGLVQFLLQAGAQVDARMLNGCTPLHLAAGRGLMGISSTLCKAGADSLLRNVEDETPQDLTEESLVLLPFDDLKISGKLLLCTD

SEQ ID NO: 363 - protein, 556 aa, Homo sapiens
MPSFDEALQRVGEFGRFQRRVFLLLCLTGVTFAFLFVGVVFLGTQPDHYWCRGPSAAALAERCGWSPEEEWNRTAPASRGPEPPERRGRCQRYLLEAANDSASATSALSCADPLAAFPNRSAPLVPCRGGWRYAQAHSTIVSEFDLVCVNAWMLDLTQAILNLGFLTGAFTLGYAADRYGRIVIYLLSCLGVGVTGVVVAFAPNFPVFVIFRFLQGVFGKGTWMTCYVIVTEIVGSKQRRIVGIVIQMFFTLGIIILPGIAYFIPNWQGIQLAITLPSFLFLLYYWVVPESPRWLITRKKGDKALQILRRIAKCNGKYLSSNYSEITVTDEEVSNPSFLDLVRTPQMRKCTLILMFAWFTSAVVYQGLVMRLGIIGGNLYIDFFISGVVELPGALLILLTIERLGRRLPFAASNIVAGVACLVTAFLPEGIAWLRTTVATLGRLGITMAFEIVYLVNSELYPTTLRNFGVSLCSGLCDFGGIIAPFLLFRLAAVWLELPLIIFGILASICGGLVMLLPETKGIALPETVDDVEKLGSPHSCKCGRNKKTPVSRSHL

SEQ ID NO: 364 - protein, 1590 aa, Homo sapiens
MPGGACVLVIALMFLAWGEAQECSPGGHQFLRSPYRSVRFDSWHLQQSAVQDLICDHSLSPGWYRFLILDRPAEMPTKCVEMNHCGTQAPIWLSLRDSETLPSPGEIKQLTACATWQFLFSTTKDCCLFQIPVSVRNCGNFSVYLLQPTQGCMGYCAEAISDARLHPCGSDETETGGDCVRQLAASLPPPPAGRPEVLVELIESRLFCRCSFDVPATKNSVGFHIAWSRLSSQEVKEELTQETTVQAFSLLELDGINLRLGDRIFCSASVFFLENPHVQSVAIESQEFFAGFKLQPELSTISEDGKEYYLRIESTVPIICSEFSELDQECKISLKLKTIGQGREHLGLNLALSSCHVDLLQTSSCANGTCSHTFVYYTAVTDFSRDGDRVSNIVVQPIVNEDFLWNNYIPDSIQIKVKDVPTAYCYTFTDPHIITFDGRVYDNFKTGTFVLYKSMSRDFEVHVRQWDCRSLHYPVSCNCGFVAQEGGDIVTFDMCNGQLRESQPYLFIKSQDVTRNIKISESYLGRKVTIWFSSGAFIRADLGEWGMSLTIRAPSVDYRNTLGLCGTFDENPENDFHDKNGMQIDQNFNNYVAFINEWRILPGKSMSDTLPVSMTSPGKPSYCSCSLDTAAYPSSEDLDSVSRSEIALGCKDLNHVSLSSLIPELDVTSEYINSDTLVREINKHTSPEEYNLNLFLQEKKHINLTKLGLNVQKHPGNEKEDSLQYLANKKYTQGRGSHSQEMRYNRQNRWKRQNFHEFPPLFAFPSLSQTDLEELTYFFPEDHAEDVQQEFFPSWPTPSGLTEYSTLTLCQETLANSSIGRLCLAFLGKRLDSVIEMCVKDVLLKDDLSWAEAGVALLENECEKRIVEEGKYNTEEYGTSIEDILSVLKCPNLCSGNGQCMEWGCACSPSFSSYDCSDSYDKAPEITELGNAGFCDVQKYNCMMVRVFGKGFKELPSIKCEVTKLQYNSSEWMPGEPIYTQTVFHNSRAVDCQLPTDVQQFDTMDLVGGKPTGKWQLKVSNDGYKFSNPKITVIYDGACQVCGLYKNDSCTIKENVCIIDGLCYVEGDKNPTSPCLICRPKISRFTWSFLENNQPPVIQALQDKLQTFYGENFEYQFVAFDPEGSDIHFTLDSGPEGASVSSAGLFMWKTDLLTTQQITVRLNDDCDAETRVTIEVTVKSCDCLNGGSCVSDRNFSPGSGVYLCVCLPGFHGSLCEVDISGCQSNPCGLGSYISGFHSYSCDCPPELKVETQFVNQFTTQTVVLTRSDKSVNKEEDDKNAQGRKRHVKPTSGNAFTICKYPCGKSRECVAPNICKCKPGYIGSNCQTALCDPDCKNHGKCIKPNICQCLPGHGGATCDEEHCNPPCQHGGTCLAGNLCTCPYGFVGPRCETMVCNRHCENGGQCLTPDICQCKPGWYGPTCSTALCDPVCLNGGSCNKPNTCLCPNGFFGEHCQNAFCHPPCKNGGHCMRNNVCVCREGYTGRRFQKSICDPTCMNGGKCVGPSTCSCPSGWSGKRCNTPICLQKCKNGGECIAPSICHCPSSWEGVRCQIPICNPKCLYGGRCIFPNVCSCRTEYSGVKCEKKIQIRRH

SEQ ID NO: 365 - protein, 259 aa, Homo sapiens
MSEVPVARVWLVLLLLTVQVGVTAGAPWQCAPCSAEKLALCPPVSASCSEVTRSAGCGCCPMCALPLGAACGVATARCARGLSCRALPGEQQPLHALTRGQGACVQESDASAPHAAEAGSPESPESTEITEEELLDNFHLMAPSEEDHSILWDAISTYDGSKALHVTNIKKWKEPCRIELYRVVESLAKAQETSGEEISKFYLPNCNKNGFYHSRQCETSMDGEAGLCWCVYPWNGKRIPGSPEIRGDPNCQIYFNVQN

SEQ ID NO: 366 - protein, 976 aa, Homo sapiens
MERRWPLGLGLVLLLCAPLPPGARAKEVTLMDTSKAQGELGWLLDPPKDGWSEQQQILNGTPLYMYQDCPMQGRRDTDHWLRSNWIYRGEEASRVHVELQFTVRDCKSFPGGAGPLGCKETFNLLYMESDQDVGIQLRRPLFQKVTTVAADQSFTIRDLVSGSVKLNVERCSLGRLTRRGLYLAFHNPGACVALVSVRVFYQRCPETLNGLAQFPDTLPGPAGLVEVAGTCLPHARASPRPSGAPRMHCSPDGEWLVPVGRCHCEPGYEEGGSGEACVACPSGSYRMDMDTPHCLTCPQQSTAESEGATICTCESGHYRAPGEGPQVACTGPPSAPRNLSFSASGTQLSLRWEPPADTGGRQDVRYSVRCSQCQGTAQDGGPCQPCGVGVHFSPGARGLTTPAVHVNGLEPYANYTFNVEAQNGVSGLGSSGHASTSVSISMGHAESLSGLSLRLVKKEPRQLELTWAGSRPRSPGANLTYELHVLNQDEERYQMVLEPRVLLTELQPDTTYIVRVRMLTPLGPGPFSPDHEFRTSPPVSRGLTGGEIVAVIFGLLLGAALLLGILVFRSRRAQRQRQQRQRDRATDVDREDKLWLKPYVDLQAYEDPAQGALDFTRELDPAWLMVDTVIGEGEFGEVYRGTLRLPSQDCKTVAIKTLKDTSPGGQWWNFLREATIMGQFSHPHILHLEGVVTKRKPIMIITEFMENGALDAFLREREDQLVPGQLVAMLQGIASGMNYLSNHNYVHRDLAARNILVNQNLCCKVSDFGLTRLLDDFDGTYETQGGKIPIRWTAPEAIAHRIFTTASDVWSFGIVMWEVLSFGDKPYGEMSNQEVMKSIEDGYRLPPPVDCPAPLYELMKNCWAYDRARRPHFQKLQAHLEQLLANPHSLRTIANFDPRMTLRLPSLSGSDGIPYRTVSEWLESIRMKRYILHFHSAGLDTMECVLELTAEDLTQMGITLPGHQKRILCSIQGFKD

SEQ ID NO: 367 - protein, 412 aa, Homo sapiens
MGDGAVKQGFLYLQQQQTFGKKWRRFGASLYGGSDCALARLELQEGPEKPRRCEAARKVIRLSDCLRVAEAGGEASSPRDTSAFFLETKERLYLLAAPAAERGDWVQAICLLAFPGQRKELSGPEGKQSRPCMEENELYSSAVTVGPHKEFAVTMRPTEASERCHLRGSYTLRAGESALELWGGPEPGTQLYDWPYRFLRRFGRDKVTFSFEAGRRCVSGEGNFEFETRQGNEIFLALEEAISAQKNAAPATPQPQPATIPASLPRPDSPYSRPHDSLPPPSPTTPVPAPRPRGQEGEYAVPFDAVARSLGKNFRGILAVPPQLLADPLYDSIEETLPPRPDHIYDEPEGVAALSLYDSPQEPRGEAWRRQATADRDPAGLQHVQPAGQDFSASGWQPGTEYDNVVLKKGPK

SEQ ID NO: 368 - protein, 440 aa, Homo sapiens
MEQRGQNAPAASGARKRHGPGPREARGARPGPRVPKTLVLVVAAVLLLVSAESALITQQDLAPQQRAAPQQKRSSPSEGLCPPGHHISEDGRDCISCKYGQDYSTHWNDLLFCLRCTRCDSGEVELSPCTTTRNTVCQCEEGTFREEDSPEMCRKCRTGCPRGMVKVGDCTPWSDIECVHKESGTKHSGEVPAVEETVTSSPGTPASPCSLSGIIIGVTVAAVVLIVAVFVCKSLLWKKVLPYLKGICSGGGGDPERVDRSSQRPGAEDNVLNEIVSILQPTQVPEQEMEVQEPAEPTGVNMLSPGESEHLLEPAEAERSQRRRLLVPANEGDPTETLRQCFDDFADLVPFDSWEPLMRKLGLMDNEIKVAKAEAAGHRDTLYTMLIKWVNKTGRDASVHTLLDALETLGERLAKQKIEDHLLSSGKFMYLEGNADSAMS

SEQ ID NO: 369 - protein, 318 aa, Homo sapiens
MDKINQTFVREFILLGLSGYPKLEIIFFALILVMYVVILIGNGVLIIASILDSRLHMPMYFFLGNLSFLDICYTTSSIPSTLVSLISKKRNISFSGCAVQMFFGFAMGSTECFLLGMMAFDRYVAICNPLRYPIIMNKVVYVLLTSVSWLSGGINSTVQTSLAMRWPFCGNNIINHFLCEILAVLKLACSDISVNIVTLAVSNIAFLVLPLLVIFFSYMFILYTILRTNSATGRHKAFSTCSAHLTVVIIFYGTIFFMYAKPKSQDLLGKDNLQATEGLVSMFYGVVTPMLNPIIYSLRNKDVKAAIKYLLSRKAINQ

SEQ ID NO: 370 - protein, 227 aa, Homo sapiens
MSDINLDWVDRRQLQRLEEMLIVVDENDKVIGADTKRNCHLNENIEKGLLHRAFSVVLFNTKNRILIQQRSDTKVTFPGYFTDSCSSHPLYNPAELEEKDAIGVRRAAQRRLQAELGIPGEQISPEDIVFMTIYHHKAKSDRIWGEHEICYLLLVRKNVTLNPDPSETKSILYLSQEELWELLEREARGEVKVTPWLRTIAERFLYRWWPHLDDVTPFVELHKIHRV

SEQ ID NO: 371 - protein, 2237 aa, Homo sapiens [sequence omitted]

SEQ ID NO: 372 - protein, 2237 aa, Homo sapiens
MVRFGDELGGRYGGPGGGERARGGGAGGAGGPGPGGLQPGQRVLYKQSIAQRARTMALYNPIPVKQNCFTVNRSLFVFSEDNVVRKYAKRITEWPPFEYMILATIIANCIVLALEQHLPDGDKTPMSERLDDTEPYFIGIFCFEAGIKIIALGFVFHKGSYLRNGWNVMDFVVVLTGILATAGTDFDLRTLRAVRVLRPLKLVSGIPSLQVVLKSIMKAMVPLLQIGLLLFFAILMFAIIGLEFYMGKFHKACFPNSTDAEPVGDFPCGKEAPARLCEGDTECREYWPGPNFGITNFDNILFAILTVFQCITMEGWTDILYNTNDAAGNTWNWLYFIPLIIIGSFFMLNLVLGVLSGEFAKERERVENRRAFLKLRRQQQIERELNGYLEWIFKAEEVMLAEEDRNAEEKSPLDVLKRAATKKSRNDLIHAEEGEDRFADLCAVGSPFARASLKSGKTESSSYFRRKEKMFRFFIRRMVKAQSFYWVVLCVVALNTLCVAMVHYNQPRRLTTTLYFAEFVFLGLFLTEMSLKMYGLGPRSYFRSSFNCFDFGVIVGSVFEVVWAAIKPGSSFGISVLRALRLLRIFKVTKYWSSLRNLVVSLLNSMKSIISLLFLLFLFIVVFALLGMQLFGGQFNFQDETPTTNFDTFPAAILTVFQILTGEDWNAVMYHGIESQGGVSKGMFSSFYFIVLTLFGNYTLLNVFLAIAVDNLANAQELTKDEEEMEEAANQKLALQKAKEVAEVSPMSAANISIAARQQNSAKARSVWEQRASQLRLQNLRASCEALYSEMDPEERLRFATTRHLRPDMKTHLDRPLVVELGRDGARGPVGGKARPEAAEAPEGVDPPRRHHRHRDKDKTPAAGDQDRAEAPKAESGEPGAREERPRPHRSHSKEAAGPPEARSERGRGPGPEGGRRHHRRGSPEEAAEREPRRHRAHRHQDPSKECAGAKGERRARHRGGPRAGPREAESGEEPARRHRARHKAQPAHEAVEKETTEKEATEKEAEIVEADKEKELRNHQPREPHCDLETSGTVTVGPMHTLPSTCLQKVEEQPEDADNQRNVTRMGSQPPDPNTIVHIPVMLTGPLGEATVVPSGNVDLESQAEGKKEVEADDVMRSGPRPIVPYSSMFCLSPTNLLRRFCHYIVTMRYFEVVILVVIALSSIALAAEDPVRTDSPRNNALKYLDYIFTGVFTFEMVIKMIDLGLLLHPGAYFRDLWNILDFIVVSGALVAFAFSGSKGKDINTIKSLRVLRVLRPLKTIKRLPKLKAVFDCVVNSLKNVLNILIVYMLFMFIFAVIAVQLFKGKFFYCTDESKELERDCRGQYLDYEKEEVEAQPRQWKKYDFHYDNVLWALLTLFTVSTGEGWPMVLKHSVDATYEEQGPSPGYRMELSIFYVVYFVVFPFFFVNIFVALIIITFQEQGDKVMSECSLEKNERACIDFAISAKPLTRYMPQNRQSFQYKTWTFVVSPPFEYFIMAMIALNTVVLMMKFYDAPYEYELMLKCLNIVFTSMFSMECVLKIIAFGVLNYFRDAWNVFDFVTVLGSITDILVTEIAETNNFINLSFLRLFRAARLIKLLRQGYTIRILLWTFVQSFKALPYVCLLIAMLFFIYAIIGMQVFGNIALDDDTSINRHNNFRTFLQALMLLFRSATGEAWHEIMLSCLSNQACDEQANATECGSDFAYFYFVSFIFLCSFLMLNLFVAVIMDNFEYLTRDSSILGPHHLDEFIRVWAEYDPAACGRISYNDMFEMLKHMSPPLGLGKKCPARVAYKRLVRMNMPISNEDMTVHFTSTLMALIRTALEIKLAPAGTKQHQCDAELRKEISVVWANLPQKTLDLLVPPHKPDEMTVGKVYAALMIFDFYKQNKTTRDQMQQAPGGLSQMGPVSLFHPLKATLEQTQPAVLRGARVFLRQKSSTSLSNGGAIQNQESGIKESVSWGTQRTQDAPHEARPPLERGHSTEIPVGRSGALAVDVQMQSITRRGPDGEPQPGLESQGRAASMPRLAAETQPVTDASPMKRSISTLAQRPRGTHLCSTTPDRPPPSQASSHHHHHRCHRRRDRKQRSLEKGPSLSADMDGAPSSAVGPGLPPGEGPTGCRRERERRQERGRSQERRQPSSSSSEKQRFYSCDRFGGREPPKPKPSLSSHPTSPTAGQEPGPHPQAGSAVGFPNTTPCCRETPSASPWPLALELALTLTWGSVWTVRPLSTPCLRTLSLSRRLWPPTRAAPPGLPTCPP

SEQ ID NO: 373 - protein, 312 aa, Homo sapiens
MESALPAAGFLYWVGAGTVAYLALRISYSLFTALRVWGVGNEAGVGPGLGEWAVVTGSTDGIGKSYAEELAKHGMKVVLISRSKDKLDQVSSEIKEKFKVETRTIAVDFASEDIYDKIKTGLAGLEIGILVNNVGMSYEYPEYFLDVPDLDNVIKKMININILSVCKMTQLVLPGMVERSKGAILNISSGSGMLPVPLLTIYSATKTFVDFFSQCLHEEYRSKGVFVQSVLPYFVATKLAKIRKPTLDKPSPETFVKSAIKTVGLQSRTNGYLIHALMGSIISNLPSWIYLKIVMNMNKSTRAHYLKKTKKN

SEQ ID NO: 374 - protein, 3056 aa, Homo sapiens
MSLVLNDLLICCRQLEHDRATERKKEVEKFKRLIRDPETIKHLDRHSDSKQGKYLNWDAVFRFLQKYIQKETECLRIAKPNVSASTQASRQKKMQEISSLVKYFIKCANRRAPRLKCQELLNYIMDTVKDSSNGAIYGADCSNILLKDILSVRKYWCEISQQQWLELFSVYFRLYLKPSQDVHRVLVARIIHAVTKGCCSQTDGLNSKFLDFFSKAIQCARQEKSSSGLNHILAALTIFLKTLAVNFRIRVCELGDEILPTLLYIWTQHRLNDSLKEVIIELFQLQIYIHHPKGAKTQEKGAYESTKWRSILYNLYDLLVNEISHIGSRGKYSSGFRNIAVKENLIELMADICHQVFNEDTRSLEISQSYTTTQRESSDYSVPCKRKKIELGWEVIKDHLQKSQNDFDLVPWLQIATQLISKYPASLPNCELSPLLMILSQLLPQQRHGERTPYVLRCLTEVALCQDKRSNLESSQKSDLLKLWNKIWCITFRGISSEQIQAENFGLLGAIIQGSLVEVDREFWKLFTGSACRPSCPAVCCLTLALTTSIVPGTVKMGIEQNMCEVNRSFSLKESIMKWLLFYQLEGDLENSTEVPPILHSNFPHLVLEKILVSLTMKNCKAAMNFFQSVPECEHHQKDKEELSFSEVEELFLQTTFDKMDFLTIVRECGIEKHQSSIGFSVHQNLKESLDRCLLGLSEQLLNNYSSEITNSETLVRCSRLLVGVLGCYCYMGVIAEEEAYKSELFQKAKSLMQCAGESITLFKNKTNEEFRIGSLRNMMQLCTRCLSNCTKKSPNKIASGFFLRLLTSKLMNDIADICKSLASFIKKPFDRGEVESMEDDTNGNLMEVEDQSSMNLFNDYPDSSVSDANEPGESQSTIGAINPLAEEYLSKQDLLFLDMLKFLCLCVTTAQTNTVSFRAADIRRKLLMLIDSSTLEPTKSLHLHMYLMLLKELPGEEYPLPMEDVLELLKPLSNVCSLYRRDQDVCKTILNHVLHVVKNLGQSNMDSENTRDAQGQFLTVIGAFWHLTKERKYIFSVRMALVNCLKTLLEADPYSKWAILNVMGKDFPVNEVFTQFLADNHHQVRMLAAESINRLFQDTKGDSSRLLKALPLKLQQTAFENAYLKAQEGMREMSHSAENPETLDEIYNRKSVLLTLIAVVLSCSPICEKQALFALCKSVKENGLEPHLVKKVLEKVSETFGYRRLEDFMASHLDYLVLEWLNLQDTEYNLSSFPFILLNYTNIEDFYRSCYKVLIPHLVIRSHFDEVKSIANQIQEDWKSLLTDCFPKILVNILPYFAYEGTRDSGMAQQRETATKVYDMLKSENLLGKQIDHLFISNLPEIVVELLMTLHEPANSSASQSTDLCDFSGDLDPAPNPPHFPSHVIKATFAYISNCHKTKLKSILEILSKSPDSYQKILLAICEQAAETNNVYKKHRILKIYHLFVSLLLKDIKSGLGGAWAFVLRDVIYTLIHYINQRPSCIMDVSLRSFSLCCDLLSQVCQTAVTYCKDALENHLHVIVGTLIPLVYEQVEVQKQVLDLLKYLVIDNKDNENLYITIKLLDPFPDHVVFKDLRITQQKIKYSRGPFSLLEEINHFLSVSVYDALPLTRLEGLKDLRRQLELHKDQMVDIMRASQDNPQDGIMVKLVVNLLQLSKMAINHTGEKEVLEAVGSCLGEVGPIDFSTIAIQHSKDASYTKALKLFEDKELQWTFIMLTYLNNTLVEDCVKVRSAAVTCLKNILATKTGHSFWEIYKMTTDPMLAYLQPFRTSRKKFLEVPRFDKENPFEGLDDINLWIPLSENHDIWIKTLTCAFLDSGGTKCEILQLLKPMCEVKTDFCQTVLPYLIHDILLQDTNESWRNLLSTHVQGFFTSCLRHFSQTSRSTTPANLDSESEHFFRCCLDKKSQRTMLAVVDYMRRQKRPSSGTIFNDAFWLDLNYLEVAKVAQSCAAHFTALLYAEIYADKKSMDDQEKRSLAFEEGSQSTTISSLSEKSKEETGISLQDLLLEIYRSIGEPDSLYGCGGGKMLQPITRLRTYEHEAMWGKALVTYDLETAIPSSTRQAGIIQALQNLGLCHILSVYLKGLDYENKDWCPELEELHYQAAWRNMQWDHCTSVSKEVEGTSYHESLYNALQSLRDREFSTFYESLKYARVKEVEEMCKRSLESVYSLYPTLSRLQAIGELESIGELFSRSVTHRQLSEVYIKWQKHSQLLKDSDFSFQEPIMALRTVILEILMEKEMDNSQRECIKDILTKHLVELSILARTFKNTQLPERAIFQIKQYNSVSCGVSEWQLEEAQVFWAKKEQSLALSILKQMIKKLDASCAANNPSLKLTYTECLRVCGNWLAETCLENPAVIMQTYLEKAVEVAGNYDGESSDELRNGKMKAFLSLARFSDTQYQRIENYMKSSEFENKQALLKRAKEEVGLLREHKIQTNRYTVKVQRELELDELALRALKEDRKRFLCKAVENYINCLLSGEEHDMWVFRLCSLWLENSGVSEVNGMMKRDGMKIPTYKFLPLMYQLAARMGTKMMGGLGFHEVLNNLISRISMDHPHHTLFIILALANANRDEFLTKPEVARRSRITKNVPKQSSQLDEDRTEAANRIICTIRSRRPQMVRSVEALCDAYIILANLDATQWKTQRKGINIPADQPITKLKNLEDVVVPTMEIKVDHTGEYGNLVTIQSFKAEFRLAGGVNLPKIIDCVGSDGKERRQLVKGRDDLRQDAVMQQVFQMCNTLLQRNTETRKRKLTICTYKVVPLSQRSGVLEWCTGTVPIGEFLVNNEDGAHKRYRPNDFSAFQCQKKMMEVQKKSFEEKYEVFMDVCQNFQPVFRYFCMEKFLDPAIWFEKRLAYTRSVATSSIVGYILGLGDRHVQNILINEQSAELVHIDLGVAFEQGKILPTPETVPFRLTRDIVDGMGITGVEGVFRRCCEKTMEVMRNSQETLLTIVEVLLYDPLFDWTMNPLKALYLQQRPEDETELHPTLNADDQECKRNLSDIDQSFNKVAERVLMRLQEKLKGVEEGTVLSVGGQVNLLIQQAIDPKNLSRLFPGWKAWV

SEQ ID NO: 375 - protein, 1151 aa, Homo sapiens
MEVVDETEALQRFFEGHDINGALEPSNIDTSILEEYISKEDASDLCFPDISAPASSASYSHGQPAMPGSSGVHHLSPPGGGPSPGRHGPLPPPGYGTPLNCNNNNGMGAAPKPFPGGTGPPIKAEPKAPYAPGTLPDSPPDSGSEAYSPQQVNEPHLLRTITPETLCHVGVPSRLEHPPPPPAHLPGPPPPPPPPPHYPVLQRDLYMKAEPPIPHYAAMGQGLVPTDLHHTQQSQMLHQLLQQHGAELPTHPSKKRKHSESPPSTLNAQMLNGMIKQEPGTVTALPLHPTRAPSPPWPPQGPLSPGPGSLPLSIARVQTPPWHPPGAPSPGLLQDSDSLSGSYLDPNYQSIKWQPHQQNKWATLYDANYKELPMLTYRVDADKGFNFSVGDDAFVCQKKNHFQVTVYIGMLGEPKYVKTPEGLKPLDCFYLKLHGVKLEALNQSINIEQSQSDRSKRPFNPVTVNLPPEQVTKVTVGRLHFSETTANNMRKKGKPNPDQRYFMLVVALQAHAQNQNYTLAAQISERIIVRASNPGQFESDSDVLWQRAQVPDTVFHHGRVGINTDRPDEALVVHGNVKVMGSLMHPSDLRAKEHVQEVDTTEQLKRISRMRLVHYRYKPEFAASAGIEATAPETGVIAQEVKEILPEAVKDTGDMVFANGKTIENFLVVNKERIFMENVGAVKELCKLTDNLETRIDELERWSHKLAKLRRLDSLKSTGSSGAFSHAGSQFSRAGSVPHKKRPPKVASKSSSVVPDQACISQRFLQGTIIALVVVMAFSVVSMSTLYVLSLRTEEDLVDTDGSFAVSTSCLLALLRPQPPGGSEALCPWSSQSFGTTQLRQSPLTTGLPGIQPSLLLVTTSLTSSAPGSAVRTLDMCSSHPCPVICCSSPTTNPTTGPSLGPSFNPGHVLSPSPSPSTNRSGPSQMALLPVTNIRAKSWGLSVNGIGHSKHHKSLEPLASPAVPFPGGQGKAKNSPSLGFHGRARRGALQSSVGPAEPTWAQGQSASLLAEPVPSLTSIQVLENSMSITSQYCAPGDACRPGNFTYHIPVSSGTPLHLSLTLQMNSSSPVSVVLCSLRSKEEPCEEGSLPQSLHTHQDTQGTSHRWPITILSFREFTYHFRVALLGQANCSSEALAQPATDYHFHFYRLCD

SEQ ID NO: 376 - protein, 914 aa, Homo sapiens
MGTTAPGPIHLLELCDQKLMEFLCNMDNKDLVWLEEIQEEAERMFTREFSKEPELMPKTPSQKNRRKKRRISYVQDENRDPIRRRLSRRKSRSSQLSSRRLRSKDSVEKLATVVGENGSVLRRVTRAAAAAAAATMALAAPSSPTPESPTMLTKKPEDNHTQCQLVPVVEIGISERQNAEQHVTQLMSTEPLPRTLSPTPASATAPTSQGIPTSDEESTPKKSKARILESITVSSLMATPQDPKGQGVGTGRSASKLRIAQVSPGPRDSPAFPDSPWRERVLAPILPDNFSTPTGSRTDSQSVRHSPIAPSSPSPQVLAQKYSLVAKQESVVRRASRRLAKKTAEEPAASGRIICHSYLERLLNVEVPQKVGSEQKEPPEEAEPVAAAEPEVPENNGNNSWPHNDTEIANSTPNPKPAASSPETPSAGQQEAKTDQADGPREPPQSARRKRSYKQAVSELDEEQHLEDEELQPPRSKTPSSPCPASKVVRPLRTFLHTVQRNQMLMTPTSAPRSVMKSFIKRNTPLRMDPKEKERQRLENLRRKEEAEQLRRQKVEEDKRRRLEEVKLKREERLRKVLQARERVEQMKEEKKKQIEQKFAQIDEKTEKAKEERLAEEKAKKKAAAKKMEEVEARRKQEEEARRLRWLQQEEEERRHQELLQKKKEEEQERLRKAAEAKRLAEQREQERREQERREQERREQERREQERREQERQLAEQERRREQERLQAERELQEREKALRLQKEQLQRELEEKKKKEEQQRLAERQLQEEQEKKAKEAAGASKALNVTVDVQSPACTSYQMTPQGHRAPPKINPDNYGMDLNSDDSTDDEAHPRKPIPTWARGTPLSQAIIHQYYHPPNLLELFGTILPLDLEDIFKKSKPRYHKRTSSAVWNSPPLQGARVPSSLAYSLKKH

SEQ ID NO: 377 - protein, 215 aa, Homo sapiens
MYGKSSTRAVLLLLGIQLTALWPIAAVEIYTSRVLEAVNGTDARLKCTFSSFAPVGDALTVTWNFRPLDGGPEQFVFYYHIDPFQPMSGRFKDRVSWDGNPERYDASILLWKLQFDDNGTYTCQVKNPPDVDGVIGEIRLSVVHTVRFSEIHFLALAIGSACALMIIIVIVVVLFQHYRKKRWAERAHKVVEIKSKEEERLNQEKKVSVYLEDTD

SEQ ID NO: 378 - protein, 667 aa, Homo sapiens
MAGMKTASGDYIDSSWELRVFVGEEDPEAESVTLRVTGESHIGGVLLKIVEQINRKQDWSDHAIWWEQKRQWLLQTHWTLDKYGILADARLFFGPQHRPVILRLPNRRALRLRASFSQPLFQAVAAICRLLSIRHPEELSLLRAPEKKEKKKKEKEPEEELYDLSKVVLAGGVAPALFRGMPAHFSDSAQTEACYHMLSRPQPPPDPLLLQRLPRPSSLSDKTQLHSRWLDSSRCLMQQGIKAGDALWLRFKYYSFFDLDPKTDPVRLTQLYEQARWDLLLEEIDCTEEEMMVFAALQYHINKLSQSGEVGEPAGTDPGLDDLDVALSNLEVKLEGSAPTDVLDSLTTIPELKDHLRIFRIPRRPRKLTLKGYRQHWVVFKETTLSYYKSQDEAPGDPIQQLNLKGCEVVPDVNVSGQKFCIKLLVPSPEGMSEIYLRCQDEQQYARWMAGCRLASKGRTMADSSYTSEVQAILAFLSLQRTGSGGPGNHPHGPDASAEGLNPYGLVAPRFQRKFKAKQLTPRILEAHQNVAQLSLAEAQLRFIQAWQSLPDFGISYVMVRFKGSRKDEILGIANNRLIRIDLAVGDVVKTWRFSNMRQWNVNWDIRQVAIEFDEHINVAFSCVSASCRIVHEYIGGYIFLSTRERARGEELDEDLFLQLTGGHEAF

SEQ ID NO: 379 - protein, 1234 aa, Homo sapiens
MAGAQPGVHALQLEPPTVVETLRRGSKFIKWDEETSSRNLVTLRVDPNGFFLYWTGPNMEVDTLDISSIRDTRTGRYARLPKDPKIREVLGFGGPDARLEEKLMTVVSGPDPVNTVFLNFMAVQDDTAKVWSEELFKLAMNILAQNASRNTFLRKAYTKLKLQVNQDGRIPVKNILKMFSADKKRVETALESCGLKFNRSESIRPDEFSLEIFERFLNKLCLRPDIDKILLEIGAKGKPYLTLEQLMDFINQKQRDPRLNEVLYPPLRPSQARLLIEKYEPNQQFLERDQMSMEGFSRYLGGEENGILPLEALDLSTDMTQPLSAYFINSSHNTYLTAGQLAGTSSVEMYRQALLWGCRCVELDVWKGRPPEEEPFITHGFTMTTEVPLRDVLEAIAETAFKTSPYPVILSFENHVDSAKQQAKMAEYCRSIFGDALLIEPLDKYPLAPGVPLPSPQDLMGRILVKNKKRHRPSAGGPDSAGRKRPLEQSNSALSESSAATEPSSPQLGSPSSDSCPGLSNGEEVGLEKPSLEPQKSLGDEGLNRGPYVLGPADREDEEEDEEEEEQTDPKKPTTDEGTASSEVNATEEMSTLVNYIEPVKFKSFEAARKRNKCFEMSSFVETKAMEQLTKSPMEFVEYNKQQLSRIYPKGTRVDSSNYMPQLFWNVGCQLVALNFQTLDVAMQLNAGVFEYNGRSGYLLKPEFMRRPDKSFDPFTEVIVDGIVANALRVKVISGQFLSDRKVGIYVEVDMFGLPVDTRRKYRTRTSQGNSFNPVWDEEPFDFPKVVLPTLASLRIAAFEEGGKFVGHRILPVSAIRSGYHYVCLRNEANQPLCLPALLIYTEASDYIPDDHQDYAEALINPIKHVSLMDQRARQLAALIGESEAQAGQETCQDTQSQQLGSQPSSNPTPSPLDASPRRPPGPTTSPASTSLSSPGQRDDLIASILSEVAPTPLDELRGHKALVKLRSRQERDLRELRKKHQRKAVTLTRRLLDGLAQAQAEGRCRLRPGALGGAADVEDTKEGEDEAKRYQEFQNRQVQSLLELREAQVDAEAQRRLEHLRQALQRLREVVLDANTTQFKRLKEMNEREKKELQKILDRKRHNSISEAKMRDKHKKEAELTEINRRHITESVNSIRRLEEAQKQRHDRLVAGQQQVLQQLAEEEPKLLAQLAQECQEQRARLPQEIRRSLLGEMPEGLGDGPLVACASNGHAPGSSGHLSGADSESQEENTQL

SEQ ID NO: 380 - protein, 336 aa, Homo sapiens
MDYPTLLLALLHVYRALCEEVLWHTSVPFAENMSLECVYPSMGILTQVEWFKIGTQQDSIAIFSPTHGMVIRKPYAERVYFLNSTMASNNMTLFFRNASEDDVGYYSCSLYTYPQGTWQKVIQVVQSDSFEAAVPSNSHIVSEPGKNVTLTCQPQMTWPVQAVRWEKIQPRQIDLLTYCNLVHGRNFTSKFPRQIVSNCSHGRWSVIVIPDVTVSDSGLYRCYLQASAGENETFVMRLTVAEGKTDNQYTLFVAGGTVLLLLFVISITTIIVIFLNRRRRRERRDLFTESWDTQKAPNNYRSPISTSQPTNQSMDDTREDIYVNYPTFSRRPKTRV

SEQ ID NO: 381 - protein, 116 aa, Homo sapiens
MNQTDKNQQEIPSYLNDEPPEGSMKDHPQQQPGMLSRVTGGIFSVTKGAVGATIGGVAWIGGKSLEVTKTAVTTVPSMGIGLVKGGVSAVAGGVTAVGSAVVNKVPLTGKKKDKSD

SEQ ID NO: 382 - protein, 1104 aa, Homo sapiens
MARRGKKPVVRTLEDLTLDSGYGGAADSVRSSNLSLCCSDSHPASPYGGSCWPPLADSMHSRHNSFDTVNTALVEDSEGLDCAGQHCSRLLPDLDEVPWTLQELEALLLRSRDPRAGPAVPGGLPKDALAKLSTLVSRALVRIAKEAQRLSLRFAKCTKYEIQSAMEIVLSWGLAAHCTAAALAALSLYNMSSAGGDRLGRGKSARCGLTFSVGRVYRWMVDSRVALRIHEHAAIYLTACMESLFRDIYSRVVASGVPRSCSGPGSGSGSGPGPSSGPGAAPAADKEREAPGGGAASGGACSAASSASGGSSCCAPPAAAAAAVPPAAAANHHHHHHHALHEAPKFTVETLEHTVNNDSEIWGLLQPYQHLICGKNASGVLCLPDSLNLHRDPQRSNKPGELPMFSQSELRTIEQSLLATRVGSIAELSDLVSRAMHHLQPLNAKHHGNGTPLHHKQGALYWEPEALYTLCYFMHCPQMEWENPNVEPSKVNLQVERPFLVLPPLMEWIRVAVAHAGHRRSFSMDSDDVRQAARLLLPGVDCEPRQLRADDCFCASRKLDAVAIEAKFKQDLGFRMLNCGRTDLVKQAVSLLGPDGINTMSEQGMTPLMYACVRGDEAMVQMLLDAGADLNVEVVSTPHKYPSVHPETRHWTALTFAVLHGHIPVVQLLLDAGAKVEGSVEHGEENYSETPLQLAAAVGNFELVSLLLERGADPLIGTMYRNGISTTPQGDMNSFSQAAAHGHRNVFRKLLAQPEKEKSDILSLEEILAEGTDLAETAPPPLCASRNSKAKLRALREAMYHSAEHGYVDVTIDIRSIGVPWTLHTWLESLRIAFQQHRRPLIQCLLKEFKTIQEEEYTEELVTQGLPLMFEILKASKNEVISQQLCVIFTHCYGPYPIPKLTEIKRKQTSRLDPHFLNNKEMSDVTFLVEGRPFYAHKVLLFTASPRFKALLSSKPTNDGTCIEIGYVKYSIFQLVMQYLYYGGPESLLIKNNEIMELLSAAKFFQLEALQRHCEIICAKSINTDNCVDIYNHAKFLGVTELSAYCEGYFLKNMMVLIENEAFKQLLYDKNGEGTGQDVLQDLQRTLAIRIQSIHLSSSKGSVV

SEQ ID NO: 383 - protein, 2319 aa, Homo sapiens
MLTMSVTLSPLRSQDLDPMATDASPMAINMTPTVEQGEGEEAMKDMDSDQQYEKPPPLHTGADWKIVLHLPEIETWLRMTSERVRDLTYSVQQDSDSKHVDVHLVQLKDICEDISDHVEQIHALLETEFSLKLLSYSVNVIVDIHAVQLLWHQLRVSVLVLRERILQGLQDANGNYTRQTDILQAFSEETKEGRLDSLTEVDDSGQLTIKCSQNYLSLDCGITAFELSDYSPSEDLLSGLGDMTSSQVKTKPFDSWSYSEMEKEFPELIRSVGLLTVAADSISTNGSEAVTEEVSQVSLSVDDKGGCEEDNASAVEEQPGLTLGVSSSSGEALTNAAQPSSETVQQESSSSSHHDAKNQQPVPCENATPKRTIRDCFNYNEDSPTQPTLPKRGLFLKEETFKNDLKGNGGKRQMVDLKPEMSRSTPSLVDPPDRSKLCLVLQSSYPNSPSAASQSYECLHKVGNGNLENTVKFHIKEISSSLGRLNDCYKEKSRLKKPHKTSEEVPPCRTPKRGTGSGKQAKNTKSSAVPNGELSYTSKAIEGPQTNSASTSSLEPCNQRSWNAKLQLQSETSSSPAFTQSSESSVGSDNIMSPVPLLSKHKSKKGQASSPSHVTRNGEVVEAWYGSDEYLALPSHLKQTEVLALKLENLTKLLPQKPRGETIQNIDDWELSEMNSDSEIYPTYHVKKKHTRLGRVSPSSSSDIASSLGESIESGPLSDILSDEESSMPLAGMKKYADEKSERASSSEKNESHSATKSALIQKLMQDIQHQDNYEAIWEKIEGFVNKLDEFIQWLNEAMETTENWTPPKAEMDDLKLYLETHLSFKLNVDSHCALKEAVEEEGHQLLELIASHKAGLKDMLRMIASQWKELQRQIKRQHSWILRALDTIKAEILATDVSVEDEEGTGSPKAEVQLCYLEAQRDAVEQMSLKLYSEQYTSSSKRKEEFADMSKVHSVGSNGLLDFDSEYQELWDWLIDMESLVMDSHDLMMSEEQQQHLYKRYSVEMSIRHLKKTELLSKVEALKKGGVLLPNDLLEKVDSINEKWELLGKTLGEKIQDTMAGHSGSSPRDLLSPESGSLVRQLEVRIKELKGWLRDTELFIFNSCLRQEKEGTMNTEKQLQYFKSLCREIKQRRRGVASILRLCQHLLDDRETCNLNADHQPMQLIIVNLERRWEAIVMQAVQWQTRLQKKMGKESETLNVIDPGLMDLNGMSEDALEWDEMDISNKLISLNEESNDLDQELQPVIPSLKLGETSNEDPGYDEEADNHGGSQYASNITAPSSPHIYQVYSLHNVELYEDNHMPFLKNNPKVTGMTQPNVLTKSLSKDSSFSSTKSLPDLLGGSNLVKPCACHGGDMSQNSGSESGIVSEGDTETTTNSEMCLLNAVDGSPSNLETEHLDPQMGDAVNVLKQKFTDEGESIKLPNSSQSSISPVGCVNGKVGDLNSITKHTPDCLGEELQGKHDVFTFYDYSYLQGSKLKLPMIMKQSQSEKAHVEDPLLRGFYFDKKSCKSKHQTTELQPDVPPHERILASASHEMDRISYKSGNIEKTFTGMQNAKQLSLLSHSSSIESLSPGGDLFGLGIFKNGSDSLQRSTSLESWLTSYKSNEDLFSCHSSGDISVSSGSVGELSKRTLDLLNRLENIQSPSEQKIKRSVSDITLQSSSQKMSFTGQMSLDIASSINEDSAASLTELSSSDELSLCSEDIVLHKNKIPESNASFRKRLTRSVADESDVNVSMIVNVSCTSACTDDEDDSDLLSSSTLTLTEEELCIKDEDDDSSIATDDEIYEDCTLMSGLDYIKNELQTWIRPKLSLTRDKKRCNVSDEMKGSKDISSSEMTNPSDTLNIETLLNGSVKRVSENNGNGKNSSHTHELGTKRENKKTIFKVNKDPYVADMENGNIEGIPERQKGKPNVTSKVSENLGSHGKEISESEHCKCKALMDSLDDSNTAGKEFVSQDVRHLPKKCPNHHHFENQSTASTPTEKSFSELALETRFNNRQDSDALKSSDDAPSMAGKSAGCCLALEQNGTEENASISNISCCNCEPDVFHQKDAEDCSVHNFVKEIIDMASTALKSKSQPENEVAAPTSLTQIKEKVLEHSHRPIQLRKGDFYSYLSLSSHDSDCGEVTNYIEEKSSTPLPLDTTDSGLDDKEDIECFFEACVEGDSDGEEPCFSSAPPNESAVPSEAAMPLQATACSSEFSDSSLSADDADTVALSSPSSQERAEVGKEVNGLPQTSSGCAENLEFTPSKLDSEKESSGKPGESGMPEEHNAASAKSKVQDLSLKANQPTDKAALHPSPKTLTCEENLLNLHEKRHRNMHR

SEQ ID NO: 384 - protein, 987 aa, Homo sapiens
MTPALREATAKGISFSSLPSTMESDKMLYMESPRTVDEKLKGDTFSQMLGFPTPEPTLNTNFVNLKHFGSPQSSKHYQTVFLMRSNSTLNKHNENYKQKKLGEPSCNKLKNILYNGSNIQLSKICLSHSEEFIKKEPLSDTTSQCMKDVQIILDSNITKDTNVDKVQLQNCKWYQENALLDKVTDAEIKKGLLHCTQKKIVPGHSNVPVSSSAAEKEEEVHARLLHCVSKQKILLSQARRTQKHLQMLLAKHVVKHYGQQMKLSMKHQLPKMKTFHEPTTILGNSLPKCTEIKPEVNTLTAENKLWDDAKNGFARCTAAEIQRFAFSATGLLSHVEEGLDSDATDSSSDDDLDEYTLRKNVAVNCSTEWKWLVDRARVGSRWTWLQAQISDLECKIQQLTDIHRQIRASKGIVVLEECQLPKDILKKQMQFADQAASLNILGNPQVPQECQDPVPEQDFEMSPSSPTLLLRNIEKQSAQLTEIINSLIAPLNLSPTSSPLSSKSCSHKCLANGIYRSASENLDELSSSSSWLLNQKHSKKKRKDRTRLKSSSLTFMSTSARTRPLQSFHKRKLYRLSPTFYWTPQTLPSKETAFLNTTQMPCLQSASTWSSYEHNSESYLLREHVSELDSSFHSVLSLPSDVPLHFHFETLLKKTEIKGNLAENKFVDEYIISPSPVHSTLNQWRNGYSPICKPQIRSESSAQLLQGRKKRHLSETALGERTKLEESDFQHTESGSHSNFTAVSNVNVLSRIQNSSRNTARRRLRSESSYDIDNIVIPMSLVAPAKLEKLQYKEILTPSWRMVVLQPLDEYNLGKEEIEDLSDEVFSLRHKKYEEREQARWSLWEQSKWHRRNSRAYSKNVEGQDLLLKEYPNNFSSSQQCAAASPPGLPSENQDLCAYGLPSLNQSQETKSLWWERRAFPLKGEDMAALLCQDEKKDQVERSSTAFHGEIFGTSVPENGHHPKKQSDGMEEYKTFGLGLTNVKKNR

SEQ ID NO: 385 - protein, 221 aa, Homo sapiens
MHFLTIYPNCSSGVVRAQSRTEQKNPLGLDDLGIQNLGQTVSLAPAVEAASMLKMEPLNSTHPGTAASSSPLESRAAGGGSGNGNEYFYILVVMSFYGIFLIGIMLGYMKSKRREKKSSLLLLYKDEERLWGEAMKPLPVVSGLRSVQVPLMLNMLQESVAPALSCTLCSMEGDSVSSESSSPDVHLTIQEEGADDELEETSETPLNESSEGSSENIHQNS

SEQ ID NO: 386 - protein, 2579 aa, Homo sapiens
MAEAVKPQRRAKAKASRTKTKEKKKYETPQREESSEVSLPKTSREQEIPSLACEFKGDHLKVVTDSQLQDDASGQNESEMFDVPLTSLTISNEESLTCNTEPPKEGGEARPCVGDSAVTPKVHPGDNVGTKVETPKNFTEVEENMSVQGGLSESAPQSNFSYTQPAMENIQVRETQNSKEDKQGLVCSSEVPQNVGLQSSCPAKHGFQTPRVKKLYPQLPAEIAGEAPALVAVKPLLRSERLYPELPSQLELVPFTKEQLKILEPGSWLENVESYLEEFDSMAHQDRHEFYELLLNYSRCRKQLLLAEAELLTLTSDCQNAKSRLWQFKEEQMSVQGICADQVKVFSYHRYQRVEMNENALVELKKLFDAKSEHLHQTLALHSYTSVLSRLQVESYIYALLSSSAVLRSSAIHQQGRASKQTESIPSDLCQLKECISVLFMFTRRVNEDTQFHDDILLWLQKLVSVLQRVGCPGDHLFLLNHILRCPAGVSKWAVPFIQIKVLHNPSGVFHFMQSLALLMSPVKNRAEFMCHMKPSERKPSSSGPGSGTWTLVDEGGEEDEDPETSWILLNEDDLVTILAQFPFHELFQHLLGFKAKGDYLPETTRPQEMMKIFAFANSLVELLAVGLETFNRARYRQFVKRIGYMIRMTLGYVSDHWAQYVSHNQGSGLAQQPYSMEKLQVEFDELFLRAVLHVLKAKRLGIWLFMSEMPFGTLSVQMLWKLFYLMHQVESENLQQLSSSLQPAQCKQQLQDPEHFTNFEKCLSSMNSSEEICLLTTFAQMAQARRTNVDEDFIKIIVLEIYEVSYVTLSTRETFSKVGRELLGTITAVHPEIISVLLDRVQETIDQVGMVSLYLFKELPLYLWQPSASEIAVIRDWLLNYNLTVVKNKLACVILEGLNWGFAKQATLHLDQAVHAEVALMVLEAYQKYLAQKPYAGILSESMKQVSYLASIVRYGETPETSFNQWAWNLILRLKLHKNDYGIQPNCPAVPFSVTVPDMTESPTFHPLLKAVKAGMPIGCYLALSMTAVGHSIEKFCAEGIPLLGILVQSRHLRTVVHVLDKILPLFYPCQYYLLKNEQFLSHLLLFLHLDSGVPQGVTQQVTHKVAQHLTGASHGDNVKLLNSMIQAHISVSTQPNEVGPVAVLEFWVQALISQHLWYREQPILFLMDHLCKAAFQLMQEDCIQKLLYQQHKNALGYHCDRSLLSSLVSWIVAGNITPSFVEGLATPTQVWFAWTVLNMESIFEEDSQLRRVIEGELVINSAFTPDQALKKAQTQLKLPIVPSLQRLLIYRWAHQALVTPSDHPLLPLIWQKFFLLYLHRPGPQYGLPIDGCIGRRFFQSPAHINLLKEMKRRLTEVADFHHAASKALRVPAEGSEGLPESHSGTPGYLTSPELHKELVRLFNVYILWLEDENFQKGDTYIPSLPKHYDIHRLAKVMQNQQDLWMEYLNMERIYHEFQETVGLWTQAKLESHSTPCSLSVQLDFTDPLLAKERVLSNLRKHEAPQPPLALHPTKPPVPVISSAVLLSQKDATQLVCTDLNLLQQQARTAALRESQQVALDGELLDTMPKQYVNREEQTTLHLECRGSSGKKCQGAAVVTVQFEGMHKNEAISQQLHVLRKEVKQLQAEAAKPPSLNIVEAAVHAENLITALVNAYKLQPTPGIQKVGISLFFTIVDYVSDETQRHPPTRQFFTSCIEILGQVFISGIKSECRKVLETILKNSRLCSLLSPFFTPNAAPAEFIQLYEQVVKFLSEDNSDMIFMLLTKFDLKQWLSATKPPLSDRTRLLESIHLALTAWGLEPDEDILMPFNLFCKHWTYLLLYQFPDQYSDILRLLMQSSAEQLLSPECWKATLRALGCCAPSCQQGAASTEGAVLPSSSDALLSDKQVMETIQWLSDFFYKLRLSKMDFKSFGLFSKWSPYMADVKTFLGYLVKRLIDLEMTCLAQDPTASRKTVLKSLHSVIIQLFKPWILVLEDNESSQQRHYPWLESDTVVASSIVQLFTDCIDSLHESFKDKLLPGDAGALWLHLMHYCEACTAPKMPEFILYAFHSTYRKLPWKDLHPDQMLMEAFFKVERGSPKSCFLFLGSVLCEVNWVSVLSDAWNSSPHPETRSMIVCLLFMMILLAKEVQLVDQTDSPLLSLLGQTSSLSWHLVDIVSYQSVLSYFSSHYPPSIILAKESYAELIMKLLKVSAGLSIPTDSQKHLDAVPKCQAFTHQMVQFLSTLEQNGKITLAVLEQEMSKLLDDIIVFNPPDMDSQTRHMALSSLFMEVLMMMNNATIPTAEFLRGSIRTWIGQKMHGLVVLPLLTAACQSLASVRHMAETTEACITAYFKESPLNQNSGWGPILVSLQVPELTMEEFLQECLTLGSYLTLYVYLLQCLNSEQTLRNEMKVLLILSKWLEQVYPSSVEEEAKLFLWWHQVLQLSLIQTEQNDSVLTESVIRILLLVQSRQNLVAEERLSSGILGAIGFGRKSPLSNRFRVVARSMAAFLSVQVPMEDQIRLRPGSELHLTPKAQQALNALESMASSKQYVEYQDQILQATQFIRHPGHCLQDGKSFLALLVNCLYPEVHYLDHIR

SEQ ID NO: 387 - protein, 115 aa, Homo sapiens
MIPAKDMAKVMIVMLAICFLTKSDGKSVKKRSVSEIQLMHNLGKHLNSMERVEWLRKKLQDVHNFVALGAPLAPRDAGSQRPRKKEDNVLVESHEKSLGEADKADVNVLTKAKSQ

SEQ ID NO: 388 - protein, 894 aa, Homo sapiens
MATSMAAASGRFESAKSIEERKEQTRNARAEVLRQAKANFEKEERRKELKRLRGEDTWMLPDVNERIEQFSQEHSVKKKKKKDKHSKKAKKEKKKKSKKQKYEKNNESSDSSSSSEDEWVEAVPSQTPDKEKAWKVKDEKSGKDDTQIIKRDEWMTVDFMSVKTVSSSSLKAEKETMRKIEQEKNQALEQSKLMERELNPYWKDGGTGLPPEDCSVSSITKVSVVEDGGLSWLRKSYLRMKEQAEKQSRNFEDIVAERYGSMEIFQSKLEDAEKAASTKEDYRRERWRKPTYSDKAQNCQESRESDLVKYGNSSRDRYATTDTAKNSNNEKFIGDEKDKRPGSLETCRRESNPRQNQEFSFGNLRAKFLRPSDDEELSFHSKGRKFEPLSSSSALVAQGSLCSGFRKPTKNSEERLTSWSRSDGRGDKKHSNQKPSETSTDEHQHVPEDPREKSQDEVLRDDPPKKEHLRDTKSTFAGSPERESIHILSVDEKNKLGAKIIKAEMMGNMELAEQLKVQLEKANKFKETITQIPKKSGVENEDQQEVILVRTDQSGRVWPVNTPGKSLESQGGRRKRQMVSTHEERERVRYFHDDDNLSLNDLVKNEKMGTAENQNKLFMRMASKFMGKTDGDYYTLDDMFVSKAAERERLGEEEENQRKKAIAEHRSLAAQMEKCLYCFDSSQFPKHLIVAIGVKVYLCLPNVRSLTEGHCLIVPLQHHRAATLLDEDIWEEIQMFRKSLVKMFEDKGLDCIFLETNMSMKKQYHMVYECIPLPKEVGDMAPIYFKKAIMESDEEWSMNKKLIDLSSKDIRKSVPRGLPYFSVDFGLHGGFAHVIEDQHKFPHYFGKEIIGGMLDIEPRLWRKGIRESFEDQRKKALQFAQWWKPYDFTKSKNY

SEQ ID NO: 389 - protein, 586 aa, Homo sapiens
MESNHKSGDGLSGTQKEAALRALVQRTGYSLVQENGQRKYGGPPPGWDAAPPERGCEIFIGKLPRDLFEDELIPLCEKIGKIYEMRMMMDFNGNNRGYAFVTFSNKVEAKNAIKQLNNYEIRNGRLLGVCASVDNCRLFVGGIPKTKKREEILSEMKKVTEGVVDVIVYPSAADKTKNRGFAFVEYESHRAAAMARRKLLPGRIQLWGHGIAVDWAEPEVEVDEDTMSSVKILYVRNLMLSTSEEMIEKEFNNIKPGAVERVKKIRDYAFVHFSNREDAVEAMKALNGKVLDGSPIEVTLAKPVDKDSYVRYTRGTGGRGTMLQGEYTYSLGQVYDPTTTYLGAPVFYAPQTYAAIPSLHFPATKGHLSNRAIIRAPSVRGAAGVRGLGGRGYLAYTGLGRGYQVKGDKREDKLYDILPGMELTPMNPVTLKPQGIKLAPQILEEICQKNNWGQPVYQLHSAIGQDQRQLFLYKITIPALASQNPAIHPFTPPKLSAFVDEAKTYAAEYTLQTLGIPTDGGDGTMATAAAAATAFPGYAVPNATAPVSAAQLKQAVTLGQDLAAYTTYEVYPTFAVTARGDGYGTF

SEQ ID NO: 390 - protein, 472 aa, Homo sapiens
MAGASRLLFLWLGCFCVSLAQGERPKPPFPELRKAVPGDRTAGGGPDSELQPQDKVSEHMLRLYDRYSTVQAARTPGSLEGGSQPWRPRLLREGNTVRSFRAAAAETLERKGLYIFNLTSLTKSENILSATLYFCIGELGNISLSCPVSGGCSHHAQRKHIQIDLSAWTLKFSRNQSQLLGHLSVDMAKSHRDIMSWLSKDITQLLRKAKENEEFLIGFNITSKGRQLPKRRLPFPEPYILVYANDAAISEPESVVSSLQGHRNFPTGTVPKWDSHIRAALSIERRKKRSTGVLLPLQNNELPGAEYQYKKDEVWEERKPYKTLQAQAPEKSKNKKKQRKGPHRKSQTLQFDEQTLKKARRKQWIEPRNCARRYLKVDFADIGWSEWIISPKSFDAYYCSGACQFPMPKSLKPSNHATIQSIVRAVGVVPGIPEPCCVPEKMSSLSILFFDENKNVVLKVYPNMTVESCACR

SEQ ID NO: 391 - protein, 1221 aa, Homo sapiens
MECALLLACAFPAAGSGPPRGLAGLGRVAKALQLCCLCCASVAAALASDSSSGASGLNDDYVFVTPVEVDSAGSYISHDILHNGRKKRSAQNARSSLHYRFSAFGQELHLELKPSAILSSHFIVQVLGKDGASETQKPEVQQCFYQGFIRNDSSSSVAVSTCAGLSGLIRTRKNEFLISPLPQLLAQEHNYSSPAGHHPHVLYKRTAEEKIQRYRGYPGSGRNYPGYSPSHIPHASQSRETEYHHRRLQKQHFCGRRKKYAPKPPTEDTYLRFDEYGSSGRPRRSAGKSQKGLNVETLVVADKKMVEKHGKGNVTTYILTVMNMVSGLFKDGTIGSDINVVVVSLILLEQEPGGLLINHHADQSLNSFCQWQSALIGKNGKRHDHAILLTGFDICSWKNEPCDTLGFAPISGMCSKYRSCTINEDTGLGLAFTIAHESGHNFGMIHDGEGNPCRKAEGNIMSPTLTGNNGVFSWSSCSRQYLKKFLSTPQAGCLVDEPKQAGQYKYPDKLPGQIYDADTQCKWQFGAKAKLCSLGFVKDICKSLWCHRVGHRCETKFMPAAEGTVCGLSMWCRQGQCVKFGELGPRPIHGQWSAWSKWSECSRTCGGGVKFQERHCNNPKPQYGGLFCPGSSRIYQLCNINPCNENSLDFRAQQCAEYNSKPFRGWFYQWKPYTKVEEEDRCKLYCKAENFEFFFAMSGKVKDGTPCSPNKNDVCIDGVCELVGCDHELGSKAVSDACGVCKGDNSTCKFYKGLYLNQHKANEYYPVVLIPAGARSIEIQELQVSSSYLAVRSLSQKYYLTGGWSIDWPGEFPFAGTTFEYQRSFNRPERLYAPGPTNETLVFEILMQGKNPGIAWKYALPKVMNGTPPATKRPAYTWSIVQSECSVSCGGGYINVKAICLRDQNTQVNSSFCSAKTKPVTEPKICNAFSCPAYWMPGEWSTCSKACAGGQQSRKIQCVQKKPFQKEEAVLHSLCPVSTPTQVQACNSHACPPQWSLGPWSQCSKTCGRGVRKRELLCKGSAAETLPESQCTSLPRPELQEGCVLGRCPKNSRLQWVASSWSECSATCGLGVRKREMKCSEKGFQGKLITFPERRCRNIKKPNLDLEETCNRRACPAHPVYNMVAGWYSLPWQQCTVTCGGGVQTRSVHCVQQGRPSSSCLLHQKPPVLRACNTNFCPAPEKREDPSCVDFFNWCHLVPQHGVCNHKFYGKQCCKSCTRKI

SEQ ID NO: 392 - protein, 887 aa, Homo sapiens
MAGRVPSLLVLLVFPSSCLAFRSPLSVFKRFKETTRPFSNECLGTTRPVVPIDSSDFALDIRMPGVTPKQSDTYFCMSMRIPVDEEAFVIDFKPRASMDTVHHMLLFGCNMPSSTGSYWFCDEGTCTDKANILYAWARNAPPTRLPKGVGFRVGGETGSKYFVLQVHYGDISAFRDNNKDCSGVSLHLTRLPQPLIAGMYLMMSVDTVIPAGEKVVNSDISCHYKNYPMHVFAYRVHTHHLGKVVSGYRVRNGQWTLIGRQSPQLPQAFYPVGHPVDVSFGDLLAARCVFTGEGRTEATHIGGTSSDEMCNLYIMYYMEAKHAVSFMTCTQNVAPDMFRTIPPEANIPIPVKSDMVMMHEHHKETEYKDKIPLLQQPKREEEEVLDQGDFYSLLSKLLGEREDVVHVHKYNPTEKAESESDLVAEIANVVQKKDLGRSDAREGAEHERGNAILVRDRIHKFHRLVSTLRPPESRVFSLQQPPPGEGTWEPEHTGDFHMEEALDWPGVYLLPGQVSGVALDPKNNLVIFHRGDHVWDGNSFDSKFVYQQIGLGPIEEDTILVIDPNNAAVLQSSGKNLFYLPHGLSIDKDGNYWVTDVALHQVFKLDPNNKEGPVLILGRSMQPGSDQNHFCQPTDVAVDPGTGAIYVSDGYCNSRIVQFSPSGKFITQWGEESSGSSPLPGQFTVPHSLALVPLLGQLCVADRENGRIQCFKTDTKEFVREIKHSSFGRNVFAISYIPGLLFAVNGKPHFGDQEPVQGFVMNFSNGEIIDIFKPVRKHFDMPHDIVASEDGTVYIGDAHTNTVWKFTLTEKLEHRSVKKAGIEVQEIKGKGSGGLNLGNFFASRKGYSRKGFDRLSTEGSDQEKEDDGSESEEEYSAPLPALAPSSS

SEQ ID NO: 393 - protein, 812 aa, Homo sapiens [sequence omitted]

SEQ ID NO: 394 - protein, 2005 aa, Homo sapiens
MAQSVLVPPGPDSFRFFTRESLAAIEQRIAEEKAKRPKQERKDEDDENGPKPNSDLEAGKSLPFIYGDIPPEMVSVPLEDLDPYYINKKTFIVLNKGKAISRFSATPALYILTPFNPIRKLAIKILVHSLFNMLIMCTILTNCVFMTMSNPPDWTKNVEYTFTGIYTFESLIKILARGFCLEDFTFLRDPWNWLDFTVITFAYVTEFVDLGNVSALRTFRVLRALKTISVIPGLKTIVGALIQSVKKLSDVMILTVFCLSVFALIGLQLFMGNLRNKCLQWPPDNSSFEINITSFFNNSLDGNGTTFNRTVSIFNWDEYIEDKSHFYFLEGQNDALLCGNSSDAGQCPEGYICVKAGRNPNYGYTSFDTFSWAFLSLFRLMTQDFWENLYQLTLRAAGKTYMIFFVLVIFLGSFYLINLILAVVAMAYEEQNQATLEEAEQKEAEFQQMLEQLKKQQEEAQAAAAAASAESRDFSGAGGIGVFSESSSVASKLSSKSEKELKNRRKKKKQKEQSGEEEKNDRVRKSESEDSIRRKGFRFSLEGSRLTYEKRFSSPHQSLLSIRGSLFSPRRNSRASLFSFRGRAKDIGSENDFADDEHSTFEDNDSRRDSLFVPHRHGERRHSNVSQASRASRVLPILPMNGKMHSAVDCNGVVSLVGGPSTLTSAGQLLPEGTTTETEIRKRRSSSYHVSMDLLEDPTSRQRAMSIASILTNTMEELEESRQKCPPCWYKFANMCLIWDCCKPWLKVKHLVNLVVMDPFVDLAITICIVLNTLFMAMEHYPMTEQFSSVLSVGNLVFTGIFTAEMFLKIIAMDPYYYFQEGWNIFDGFIVSLSLMELGLANVEGLSVLRSFRLLRVFKLAKSWPTLNMLIKIIGNSVGALGNLTLVLAIIVFIFAVVGMQLFGKSYKECVCKISNDCELPRWHMHDFFHSFLIVFRVLCGEWIETMWDCMEVAGQTMCLTVFMMVMVIGNLVVLNLFLALLLSSFSSDNLAATDDDNEMNNLQIAVGRMQKGIDFVKRKIREFIQKAFVRKQKALDEIKPLEDLNNKKDSCISNHTTIEIGKDLNYLKDGNGTTSGIGSSVEKYVVDESDYMSFINNPSLTVTVPIAVGESDFENLNTEEFSSESDMEESKEKLNATSSSEGSTVDIGAPAEGEQPEVEPEESLEPEACFTEDCVRKFKCCQISIEEGKGKLWWNLRKTCYKIVEHNWFETFIVFMILLSSGALAFEDIYIEQRKTIKTMLEYADKVFTYIFILEMLLKWVAYGFQVYFTNAWCWLDFLIVDVSLVSLTANALGYSELGAIKSLRTLRALRPLRALSRFEGMRVVVNALLGAIPSIMNVLLVCLIFWLIFSIMGVNLFAGKFYHCINYTTGEMFDVSVVNNYSECKALIESNQTARWKNVKVNFDNVGLGYLSLLQVATFKGWMDIMYAAVDSRNVELQPKYEDNLYMYLYFVIFIIFGSFFTLNLFIGVIIDNFNQQKKKFGGQDIFMTEEQKKYYNAMKKLGSKKPQKPIPRPANKFQGMVFDFVTKQVFDISIMILICLNMVTMMVETDDQSQEMTNILYWINLVFIVLFTGECVLKLISLRYYYFTIGWNIFDFVVVILSIVGMFLAELIEKYFVSPTLFRVIRLARIGRILRLIKGAKGIRTLLFALMMSLPALFNIGLLLFLVMFIYAIFGMSNFAYVKREVGIDDMFNFETFGNSMICLFQITTSAGWDGLLAPILNSGPPDCDPDKDHPGSSVKGDCGNPSVGIFFFVSYIIISFLVVVNMYIAVILENFSVATEESAEPLSEDDFEMFYEVWEKFDPDATQFIEFAKLSDFADALDPPLLIAKPNKVQLIAMDLPMVSGDRIHCLDILFAFTKRVLGESGEMDALRIQMEERFMASNPSKVSYEPITTTLKRKQEEVSAIIIQRAYRRYLLKQKVKKVSSIYKKDKGKECDGTPIKEDTLIDKLNENSTPEKTDMTPSTTSPPSYDSVTKPEKEKFEKDKSEKEDKGKDIRESKK

SEQ ID NO: 395 - protein, 590 aa, Homo sapiens
MEVIHGRPYCCRELEGADILSNTFYSNELHNPLQTVTRPTASEDRYQELRESLQQCRLPWGAEREYGGIIPISLPEDHRPKYEPPRVMGKGHQHYGFGGETWPRKLPVEQFYYLTQNKKSDVYGNDSLIPKPPNSTVGEICLPYPIEHPYHTHICRGAMFPTFTSPEDLYTGIKARTQQPFPPTVPTKAYDSTVLKTRGNPYRYELIDIPMDSKKKALTWPGQGVYYDFPRGVEKNKPVFYPKPPKTFAPNTSLNSWDPICSAKEANIQRNLERSHWLTSYTHDFTGLGPMDPLELDDYHEKMVAELTRKIGFDPEPQEKFHPVFKPPRPLEGRIARLIQNRRSLEAIVQQRPRSCPDCTPRVLCNFHTFVPSSKEMVALSDNIPAGVTHKNQDIEEKIIEEQSLLSTYELPSCYPTKDLTSIYDIKPFPKITDTKKTEDLYWRQQSLKTQPTPYCKPDHWIHYENLKSPLRDQYNMCPDPVSLSKPSVLQNKQDTEAFTLEHFLSKPEEELFLNMENNEETRPVLGWIPRAGVTKPQTNLLELKNSFSKTGAQKRFHKSILEDHKDLRDNEHSGMKHQFYGHNSYYFYN

SEQ ID NO: 396 - protein, 492 aa, Homo sapiens
MVKFPALTHYWPLIRFLVPLGITNIAIDFGEQALNRGIAAVKEDAVEMLASYGLAYSLMKFFTGPMSDFKNVGLVFVNSKRDRTKAVLCMVVAGAIAAVFHTLIAYSDLGYYIINKLHHVDESVGSKTRRAFLYLAAFPFMDAMAWTHAGILLKHKYSFLVGCASISDVIAQVVFVAILLHSHLECREPLLIPILSLYMGALVRCTTLCLGYYKNIHDIIPDRSGPELGGDATIRKMLSFWWPLALILATQRISRPIVNLFVSRDLGGSSAATEAVAILTATYPVGHMPYGWLTEIRAVYPAFDKNNPSNKLVSTSNTVTAAHIKKFTFVCMALSLTLCFVMFWTPNVSEKILIDIIGVDFAFAELCVVPLRIFSFFPVPVTVRAHLTGWLMTLKKTFVLAPSSVLRIIVLIASLVVLPYLGVHGATLGVGSLLAGFVGESTMVAIAACYVYRKQKKKMENESATEGEDSAMTDMPPTEEVTDIVEMREENE

SEQ ID NO: 397 - protein, 1617 aa, Homo sapiens
MNMKQKSVYQQTKALLCKNFLKKWRMKRESLLEWGLSILLGLCIALFSSSMRNVQFPGMAPQNLGRVDKFNSSSLMVVYTPISNLTQQIMNKTALAPLLKGTSVIGAPNKTHMDEILLENLPYAMGIIFNETFSYKLIFFQGYNSPLWKEDFSAHCWDGYGEFSCTLTKYWNRGFVALQTAINTAIIEITTNHPVMEELMSVTAITMKTLPFITKNLLHNEMFILFFLLHFSPLVYFISLNVTKERKKSKNLMKMMGLQDSAFWLSWGLIYAGFIFIISIFVTIIITFTQIIVMTGFMVIFILFFLYGLSLVALVFLMSVLLKKAVLTNLVVFLLTLFWGCLGFTVFYEQLPSSLEWILNICSPFAFTTGMIQIIKLDYNLNGVIFPDPSGDSYTMIATFSMLLLDGLIYLLLALYFDKILPYGDERHYSPLFFLNSSSCFQHQRTNAKVIEKEIDAEHPSDDYFEPVAPEFQGKEAIRIRNVKKEYKGKSGKVEALKGLLFDIYEGQITAILGHSGAGKSSLLNILNGLSVPTEGSVTIYNKNLSEMQDLEEIRKITGVCPQFNVQFDILTVKENLSLFAKIKGIHLKEVEQEVQRILLELDMQNIQDNLAKHLSEGQKRKLTFGITILGDPQILLLDEPTTGLDPFSRDQVWSLLRERRADHVILFSTQSMDEADILADRKVIMSNGRLKCAGSSMFLKRRWGLGYHLSLHRNEICNPEQITSFITHHIPDAKLKTENKEKLVYTLPLERTNTFPDLFSDLDKCSDQGVTGYDISMSTLNEVFMKLEGQSTIEQDFEQVEMIRDSESLNEMELAHSSFSEMQTAVSDMGLWRMQVFAMARLRFLKLKRQTKVLLTLLLVFGIAIFPLIVENIMYAMLNEKIDWEFKNELYFLSPGQLPQEPRTSLLIINNTESNIEDFIKSLKHQNILLEVDDFENRNGTDGLSYNGAIIVSGKQKDYRFSVVCNTKRLHCFPILMNIISNGLLQMFNHTQHIRIESSPFPLSHIGLWTGLPDGSFFLFLVLCSISPYITMGSISDYKKNAKSQLWISGLYTSAYWCGQALVDVSFFILILLLMYLIFYIENMQYLLITSQIVFALVIVTPGYAASLVFFIYMISFIFRKRRKNSGLWSFYFFFASTIMFSITLINHFDLSILITTMVLVPSYTLLGFKTFLEVRDQEHYREFPEANFELSATDFLVCFIPYFQTLLFVFVLRCMELKCGKKRMRKDPVFRISPQSRDAKPNPEEPIDEDEDIQTERIRTATALTTSILDEKPVIIASCLHKEYAGQKKSCFSKRKKKIAARNISFCVQEGEILGLLGPNGAGKSSSIRMISGITKPTAGEVELKGCSSVLGHLGYCPQENVLWPMLTLREHLEVYAAVKGLRKADARLAIARLVSAFKLHEQLNVPVQKLTAGITRKLCFVLSLLGNSPVLLLDEPSTGIDPTGQQQMWQAIQAVVKNTERGVLLTTHNLAEAEALCDRVAIMVSGRLRCIGSIQHLKNKLGKDYILELKVKETSQVTLVHTEILKLFPQAAGQERYSSLLTYKLPVADVYPLSQTFHKLEAVKHNFNLEEYSLSQCTLEKVFLELSKEQEVGNFDEEIDTTMRWKLLPHSDEP

SEQ ID NO: 398 - protein, 699 aa, Homo sapiens
MLKLSGEGLRDSYHSRRDQIALKNLQSDVTEAKSDFTKETLASQNTKMISSIVISQMIDENKSRENRASLPLPCAIAQSRAHHAKQSLANRSGVNIHRAFALLPGRLGIPAPSDERGPEAELPPKEERPCGGPRRGFASITITARRVGPPARALVWGTAGDSLCPKCRAEDTLFQAPPALANGAHPGRHQRSFACTEFSRNSSVVRLKVPEAHTGLCERRKYWVTHADDKETSFSPDTPLSGKSPLVFSSCVHLRVSQQCPDSIYYVDKSLSVPIEPPQIASPKMHRSVLSLNLNCSSHRLTADGVDGLVNREPISEALKQELLEGDQDLVGQRWNPGLQESHLKETPSLRRVHLGTGACPWSGSFPLENTELANVGANQVTVRKGEKDHTTHCHASDHANQLSIHIPGWSYRAVHTKVFSGSSKRQQGEVCMTVSAPPVEQKPTRHFLPIGDSSPSDDCLSRDLSEPTERRHQSFLKPRILFPGFLCPLQDVCASLQEDNGVQIESKFPKGDYTCCDLVVKIKECKKSEDPTTPEPSPAAPSPAPRDGAGSPGLSEDCSESQQTPARSLTLQEALEVRKPQFISRSQERLKKLEHMVQQRKAQRKEDLRQKQSLLPIRTSKKQFTIPHPLSDNLFKPKERCISEKEMHMRSKRIYDNLPEVKKKKEEQRKRVILQSNRLRAEVFKKQLLDQLLQRNAV

SEQ ID NO: 399 - protein, 770 aa, Homo sapiens
MLPGLALLLLAAWTARALEVPTDGNAGLLAEPQIAMFCGRLNMHMNVQNGKWDSDPSGTKTCIDTKEGILQYCQEVYPELQITNVVEANQPVTIQNWCKRGRKQCKTHPHFVIPYRCLVGEFVSDALLVPDKCKFLHQERMDVCETHLHWHTVAKETCSEKSTNLHDYGMLLPCGIDKFRGVEFVCCPLAEESDNVDSADAEEDDSDVWWGGADTDYADGSEDKVVEVAEEEEVAEVEEEEADDDEDDEDGDEVEEEAEEPYEEATERTTSIATTTTTTTESVEEVVREVCSEQAETGPCRAMISRWYFDVTEGKCAPFFYGGCGGNRNNFDTEEYCMAVCGSAMSQSLLKTTQEPLARDPVKLPTTAASTPDAVDKYLETPGDENEHAHFQKAKERLEAKHRERMSQVMREWEEAERQAKNLPKADKKAVIQHFQEKVESLEQEAANERQQLVETHMARVEAMLNDRRRLALENYITALQAVPPRPRHVFNMLKKYVRAEQKDRQHTLKHFEHVRMVDPKKAAQIRSQVMTHLRVIYERMNQSLSLLYNVPAVAEEIQDEVDELLQKEQNYSDDVLANMISEPRISYGNDALMPSLTETKTTVELLPVNGEFSLDDLQPWHSFGADSVPANTENEVEPVDARPAADRGLTTRPGSGLTNIKTEEISEVKMDAEFRHDSGYEVHHQKLVFFAEDVGSNKGAIIGLMVGGVVIATVIVITLVMLKKKQYTSIHHGVVEVDAAVTPEERHLSKMQQNGYENPTYKFFEQMQN

SEQ ID NO: 400 - protein, 1462 aa, Homo sapiens
MFRGPKPPIAPKPRLTAPNEWRASVYLNDSLNKCSNGRLPCVDRGLDEGPRSIPKCSESETDEDYIVVPRVPLREDEPKDEGSVGNKALVSPESSAEEEEEREEGGEACGLEGTGAGEDSVAPAAPGAGALSREGEEGTDLALEDEGEGCADEPGTLEQVSRSEEEEKLVQPHRECSLEDSGPWAGEGVFQSDLLLPHIHGEDQEPPDTPGEAEEDDEEGCASTDPAGADEGSGPDRPTEDMGQDAEDTSEEPPEKEELAGVQEAETATDCPEVLEEGCEEATGVTGGEQVDLSEPPDHEKKTNQEVAAATLEDHAQDESAEESCQIVPFENDCMEDFVTSLTGSPYEFFPTESTSFCSESCSPLSESAKGLESEQAPKLGLRAEENPMVGALCGQCGSLQGGAAEGPAAPDVVVVLEEEALDDALANPYVMGVGLPGQAAPGEGGQAASDALGGYGSKEELNCEAEGGLVPADRKNTSTRVRPHSGKVAGYVPETVPEETGPEAGSSAPGIGGAAEEVGKTLLSLEGKPLEASRALPAKPRAFTLYPRSFSVEGREIPVSVYQEPEGSGLDDHRIKRKEDNLSLSCVIGSSGSFSQRNHLPSSGTSTPSSMVDIPPPFDLACITKKPITKSSPSLLIESDSPDKYKKKKSSFKRFLALTFKKKTENKLHVDVNVSSSRSSSESSYHGPSRILEVDRRSLSNSPQLKSRTGKLRASESPSSLIFYRDGKRKGVPFSRTVSRVESFEDRSRPPFLPLPLTKPRSISFPSADTSDYENIPAMNSDYENIQIPPRRPARAGAFTKLFEDQSRALSTANENDGYVDMSSFNAFESKQQSADQDAESAYTEPYKVCPISSAAPKEDLTSDEEQRSSEEEDSASRDPSVTHKVEGQSRALVIAQELLSSEKAYVEMLQHLNLDFHGAVMRALDDMDHEGRDTLAREELRQGLSELPAIHDLHQGILEELEERLSNWESQQKVADVFLAREQGFDHHATHILQFDRYLGLLSENCLHSPRLAAAVREFEQSVQGGSQTAKHRLLRVVQRLFQYQVLLTDYLNNLCPDSAEYDNTQGALSLISKVTDRANDSMEQGENLQKLVHIEHSVRGQGDLLQPGREFLKEGTLMKVTGKNRRPRHLFLMNDVLLYTYPQKDGKYRLKNTLAVANMKVSRPVMEKVPYALKIETSESCLMLSASSCAERDEWYGCLSRALPEDYKAQALAAFHHSVEIRERLGVSLGERPPTLVPVTHVMMCMNCGCDFSLTLRRHHCHACGKIVCRNCSRNKYPLKYLKDRMAKVCDGCFGELKKRGRAVPGLMRERPVSMSFPLSSPRFSGSAFSSVFQSINPSTFKKQKKVPSALTEVAASGEGSAISGYLSRCKRGKRHWKKLWFVIKGKVLYTYMASEDKVALESMPLLGFTIAPEKEEGSSEVGPIFHLYHKKTLFYSFKAEDTNSAQRWIEAMEDASVL

SEQ ID NO: 401 - protein, 1508 aa, Homo sapiens
MGQEPRTLPPSPNWYCARCSDAVPGGLFGFAARTSVFLVRVGPGAGESPGTPPFRVIGELVGHTERVSGFTFSHHPGQYNLCATSSDDGTVKIWDVETKTVVTEHALHQHTISTLHWSPRVKDLIVSGDEKGVVFCYWFNRNDSQHLFIEPRTIFCLTCSPHHEDLVAIGYKDGIVVIIDISKKGEVIHRLRGHDDEIHSIAWCPLPGEDCLSINQEETSEEAEITNGNAVAQAPVTKGCYLATGSKDQTIRIWSCSRGRGVMILKLPFLKRRGGGIDPTVKERLWLTLHWPSNQPTQLVSSCFGGELLQWDLTQSWRRKYTLFSASSEGQNHSRIVFNLCPLQTEDDKQLLLSTSMDRDVKCWDIATLECSWTLPSLGGFAYSLAFSSVDIGSLAIGVGDGMIRVWNTLSIKNNYDVKNFWQGVKSKVTALCWHPTKEGCLAFGTDDGKVGLYDTYSNKPPQISSTYHKKTVYTLAWGPPVPPMSLGGEGDRPSLALYSCGGEGIVLQHNPWKLSGEAFDINKLIRDTNSIKYKLPVHTEISWKADGKIMALGNEDGSIEIFQIPNLKLICTIQQHHKLVNTISWHHEHGSQPELSYLMASGSNNAVIYVHNLKTVIESSPESPVTITEPYRTLSGHTAKITSVAWSPHHDGRLVSASYDGTAQVWDALREEPLCNFRGHRGRLLCVAWSPLDPDCIYSGADDFCVHKWLTSMQDHSRPPQGKKSIELEKKRLSQPKAKPKKKKKPTLRTPVKLESIDGNEEESMKENSGPVENGVSDQEGEEQAREPELPCGLAPAVSREPVICTPVSSGFEKSKVTINNKVILLKKEPPKEKPETLIKKRKARSLLPLSTSLDHRSKEELHQDCLVLATAKHSRELNEDVSADVEERFHLGLFTDRATLYRMIDIEGKGHLENGHPELFHQLMLWKGDLKGVLQTAAERGELTDNLVAMAPAAGYHVWLWAVEAFAKQLCFQDQYVKAASHLLSIHKVYEAVELLKSNHFYREAIAIAKARLRPEDPVLKDLYLSWGTVLERDGHYAVAAKCYLGATCAYDAAKVLAKKGDAASLRTAAELAAIVGEDELSASLALRCAQELLLANNWVGAQEALQLHESLQGQRLVFCLLELLSRHLEEKQLSEGKSSSSYHTWNTGTEGPFVERVTAVWKSIFSLDTPEQYQEAFQKLQNIKYPSATNNTPAKQLLLHICHDLTLAVLSQQMASWDEAVQALLRAVVRSYDSGSFTIMQEVYSAFLPDGCDHLRDKLGDHQSPATPAFKSLEAFFLYGRLYEFWWSLSRPCPNSSVWVRAGHRTLSVEPSQQLDTASTEETDPETSQPEPNRPSELDLRLTEEGERMLSTFKELFSEKHASLQNSQRTVAEVQETLAEMIRQHQKSQLCKSTANGPDKNEPEVEAEQPLCSSQSQCKEEKNEPLSLPELTKRLTEANQRMAKFPESIKAWPFPDVLECCLVLLLIRSHFPGCLAQEMQQQAQELLQKYGNTKTYRRHCQTFCM

SEQ ID NO: 402 - protein, 1142 aa, Homo sapiens
MGDKDMPTAGMPSLLQSSSESPQSCPEGEDSQSPLQIPQSSPESDDTLYPLQSPQSRSEGEDSSDPLQRPPEGKDSQSPLQIPQSSPEGDDTQSPLQNSQSSPEGKDSLSPLEISQSPPEGEDVQSPLQNPASSFFSSALLSIFQSSPESTQSPFEGFPQSVLQIPVSAASSSTLVSIFQSSPESTQSPFEGFPQSPLQIPVSRSFSSTLLSIFQSSPERTQSTFEGFAQSPLQIPVSPSSSSTLLSLFQSFSERTQSTFEGFAQSSLQIPVSPSFSSTLVSLFQSSPERTQSTFEGFPQSPLQIPVSSSSSSTLLSLFQSSPERTHSTFEGFPQSLLQIPMTSSFSSTLLSIFQSSPESAQSTFEGFPQSPLQIPGSPSFSSTLLSLFQSSPERTHSTFEGFPQSPLQIPMTSSFSSTLLSILQSSPESAQSAFEGFPQSPLQIPVSSSFSYTLLSLFQSSPERTHSTFEGFPQSPLQIPVSSSSSSSTLLSLFQSSPECTQSTFEGFPQSPLQIPQSPPEGENTHSPLQIVPSLPEWEDSLSPHYFPQSPPQGEDSLSPHYFPQSPPQGEDSLSPHYFPQSPQGEDSLSPHYFPQSPPQGEDSMSPLYFPQSPLQGEEFQSSLQSPVSICSSSTPSSLPQSFPESSQSPPEGPVQSPLHSPQSPPEGMHSQSPLQSPESAPEGEDSLSPLQIPQSPLEGEDSLSSLHFPQSPPEWEDSLSPLHFPQFPPQGEDFQSSLQSPVSICSSSTSLSLPQSFPESPQSPPEGPAQSPLQRPVSSFFSYTLASLLQSSHESPQSPPEGPAQSPLQSPVSSFPSSTSSSLSQSSPVSSFPSSTSSSLSKSSPESPLQSPVISFSSSTSLSPFSEESSSPVDEYTSSSDTLLESDSLTDSESLIESEPLFTYTLDEKVDELARFLLLKYQVKQPITKAEMLTNVISRYTGYFPVIFRKAREFIEILFGISLREVDPDDSYVFVNTLDLTSEGCLSDEQGMSQNRLLILILSIIFIKGTYASEEVIWDVLSGIGVRAGREHFAFGEPRELLTKVWVQEHYLEYREVPNSSPPRYEFLWGPRAHSEVIKRKVVEFLAMLKNTVPITFPSSYKDALKDVEERAQAIIDTTDDSTATESASSSVMSPSFSSE

SEQ ID NO: 403 - protein, 2012 aa, Homo sapiens
MATPLAVNSAASLWGPYKDIWHKVGNALWRRQPEAVHLLDKILKKHKPDFISLFKNPPKNVQQHEKVQKASTEGVAIQGQQGTRLLPEQLIKEAFILSDLFDIGELAAVELLLAGEHQQPHFPGLTRGLVAVLLYWDGKRCIANSLKALIQSRRGKTWTLELSPELASMTTRFTDELMEQGLTYKVLTLVSQIDVNNEFEKLQRERGLGSEKHRKEVSDLIKECRQSLAESLFAWACQSPLGKEDTLLLIGHLERVTVEANGSLDAVNLALLMALLYCFDISFIEQSTEERDDMIHQLPLLTEKQYIATIHSRLQDSQLWKLPGLQATVRLAWALALRGISQLPDVTALAEFTEADEAMAELAIADNVFLFLMESVVVSEYFYQEEFYIRRVHNLITDFLALMPMKVKQLRNRADEDARMIHMSMQMGNEPPISLRRDLEHLMLLIGELYKKNPFHLELALEYWCPTEPLQTPTIMGSYLGVAHQRPPQRQVVLSKFVRQMGDLLPPTIYIPYLKMLQGLANGPQCAHYCFSLLKVNGSSHVENIQGAGGSPVSWEHFFHSLMLYHEHLRKDLPSADSVQYRHLPSRGITQKEQDGLIAFLQLTSTIITWSENARLALCEHPQWTPVVVILGLLQCSIPPVLKAELLKTLAAFGKSPEIAASLWQSLEYTQILQTVRIPSQRQAIGIEVELNEIESRCEEYPLTRAFCQLISTLVESSFPSNLGAGLRPPGFDPYLQFLRDSVFLRFRTRAYRRAAEKWEVAEVVLEVFYKLLRDYEPQLEDFVDQFVELQGEEIIAYKPPGFSLMYHLLNESPMLELALSLLEEGVKQLDTYAPFPGKKHLEKAVQHCLALLNLTLQKENLFMDLLRESQLALIVCPLEQLLQGINPRTKKADNVVNIARYLYHGNTNPELAFESAKILCCISCNSNIQIKLVGDFTHDQSISQKLMAGFVECLDCEDAEEFVRLEEGSELEKKLVAIRHETRIHILNLLITSLECNPPNLALYLLGFELKKPVSTTNLQDPGVLGCPRTCLHAILNILEKGTEGRTGPVAVRESPQLAELCYQVIYQLCACSDTSGPTMRYLRTSQDFLFSQLQYLPFSNKEYEISMLNQMSWLMKTASIELRVTSLNRQRSHTQRLLHLLLDDMPVKPYSDGEGGIEDENRSVSGFLHFDTATKVRRKILNILDSIDFSQEIPEPLQLDFFDRAQIEQVIANCEHKNLRGQTVCNVKLLHRVLVAEVNALQGMAAIGQRPLLMEEISTVLQYVVGRNKLLQCLHAKRHALESWRQLVEIILTACPQDLIQAEDRQLIIRDILQDVHDKILDDEAAQELMPVVAGAVFTLTAHLSQAVLTEQKETSVLGPAEAHYAFMLDSCFTSPPPEENPLVGFASIGDSSLYIILKKLLDFILKTGGGFQRVRTHLYGSLLYYLQIAQRPDEPDTLEAAKKTMWERLTAPEDVFSKLQRENIAIIESYGAALMEVVCRDACDGHEIGRMLALALLDRIVSVDKQQQWLLYLSNSGYLKVLVDSLVEDDRTLQSLLTPQPPLLKALYTYESKMAFLTRVAKIQQGALELLRSGVIVRLAQCQVYDMRPETDPQSMFGMRDPPMFIPTPVDRYRQILLPALQLCQVILTSSMAQHLQAAGQVLQFLISHSDTIQAILRCQDVSAGSLQELALLTGIISKAALPGILSELDVDVNEGSLMELQGHIGRFQRQCLGLLSRFGGSDRLRQFKFQDDNVEGDKVSKKDEIELAMQQICANVMEYCQSLMLQSSPTFQHAVCLFTPSLSETVNRDGPRQDTQAPVVPYWRLPGLGIIIYLLKQSANDFFSYYDSHRQSVSKLQNVEQLPPDEIKELCQSVMPAGVDKISTAQKYVLARRRLVKVINNRAKLLSLCSFIIETCLFILWRHLEYYLLHCMPTDSQDSLFASRTLFKSRRLQDSFASETNLDFRSGLAIVSQHDLDQLQADAINAFGESLQKKLLDIEGLYSKVRSRYSFIQALVRRIRGLLRISRN

SEQ ID NO: 404 - protein, 933 aa, Homo sapiens
MAASRLDFGEVETFLDRHPELFEDYLMRKGKQEMVEKWLQRHSQGQGALGPRPSLAGTSSLAHSTCRGGSSVGGGTGPNGSAHSQPLPGGGDCGGVPLSPSWAGGSRGDGNLQRRASQKELRKSFARSKAIHVNRTYDEQVTSRAQEPLSSVRRRALLRKASSLPPTTAHILSALLESRVNLPRYPPTAIDYKCHLKKHNERQFFLELVKDISNDLDLTSLSYKILIFVCLMVDADRCSLFLVEGAAAGKKTLVSKFFDVHAGTPLLPCSSTENSNEVQVPWGKGIIGYVGEHGETVNIPDAYQDRRFNDEIDKLTGYKTKSLLCMPIRSSDGEIIGVAQAINKIPEGAPFTEDDEKVMQMYLPFCGIAISNAQLFAASRKEYERSRALLEVVNDLFEEQTDLEKIVKKIMHRAQTLLKCERCSVLLLEDIESPVVKFTKSFELMSPKCSADAENSFKESMEKSSYSDWLINNSIAELVASTGLPVNISDAYQDPRFDAEADQISGFHIRSVLCVPIWNSNHQIIGVAQVLNRLDGKPFDDADQRLFEAFVIFCGLGINNTIMYDQVKKSWAKQSVALDVLSYHATCSKAEVDKFKAANIPLVSELAIDDIHFDDFSLDVDAMITAALRMFMELGMVQKFKIDYETLCRWLLTVRKNYRMVLYHNWRHAFNVCQLMFAMLTTAGFQDILTEVEILAVIVGCLCHDLDHRGTNNAFQAKSGSALAQLYGTSATLEHHHFNHAVMILQSEGHNIFANLSSKEYSDLMQLLKQSILATDLTLYFERRTEFFELVSKGEYDWNIKNHRDIFRSMLMTACDLGAVTKPWEISRQVAELVTSEFFEQGDRERLELKLTPSAIFDRNRKDELPRLQLEWIDSICMPLYQALVKVNVKLKPMLDSVATNRSKWEELHQKRLLASTASSSPASVMVAKEDRN

SEQ ID NO: 405 - protein, 445 aa, Homo sapiens
MYPNPLIYCTCWDPWNLGPRKLIKTPQLPRKNSTGSSKLTPLVPAPKNHNYLQPTKPVVSPKMKIHSARQEETNKSFYEVINVSPGYQLVRNREQISVTLGDEMFDRKKRWESEIPDKGRFSRTNIISDLEEQISELTAIIEQMNRDHQSAQKLLSSEMDLRCAEMKQNFENKNRELKEAHEAELSELENNYKAALKAEKLAAQEKLEEMGKEYKYLKNMFRTYQDSIYDEMEEKWSKQKAKWKKDEKFERENILLQQKKKMTKKFEMESGEEDKKINESCSAVFENFIQEKEELLKQHQSDTLQLEELRKTKEVPWRRDQINRHWHDVLQQLLLMQVMQEELHAQALILESLNTNLYYTQLELQKEKAIVGNLEKMLQTKFAETEEKYKHTIQILTEENIHLKQKIISKNEEICEGCSGRLASITVSKDDSDTVQDGSKKGQES

SEQ ID NO: 406 - protein, 943 aa, Homo sapiens
MAETNNECSIKVLCRFRPLNQAEILRGDKFIPIFQGDDSVVIGVSYFEIYLDKIRDLLDVTKTNLSVHEDKNRVPFVKGCTERFVSSPEEILDVIDEGKSNRHVAVTNMNEHSSRSHSIFLINIKQENMETEQKLSGKLYLVDLAGSEKVSKTGAEGAVLDEAKNINKSLSALGNVISALAEGTKSYVPYRDSKMTRILQDSLGGNCRTTMFICCSPSSYNDAETKSTLMFGQRAKTIKNTASVNLELTAEQWKKKYEKEKEKTKAQKETIAKLEAELSRWRNGENVPETERLAGEEAALGAELCEETPVNDNSSIVVRIAPEERQKYEEEIRRLYKQLDDKDDEINQQSQLIEKLKQQMLDQEELLVSTRGDNEKVQRELSHLQSENDAAKDEVKEVLQALEELAVNYDQKSQEVEEKSQQNQLLVDELSQKVATMLSLESELQRLQEVSGHQRKRIAEVLNGLMKDLSEFSVIVGNGEIKLPVEISGAIEEEFTVARLYISKIKSEVKSVVKRCRQLENLQVECHRKMEVTGRELSSCQLLISQHEAKIRSLTEYMQSVELKKRHLEESYDSLSDELAKLQAQETVHEVALKDKEPDTQDADEVKKALELQMESHREAHHRQLARLRDEINEKQKTIDELKDLNQKLQLELEKLQADYEKLKSEEHEKSTKLQELTFLYERHEQSKQDLKGLEETVARELQTLHNLRKLFVQDVTTRVKKSAEMEPEDSGGIHSQKQKISFLENNLEQLTKVHKQLVRDNADLRCELPKLEKRLRATAERVKALEGALKEAKEGAMKDKRRYQQEVDRIKEAVRYKSSGKRGHSAQIAKPVRPGHYPASSPTNPYGTRSPECISYTNSLFQNYQNLYLQATPSSTSDMYFANSCTSSGATSSGGPLASYQKANMDNGNATDINDNRSDLPCGYEAEDQAKLFPLHQETAAS

SEQ ID NO: 407 - protein, 1691 aa, Homo sapiens
MASWTSPWWVLIGMVFMHSPLPQTTAEKSPGAYFLPEFALSPQGSFLEDTTGEQFLTYRYDDQTSRNTRSDEDKDGNWDAWGDWSDCSRTCGGGASYSLRRCLTGRNCEGQNIRYKTCSNHDCPPDAEDFRAQQCSAYNDVQYQGHYYEWLPRYNDPAAPCALKCHAQGQNLVVELAPKVLDGTRCNTDSLDMCISGICQAVGCDRQLGSNAKEDNCGVCAGDGSTCRLVRGQSKSHVSPEKREENVIAVPLGSRSVRITVKGPAHLFIESKTLQGSKGEHSFNSPGVFLVENTTVEFQRGSERQTFKIPGPLMADFIFKTRYTAAKDSVVQFFFYQPISHQWRQTDFFPCTVTCGGGYQLNSAECVDIRLKRVVPDHYCHYYPENVKPKPKLKECSMDPCPSSDGFKEIMPYDHFQPLPRWEHNPWTACSVSCGGGIQRRSFVCVEESMHGEILQVEEWKCMYAPKPKVMQTCNLFDCPKWIAMEWSQCTVTCGRGLRYRVVLCINHRGEHVGGCNPQLKLHIKEECVIPIPCYKPKEKSPVEAKLPWLKQAQELEETRIATEEPTFIPEPWSACSTTCGPGVQVREVKCRVLLTFTQTETELPEEECEGPKLPTERPCLLEACDESPASRELDIPLPEDSETTYDWEYAGFTPCTATCVGGHQEAIAVCLHIQTQQTVNDSLCDMVHRPPAMSQACNTEPCPPRWHVGSWGPCSATCGVGIQTRDVYCLHPGETPAPPEECRDEKPHALQACNQFDCPPGWHIEEWQQCSRTCGGGTQNRRVTCRQLLTDGSFLNLSDELCQGPKASSHKSCARTDCPPHLAVGDWSKCSVSCGVGIQRRKQVCQRLAAKGRRIPLSEMMCRDLPGLPLVRSCQMPECSKIKSEMKTKLGEQGPQILSVQRVYIQTREEKRINLTIGSRAYLLPNTSVIIKCPVRRFQKSLIQWEKDGRCLQNSKRLGITKSGSLKIHGLAAPDIGVYRCIAGSAQETVVLKLIGTDNRLIARPALREPMREYPGMDHSEANSLGVTWHKMRQMWNNKNDLYLDDDHISNQPFLRALLGHCSNSAGSTNSWELKNKQFEAAVKQGAYSMDTAQFDELIRNMSQLMETGEVSDDLASQLIYQLVAELAKAQPTHMQWRGIQEETPPAAQLRGETGSVSQSSHAKNSGKLTFKPKGPVLMRQSQPPSISFNKTINSRIGNTVYITKRTEVINILCDLITPSEATYTWTKDGTLLQPSVKIILDGTGKIQIQNPTRKEQGIYECSVANHLGSDVESSSVLYAEAPVILSVERNITKPEHNHLSVVVGGIVEAALGANVTIRCPVKGVPQPNITWLKRGGSLSGNVSLLFNGSLLLQNVSLENEGTYVCIATNALGKAVATSVLHLLERRWPESRIVFLQGHKKYILQATNTRTNSNDPTGEPPPQEPFWEPGNWSHCSATCGHLGARIQRPQCVMANGQEVSEALCDHLQKPLAGFEPCNIRDCPARWFTSVWSQCSVSCGEGYHSRQVTCKRTKANGTVQVVSPRACAPKDRPLGRKPCFGHPCVQWEPGNRCPGRCMGRAVRMQQRHTACQHNSSDSNCDDRKRPTLRRNCTSGACDVCWHTGPWKPCTAACGRGFQSRKVDCIHTRSCKPVAKRHCVQKKKPISWRHCLGPSCDRDCTDTTHYCMFVKHLNLCSLDRYKQRCCQSCQEG

SEQ ID NO: 408 - protein, 307 aa, Homo sapiens
MTETTKTHVILLACGSFNPITKGHIQMFERARDYLHKTGRFIVIGGIVSPVHDSYGKQGLVSSRHRLIMCQLAVQNSDWIRVDPWECYQDTWQTTCSVLEHHRDLMKRVTGCILSNVNTPSMTPVIGQPQNETPQPIYQNSNVATKPTAAKILGKVGESLSRICCVRPPVERFTFVDENANLGTVMRYEEIELRILLLCGSDLLESFCIPGLWNEADMEVIVGDFGIVVVPRDAADTDRIMNHSSILRKYKNNIMVVKDDINHPMSVVSSTKSRLALQHGDGHVVDYLSQPVIDYILKSQLYINASG

SEQ ID NO: 409 - protein, 323 aa, Homo sapiens
MSPAAAAEPDGDQQDRHVSKLIFCFFVFGAVLLCVGVLLSIFGFQACQYKPLPDCPMVLKVAGPACAVVGLGAVILARSRAQLQLRAGLQRGQQMDPDRAFICGESRQFAQCLIFGFLFLTSGMLISVLGIWVPGCGSNWAQEPLNETDTGDSEPRMCGFLSLQIMGPLIVLVGLCFFVVAHVKKRNTLNAGQDASEREEGQIQIMEPVQVTVGDSVIIFPPPPPPYFPESSASAVAESPGTNSLLPNENPPSYYSIFNYGTPTSEGAASERDCESIYTISGTNSSSEASHTPHLPSELPPRYEEKENAAATFLPLSSEPSPP

SEQ ID NO: 410 - protein, 505 aa, Homo sapiens
MGETLGDSPIDPESDSFTDTLSANISQEMTMVDTEMPFWPTNFGISSVDLSVMEDHSHSFDIKPFTTVDFSSISTPHYEDIPFTRTDPVVADYKYDLKLQEYQSAIKVEPASPPYYSEKTQLYNKPHEEPSNSLMAIECRVCGDKASGFHYGVHACEGCKGFFRRTIRLKLIYDRCDLNCRIHKKSRNKCQYCRFQKCLAVGMSHNAIRFGRMPQAEKEKLLAEISSDIDQLNPESADLRALAKHLYDSYIKSFPLTKAKARAILTGKTTDKSPFVIYDMNSLMMGEDKIKFKHITPLQEQSKEVAIRIFQGCQFRSVEAVQEITEYAKSIPGFVNLDLNDQVTLLKYGVHEIIYTMLASLMNKDGVLISEGQGFMTREFLKSLRKPFGDFMEPKFEFAVKFNALELDDSDLAIFIAVIILSGDRPGLLNVKPIEDIQDNLLQALELQLKLNHPESSQLFAKLLQKMTDLRQIVTEHVQLLQVIKKTETDMSLHPLLQEIYKDLY

SEQ ID NO: 411 - protein, 242 aa, Homo sapiens
MPRGFTWLRYLGIFLGVALGNEPLEMWPLTQNEECTVTGFLRDKLQYRSRLQYMKHYFPINYKISVPYEGVFRIANVTRLQRAQVSERELRYLWVLVSLSATESVQDVLLEGHPSWKYLQEVETLLLNVQQGLTDVEVSPKVESVLSLLNAPGPNLKLVRPKALLDNCFRVMELLYCSCCKQSSVLNWQDCEVPSPQSCSPEPSLQYAATQLYPPPPWSPSSPPHSTGSVRPVRAQGEGLLP

SEQ ID NO: 412 - protein, 458 aa, Homo sapiens
MAAMPLKAQYQEMVTFEDVAVHFTKTEWTGLSPAQRALYRSVMLENFGNLTALGYPVPKPALISLLERGDMAWGLEAQDDPPAERTKNVCKDVETNIDSESTLIQGISEERDGMMSHGQLKSVPQRTDFPETRNVEKHQDIPTVKNIQGKVPRIPCARKPFICEECGKSFSYFSYYARHQRIHTGEKPFECSECGKAFNGNSSLIRHQRIHTGERPYQCEECGRAFNDNANLIRHQRIHSGDRPYYCTECGNSFTSSSEFVIHQRIHTGEKPYECNECGKAFVGNSPLLRHQKIHTGEKPYECNECGKSFGRTSHLSQHQRIHTGEKPYSCKVCGQAFNFHTKLTRHQRIHSEEKPFDCVDCGKAFSAQEQLKRHLRIHTQESSYVCDECGKALTSKRNLHQHQRIHTGEKPYECSKYEKAFGTSSQLGHLEHVYSGEKPVLDICRFGLPEFFTPFYW

SEQ ID NO: 413 - protein, 957 aa, Homo sapiens
MYGSARTITNLEGSPSRSPRLPRSPRLGHRRTSSGGGGGTGKTLSMENIQSLNAAYATSGPMYLSDHEGVASTTYPKGTMTLGRATNRAVYGGRVTAMGSSPNIASAGLSHTDVLSYTDQHGGLTGSSHHHHHQVPSMLRQVRDSTMLDLQAQLKELQRENDLLRKELDIKDSKLGSSMNSIKTFWSPELKKERVLRKEEAARMSVLKEQMRVSHEENQHLQLTIQALQDELRTQRDLNHLLQQESGNRGAEHFTIELTEENFRRLQAEHDRQAKELFLLRKTLEEMELRIETQKQTLNARDESIKKLLEMLQSKGLPSKSLEDDNERTRRMAEAESQVSHLEVILDQKEKENIHLREELHRRSQLQPEPAKTKALQTVIEMKDTKIASLERNIRDLEDEIQMLKANGVLNTEDREEEIKQIEVYKSHSKFMKTKIDQLKQELSKKESELLALQTKLETLSNQNSDCKQHIEVLKESLTAKEQRAAILQTEVDALRLRLEEKESFLNKKTKQLQDLTEEKGTLAGEIRDMKDMLEVKERKINVLQKKIENLQEQLRDKDKQLTNLKDRVKSLQTDSSNTDTALATLEEALSEKERIIERLKEQRERDDRERLEEIESFRKENKDLKEKVNALQAELTEKESSLIDLKEHASSLASAGLKRDSKLKSLEIAIEQKKEECSKLEAQLKKAHNIEDDSRMNPEFADQIKQLDKEASYYRDECGKAQAEVDRLLEILKEVENEKNDKDKKIAELESLTLRHMKDQNKKVANLKHNQQLEKKKNAQLLEEVRRREDSMADNSQHLQIEELMNALEKTRQELDATKARLASTQQSLAEKEAHLANLRIERRKQLEEILEMKQEALLAAISEKDANIALLELSASKKKKTQEEVMALKREKDRLVHQLKQQTQNRMKLMADNYDDDHHHYHHHHHHHHHRSPGRSQHSNHRPSPDQDDEEGIWA

SEQ ID NO: 414 - protein, 969 aa, Homo sapiens
MHTPSIRSITHDAQTSSTGSSAPGTALCTEECVHGRCVSPDTCHCEPGWGGPDCSSGCDSDHWGPHCSNRCQCQNGALCNPITGACVCAAGFRGWRCEELCAPGTHGKGCQLPCQCRHGASCDPRAGECLCAPGYTGVYCEELCPPGSHGAHCELRCPCQNGGTCHHITGECACPPGWTGAVCAQPCPPGTFGQNCSQDCPCHHGGQCDHVTGQCHCTAGYMGDRCQEECPFGSFGFQCSQHCDCHNGGQCSPTTGACECEPGYKGPRCQERLCPEGLHGPGCTLPCPCDADNTISCHPVTGACTCQPGWSGHHCNESCPVGYYGDGCQLPCTCQNGADCHSITGGCTCAPGFMGEVCAVSCAAGTYGPNCSSICSCNNGGTCSPVDGSCTCKEGWQGLDCTLPCPSGTWGLNCNESCTCANGAACSPIDGSCSCTPGWLGDTCELPCPDGTFGLNCSEHCDCSHADGCDPVTGHCCCLAGWTGIRCDSTCPPGRWGPNCSVSCSCENGGSCSPEDGSCECAPGFRGPLCQRICPPGFYGHGCAQPCPLCVHSSRPCHHISGICECLPGFSGALCNQVCAGGYFGQDCAQLCSCANNGTCSPIDGSCQCFPGWIGKDCSQACPPGFWGPACFHACSCHNGASCSAEDGACHCTPGWTGLFCTQRCPAAFFGKDCGRVCQCQNGASCDHISGKCTCRTGFTGQHCEQRCAPGTFGYGCQQLCECMNNSTCDHVTGTCYCSPGFKGIRCDQAALMMEELNPYTKISPALGAERHSVGAVTGIMLLLFLIVVLLGLFAWHRRRQKEKGRDLAPRVSYTPAMRMTSTDYSLSGACGMDRRQNTYIMDKGFKDYMKESVCSSSTCSLNSSENPYATIKDPPILTCKLPESSYVEMKSPVHMGSPYTDVPSLSTSNKNIYEVEPTVSVVQEGCGHNSSYIQNAYDLPRNSHIPGHYDLLPVRQSPANGPSQDKQS

SEQ ID NO: 415 - protein, 1149 aa, Homo sapiens
MSDAAEAPREATGENGETEMKEEEEPNPNYKEVEDPQQESKDDTIAWRESQEEERKTGEEEGEEEGKEDKKIVMEETEEKAGEVQEKEASGIQEETTVEPQEVTASMIRLETQITDSQSITSGIFPKTQRGSKSKLSLQLEDAETDELLRDLSTQIEFLDLDQISPEEQQISSPERQPSGELEEKTDRMPQDELGQERRDLEPENREEGQERRVSDIQSKAGISRESLVSSTTEDILFQKDKSTPVYPLTMTWSFGWNSSLPVYYIREERQRVLLYVCAHTAIIYNVFRNNQYHLQGHANIISCLCVSEDRRWIATADKGPDCLVIIWDSFTGIPVHTIFDSCPEGNGIMAMAMTHDAKYLATISDAEVQKVCIWKWTLAVETPACTLELPTEYGVQNYVTFNPTNNKELVSNSKTRAIYYAWYEERDTLAHSAPLLTEKTFNKLVGKFSQSIFHLNLTQILSATMEGKLVVWDIHRPPSSASTFLGFPYIKPCKLVHLQKEGITVLTTIDSYIVTGDIKGNIKFYDHTLSIVNWYSHLKLGAIRTLSFSKTPATPPTEKSNYPPDCTLKGDLFVLRNFIIGTSDAAVYHLTTDGTKLEKLFVEPKDAICAISCHPYQPLIAIGSICGMIKVWNYENKQYLFSRVFEKGLGVQSLTYNPEGALLGAGFTEGTVYILDAMSLENESPEPFKYSRTSVTHISFSHDSQYMATADRSFTVAVYMLVVRNGQRVWEYLARLRSHRKSIRSLLFGVYLDSNEPRLLSLGTDRLLIEYDLLRSYKDHLEVLDIHHTDQGCYPTCMVWYPPLTRELFLLICNSGYKVKLFNATTKMCRKTLLGPAYGSPIEQTQVLPVRSMAELQKRYLVFINRDKVGLQILPVDGNPHKTSAIVCHPNGVAGMAVSYDGCYAFTAGGHDRSVVQWKITLSVLEAAVSLGGEDLTPFYGLLSGGREGKFYRELEDYFYYSQLRSQGIDTMETRKVSEHICLSELPFVMRAIGFYPSEEKIDDIFNEIKFGEYVDTGKLIDKINLPDFLKVYLNHKPPFGNTMSGIHKSFEVLGYTNSKGKKAIRREDFLRLLVTKGEHMTEEEMLDCFASLFGLNPEGWKSEPATCSVKGSEICLEEELPDEITAEIFATEILGLTISEDSGQDGQ

SEQ ID NO: 416 - protein, 626 aa, Homo sapiens
MSNELDFRSVRLLKNDPVNLQKFSYTSEDEAWKTYLENPLTAATKAMMRVNGDDDSVAALSFLYDYYMGPKEKRILSSSTGGRNDQGKRYYHGMEYETDLTPLESPTHLMKFLTENVSGTPEYPDLLKKNNLMSLEGALPTPGKAAPLPAGPSKLEAGSVDSYLLPTTDMYDNGSLNSLFESIHGVPPTQRWQPDSTFKDDPQESMLFPDILKTSPEPPCPEDYPSLKSDFEYTLGSPKAIHIKSGESPMAYLNKGQFYPVTLRTPAGGKGLALSSNKVKSVVMVVFDNEKVPVEQLRFWKHWHSRQPTAKQRVIDVADCKENFNTVEHIEEVAYNALSFVWNVNEEAKVFIGVNCLSTDFSSQKGVKGVPLNLQIDTYDCGLGTERLVHRAVCQIKIFCDKGAERKMRDDERKQFRRKVKCPDSSNSGVKGCLLSGFRGNETTYLRPETDLETPPVLFIPNVHFSSLQRSGGAAPSAGPSSSNRLPLKRTCSPFTEEFEPLPSKQAKEGDLQRVLLYVRRETEEVFDALMLKTPDLKGLRNAISEKYGFPEENIYKVYKKCKRGETSLLHPRLSRHPPPDCLECSHPVTQVRNMGFGDGFWRQRDLDSNPSPTTVNSLHFTVNSE

SEQ ID NO: 417 - protein, 310 aa, Homo sapiens
MRAEEPCAPGAPSALGAQRTPGPELRLSSQLLPELCTFVVRVLFYLGPVYLAGYLGLSITWLLLGALLWMWWRRNRRGKLGRLAAAFEFLDNEREFISRELRGQHLPAWIHFPDVERVEWANKIISQTWPYLSMIMESKFREKLEPKIREKSIHLRTFTFTKLYFGQKCPRVNGVKAHTNTCNRRRVTVDLQICYIGDCEISVELQKIQAGVNGIQLQGTLRVILEPLLVDKPFVGAVTVFFLQKPHLQINWTGLTNLLDAPGINDVSDSLLEDLIATHLVLPNRVTVPVKKGLDLTNLRFPLPCVSTQY

SEQ ID NO: 418 - protein, 752 aa, Homo sapiens
MTSPAAAQSREIDCLSPEAQKLAEARLAAKRAARAEAREIRMKELERQQKEVEERPEKDFTEKGSRNMPGLSAATLASLGGTSSRRGSGDTSISIDTEASIREIKDSLAEVEEKYKKAMVSNAQLDNEKTNFMYQVDTLKDMLLELEEQLAESRRQYEEKNKEFEREKHAHSILQFQFAEVKEALKQREEMLEKHGIILNSEIATNGETSDTLNNVGYQGPTKMTKEELNALKSTGDGTLGRASEVEVKNEIVANVGKREILHNTEKEQHTEDTVKDCVDIEVFPAGENTEDQKSSEDTAPFLGTLAGATYEEQVQSQILESSSLPENTVQVESNEVMGAPDDRTRTPLEPSNCWSDLDGGNHTENVGEAAVTQVEEQAGTVASCPLGHSDDTVYHDDKCMVEVPQELETSTGHSLEKEFTNQEAAEPKEVPAHSTEVGRDHNEEEGEETGLRDEKPIKTEVPGSPAGTEGNCQEATGPSTVDTQNEPLDMKEPDEEKSDQQGEALDSSQKKTKNKKKKNKKKKSPVPVETLKDVKKELTYQNTDLSEIKEEEQVKSTDRKSAVEAQNEVTENPKQKIAAESSENVDCPENPKIKLDGKLDQEGDDVQTAAEEVLADGDTLDFEDDTVQSSGPRAGGEELDEGVAKDNAKIDGATQSSPAEPKSEDADRCTLPEHESPSQDISDACEAESTERCEMSEHPSQTVRKALDSNSLENDDLSAPGREPGHFNPESREDTRGGNEKGKSKEDCTMS

SEQ ID NO: 419 - protein, 376 aa, Homo sapiens
MESYDIIANQPVVIDNGSGVIKAGFAGDQIPKYCFPNYVGRPKHMRVMAGALEGDLFIGPKAEEHRGLLTIRYPMEHGVVRDWNDMERIWQYVYSKDQLQTFSEEHPVLLTEAPLNPSKNREKAAEVFFETFNVPALFISMQAVLSLYATGRTTGVVLDSGDGVTHAVPIYEGFAMPHSIMRVDIAGRDVSRYLRLLLRKEGVDFHTSAEFEVVRTIKERACYLSINPQKDEALETEKVQYTLPDGSTLDVGPARFRAPELLFQPDLVGDESEGLHEVVAFAIHKSDMDLRRTLFANIVLSGGSTLFKGFGDRLLSEVKKLAPKDIKIKISAPQERLYSTWIGGSILASLDTFKKMWVSKKEYEEDGSRAIHRKTF

SEQ ID NO: 420 - protein, 513 aa, Homo sapiens
MKMASFLAFLLLNFRVCLLLLQLLMPHSAQFSVLGPSGPILAMVGEDADLPCHLFPTMSAETMELKWVSSSLRQVVNVYADGKEVEDRQSAPYRGRTSILRDGITAGKAALRIHNVTASDSGKYLCYFQDGDFYEKALVELKVAALGSDLHVDVKGYKDGGIHLECRSTGWYPQPQIQWSNNKGENIPTVEAPVVADGVGLYAVAASVIMRGSSGEGVSCTIRSSLLGLEKTASISIADPFFRSAQRWIAALAGTLPVLLLLLGGAGYFLWQQQEEKKTQFRKKKREQELREMAWSTMKQEQSTRVKLLEELRWRSIQYASRGERHSAYNEWKKALFKPADVILDPKTANPILLVSEDQRSVQRAKEPQDLPDNPERFNWHYCVLGCESFISGRHYWEVEVGDRKEWHIGVCSKNVQRKGWVKMTPENGFWTMGLTDGNKYRTLTEPRTNLKLPKPPKKVGVFLDYETGDISFYNAVDGSHIHTFLDVSFSEALYPVFRILTLEPTALTICPA

SEQ ID NO: 421 - protein, 586 aa, Homo sapiens
MLARVTRKMLRHAKCFQRLAIFGSVRALHKDNRTATPQNFSNYESMKQDFKLGIPEYFNFAKDVLDQWTDKEKAGKKPSNPAFWWINRNGEEMRWSFEELGSLSRKFANILSEACSLQRGDRVILILPRVPEWWLANVACLRTGTVLIPGTTQLTQKDILYRLQSSKANCIITNDVLAPAVDAVASKCENLHSKLIVSENSREGWGNLKELMKHASDSHTCVKTKHNEIMAIFFTSGTSGYPKMTAHTHSSFGLGLSVNGRFWLDLTPSDVMWNTSDTGWAKSAWSSVFSPWIQGACVFTHHLPRFEPTSILQTLSKYPITVFCSAPTVYRMLVQNDITSYKFKSLKHCVSAGEPITPDVTEKWRNKTGLDIYEGYGQTETVLICGNFKGMKIKPGSMGKPSPAFDVKIVDVNGNVLPPGQEGDIGIQVLPNRPFGLFTHYVDNPSKTASTLRGNFYITGDRGYMDKDGYFWFVARADDVILSSGYRIGPFEVENALNEHPSVAESAVVSSPDPIRGEVVKAFVVLNPDYKSHDQEQLIKEIQEHVKKTTAPYKYPRKVEFIQELPKTISGKTKRNELRKKEWKTI

SEQ ID NO: 422 - protein, 520 aa, Homo sapiens
MGKPSSMDTKFKDDLFRKYVQFHESKVDTTTSRQRPGSDECLRVAASTLLSLHKVDPFYRFRLIQFYEVVESSLRSLSSSSLRALHGAFSMLETVGINLFLYPWKKEFRSIKTYTGPFVYYVKSTLLEEDIRAILSCMGYTPELGTAYKLRELVETLQVKMVSFELFLAKVECEQMLEIHSQVKDKGYSELDIVSERKSSAEDVRGCSDALRRRAEGREHLTASMSRVALQKSASERAAKDYYKPRVTKPSRSVDAYDSYWESRKPPLKASLSLRKEPVATDVGDDLKDEIIRPSPSLLTMASSPHGSPDVLPPASPSNGPALLRGTYFSTQDDVDLYTDSEPRATYRRQDALRPDVWLLRNDAHSLYHKRSPPAKESALSKCQSCGLSCSSSLCQRCDSLLTCPPASKPSAFPSKASTHDSLAHGASLREKYPGQTQGLDRLPHLHSKSKPSTTPTSRCGFCNRPGATNTCTQCSKVSCDACLSAYHYDPCYKKSELHKFMPNNQLNYKSTQLSHLVYR

SEQ ID NO: 423 - protein, 1359 aa, Homo sapiens
MAEAGLRGWLLWALLLRLAQSEPYTTIHQPGYCAFYDECGKNPELSGSLMTLSNVSCLSNTPARKITGDHLILLQKICPRLYTGPNTQACCSAKQLVSLEASLSITKALLTRCPACSDNFVNLHCHNTCSPNQSLFINVTRVAQLGAGQLPAVVAYEAFYQHSFAEQSYDSCSRVRVPAAATLAVGTMCGVYGSALCNAQRWLNFQGDTGNGLAPLDITFHLLEPGQAVGSGIQPLNEGVARCNESQGDDVATCSCQDCAASCPAIARPQALDSTFYLGQMPGSLVLIIILCSVFAVVTILLVGFRVAPARDKSKMVDPKKGTSLSDKLSFSTHTLLGQFFQGWGTWVASWPLTILVLSVIPVVALAAGLVFTELTTDPVELWSAPNSQARSEKAFHDQHFGPFFRTNQVILTAPNRSSYRYDSLLLGPKNFSGILDLDLLLELLELQERLRHLQVWSPEAQRNISLQDICYAPLNPDNTSLYDCCINSLLQYFQNNRTLLLLTANQTLMGQTSQVDWKDHFLYCANAPLTFKDGTALALSCMADYGAPVFPFLAIGGYKGKDYSEAEALIMTFSLNNYPAGDPRLAQAKLWEEAFLEEMRAFQRRMAGMFQVTFMAERSLEDEINRTTAEDLPIFATSYIVIFLYISLALGSYSSWSRVMVDSKATLGLGGVAVVLGAVMAAMGFFSYLGIRSSLVILQVVPFLVLSVGADNIFIFVLEYQRLPRRPGEPREVHIGRALGRVAPSMLLCSLSEAICFFLGALTPMPAVRTFALTSGLAVILDFLLQMSAFVALLSLDSKRQEASRLDVCCCVKPQELPPPGQGEGLLLGFFQKAYAPFLLHWITRGVVLLLFLALFGVSLYSMCHISVGLDQELALPKDSYLLDYFLFLNRYFEVGAPVYFVTTLGYNFSSEAGMNAICSSAGCNNFSFTQKIQYATEFPEQSYLAIPASSWVDDFIDWLTPSSCCRLYISGPNKDKFCPSTVNSLNCLKNCMSITMGSVRPSVEQFHKYLPWFLNDRPNIKCPKGGLAAYSTSVNLTSDGQVLDTVAILSPRLEYSGTISAHCNLYLLDSTSRFMAYHKPLKNSQDYTEALRAARELAANITADLRKVPGTDPAFEVFPYTITNVFYEQYLTILPEGLFMLSLCLVPTFAVSCLLLGLDLRSGLLNLLSIVMILVDTVGFMALWGISYNAVSLINLVSAVGMSVEFVSHITRSFAISTKPTWLERAKEATISMGSAVFAGVAMTNLPGILVLGLAKAQLIQIFFFRLNLLITLLGLLHGLVFLPVILSYVGPDVNPALALEQKRAEEAVAAVMVASCPNHPSRVSTADNIYVNHSFEGSIKGAGAISNFLPNNGRQF

SEQ ID NO: 424 - protein, 285 aa, Homo sapiens
MVMRPLWSLLLWEALLPITVTGAQVLSKVGGSVLLVAARPPGFQVREAIWRSLWPSEELLATFFRGSLETLYHSRFLGRAQLHSNLSLELGPLESGDSGNFSVLMVDTRGQPWTQTLQLKVYDAVPRPVVQVFIAVERDAQPSKTCQVFLSCWAPNISEITYSWRRETTMDFGMEPHSLFTDGQVLSISLGPGDRDVAYSCIVSNPVSWDLATVTPWDSCHHEAAPGKASYKDVLLVVVPVSLLLMLVTLFSAWHWCPCSGKKKKDVHADRVGPETENPLVQDLP

SEQ ID NO: 425 - protein, 748 aa, Homo sapiens
MIPAASSTPPGDALFPSVAPQDFWRSQVTGYSGSVTRHLSHRANNFKRHPKRRKCIRPSPPPPPNTPCPLELVDFGDLHPQRSFRELLFNGCILFGIEFSYAMETAYVTPVLLQMGLPDQLYSLVWFISPILGFLLQPLLGAWSDRCTSRFGRRRPFILVLAIGALLGLSLLLNGRDIGIALADVTGNHKWGLLLTVCGVVLMDFSADSADNPSHAYMMDVCSPADQDRGLNIHALLAGLGGGFGYVVGGIHWDKTGFGRALGGQLRVIYLFTAVTLSVTTVLTLVSIPERPLRPPSEKRAAMKSPSLPLPPSPPVLPEEGPGDSLPSHTATNFSSPISPPSPLTPKYGSFISRDSSLTGISEFASSFGTANIDSVLIDCFTGGHDSYLAIPGSVPRPPISVSFPRAPDGFYRQDRGLLEGREGALTSGCDGDILRVGSLDTSKPRSSGILKRPQTLAIPDAAGGGGPETSRRRNVTFSQQVANILLNGVKYESELTGSSERAEQPLSVGRLCSTICNMPKALRTLCVNHFLGWLSFEGMLLFYTDFMGEVVFQGDPKAPHTSEAYQKYNSGVTMGCWGMCIYAFSAAFYSAILEKLEEFLSVRTLYFIAYLAFGLGTGLATLSRNLYVVLSLCITYGILFSTLCTLPYSLLCDYYQSKKFAGSSADGTRRGMGVDISLLSCQYFLAQILVSLVLGPLTSAVGSANGVMYFSSLVSFLGCLYSSLFVIYEIPPSDAADEEHRPLLLNV

SEQ ID NO: 426 - protein, 357 aa, Homo sapiens
MRPPPALALAGLCLLALPAAAASYFGLTGREVLTPFPGLGTAAAPAQGGAHLKQCDLLKLSRRQKQLCRREPGLAETLRDAAHLGLLECQFQFRHERWNCSLEGRMGLLKRGFKETAFLYAVSSAALTHTLARACSAGRMERCTCDDSPGLESRQAWQWGVCGDNLKYSTKFLSNFLGSKRGNKDLRARADAHNTHVGIKAVKSGLRTTCKCHGVSGSCAVRTCWKQLSPFRETGQVLKLRYDSAVKVSSATNEALGRLELWAPARQGSLTKGLAPRSGDLVYMEDSPSFCRPSKYSPGTAGRVCSREASCSSLCCGRGYDTQSRLVAFSCHCQVQWCCYVECQQCVQEELVYTCKH

SEQ ID NO: 427 - protein, 2334 aa, Homo sapiens
MQPPPQTVPSGMAGPPPAGNPRSVFWASSPYRRRANNNAAVAPTTCPLQPVTDPFAFSRQALQSTPLGSSSKSSPPVLQGPAPAGFSQHPGLLVPHTHARDSSQGPCEPLPGPLTQPRAHASPFSGALTPSAPPGPEMNRSAEVGPSSEPEVQTLPYLPHYIPGVDPETSHGGHPHGNMPGLDRPLSRQNPHDGVVTPAASPSLPQPGLQMPGQWGPVQGGPQPSGQHRSPCPEGPVPSGVPCATSVPHFPTPSILHQGPGHEQHSPLVAPPAALPSDGRDEVSHLQSGSHLANNSDPESTFRQNPRIVNHWASPELRQNPGVKNEHRPASALVNPLARGDSPENRTHHPLGAGAGSGCAPLEADSGASGALAMFFQGGETENEENLSSEKAGLSGQADFDDFCSSPGLGRPPAPTHVGAGSLCQALLPGPSNEAAGDVWGDTASTGVPDASGSQYENVENLEFVQNQEVLPSEPLNLDPSSPSDQFRYGPLPGPAVPRHGAVCHTGAPDATLHTVHPDSVSSSYSSRSHGRLSGSARPQELVGTFIQQEVGKPEDEASGSFFKQIDSSPVGGETDETTVSQNYRGSVSQPSTPSPPKPTGIFQTSANSSFEPVKSHLVGVKPFEADRANVVGEVRETCVRQKQCRPAAALPDASPGNLEQPPDNMETLCAPQVCPLPLNSTTEAVHMLPHAGAPPLDTVYPAPEKRPSARTQGPVKCESPATTLWAQSELPDFGGNVLLAPAAPALYVCAKPQPPVVQPPEEAMSGQQSRNPSSAAPVQSRGGIGASENLENPPKMGEEEALQSQASSGYASLLSSPPTESLQNPPVLIAQPDHSYNLAQPINFSVSLSNSHEKNQSWREALVGDRPAVSSWALGGDSGENTSLSGIPTSSVLSLSLPSSVAQSNFPQGSGASEMVSNQPANLLVQPPSQPVPENLVPESQKDRKAGSALPGFANSPAGSTSVVLVPPAHGTLVPDGNKANHSSHQEDTYGALDFTLSRTLENPVNVYNPSHSDSLASQQSVASHPRQSGPGAPNLDRFYQQVTKDAQGQPGLERAQQELVPPQQQASPPQLPKAMFSELSNPESLPAQGQAQNSAQSPASLVLVDAGQQLPPRPPQSSSVSLVSSGSGQAAVPSEQPWPQPVPALAPGPPPQDLAAYYYYRPLYDAYQPQYSLPYPPEPGAASLYYQDVYSLYEPRYRPYDGAASAYAQNYRYPEPERPSSRASHSSERPPPRQGYPEGYYSSKSGWSSQSDYYASYYSSQYDYGDPGHWDRYHYSARVRDPRTYDRRYWCDAEYDAYRREHSAFGDRPEKRDNNWRYDPRFTGSFDDDPDPHRDPYGEEVDRRSVHSEHSARSLHSAHSLASRRSSLSSHSHQSQIYRSHNVAAGSYEAPLPPGSFHGDFAYGTYRSNFSSGPGFPEYGYPADTVWPAMEQVSSRPTSPEKFSVPHVCARFGPGGQLIKVIPNLPSEGQPALVEVHSMEALLQHTSEQEEMRAFPGPLAKDDTHKVDVINFAQNKAMKCLQNENLIDKESASLLWNFIVLLCRQNGTVVGTDIAELLLRDHRTVWLPGKSPNEANLIDFTNEAVEQVEEEESGEAQLSFLTGGPAAAASSLERETERFRELLLYGRKKDALESAMKNGLWGHALLLASKMDSRTHARVMTRFANSLPINDPLQTVYQLMSGRMPAASTCCGDEKWGDWRPHLAMVLSNLNNNMDVESRTMATMGDTLASRGLLDAAHFCYLMAQAGFGVYTKKTTKLVLIGSNHSLPFLKFATNEAIQRTEAYEYAQSLGAETCPLPSFQVFKFIYSCRLAEMGLATQAFHYCEAIAKSILTQPHLYSPVLISQLVQMASQLRLFDPQLKEKPEEESLAAPTWLVHLQQVERQIKEGAGVWHQDGALPQQCPGTPSSEMEQLDRPGLSQPGALGIANPLLAVPAPSPEHSSPSVRLLPSAPQTLPDGPLASPARVPMFPVPLPPGPLEPGPGCVTPGPALGFLEPSGPGLPPGVPPLQERRHLLQEARSPDPGIVPQEAPVGNSLSELSEENFDGKFANLTPSRTVPDSEAPPGWDRADSGPTQPPLSLSPAPETKRPGQAAKKETKEPKKGESWFFRWLPGKKKTEAYLPDDKNKSIVWDEKKNQWVNLNEPEEEKKAPPPPPTSMPKTVQAAPPALPGPPGAPVNMYSRRAAGTRARYVDVLNPSGTQRSEPALAPADFVAPLAPLPIPSNLFVPTPVSSVRPQGRSGRNDGLLALSSPDAEEPQLPDGTGREGPAAARGLANPEPAPEPKAPGDLPAAGGPPSGAMPFYNPAQLAQACATSGSSRLGRIGQRKHLVLN

SEQ ID NO: 428 - protein, 337 aa, Homo sapiens
MRPTLLWSLLLLLGVFAAAAAAPPDPLSQLPAPQHPKIRLYNAEQVLSWEPVALSNSTRPVVYQVQFKYTDSKWFTADIMSIGVNCTQITATECDFTAASPSAGFPMDFNVTLRLRAELGALHSAWVTMPWFQHYRNVTVGPPENIEVTPGEGSLIIRFSSPFDIADTSTAFFCYYVHYWEKGGIQQVKGPFRSNSISLDNLKPSRVYCLQVQAQLLWNKSNIFRVGHLSNISCYETMADASTELQQVILISVGTFSLLSVLAGACFFLVLKYRGLIKYWFHTPPSIPLQIEEYLKDPTQPILEALDKDSSPKDDVWDSVSIISFPEKEQEDVLQTL

SEQ ID NO: 429 - protein, 284 aa, Homo sapiens
MEPGNYATLDGAKDIEGLLGAGGGRNLVAHSPLTSHPAAPTLMPAVNYAPLDLPGSAEPPKQCHPCPGVPQGTSPAPVPYGYFGGGYYSCRVSRSSLKPCAQAATLAAYPAETPTAGEEYPSRPTEFAFYPGYPGTYQPMASYLDVSVVQTLGAPGEPRHDSLLPVDSYQSWALAGGWNSQMCCQGEQNPPGPFWKAAFADSSGQHPPDACAFRRGRKKRIPYSKGQLRELEREYAANKFITKDKRRKISAATSLSERQITIWFQNRRVKEKKVLAKVKNSATP

SEQ ID NO: 430 - protein, 563 aa, Homo sapiens
MLLPAPALRRALLSRPWTGAGLRWKHTSSLKVANEPVLAFTQGSPERDALQKALKDLKGRMEAIPCVVGDEEVWTSDVQYQVSPFNHGHKVAKFCYADKSLLNKAIEAALAARKEWDLKPIADRAQIFLKAADMLSGPRRAEILAKTMVGQGKTVIQAEIDAAAELIDFFRFNAKYAVELEGQQPISVPPSTNSTVYRGLEGFVAAISPFNFTAIGGNLAGAPALMGNVVLWKPSDTAMLASYAVYRILREAGLPPNIIQFVPADGPLFGDTVTSSEHLCGINFTGSVPTFKHLWKQVAQNLDRFHTFPRLAGECGGKNFHFVHRSADVESVVSGTLRSAFEYGGQKCSACSRLYVPHSLWPQIKGRLLEEHSRIKVGDPAEDFGTFFSAVIDAKSFARIKKWLEHARSSPSLTILAGGKCDDSVGYFVEPCIVESKDPQEPIMKEEIFGPVLSVYVYPDDKYKETLQLVDSTTSYGLTGAVFSQDKDVVQEATKVLRNAAGNFYINDKSTGSIVGQQPFGGARASGTNDKPGGPHYILRWTSPQVIKETHKPLGDWSYAYMQ

SEQ ID NO: 431 - protein, 191 aa, Homo sapiens
MHDSNNVEKDITPSELPANPGCLHSKEHSIKATLIWRLFFLIMFLTIIVCGMVAALSAIRANCHQEPSVCLQAACPESWIGFQRKCFYFSDDTKNWTSSQRFCDSQDADLAQVESFQELNFLLRYKGPSDHWIGLSREQGQPWKWINGTEWTRQFPILGAGECAYLNDKGASSARHYTERKWICSKSDIHV

SEQ ID NO: 432 - protein, 1306 aa, Homo sapiens
MGAASGRRGPGLLLPLPLLLLLPPQPALALDPGLQPGNFSADEAGAQLFAQSYNSSAEQVLFQSVAASWAHDTNITAENARRQEEAALLSQEFAEAWGQKAKELYEPIWQNFTDPQLRRIIGAVRTLGSANLPLAKRQQYNALLSNMSRIYSTAKVCLPNKTATCWSLDPDLTNILASSRSYAMLLFAWEGWHNAAGIPLKPLYEDFTALSNEAYKQDGFTDTGAYWRSWYNSPTFEDDLEHLYQQLEPLYLNLHAFVRRALHRRYGDRYINLRGPIPAHLLGDMWAQSWENIYDMVVPFPDKPNLDVTSTMLQQGWNATHMFRVAEEFFTSLELSPMPPEFWEGSMLEKPADGREVVCHASAWDFYNRKDFRIKQCTRVTMDQLSTVHHEMGHIQYYLQYKDLPVSLRRGANPGFHEAIGDVLALSVSTPEHLHKIGLLDRVTNDTESDINYLLKMALEKIAFLPFGYLVDQWRWGVFSGRTPPSRYNFDWWYLRTKYQGICPPVTRNETHFDAGAKFHVPNVTPYIRYFVSFVLQFQFHEALCKEAGYEGPLHQCDIYRSTKAGAKLRKVLQAGSSRPWQEVLKDMVGLDALDAQPLLKYFQPVTQWLQEQNQQNGEVLGWPEYQWHPPLPDNYPEGIDLVTDEAEASKFVEEYDRTSQVVWNEYAEANWNYNTNITTETSKILLQKNMQIANHTLKYGTQARKFDVNQLQNTTIKRIIKKVQDLERAALPAQELEEYNKILLDMETTYSVATVCHPNGSCLQLEPDLTNVMATSRKYEDLLWAWEGWRDKAGRAILQFYPKYVELINQAARLNGYVDAGDSWRSMYETPSLEQDLERLFQELQPLYLNLHAYVRRALHRHYGAQHINLEGPIPAHLLGNMWAQTWSNIYDLVVPFPSAPSMDTTEAMLKQGWTPRRMFKEADDFFTSLGLLPVPPEFWNKSMLEKPTDGREVVCHASAWDFYNGKDFRIKQCTTVNLEDLVVAHHEMGHIQYFMQYKDLPVALREGANPGFHEAIGDVLALSVSTPKHLHSLNLLSSEGGSDEHDINFLMKMALDKIAFIPFSYLVDQWRWRVFDGSITKENYNQEWWSLRLKYQGLCPPVPRTQGDFDPGAKFHIPSSVPYIRYFVSFIIQFQFHEALCQAAGHTGPLHKCDIYQSKEAGQRLATAMKLGFSRPWPEAMQLITGQPNMSASAMLSYFKPLLDWLRTENELHGEKLGWPQYNWTPNSARSEGPLPDSGRVSFLGLDLDAQQARVGQWLLLFLGIALLVATLGLSQRLFSIRHRSLHRHSHGPQFGSEVELRHS

SEQ ID NO: 433 - protein, 676 aa, Homo sapiens
MSSLQALCSGLPLRPLPENRGRQAGVPHAPVRTPSLSPVEKQLALRNALRYFPPDVQELLAPEFAQELQLYGHIYMYRFCPDIEMRAYPIEQYPCQTKVAAAIMHMIMNNLDPAVAQFPQELVTYGGNGQVFSNWAQFWLTMFYLSKMTEEQTLVMYSGHPLGLFPSSRSAPRLVITNGMVIPNYSSRTEYEKLFALGVTMYGQMTAGSYCYIGPQGIVHGTVLTVLNAARRYLGIEDLAGKVFVTSGLGGMSGAQAKAAVIVGCIGVIAEVDKAALEKRHRQGWLMEVTDSLDRCIQRLREARKKKEVLSLGYHGNVVALWERLVHELDTTGECLVDLGSDQTSCHNPFNGGYYPVQLSFTEAQSLMASNPAVFKDLVQESLRRQVSAINRLAEEKFFFWDYGNAFLLEAQRAGADVEKKGAGRTEFRYPSYVQHIMGDIFSQGFGPFRWVCTSGDPQDLAVTDELATSVLEEAIADGVKVSVKLQYMDNIRWIREAARHRLVVGSQARILYSDQKGRVAIAVAINQAIACRRIKAPVVLSRDHHDVSGTDSPFRETSNIYDGSAFCADMAVQNFVGDACRGATWVALHNGGGVGWGEVINGGFGLVLDGTPEAEGRARLMLSWDVSNGVARRCWSGNQKAYEIICQTMQENSTLVVTLPHKVEDERVLQQALQL

SEQ ID NO: 434 - protein, 545 aa, Homo sapiens
MATDAALRRLLRLHRTEIAVAVDSAFPLLHALADHDVVPEDKFQETLHLKEKEGCPQAFHALLSWLLTQDSTAILDFWRVLFKDYNLERYGRLQPILDSFPKDVDLSQPRKGRKPPAVPKALVPPPRLPTKRKASEEARAAAPAALTPRGTASPGSQLKAKPPKKPESSAEQQRLPLGNGIQTMSASVQRAVAMSSGDVPGARGAVEGILIQQVFESGGSKKCIQVGGEFYTPSKFEDSGSGKNKARSSSGPKPLVRAKGAQGAAPGGGEARLGQQGSVPAPLALPSDPQLHQKNEDECAVCRDGGELICCDGCPRAFHLACLSPPLREIPSGTWRCSSCLQATVQEVQPRAEEPRPQEPPVETPLPPGLRSAGEEVRGPPGEPLAGMDTTLVYKHLPAPPSAAPLPGLDSSALHPLLCVGPEGQQNLAPGARCGVCGDGTDVLRCTHCAAAFHWRCHFPAGTSRPGTGLRCRSCSGDVTPAPVEGVLAPSPARLAPGPAKDDTASHEPALHRDDLESLLSEHTFDGILQWAIQSMARPAAPFPS

SEQ ID NO: 435 - protein, 541 aa, Homo sapiens
MSQLVECVPNFSEGKNQEVIDAISGAITQTPGCVLLDVDAGPSTNRTVYTFVGPPECVVEGALNAARVASRLIDMSRHQGEHPRMGALDVCPFIPVRGVSVDECVLCAQAFGQRLAEELDVPVYLYGEAARMDSRRTLPAIRAGEYEALPKKLQQADWAPDFGPSSFVPSWGATATGARKFLIAFNINLLGTKEQAHRIALNLREQGRGKDQPGRLKKVQGIGWYLDEKNLAQVSTNLLDFEVTALHTVYEETCREAQELSLPVVGSQLVGLVPLKALLDAAAFYCEKENLFILEEEQRIRLVVSRLGLDSLCPFSPKERIIEYLVPERGPERGLGSKSLRAFVGEVGARSAAPGGGSVAAAAAAMGAALGSMVGLMTYGRRQFQSLDTTMRRLIPPFREASAKLTTLVDADAEAFTAYLEAMRLPKNTPEEKDRRTAALQEGLRRAVSVPLTLAETVASLWPALQELARCGNLACRSDLQVAAKALEMGVFGAYFNVLINLRDITDEAFKDQIHHRVSSLLQEAKTQAALVLDCLETRQE

SEQ ID NO: 436 - protein, 130 aa, Homo sapiens
MSSSGGAPGASASSAPPAQEEGMTWWYRWLCRLSGVLGAVSCAISGLFNCITIHPLNIAAGVWMMMAVVPIVISLTLTTLLGNAIAFATGVLYGLSALGKKGDAISYARIQQQRQQADEEKLAETLEGEL

SEQ ID NO: 437 - protein, 1048 aa, Homo sapiens
MSDVNPPSDTPIPFSSSSTHSSHIPPWTFSCYPGSPCENGVMLYMRNVSHEELQRFKQLLLTELSTGTMPITWDQVETASWAEVVHLLIERFPGRRAWDVTSNIFAIMNCDKMCVVVRREINAILPTLEPEDLNVGETQVNLEEGESGKIRRYKSNVMEKFFPIWDITTWPGNQRDFFYQGVHRHEEYLPCLLLPKRPQGRQPKTVAIQGAPGIGKTILAKKVMFEWARNKFYAHKRWCAFYFHCQEVNQTTDQSFSELIEQKWPGSQDLVSKIMSKPDQLLLLLDGFEELTSTLIDRLEDLSEDWRQKLPGSVLLSSLLSKTMLPEATLLIMIRFTSWQTCKPLLKCPSLVTLPGFNTMEKIKYFQMYFGHTEEGDQVLSFAMENTILFSMCRVPVVCWMVCSGLKQQMERGNNLTQSCPNATSVFVRYISSLFPTRAENFSRKIHQAQLEGLCHLAADSMWHRKWVLGKEDLEEAKLDQTGVTAFLGMSILRRIAGEEDHYVFTLVTFQEFFAALFYVLCFPQRLKNFHVLSHVNIQRLIASPRGSKSYLSHMGLFLFGFLNEACASAVEQSFQCKVSFGNKRKLLKVIPLLHKCDPPSPGSGVPQLFYCLHEIREEAFVSQALNDYHKVVLRIGNNKEVQVSAFCLKRCQYLHEVELTVTLNFMNVWKLSSSSHPGSEAPESNGLHRWWQDLCSVFATNDKLEVLTMTNSVLGPPFLKALAAALRHPQCKLQKLLLRRVNSTMLNQDLIGVLTGNQHLRYLEIQHVEVESKAVKLLCRVLRSPRCRLQCLRLEDCLATPRIWTDLGNNLQGNGHLKTLILRKNSLENCGAYYLSVAQLERLSIENCNLTQLTCESLASCLRQSKMLTHLSLAENALKDEGAKHIWNALPHLRCPLQRLVLRKCDLTFNCCQDMISALCKNKTLKSLDLSFNSLKDDGVILLCEALKNPDCTLQILELENCLFTSICCQAMASMLRKNQHLRHLDLSKNAIGVYGILTLCEAFSSQKKREEVIFCIPAWTRITSFSPTPHPPDFTGKSDCLSQINP

SEQ ID NO: 438 - protein, 539 aa, Homo sapiens
MGSPEDDLIGIPFPDHSSELLSCLNEQRQLGHLCDLTIRTQGLEYRTHRAVLAACSHYFKKLFTEGGGGAVMGAGGSGTATGGAGAGVCELDFVGPEALGALLEFAYTATLTTSSANMPAVLQAARLLEIPCVIAACMEILQGSGLEAPSPDEDDCERARQYLEAFATATASGVPNGEDSPPQVPLPPPPPPPPRPVARRSRKPRKAFLQTKGARANHLVPEVPTVPAHPLTYEEEEVAGRVGSSGGSGPGDSYSPPTGTASPPEGPQSYEPYEGEEEEEELVYPPAYGLAQGGGPPLSPEELGSDEDAIDPDLMAYLSSLHQDNLAPGLDSQDKLVRKRRSQMPQECPVCHKIIHGAGKLPRHMRTHTGEKPFACEVCGVRFTRNDKLKIHMRKHTGERPYSCPHCPARFLHSYDLKNHMHLHTGDRPYECHLCHKAFAKEDHLQRHLKGQNCLEVRTRRRRKDDAPPHYPPPSTAAASPAGLDLSNGHLDTFRLSLARFWEQSAPTGPPVSTPGPPDDDEEEGAPTTPQAEGAMESS

SEQ ID NO: 439 - protein, 660 aa, Homo sapiens
MKVTLSALDTSESSFTPLVVIELAQDVKEETKEWLKNRIIAKKKDGGAQLLFRPLLNKYEQETLENQNLYLVGASKIRMLLGAEAVGLVKECNDNTMRAFTYRTRQNFKGFDDNNDDFLTMAECQFIIKHELENLRAKDEKMIPGYPQAKLYPGKSLLRRLLTSGIVIQVFPLHDSEALKKLEDTWYTRFALKYQPIDSIRGYFGETIALYFGFLEYFTFALIPMAVIGLPYYLFVWEDYDKYVIFASFNLIWSTVILELWKRGCANMTYRWGTLLMKRKFEEPRPGFHGVLGINSITGKEEPLYPSYKRQLRIYLVSLPFVCLCLYFSLYVMMIYFDMEVWALGLHENSGSEWTSVLLYVPSIIYAIVIEIMNRLYRYAAEFLTSWENHRLESAYQNHLILKVLVFNFLNCFASLFYIAFVLKDMKLLRQSLATLLITSQILNQIMESFLPYWLQRKHGVRVKRKVQALKADIDATLYEQVILEKEMGTYLGTFDDYLELFLQFGYVSLFSCVYPLAAAFAVLNNFTEVNSDALKMCRVFKRPFSEPSANIGVWQLAFETMSVISVVTNCALIGMSPQVNAVFPESKADLILIVVAVEHALLALKFILAFAIPDKPRHIQMKLARLEFESLEALKQQQMKLVTENLKEEPMESGKEKAT

SEQ ID NO: 440 - protein, 802 aa, Homo sapiens
MRLLLALLGVLLSVPGPPVLSLEASEEVELEPCLAPSLEQQEQELTVALGQPVRLCCGRAERGGHWYKEGSRLAPAGRVRGWRGRLEIASFLPEDAGRYLCLARGSMIVLQNLTLITGDSLTSSNDDEDPKSHRDPSNRHSYPQQAPYWTHPQRMEKKLHAVPAGNTVKFRCPAAGNPTPTIRWLKDGQAFHGENRIGGIRLRHQHWSLVMESVVPSDRGTYTCLVENAVGSIRYNYLLDVLERSPHRPILQAGLPANTTAVVGSDVELLCKVYSDAQPHIQWLKHIVINGSSFGADGFPYVQVLKTADINSSEVEVLYLRNVSAEDAGEYTCLAGNSIGLSYQSAWLTVLPEEDPTWTAAAPEARYTDIILYASGSLALAVLLLLAGLYRGQALHGRHPRPPATVQKLSRFPLARQFSLESGSSGKSSSSLVRGVRLSSSGPALLAGLVSLDLPLDPLWEFPRDRLVLGKPLGEGCFGQVVRAEAFGMDPARPDQASTVAVKMLKDNASDKDLADLVSEMEVMKLIGRHKNIINLLGVCTQEGPLYVIVECAAKGNLREFLRARRPPGPDLSPDGPRSSEGPLSFPVLVSCAYQVARGMQYLESRKCIHRDLAARNVLVTEDNVMKIADFGLARGVHHIDYYKKTSNGRLPVKWMAPEALFDRVYTHQSDVWSFGILLWEIFTLGGSPYPGIPVEELFSLLREGHRMDRPPHCPPELYGLMRECWHAAPSQRPTFKQLVEALDKVLLAVSEEYLDLRLTFGPYSPSGGDASSTCSSSDSVFSHDPLPLGSSSFPFGSGVQT

SEQ ID NO: 441 - protein, 323 aa, Homo sapiens
MSRPRMRLVVTADDFGYCPRRDEGIVEAFLAGAVTSVSLLVNGAATESAAELARRHSIPTGLHANLSEGRPVGPARRGASSLLGPEGFFLGKMGFREAVAAGDVDLPQVREELEAQLSCFRELLGRAPTHADGHQHVHVLPGVCQVFAEALQAYGVRFTRLPLERGVGGCTWLEAPARAFACAVERDARAAVGPFSRHGLRWTDAFVGLSTCGRHMSAHRVSGALARVLEGTLAGHTLTAELMAHPGYPSVPPTGGCGEGPDAFSCSWERLHELRVLTAPTLRAQLAQDGVQLCALDDLDSKRPGEEVPCEPTLEPFLEPSLL

SEQ ID NO: 442 - protein, 274 aa, Homo sapiens
MPKYCRAPNCSNTAGRLGADNRPVSFYKFPLKDGPRLQAWLQHMGCEHWVPSCHQHLCSEHFTPSCFQWRWGVRYLRPDAVPSIFSRGPPAKSQRRTRSTQKPVSPPPPLQKNTPLPQSPAIPVSGPVRLVVLGPTSGSPKTVATMLLTPLAPAPTPERSQPEVPAQQAQTGLGPVLGALQRRVRRLQRCQERHQAQLQALERLAQQLHGESLLARARRGLQRLTTAQTLGPEESQTFTIICGGPDIAMVLAQDPAPATVDAKPELLDTRIPSA

SEQ ID NO: 443 - protein, 141 aa, Homo sapiens
MVHLTPEEKTAVNALWGKVNVDAVGGEALGRLLVVYPWTQRFFESFGDLSSPDAVMGNPKVKAHGKKVLGAFSDGLAHLDNLKGTFSQLSELHCDKLHVDPENFRVCKKVPEALQIGSTCLFYKEYMGKEKSKGTVQGING

SEQ ID NO: 444 - protein, 576 aa, Homo sapiens
MNRKDSKRKSHQECTGKIGGRGRPRQVRRHKTCPSPREISKVMASMNLGLLSEGGCSEDELLEKCIQSFDSAGSLCHEDHMLNMVLAMHSWVLPSADLAARLLTSYQKATGDTQELRRLQICHLVRYWLMRHPEVMHQDPQLEEVIGRFWATVAREGNSAQRRLGDSSDLLSPGGPGPPLPMSSPGLGKKRKVSLLFDHLETGELAQHLTYLEFRSFQAITALLELTELLASHNNYARYRRTWAGCAGFRLPVLGVHLKDLVSLHEAQPDRLPDGRLHLPKLNNLYLRLQELVALQGQHPPCSANEDLLHLLTLSLDLFYTEDEIYELSYAREPRCPKSLPPSPFNAPLVVEWAPGVTPKPDRVTLGRHVEQLVESVFKNYDPEGRGTISQEDFERLSGNFPFACHGLHPPPRQGRGSFSREELTGYLLRASAICSKLGLAFLHTFHEVTFRKPTFCDSCSGFLWGVTKQGYRCRECGLCCHKHCRDQVKVECKKRPGAKGDAGPPGAPVPSTPAPHASCGSEENHSYTLSLEPETGCQLRHAWTQTESPHPSWETDTVPCPVMDPPSTASSKLDS

SEQ ID NO: 445 - protein, 173 aa, Homo sapiens
MQFPMGPACIFLRKGIAEKQRERPLGQDEIEELREAFLEFDKDRDGFISCKDLGNLMRTMGYMPTEMELIELGQQIRMNLGGRVDFDDFVELMTPKLLAETAGMIGVQEMRDAFKEFDTNGDGEITLVELQQAMQRLLGERLTPREISEVVREADVNGDGTVDFEEFVKMMSR

SEQ ID NO: 446 - protein, 483 aa, Homo sapiens
MSIRVTQKSYKVSTSGPRAFSSRSYTSGPGSRISSSSFSRVGSSNFRGGLGGGYGGASGMGGITAVTVNQSLLSPLVLEVDPNIQAVRTQEKEQIKTLNNKFASFIDKVRFLEQQNKMLETKWSLLQQQKTARSNMDNMFESYINNLRRQLETLGQEKLKLEAELGNMQGLVEDFKNKYEDEINKRTEMENEFVLIKKDVDEAYMNKVELESRLEGLTDEINFLRQLYEEEIRELQSQISDTSVVLSMDNSRSLDMDSIIAEVKAQYEDIANRSRAEAESMYQIKYEELQSLAGKHGDDLRRTKTEISEMNRNISRLQAEIEGLKGQRASLEAAIADAEQRGELAIKDANAKLSELEAALQRAKQDMARQLREYQELMNVKLALDIEIATYRKLLEGEESRLESGMQNMSIHTKTTSGYAGGLSSAYGGLTSPGLSYSLGSSFGSGAGSSSFSRTSSSRAVVVKKIETRDGKLVSESSDVLPK

SEQ ID NO: 447 - protein, 790 aa, Homo sapiens
MPLPGGLWWLLCCRRGFTLLHRDYGDGELSGDGDEDEDEETFELRTPSPAGGGRGPLEVTLTQPVRSGPVSNRLQSWEETWSLIPEKGLPEDDPDIVVKGWLYREPRGGGARPWLPPRRAWFVLTRDSLDQFSSSGKGARRLGSLVLTSLCSVTGPERRRKETGLWSVTVSGRKHSVRLCSPRQAEAERWGVALREVIASKAPLETPTQLLLRDIQESCGDPEAVALIYLRNPILRHTSGALYAPLLPLPYGVSAPGPGYAPLREEAVRLFLALQALEGARRPGPLMQGVLQTCRDLPALRDELFLQLAKQTSGPAGPPGLPATQDPAALRYWQLLTCMSCTFRPGGAVRGHLLGHLERTEQALPDSELAEYARFIRKALGRTRGRELVPSLAEISALSQRQELLCTVHCPGAGACAVAIDSHTTAGEVARELVGRLGLARSRNAFALYEQRGAQERALAGGTLVADVLTSLAAEEAGLEDSPDSGWRLCLRLHGPLHPEGLSPDGHELPFLFEQAHALLLRGRPPPPDDTLRALAALRLQSLQRDFSPRVPLPRLDRLLPPPAPPREDPPRPTPRPPPSAALLAGALWSPGLAKRRAERARRGGAGRTAGSIAREGGGGAGTAAAVLGGWKRLRGMGRAEAMAAYLALAAQCPGFGAARYDVLELSTEPGRGAPQKLCLGLGAKAMSLSRPGETEPIHSVSYGHVAACQLMGPHTLALRVGESQLLLQSPQVEEIMQLVNAYLANPSPERPCSSSSPPCQDLPDTSPPSQRPGLDEPQGQSGCLGQLQD

SEQ ID NO: 448 - protein, 233 aa, Homo sapiens
MRLLVLLWGCLLLPGYEALEGPEEISGFEGDTVSLQCTYREELRDHRKYWCRKGGILFSRCSGTIYAEEEGQETMKGRVSIRDSRQELSLIVTLWNLTLQDAGEYWCGVEKRGPDESLLISLFVFPGSSRPPMQLDSTSAEDTSPALSSGSSKPRVSIPMVRILAPVLVLLSLLSAAGLIAFCSHLLLWRKEAQQATETQRNEKFCLSRLNHRTSELDPDEAFEISSLTFLSV

SEQ ID NO: 449 - protein, 493 aa, Homo sapiens
MTCGFNSIGCGFRPGNFSCVSACGPRPSRCCITAAPYRGISCYRGLTGGFGSHSVCGGFRAGSCGRSFGYRSGGVCGPSPPCITTVSVNESLLTPLNLEIDPNAQCVKQEEKEQIKSLNSRFAAFIDKVRFLEQQNKLLETKLQFYQNRECCQSNLEPLFAGYIETLRREAECVEADSGRLASELNHVQEVLEGYKKKYEEEVALRATAENEFVALKKDVDCAYLRKSDLEANVEALIQEIDFLRRLYEEEIRILQSHISDTSVVVKLDNSRDLNMDCIVAEIKAQYDDIATRSRAEAESWYRSKCEEMKATVIRHGETLRRTKEEINELNRMIQRLTAEVENAKCQNSKLEAAVAQSEQQGEAALSDARCKLAELEGALQKAKQDMACLIREYQEVMNSKLGLDIEIATYRRLLEGEEQRLCEGVEAVNVCVSSSRGGVVCGDLCVSGSRPVTGSVCSAPCNGNLVVSTGLCKPCGQLNTTCGGGSCGQGRH

SEQ ID NO: 450 - protein, 860 aa, Homo sapiens
MARPRGLGRIPELQLVAFPVAVAAEDEAFLPEPLAPRAPRRPRSPPSSPVFFASPSPTFRRRLRLLRSCQDLGRQAWAGAGFEAENGPTPSPGRSPLDSQASPGLVLHAGAATSQRRESFLYRSDSDYDMSPKTMSRNSSVTSEAHAEDLIVTPFAQVLASLRSVRSNFSLLTNVPVPSNKRSPLGGPTPVCKATLSEETCQQLARETLEELDWCLEQLETMQTYRSVSEMASHKFKRMLNRELTHLSEMSRSGNQVSEYISTTFLDKQNEVEIPSPTMKEREKQQAPRPRPSQPPPPPVPHLQPMSQITGLKKLMHSNSLNNSNIPRFGVKTDQEELLAQELENLNKWGLNIFCVSDYAGGRSLTCIMYMIFQERDLLKKFRIPVDTMVTYMLTLEDHYHADVAYHNSLHAADVLQSTHVLLATPALDAVFTDLEILAALFAAAIHDVDHPGVSNQFLINTNSELALMYNDESVLENHHLAVGFKLLQEDNCDIFQNLSKRQRQSLRKMVIDMVLATDMSKHMTLLADLKTMVETKKVTSSGVLLLDNYSDRIQVLRNMVHCADLSNPTKPLELYRQWTDRIMAEFFQQGDRERERGMEISPMCDKHTASVEKSQVGFIDYIVHPLWETWADLVHPDAQEILDTLEDNRDWYYSAIRQSPSPPPEEESRGPGHPPLPDKFQFELTLEEEEEEEISMAQIPCTAQEALTAQGLSGVEEALDATIAWEASPAQESLEVMAQEASLEAELEAVYLTQQAQSTGSAPVAPDEFSSREEFVVAVSHSSPSALALQSPLLPAWRTLSVSEHAPGLPGLPSTAAEVEAQREHQAAKRACSACAGTFGEDTSALPAPGGGGSGGDPT

SEQ ID NO: 451 - protein, 662 aa, Homo sapiens
MGLYRIRVSTGASLYAGSNNQVQLWLVGQHGEAALGKRLWPARGKETELKVEVPEYLGPLLFVKLRKRHLLKDDAWFCNWISVQGPGAGDEVRFPCYRWVEGNGVLSLPEGTGRTVGEDPQGLFQKHREEELEERRKLYRWGNWKDGLILNMAGAKLYDLPVDERFLEDKRVDFEVSLAKGLADLAIKDSLNVLTCWKDLDDFNRIFWCGQSKLAERVRDSWKEDALFGYQFLNGANPVVLRRSAHLPARLVFPPGMEELQAQLEKELEGGTLFEADFSLLDGIKANVILCSQQHLAAPLVMLKLQPDGKLLPMVIQLQLPRTGSPPPPLFLPTDPPMAWLLAKCWVRSSDFQLHELQSHLLRGHLMAEVIVVATMRCLPSIHPIFKLIIPHLRYTLEINVRARTGLVSDMGIFDQIMSTGGGGHVQLLKQAGAFLTYSSFCPPDDLADRGLLGVKSSFYAQDALRLWEIIYRYVEGIVSLHYKTDVAVKDDPELQTWCREITEIGLQGAQDRGFPVSLQARDQVCHFVTMCIFTCTGQHASVHLGQLDWYSWVPNAPCTMRLPPPTTKDATLETVMATLPNFHQASLQMSITWQLGRRQPVMVAVGQHEEEYFSGPEPKAVLKKFREELAALDKEIEIRNAKLDMPYEYLRPSVVENSVAI

SEQ ID NO: 452 - protein, 330 aa, Homo sapiens
MAARRSQRRRGRRGEPGTALLVPLALGLGLALACLGLLLAVVSLGSRASLSAQEPAQEELVAEEDQDPSELNPQTEESQDPAPFLNRLVRPRRSAPKGRKTRARRAIAAHYEVHPRPGQDGAQAGVDGTVSGWEEARINSSSPLRYNRQIGEFIVTRAGLYYLYCQSSDALEAWENGERSRKRRAVLTQKQKKQHSVLHLVPINATSKDDSDVTEVMWQPALRRGRGLQAQGYGVRIQDAGVYLLYSQVLFQDVTFTMGQVVSREGQGRQETLFRCIRSMPSHPDRAYNSCYSAGVFHLHQGDILSVIIPRARAKLNLSPHGTFLGFVKL

SEQ ID NO: 453 - protein, 316 aa, Homo sapiens
MSLGIMEEEDLAEYFRLQYGERLLQMLQKLPNVEGASESPSIWLLEKKKETEIMHQTMVQKKKMFQRRMETLNLRWEELGVKEAQLKAHIQKSEQFIQENDQKRIRAMKKANKERELKCQHMQELTKRKQEMVALRLEHQRLSAKLKDYYIFNKYLEKVVENSEFEEIHEVIARYKTLVSMRHDLMQSAQEGQEKIERAKARLARYMEEKDDEILQQNNELARLQMRFDRARSNVIFWESRWAHIQNTAAKKTLLLGTIKMATLNLFQIVSKHLKEVTEVALEDTHKQLDMIQQFIQDRSDIWAEVKKKEQQRVRI

SEQ ID NO: 454 - protein, 123 aa, Homo sapiens
MVVQDPLLCDLPIQVTLEEVNSQIALEYGQAMTVRVCKMDGEVMPVVVVQSATVLDLKKAIQRYVQLKQEREGGIQHISWSYVWRTYHLTSAGEKLTEDRKKLRDYGIRNRDEVSFIKKLRQK

SEQ ID NO: 455 - protein, 220 aa, Homo sapiens
MGNCAKRPWRRGPKDPLQWLGSPPRGSCPSPSSSPKEQGDPAPGVQGYSVLNSLVGPACIFLRPSIAATQLDRELRPEEIEELQVAFQEFDRDRDGYIGCRELGACMRTLGYMPTEMELIEISQQISGGKVDFEDFVELMGPKLLAETADMIGVRELRDAFREFDTNGDGRISVGELRAALKALLGERLSQREVDEILQDVDLNGDGLVDFEEFVRMMSR

SEQ ID NO: 456 - protein, 1615 aa, Homo sapiens
MEAAPPGPPWPLLLLLLLLLALCGCPAPAAASPLLLFANRRDVRLVDAGGVKLESTIVVSGLEDAAAVDFQFSKGAVYWTDVSEEAIKQTYLNQTGAAVQNVVISGLVSPDGLACDWVGKKLYWTDSETNRIEVANLNGTSRKVLFWQDLDQPRAIALDPAHGYMYWTDWGETPRIERAGMDGSTRKIIVDSDIYWPNGLTIDLEEQKLYWADAKLSFIHRANLDGSFRQKVVEGSLTHPFALTLSGDTLYWTDWQTRSIHACNKRTGGKRKEILSALYSPMDIQVLSQERQPFFHTRCEEDNGGCSHLCLLSPSEPFYTCACPTGVQLQDNGRTCKAGAEEVLLLARRTDLRRISLDTPDFTDIVLQVDDIRHAIAIDYDPLEGYVYWTDDEVRAIRRAYLDGSGAQTLVNTEINDPDGIAVDWVARNLYWTDTGTDRIEVTRLNGTSRKILVSEDLDEPRAIALHPVMGLMYWTDWGENPKIECANLDGQERRVLVNASLGWPNGLALDLQEGKLYWGDAKTDKIEVINVDGTKRRTLLEDKLPHIFGFTLLGDFIYWTDWQRRSIERVHKVKASRDVIIDQLPDLMGLKAVNVAKVVGTNPCADRNGGCSHLCFFTPHATRCGCPIGLELLSDMKTCIVPEAFLVFTSRAAIHRISLETNNNDVAIPLTGVKEASALDFDVSNNHIYWTDVSLKTISRAFMNGSSVEHVVEFGLDYPEGMAVDWMGKNLYWADTGTNRIEVARLDGQFRQVLVWRDLDNPRSLALDPTKGYIYWTEWGGKPRIVRAFMDGTNCMTLVDKVGRANDLTIDYADQRLYWTDLDTNMIESSNMLGQERVVIADDLPHPFGLTQYSDYIYWTDWNLHSIERADKTSGRNRTLIQGHLDFVMDILVFHSSRQDGLNDCMHNNGQCGQLCLAIPGGHRCGCASHYTLDPSSRNCSPPTTFLLFSQKSAISRMIPDDQHSPDLILPLHGLRNVKAIDYDPLDKFIYWVDGRQNIKRAKDDGTQPFVLTSLSQGQNPDRQPHDLSIDIYSRTLFWTCEATNTINVHRLSGEAMGVVLRGDRDKPRAIVVNAERGYLYFTNMQDRAAKIERAALDGTEREVLFTTGLIRPVALVVDNTLGKLFWVDADLKRIESCDLSGANRLTLEDANIVQPLGLTILGKHLYWIDRQQQMIERVEKTTGDKRTRIQGRVAHLTGIHAVEEVSLEEFSAHPCARDNGGCSHICIAKGDGTPRCSCPVHLVLLQNLLTCGEPPTCSPDQFACATGEIDCIPGAWRCDGFPECDDQSDEEGCPVCSAAQFPCARGQCVDLRLRCDGEADCQDRSDEADCDAICLPNQFRCASGQCVLIKQQCDSFPDCIDGSDELMCEITKPPSDDSPAHSSAIGPVIGIILSLFVMGGVYFVCQRVVCQRYAGANGPFPHEYVSGTPHVPLNFIAPGGSQHGPFTGIACGKSMMSSVSLMGGRGGVPLYDRNHVTGASSSSSSSTKATLYPPILNPPPSPATDPSLYNMDMFYSSNIPATARPYRPYIIRGMAPPTTPCSTDVCDSDYSASRWKASKYYLDLNSDSDPYPPPPTPHSQYLSAEDSCPPSPATERSYFHLFPPPPSPCTDSS

SEQ ID NO: 457 - protein, 752 aa, Homo sapiens
MAEPQAESEPLLGGARGGGGDWPAGLTTYRSIQVGPGAAARWDLCIDQAVVFIEDAIQYRSINHRVDASSMWLYRRYYSNVCQRTLSFTIFLILFLAFIETPSSLTSTADVRYRAAPWEPPCGLTESVEVLCLLVFAADLSVKGYLFGWAHFQKNLWLLGYLVVLVVSLVDWTVSLSLVCHEPLRIRRLLRPFFLLQNSSMMKKTLKCIRWSLPEMASVGLLLAIHLCLFTMFGMLLFAGGKQDDGQDRERLTYFQNLPESLTSLLVLLTTANNPDVMIPAYSKNRAYAIFFIVFTVIGSLFLMNLLTAIIYSQFRGYLMKSLQTSLFRRRLGTRAAFEVLSSMVGEGGAFPQAVGVKPQNLLQVLQKVQLDSSHKQAMMEKVRSYGSVLLSAEEFQKLFNELDRSVVKEHPPRPEYQSPFLQSAQFLFGHYYFDYLGNLIALANLVSICVFLVLDADVLPAERDDFILGILNCVFIVYYLLEMLLKVFALGLRGYLSYPSNVFDGLLTVVLLVLEISTLAVYRLPHPGWRPEMVGLLSLWDMTRMLNMLIVFRFLRIIPSMKLMAVVASTVLGLVQNMRAFGGILVVVYYVFAIIGINLFRGVIVALPGNSSLAPANGSAPCGSFEQLEYWANNFDDFAAALVTLWNLMVVNNWQVFLDAYRRYSGPWSKIYFVLWWLVSSVIWVNLFLALILENFLHKWDPRSHLQPLAGTPEATYQMTVELLFRDILEEPGEDELTERLSQHPHLWLCR

SEQ ID NO: 458 - protein, 417 aa, Homo sapiens
MSSKYPRSVRRCLPLCALTLEAALILLFYFFTHYDASLEDQKGLVASYQVGQDLTVMAALGLGFLTSNFRRHSWSSVAFNLFMLALGVQWAILLDGFLSQFPPGKVVITLFSIRLATMSAMSVLISAGAVLGKVNLAQLVVMVLVEVTALGTLRMVISNIFNTDYHMNLRHFYVFAAYFGLTVAWCLPKPLPKGTEDNDQRATIPSLSAMLGALFLWMFWPSVNSALLRSPIQRKNAMFNTYYALAVSVVTAISGSSLAHPQRKISMTYVHSAVLAGGVAVGTSCHLIPSPWLAMVLGLVAGLISIGGAKCLPVCCNRVLGIHHISVMHSIFSLLGLLGEITYIVLLVLHTVWNGNGMIGFQVLLSIGELSLAIVIALTSGLLTGLLLNLKIWKAPHVAKYFDDQVFWKFPHLAVGF

SEQ ID NO: 459 - protein, 2047 aa, Homo sapiens
MAASERRAFAHKINRTVAAEVRKQVSRERSGSPHSSRRCSSSLGVPLTEVVEPLDFEDVLLSRPPDAEPGPLRDLVEFPADDLELLLQPRECRTTEPGIPKDEKLDAQVRAAVEMYIEDWVIVHRRYQYLSAAYSPVTTDTQRERQKGLPRQVFEQDASGDERSGPEDSNDSRRGSGSPEDTPRSSGASSIFDLRNLAADSLLPSLLERAAPEDVDRRNETLRRQHRPPALLTLYPAPDEDEAVERCSRPEPPREHFGQRILVKCLSLKFEIEIEPIFGILALYDVREKKKISENFYFDLNSDSMKGLLRAHGTHPAISTLARSAIFSVTYPSPDIFLVIKLEKVLQQGDISECCEPYMVLKEVDTAKNKEKLEKLRLAAEQFCTRLGRYRMPFAWTAVHLANIVSSAGQLDRDSDSEGERRPAWTDRRRRGPQDRASSGDDACSFSGFRPATLTVTNFFKQEAERLSDEDLFKFLADMRRPSSLLRRLRPVTAQLKIDISPAPENPHFCLSPELLHIKPYPDPRGRPTKEILEFPAREVYAPHTSYRNLLYVYPHSLNFSSRQGSVRNLAVRVQYMTGEDPSQALPVIFGKSSCSEFTREAFTPVVYHNKSPEFYEEFKLHLPACVTENHHLLFTFYHVSCQPRPGTALETPVGFTWIPLLQHGRLRTGPFCLPVSVDQPPPSYSVLTPDVALPGMRWVDGHKGVFSVELTAVSSVHPQDPYLDKFFTLVHVLEEGAFPFRLKDTVLSEGNVEQELRASLAALRLASPEPLVAFSHHVLDKLVRLVIRPPIISGQIVNLGRGAFEAMAHVVSLVHRSLEAAQDARGHCPQLAAYVHYAFRLPGTEPSLPDGAPPVTVQAATLARGSGRPASLYLARSKSISSSNPDLAVAPGSVDDEVSRILASKLLHEELALQWVVSSSAVREAILQHAWFFFQLMVKSMALHLLLGQRLDTPRKLRFPGRFLDDITALVGSVGLEVITRVHKDVELAEHLNASLAFFLSDLLSLVDRGFVFSLVRAHYKQVATRLQSSPNPAALLTLRMEFTRILCSHEHYVTLNLPCCPLSPPASPSPSVSSTTSQSSTFSSQAPDPKVTSMFELSGPFRQQHFLAGLLLTELALALEPEAEGAFLLHKKAISAVHSLLCGHDTDPRYAEATVKARVAELYLPLLSIARDTLPRLHDFAEGPGQRSRLASMLDSDTEGEGDIAGTINPSVAMAIAGGPLAPGSRASISQGPPTASRAGCALSAESSRTLLACVLWVLKNTEPALLQRWATDLTLPQLGRLLDLLYLCLAAFEYKGKKAFERINSLTFKKSLDMKARLEEAILGTIGARQEMVRRSRERSPFGNPENVRWRKSVTHWKQTSDRVDKTKDEMEHEALVEGNLATEASLVVLDTLEIIVQTVMLSEARESVLGAVLKVVLYSLGSAQSALFLQHGLATQRALVSKFPELLFEEDTELCADLCLRLLRHCGSRISTIRTHASASLYLLMRQNFEIGHNFARVKMQVTMSLSSLVGTTQNFSEEHLRRSLKTILTYAEEDMGLRDSTFAEQVQDLMFNLHMILTDTVKMKEHQEDPEMLIDLMYRIARGYQGSPDLRLTWLQNMAGKHAELGNHAEAAQCMVHAAALVAEYLALLEDHRHLPVGCVSFQNISSNVLEESAISDDILSPDEEGFCSGKHFTELGLVGLLEQAAGYFTMGGLYEAVNEVYKNLIPILEAHRDYKKLAAVHGKLQEAFTKIMHQSSGWERVFGTYFRVGFYGAHFGDLDEQEFVYKEPSITKLAEISHRLEEFYTERFGDDVVEIIKDSNPVDKSKLDSQKAYIQITYVEPYFDTYELKDRVTYFDRNYGLRTFLFCTPFTPDGRAHGELPEQHKRKTLLSTDHAFPYIKTRIRVCHREETVLTPVEVAIEDMQKKTRELAFATEQDPPDAKMLQMVLQGSVGPTVNQGPLEVAQVFLAEIPEDPKLFRHHNKLRLCFKDFCKKCEDALRKNKALIGPDQKEYHRELERNYCRLREALQPLLTQRLPQLMAPTPPGLRNSLNRASFRKADL

SEQ ID NO: 460 - protein, 302 aa, Homo sapiens
MEIQELEEIQACQGLWEVFVTLSERARDYLHKTGRFIVIGGIVSPVHDSYGKQGLVSSRHRLIMCQLAVQNSDWIRVDPWECYQDTWQTTCSVLEHHRDLMKRVTGCILSNVNTPSMTPVIGQPQNETPQPIYQNSNVATKPTAAKILGKVGESLSRICCVRPPVERFTFVDENANLGTVMRYEEIELRILLLCGSDLLESFCIPGLWNEADMEVIVGDFGIVVVPRDAADTDRIMNHSSILRKYKNNIMVVKDDINHPMSVVSSTKSRLALQHGDGHVVDYLSQPVIDYILKSQLYINASG

SEQ ID NO: 461 - protein, 286 aa, Homo sapiens
MERRLGVRAWVKENRGSFQPPVCNKLMHQEQLKVMFIGGPNTRKDYHIEEGEEVFYQLEGDMVLRVLEQGKHRDVVIRQGEIFLLPARVPHSPQRFANTVGLVVERRRLETELDGLRYYVGDTMDVLFEKWFYCKDLGTQLAPIIQEFFSSEQYRTGKPIPDQLLKEPPFPLSTRSIMEPMSLDAWLDSHHRELQAGTPLSLFGDTYETQVIAYGQGSSEGLRQNVDVWLWQLEGSSVVTMGGRRLSLAPDDSLLVLAGTSYAWERTQGSVALSVTQDPACKKPLG

SEQ ID NO: 462 - protein, 356 aa, Homo sapiens
MTKSYSESGLMGEPQPQGPPSWTDECLSSQDEEHEADKKEDDLETMNAEEDSLRNGGEEEDEDEDLEEEEEEEEEDDDQKPKRRGPKKKKMTKARLERFKLRRMKANARERNRMHGLNAALDNLRKVVPCYSKTQKLSKIETLRLAKNYIWALSEILRSGKSPDLVSFVQTLCKGLSQPTTNLVAGCLQLNPRTFLPEQNQDMPPHLPTASASFPVHPYSYQSPGLPSPPYGTMDSSHVFHVKPPPHAYSAALEPFFESPLTDCTSPSFDGPLSPPLSINGNFSFKHEPSAEFEKNYAFTMHYPAATLAGAQSHGSIFSGTAAPRCEIPIDNIMSFDSHSHHERVMSAQLNAIFHD

SEQ ID NO: 463 - protein, 206 aa, Homo sapiens
MAATKTASYDEHFRPEKLREWPEPESVSLMEVLAREDIDEAVCAILFKENSIVKVTVPPFVDPLFQRQQEVDEERRTGLQCETGKRHSIKELEEIEKARLHASSPYFTFTSHCVIPKEWHKASARARSKTYKYSPEKLIYADKKQKRKEKKTADLSQAAFERQFLSSKLSQKNKVGERKGLVSRGLGRGWHAGLCSTHEQHILVPE

SEQ ID NO: 464 - protein, 345 aa, Homo sapiens
MSSYQKELEKYRDIDEDEILRTLSPEELEQLDCELQEMDPENMLLPAGLRQRDQTKKSPTGPLDREALLQYLEQQALEVKERDDLVPFTGEKKGKPYIQPKREIPAEEQITLEPELEEALAHATDAEMCDIAAILDMYTLMSNKQYYDALCSGEICNTEGISSVVQPDKYKPVPDEPPNPTNIEEILKRVRSNDKELEEVNLNNIQDIPIPMLSELCEAMKANTYVRSFSLVATRSGDPIANAVADMLRENRSLQSLNIESNFISSTGLMAVLKAVRENATLTELRVDNQRQWPGDAVEMEMATVLEQCPSIVRFGYHFTQQGPRARAAQAMTRNNELRRQQKKR

SEQ ID NO: 465 - protein, 1101 aa, Homo sapiens
MDECGSRIRRRVSLPKRNRPSLGCIFGAPTAAELVPGDEGKEEEEMVAENRRRKTAGVLPVEVQPLLLSDSPECLVLGGGDTNPDLLRHMPTDRGVGDQPNDSEVDMFGDYDSFTENSFIAQVDDLEQKYMQLPEHKKHATDFATENLCSESIKNKLSITTIGNLTELQTDKHTENQSGYEGVTIEPGADLLYDVPSSQAIYFENLQNSSNDLGDHSMKERDWKSSSHNTVNEELPHNCIEQPQQNDESSSKVRTSSDMNRRKSIKDHLKNAMTGNAKAQTPIFSRSKQLKDTLLSEEINVAKKTVESSSNDLGPFYSLPSKVRDLYAQFKGIEKLYEWQHTCLTLNSVQERKNLIYSLPTSGGKTLVAEILMLQELLCCRKDVLMILPYVAIVQEKISGLSSFGIELGFFVEEYAGSKGRFPPTKRREKKSLYIATIEKGHSLVNSLIETGRIDSLGLVVVDELHMIGEGSRGATLEMTLAKILYTSKTTQIIGMSATLNNVEDLQKFLQAEYYTSQFRPVELKEYLKINDTIYEVDSKAENGMTFSRLLNYKYSDTLKKMDPDHLVALVTEVIPNYSCLVFCPSKKNCENVAEMICKFLSKEYLKHKEKEKCEVIKNLKNIGNGNLCPVLKRTIPFGVAYHHSGLTSDERKLLEEAYSTGVLCLFTCTSTLAAGVNLPARRVILRAPYVAKEFLKRNQYKQMIGRAGRAGIDTIGESILILQEKDKQQVLELITKPLENCYSHLVQEFTKGIQTLFLSLIGLKIATNLDDIYHFMNGTFFGVQQKVLLKEKSLWEITVESLRYLTEKGLLQKDTIYKSEEEVQYNFHITKLGRASFKGTIDLAYCDILYRDLKKGLEGLVLESLLHLIYLTTPYDLVSQCNPDWMIYFRQFSQLSPAEQNVAAILGVSESFIGKKASGQAIGKKVDKNVVNRLYLSFVLYTLLKETNIWTVSEKFNMPRGYIQNLLTGTASFSSCVLHFCEELEEFWVYRALLVELTKKLTYCVKAELIPLMEVTGVLEGRAKQLYSAGYKSLMHLANANPEVLVRTIDHLSRRQAKQIVSSAKMLLHEKAEALQEEVEELLRLPSDFPGAVASSTDKA

SEQ ID NO: 466 - protein, 3177 aa, Homo sapiens
MRKHRHLPLVAVFCLFLSGFPTTHAQQQQADVKNGAAADIIFLVDSSWTIGEEHFQLVREFLYDVVKSLAVGENDFHFALVQFNGNPHTEFLLNTYRTKQEVLSHISNMSYIGGTNQTGKGLEYIMQSHLTKAAGSRAGDGVPQVIVVLTDGHSKDGLALPSAELKSADVNVFAIGVEDADEGALKEIASEPLNMHMFNLENFTSLHDIVGNLVSCVHSSVSPERAGDTETLKDITAQDSADIIFLIDGSNNTGSVNFAVILDFLVNLLEKLPIGTQQIRVGVVQFSDEPRTMFSLDTYSTKAQVLGAVKALGFAGGELANIGLALDFVVENHFTRAGGSRVEEGVPQVLVLISAGPSSDEIRYGVVALKQASVFSFGLGAQAASRAELQHIATDDNLVFTVPEFRSFGDLQEKLLPYIVGVAQRHIVLKPPTIVTQVIEVNKRDIVFLVDGSSALGLANFNAIRDFIAKVIQRLEIGQDLIQVAVAQYADTVRPEFYFNTHPTKREVITAVRKMKPLDGSALYTGSALDFVRNNLFTSSAGYRAAEGIPKLLVLITGGKSLDEISQPAQELKRSSIMAFAIGNKGADQAELEEIAFDSSLVFIPAEFRAAPLQGMLPGLLAPLRTLSGTPEVHSNKRDIIFLLDGSANVGKTNFPYVRDFVMNLVNSLDIGNDNIRVGLVQFSDTPVTEFSLNTYQTKSDILGHLRQLQLQGGSGLNTGSALSYVYANHFTEAGGSRIREHVPQLLLLLTAGQSEDSYLQAANALTRAGILTFCVGASQANKAELEQIAFNPSLVYLMDDFSSLPALPQQLIQPLTTYVSGGVEEVPLAQPESKRDILFLFDGSANLVGQFPVVRDFLYKIIDELNVKPEGTRIAVAQYSDDVKVESRFDEHQSKPEILNLVKRMKIKTGKALNLGYALDYAQRYIFVKSAGSRIEDGVLQFLVLLVAGRSSDRVDGPASNLKQSGVVPFIFQAKNADPAELEQIVLSPAFILAAESLPKIGDLHPQIVNLLKSVHNGAPAPVSGEKDVVFLLDGSEGVRSGFPLLKEFVQRVVESLDVGQDRVRVAVVQYSDRTRPEFYLNSYMNKQDVVNAVRQLTLLGGPTPNTGAALEFVLRNILVSSAGSRITEGVPQLLIVLTADRSGDDVRNPSVVVKRGGAVPIGIGIGNADITEMQTISFIPDFAVAIPTFRQLGTVQQVISERVTQLTREELSRLQPVLQPLPSPGVGGKRDVVFLIDGSQSAGPEFQYVRTLIERLVDYLDVGFDTTRVAVIQFSDDPKVEFLLNAHSSKDEVQNAVQRLRPKGGRQINVGNALEYVSRNIFKRPLGSRIEEGVPQFLVLISSGKSDDEVDDPAVELKQFGVAPFTIARNADQEELVKISLSPEYVFSVSTFRELPSLEQKLLTPITTLTSEQIQKLLASTRYPPPAVESDAADIVFLIDSSEGVRPDGFAHIRDFVSRIVRRLNIGPSKVRVGVVQFSNDVFPEFYLKTYRSQAPVLDAIRRLRLRGGSPLNTGKALEFVARNLFVKSAGSRIEDGVPQHLVLVLGGKSQDDVSRFAQVIRSSGIVSLGVGDRNIDRTELQTITNDPRLVFTVREFRELPNIEERIMNSFGPSAATPAPPGVDTPPPSRPEKKKADIVFLLDGSINFRRDSFQEVLRFVSEIVDTVYEDGDSIQVGLVQYNSDPTDEFFLKDFSTKRQIIDAINKVVYKGGRHANTKVGLEHLRVNHFVPEAGSRLDQRVPQIAFVITGGKSVEDAQDVSLALTQRGVKVFAVGVRNIDSEEVGKIASNSATAFRVGNVQELSELSEQVLETLHDAMHETLCPGVTDAAKACNLDVILGFDGSRDQNVFVAQKGFESKVDAILNRISQMHRVSCSGGRSPTVRVSVVANTPSGPVEAFDFDEYQPEMLEKFRNMRSQHPYVLTEDTLKVYLNKFRQSSPDSVKVVIHFTDGADGDLADLHRASENLRQEGVRALILVGLERVVNLERLMHLEFGRGFMYDRPLRLNLLDLDYELAEQLDNIAEKACCGVPCKCSGQRGDRGPIGSIGPKGIPGEDGYRGYPGDEGGPGERGPPGVNGTQGFQGCPGQRGVKGSRGFPGEKGEVGEIGLDGLDGEDGDKGLPGSSGEKGNPGRRGDKGPRGEKGERGDVGIRGDPGNPGQDSQERGPKGETGDLGPMGVPGRDGVPGGPGETGKNGGFGRRGPPGAKGNKGGPGQPGFEGEQGTRGAQGPAGPAGPPGLIGEQGISGPRGSGGAAGAPGERGRTGPLGRKGEPGEPGPKGGIGNRGPRGETGDDGRDGVGSEGRRGKKGERGFPGYPGPKGNPGEPGLNGTTGPKGIRGRRGNSGPPGIVGQKGDPGYPGPAGPKGNRGDSIDQCALIQSIKDKCPCCYGPLECPVFPTELAFALDTSEGVNQDTFGRMRDVVLSIVNDLTIAESNCPRGARVAVVTYNNEVTTEIRFADSKRKSVLLDKIKNLQVALTSKQQSLETAMSFVARNTFKRVRNGFLMRKVAVFFSNTPTRASPQLREAVLKLSDAGITPLFLTRQEDRQLINALQINNTAVGHALVLPAGRDLTDFLENVLTCHVCLDICNIDPSCGFGSWRPSFRDRRAAGSDVDIDMAFILDSAETTTLFQFNEMKKYIAYLVRQLDMSPDPKASQHFARVAVVQHAPSESVDNASMPPVKVEFSLTDYGSKEKLVDFLSRGMTQLQGTRALGSAIEYTIENVFESAPNPRDLKIVVLMLTGEVPEQQLEEAQRVILQAKCKGYFFVVLGIGRKVNIKEVYTFASEPNDVFFKLVDKSTELNEEPLMRFGRLLPSFVSSENAFYLSPDIRKQCDWFQGDQPTKNLVKFGHKQVNVPNNVTSSPTSNPVTTTKPVTTTKPVTTTTKPVTTTTKPVTIINQPSVKPAAAKPAPAKPVAAKPVATKMATVRPPVAVKPATAAKPVAAKPAAVRPPAAAAAKPVATKPEVPRPQAAKPAATKPATTKPMVKMSREVQVFEITENSAKLHWERAEPPGPYFYDLTVTSAHDQSLVLKQNLTVTDRVIGGLLAGQTYHVAVVCYLRSQVRATYHGSFSTKKSQPPPPQPARSASSSTINLMVSTEPLALTETDICKLPKDEGTCRDFILKWYYDPNTKSCARFWYGGCGGNENKFGSQKECEKVCAPVLAKPGVISVMGT

SEQ ID NO: 467 - protein, 796 aa, Homo sapiens
MEEEASRSAAATNPGSRLTRWPPPDKREGSAVDPGKRRSLAATPSSSLPCTLIALGLRHEKEANELMEDLFETFQDEMGFSNMEDDGPEEEERVAEPQANFNTPQALRFEELLANLLNEQHQIAKELFEQLKMKKPSAKQQKEVEKVKPQCKEVHQTLILDPAQRKRLQQQMQQHVQLLTQIHLLATCNPNLNPEASSTRICLKELGTFAQSSIALHHQYNPKFQTLFQPCNLMGAMQLIEDFSTHVSIDCSPHKTVKKTANEFPCLPKQVAWILATSKVFMYPELLPVCSLKAKNPQDKILFTKAEDNKYLLTCKTARQLTVRIKNLNMNRAPDNIIKFYKKTKQLPVLGKCCEEIQPHQWKPPIEREEHRLPFWLKASLPSIQEELRHMADGAREVGNMTGTTEINSDQGLEKDNSELGSETRYPLLLPKGVVLKLKPVADRFPKKAWRQKRSSVLKPLLIQPSPSLQPSFNPGKTPAQSTHSEAPPSKMVLRIPHPIQPATVLQTVPGVPPLGVSGGESFESPAALPAMPPEARTSFPLSESQTLLSSAPVPKVMMPSPASSMFRKPYVRRRPSKRRGARAFRCIKPAPVIHPASVIFTVPATTVKIVSLGGGCNMIQPVNAAVAQSPQTIPIATLLVNPTSFPCPLNQPLVASSVSPLIVSGNSVNLPIPSTPEDKAHMNVDIACAVADGENAFQGLEPKLEPQELSPLSATVFPKVEHSPGPPPVDKQCQEGLSENSAYRWTVVKTEEGRQALEPLPQGIQESLNNSSPGDLEEVVKMEPEDATEEISGFL

SEQ ID NO: 468 - protein, 520 aa, Homo sapiens
MQSESGIVPDFEVGEEFHEEPKTYYELKSQPLKSSSSAEHPGASKPPISSSSMTSRILLRQQLMREQMQEQERREQQQKLQAAQFMQQRVPVSQTPAINVSVPTTLPSATQVPMEVLKVQTHLENPTKYHIQQAQRQQVKQYLSTTLANKHANQVLSLPCPNQPGDHVMPPVPGSSAPNSPMAMLTLNSNCEKEGFYKFEEQNRAESECPGMNTHSRASCMQMDDVIDDIISLESSYNEEILGLMDPALQMANTLPVSGNLIDLYGNQGLPPPGLTISNSCPANLPNIKRELTESEARALAKERQKKDNHNLIERRRRFNINDRIKELGTLIPKSNDPDMRWNKGTILKASVDYIRKLQREQQRAKELENRQKKLEHANRHLLLRIQELEMQARAHGLSLIPSTGLCSPDLVNRIIKQEPVLENCSQDLLQHHADLTCTTTLDLTDGTITFNNNLGTGTEANQAYSVPTKMGSKLEDILMDDTLSPVGVTDPLLSSVSPGASKTSSRRSSMSMEETEHTC

SEQ ID NO: 469 - protein, 536 aa, Homo sapiens
MEEPPQEALAEPLKHESPAAPSSAGHTKGQEEDDQKNQAERKADNHTAHRIADQTALRVPSQAESSIFSQATNGVAEQNGHSTPGQAGRRASNPADVSDLRADDQVNQTPSEQTKGKASSQANNVQHEQSDGQVSGLTEERTAEQTERRLPTQAERRTSGQIDGRLAMPSDQRGSRQTDHRMAGQSERRASEQMDRRMSGEAERRTSEQITHRLSKLSERRPSVQIDSGSSVPSDQSPSVQIDSGSSVPSDQRPSVQIDRRMSGKVRRRSSEKTDYRLAGLADPGTSEQTDLRLYGLVDHKTSVKTHHQVYGQATELAEHQAIDQAHSNADQPPVDNAHYTESDQTDHLADRQANHKDQLSYYETRGQSEDRIFPQLGNSKEDKEADYRVQPCKFEDSQVDLNSKPSVEMETQNATTIPPYNPVDARFTSNFQAKDQALFPRLPSISSKLNYTSSQEKTQAIVTKSDEFSEIDQGKGYHIRNQTYRRFPSIVYEDPYQVSLQYMEKHHILQIFQQITENLVYEKPEDPLNFMLCQV

SEQ ID NO: 470 - protein, 297 aa, Homo sapiens
MEEPTAVEGQVQLPSPHQGSLRKAVAAALALDGESTMGHRKKKRKESRPESIIIYRSDNEKTDEEPGESEGGDQPKEEEGDDFLDYPVDDDMWNLPLDSRYVTLTGTITRGKKKGQMVDIHVTLTEKELQELTKPKESSRETTPEGRMACQMGADRGPHVVLWTLICLPVVFILSFVVSFYYGTITWYNIFLVYNEERTFWHKISYCPCLVLFYPVLIMAMASSLGLYAAVVQLSWSWEAWWQAARDMEKGFCGWLCSKLGLEDCSPYSIVELLESDNISSTLSNKDPIQEVETSTV

SEQ ID NO: 471 - protein, 350 aa, Homo sapiens
MSNITDPQMWDFDDLNFTGMPPADEDYSPCMLETETLNKYVVIIAYALVFLLSLLGNSLVMLVILYSRVGRSVTDVYLLNLALADLLFALTLPIWAASKVNGWIFGTFLCKVVSLLKEVNFYSGILLLACISVDRYLAIVHATRTLTQKRHLVKFVCLGCWGLSMNLSLPFFLFRQAYHPNNSSPVCYEVLGNDTAKWRMVLRILPHTFGFIVPLFVMLFCYGFTLRTLFKAHMGQKHRAMRVIFAVVLIFLLCWLPYNLVLLADTLMRTQVIQESCERRNNIGRALDATEILGFLHSCLNPIIYAFIGQNFRHGFLKILAMHGLVSKEFLARHRVTSYTSSSVNVSSNL

SEQ ID NO: 472 - protein, 1315 aa, Homo sapiens
MEKYHVLEMIGEGSFGRVYKGRRKYSAQVVALKFIPKLGRSEKELRNLQREIEIMRGLRHPNIVHMLDSFETDKEVVVVTDYAEGELFQILEDDGKLPEDQVQAIAAQLVSALYYLHSHRILHRDMKPQNILLAKGGGIKLCDFGFARAMSTNTMVLTSIKGTPLYMSPELVEERPYDHTADLWSVGCILYELAVGTPPFYATSIFQLVSLILKDPVRWPSTISPCFKNFLQGLLTKDPRQRLSWPDLLYHPFIAGHVTIITEPAGPDLGTPFTSRLPPELQVLKDEQAHRLAPKGNQSRILTQAYKRMAEEAMQKKHQNTGPALEQEDKTSKVAPGTAPLPRLGATPQESSLLAGILASELKSSWAKSGTGEVPSAPRENRTTPDCERAFPEERPEVLGQRSTDVVDLENEEPDSDNEWQHLLETTEPVPIQLKAPLTLLCNPDFCQRIQSQLHEAGGQILKGILEGASHILPAFRVLSSLLSSCSDSVALYSFCREAGLPGLLLSLLRHSQESNSLQQQSWYGTFLQDLMAVIQAYFACTFNLERSQTSDSLQVFQEAANLFLDLLGKLLAQPDDSEQTLRRDSLMCFTVLCEAMDGNSRAISKAFYSSLLTTQQVVLDGLLHGLTVPQLPVHTPQGAPQVSQPLREQSEDIPGAISSALAAICTAPVGLPDCWDAKEQVCWHLANQLTEDSSQLRPSLISGLQHPILCLHLLKVLYSCCLVSEGLCRLLGQEPLALESLFMLIQGKVKVVDWEESTEVTLYFLSLLVFRLQNLPCGMEKLGSDVATLFTHSHVVSLVSAAACLLGQLGQQGVTFDLQPMEWMAAATHALSAPAEVRLTPPGSCGFYDGLLILLLQLLTEQGKASLIRDMSSSEMWTVLWHRFSMVLRLPEEASAQEGELSLSSPPSPEPDWTLISPQGMAALLSLAMATFTQEPQLCLSCLSQHGSILMSILKHLLCPSFLNQLRQAPHGSEFLPVVVLSVCQLLCFPFALDMDADLLIGVLADLRDSEVAAHLLQVCCYHLPLMQVELPISLLTRLALMDPTSLNQFVNTVSASPRTIVSFLSVALLSDQPLLTSDLLSLLAHTARVLSPSHLSFIQELLAGSDESYRPLRSLLGHPENSVRAHTYRLLGHLLQHSMALRGALQSQSGLLSLLLLGLGDKDPVVRCSASFAVGNAAYQAGPLGPALAAAVPSMTQLLGDPQAGIRRNVASALGNLGPEGLGEELLQCEVPQRLLEMACGDPQPNVKEAALIALRSLQQEPGIHQVLVSLGASEKLSLLSLGNQSLPHSSPRPASAKHCRKLIHLLRPAHSM

SEQ ID NO: 473 - protein, 174 aa, Homo sapiens
MACLGFQRHKAQLNLATRTWPCTLLFFLLFIPVFCKAMHVAQPAVVLASSRGIASFVCEYASPGKATEVRVTVLRQADSQVTEVCAATYMMGNELTFLDDSICTGTSSGNQVNLTIQGLRAMDTGLYICKVELMYPPPYYLGIGNGTQIYVIAKEKKPSYNRGLCENAPNRARM

SEQ ID NO: 474 - protein, 982 aa, Homo sapiens
MKEPDDQDTDGEKSVTSKSDGKKSLRSSKSESRSPVQEDNTFLEDDTDETFTKGEGSYLEEDSDEERLEGSLSSFQYGDLQSTTVPQQTPAPAVEEAEEEVKKKISESFFYDYMELASMPFVTLDSNIPLDLLTLVHSFGYDCRKRANLQLLDDSIAIYIAGNQLIFLNLKTKEQIYLRSSSGEGIGVIGVHPHKTYFTVAEKGSFPDIIIYEYPSLRPYRVLRDGTEKGYAYVDFNYSGNLLASVGSNPDYTLTIWNWKEEQPILRTKAFSQEVFKVTFNPDKEEQLTTSGSGHIKFWEMAFTFTGLKLQGSLGRFGKTITTDIEGYMELPDGKVLSGSEWGNMLLWEGGLIKVELCRGTSKSCHNGPINQIMLYEGEVITVGSDGYVRIWDFETIDTADVIDETGLLEIEPINELQVDKNVNLFSMIKMNETGNNFWLAQDANGAIWKLDLSFSNITQDPECLFSFHSGAIEAVAVSPLTYLMATTALDCSVRIYDFASKTPLAQMKFKQGGTALVWVPRMVNFTGAQIIVGFEDGVVRILELYDPKGLTIFAGRKKILDADIQLKQVFKPHTACVTALAYERDGEILATGSKDQTVFFFEVERDYKPIGYINTPGPVCQLMWSPMSHPESTLLIICENGYILEAPLPTIKQEEDDHDVVSYEIKDMCIKCFHFSSVKSKILRLIEIEKRERQRELKEKIREERRNKLAAEMGEDGEKEFQEEEEEKEEEEEEEEPLPEIFIPSTPSPILCGFYSEPGKFWVSLGGYDSGFLYHCEFPPCDESSDFKEQKDEPIDVRYLADTEDNPIQTITFNINKVMMFCGMKNGAIRVYVLNQNDPSLTSLVDYWHFNMHDNNYGCIKSIANSFDDRFLVTAGADGNIFVFNIFSEFMLRKDMKAKVPSPRFGIETEPIPEDIEDPKAYSIENARRKREHDKLMKEVGEIKARKREQIKALRSEFCNLLEMNEKLPKHMQFKRTVSLI

SEQ ID NO: 475 - protein, 892 aa, Homo sapiens
MSERAADDVRGEPRRAAAAAGGAAAAAARQQQQQQQQQQPPPPQPQRQQHPPPPPRRTRPEDGGPGAASTSAAAMATVGERRPLPSPEVMLGQSWNLWVEASKLPGKDGTELDESFKEFGKNREVMGLCREDMPIFGFCPAHDDFYLVVCNDCNQVVKPQAFQSHYERRHSSSSKPPLAVPPTSVFSFFPSLSKSKGGSASGSNRSSSGGVLSASSSSSKLLKSPKEKLQLRGNTRPMHPIQQSRVPHGRIMTPSVKVEKIHPKMDGTLLKSAVGPTCPATVSSLVKPGLNCPSIPKPTLPSPGQILNGKGLPAPPTLEKKPEDNSNNRKFLNKRLSEREFDPDIHCGVIDLDTKKPCTRSLTCKTHSLTQRRAVQGRRKRFDVLLAEHKNKTREKELIRHPDSQQPPQPLRDPHPAPPRTSQEPHQNPHGVIPSESKPFVASKPKPHTPSLPRPPGCPAQQGGSAPIDPPPVHESPHPPLPATEPASRLSSEEGEGDDKEESVEKLDCHYSGHHPQPASFCTFGSRQIGRGYYVFDSRWNRLRCALNLMVEKHLNAQLWKKIPPVPSTTSPISTRIPHRTNSVPTSQCGVSYLAAATVSTSPVLLSSTCISPNSKSVPAHGTTLNAQPAASGAMDPVCSMQSRQVSSSSSSPSTPSGLSSVPSSPMSRKPQKLKSSKSLRPKESSGNSTNCQNASSSTSGGSGKKRKNSSPLLVHSSSSSSSSSSSSHSMESFRKNCVAHSGPPYPSTVTSSHSIGLNCVTNKANAVNVRHDQSGRGPPTGSPAESIKRMSVMVNSSDSTLSLGPFIHQSNELPVNSHGSFSHSHTPLDKLIGKKRKCSPSSSSINNSSSKPTKVAKVPAVNNVHMKHTGTIPGAQGLMNSSLLHQPKARP

SEQ ID NO: 476 - protein, 593 aa, Homo sapiens
MTAEDSTAAMSSDSAAGSSAKVPEGVAGAPNEAALLALMERTGYSMVQENGQRKYGGPPPGWEGPHPQRGCEVFVGKIPRDVYEDELVPVFEAVGRIYELRLMMDFDGKNRGYAFVMYCHKHEAKRAVRELNNYEIRPGRLLGVCCSVDNCRLFIGGIPKMKKREEILEEIAKVTEGVLDVIVYASAADKMKNRGFAFVEYESHRAAAMARRKLMPGRIQLWGHQIAVDWAEPEIDVDEDVMETVKILYVRNLMIETTEDTIKKSFGQFNPGCVERVKKIRDYAFVHFTSREDAVHAMNNLNGTELEGSCLEVTLAKPVDKEQYSRYQKAARGGGAAEAAQQPSYVYSCDPYTLAYYGYPYNALIGPNRDYFVKAGSIRGRGRGAAGNRAPGPRGSYLGGYSAGRGIYSRYHEGKGKQQEKGYELVPNLEIPTVNPVAIKPGTVAIPAIGAQYSMFPAAPAPKMIEDGKIHTVEHMISPIAVQPDPASAAAAAAAAAAAAAAVIPTVSTPPPFQGRPITPVYTVAPNVQRIPTAGIYGASYVPFAAPATATIATLQKNAAAAAAMYGGYAGYIPQAFPAAAIQVPIPDVYQTY

SEQ ID NO: 477 - protein, 544 aa, Homo sapiens
MLNMQGAEERDIRRETCPGWVNKNKPALEQDVCKIDSSGIVVKRFQEDEYQDSTFEEKYACEGMKENSPREIAESCLFQEGGFGRITFIHKEAPPEIISQGYNFEKSLLLTSSLVTRLRVSTEESLHQWETSNIQTNDISDQSKCPTLCTQKKSWKCNECGKTFTQSSSLTQHQRTHTGERPYTCEECGKAFSRSSFLVQHQRIHTGVKPYGCEQCGKTFRCRSFLTQHQRIHTGEKPYKCNECGNSFRNHSHLTEHQRIHTGEKPYKCNRCGKAFNQNTHLIHHQRIHTGEKPYICSECGSSFRKHSNLTQHQRIHTGEKPHKCDECGKTFQTKANLSQHQRIHSGEKPYKCKECGKAFCQSPSLIKHQRIHTGEKPYKCKECGKAFTQSTPLTKHQRIHTGERPYKCSECGKAFIQSICLIRHQRSHTGEKPYKCNECGKGFNQNTCLTQHMRIHTGEKPYKCKECGKAFAHSSSLTEHHRTHTGEKLYKCSECEKTFRKYAHLSEHYRIHTGEKPYECIECGKFFRHSSVLFRHQKLHSGD

SEQ ID NO: 478 - protein, 684 aa, Homo sapiens
MMDASKELQVLHIDFLNQDNAVSHHTWEFQTSSPVFRRGQVFHLRLVLNQPLQSYHQLKLEFSTGPNPSIAKHTLVVLDPRTPSDHYNWQATLQNESGKEVTVAVTSSPNAILGKYQLNVKTGNHILKSEENILYLLFNPWCKEDMVFMPDEDERKEYILNDTGCHYVGAARSIKCKPWNFGQFEKNVLDCCISLLTESSLKPTDRRDPVLVCRAMCAMMSFEKGQGVLIGNWTGDYEGGTAPYKWTGSAPILQQYYNTKQAVCFGQCWVFAGILTTVLRALGIPARSVTGFDSAHDTERNLTVDTYVNENGEKITSMTHDSVWNFHVWTDAWMKRPDLPKGYDGWQAVDATPQERSQGVFCCGPSPLTAIRKGDIFIVYDTRFVFSEVNGDRLIWLVKMVNGQEELHVISMETTSIGKNISTKAVGQDRRRDITYEYKYPEGSSEERQVMDHAFLLLSSEREHRRPVKENFLHMSVQSDDVLLGNSVNFTVILKRKTAALQNVNILGSFELQLYTGKKMAKLCDLNKTSQIQGQVSEVTLTLDSKTYINSLAILDDEPVIRGFIIAEIVESKEIMASEVFTSFQYPEFSIELPNTGRIGQLLVCNCIFKNTLAIPLTDVKFSLESLGISSLQTSDHGTVQPGETIQSQIKCTPIKTGPKKFIVKLSSKQVKEINAQKIVLITK

SEQ ID NO: 479 - protein, 299 aa, Homo sapiens
MAELGLNEHHQNEVINYMRFARSKRGLRLKTVDSCFQDLKESRLVEDTFTIDEVSEVLNGLQAVVHSEVESELINTAYTNVLLLRQLFAQAEKWYLKLQTDISELENRELLEQVAEFEKAEITSSNKKPILDVTKPKLAPLNEGGTAELLNKEILRLQEENEKLKSRLKTIEIQATNALDEKSKLEKALQDLQLDQGNQKDFIKAQDLSNLENTVAALKSEFQKTLNDKTENQKSLEENLATAKHDLLRVQEQLHMAEKELEKKFQQTAAYRNMKEILTKKNDQIKDLRKRLAQYEPED

SEQ ID NO: 480 - protein, 589 aa, Homo sapiens
MYRWLVRILGTIFRFCDRSVPPARALLKRRRSDSTLFSTVDTDEIPAKRPRLDCFIHQVKNSLYNAASLFGFPFQLTTKPMVTSACNGTRNVAPSGEVFSNSSSCELTGSGSWNNMLKLGNKSPNGISDYPKIRVTVTRDQPRRVLPSFGFTLNSEGCNRRPGGRRHSKGNPESSLMWKPQEQAVTEMISEESGKGLRRPHCTVEEGVQKEEREKYRKLLERLKESGHGNSVCPVTSNYHSSQRSQMDTLKTKGWGEEQNHGVKTTQFVPKQYRLVETRGPLCSLRSEKRCSKGKITDTETMVGIRFENESRRGYQLEPDLSEEVSARLRLGSGSNGLLRRKVSIIETKEKNCSGKERDRRTDDLLELTEDMEKEISNALGHGPQDEILSSAFKLRITRGDIQTLKNYHWLNDEVINFYMNLLVERNKKQGYPALHVFSTFFYPKLKSGGYQAVKRWTKGVNLFEQEIILVPIHRKVHWSLVVIDLRKKCLKYLDSMGQKGHRICEILLQYLQDESKTKRNSDLNLLEWTHHSMKPHEIPQQLNGSDCGMFTCKYADYISRDKPITFTQHQMPLFRKKMVWEILHQQLL

SEQ ID NO: 481 - protein, 464 aa, Homo sapiens
MEIRLPDLALKRIFSFLDLFGLLQVSQVNKHWNRIADSDYLWRSLSLQRWDCSNFTNQHLGTHTWKQFFLHQRRKELRLALAQPHNFIYKVTKNIAFETELAYLSGNRLTVDEQEKSIICSVSPKQELCAWDVQEGTMIWSSPVQEFHFSNLVTLPQMHLAITMDRKKTIKVWNCQDRDALAVLPMPQPCYCMEAYLTKDGPFLMVGDAAGDIYTFTLPGLRDVSKVTAFQYGIVLLHCSPDKKWVFACGTYSRTLPQVFLTESLLRPSEGSVPLSTFLPHKLCASACWTPKVKNRITLMSQSSTGKKTEFITFDLTTKKTGGQTVIQAYEIASFQVAAHLKCPIWMGASDGYMIVFTSGPYLLLFSITGFLLQRFEDHQAAINNFWVDPCYVLTTSENSVHVYMWEEGGRHPYLRSCCHLENTWHDHTTDSCISSVMCDNASIVLRVRKVSDSSILVMYSLNT

SEQ ID NO: 482 - protein, 1400 aa, Homo sapiens
MELLPPLPQSFLLLLLLPAKPAAGEDWQCPRTPYAASRDFDVKYVVPSFSAGGLVQAMVTYEGDRNESAVFVAIRNRLHVLGPDLKSVQSLATGPAGDPGCQTCAACGPGPHGPPGDTDTKVLVLDPALPALVSCGSSLQGRCFLHDLEPQGTAVHLAAPACLFSAHHNRPDDCPDCVASPLGTRVTVVEQGQASYFYVASSLDAAVAASFSPRSVSIRRLKADASGFAPGFVALSVLPKHLVSYSIEYVHSFHTGAFVYFLTVQPASVTDDPSALHTRLARLSATEPELGDYRELVLDCRFAPKRRRRGAPEGGQPYPVLRVAHSAPVGAQLATELSIAEGQEVLFGVFVTGKDGGPGVGPNSVVCAFPIDLLDTLIDEGVERCCESPVHPGLRRGLDFFQSPSFCPNPPGLEALSPNTSCRHFPLLVSSSFSRVDLFNGLLGPVQVTALYVTRLDNVTVAHMGTMDGRILQVELVRSLNYLLYVSNFSLGDSGQPVQRDVSRLGDHLLFASGDQVFQVPIQGPGCRHFLTCGRCLRAWHFMGCGWCGNMCGQQKECPGSWQQDHCPPKLTEFHPHSGPLRGSTRLTLCGSNFYLHPSGLVPEGTHQVTVGQSPCRPLPKDSSKLRPVPRKDFVEEFECELEPLGTQAVGPTNVSLTVTNMPPGKHFRVDGTSVLRGFSFMEPVLIAVQPLFGPRAGGTCLTLEGQSLSVGTSRAVLVNGTECLLARVSEGQLLCATPPGATVASVPLSLQVGGAQVPGSWTFQYREDPVVLSISPNCGYINSHITICGQHLTSAWHLVLSFHDGLRAVESRCERQLPEQQLCRLPEYVVRDPQGWVAGNLSARGDGAAGFTLPGFRFLPPPHPPSANLVPLKPEEHAIKFEYIGLGAVADCVGINVTVGGESCQHEFRGDMVVCPLPPSLQLGQDGAPLQVCVDGECHILGRVVRPGPDGVPQSTLLGILLPLLLLVAALATALVFSYWWRRKQLVLPPNLNDLASLDQTAGATPLPILYSGSDYRSGLALPAIDGLDSTTCVHGASFSDSEDESCVPLLRKESIQLRDLDSALLAEVKDVLIPHERVVTHSDRVIGKGHFGVVYHGEYIDQAQNRIQCAIKSLSRITEMQQVEAFLREGLLMRGLNHPNVLALIGIMLPPEGLPHVLLPYMCHGDLLQFIRSPQRNPTVKDLISFGLQVARGMEYLAEQKFVHRDLAARNCMLDESFTVKVADFGLARDILDREYYSVQQHRHARLPVKWMALESLQTYRFTTKSDVWSFGVLLWELLTRGAPPYRHIDPFDLTHFLAQGRRLPQPEYCPDSLYQVMQQCWEADPAVRPTFRVLVGEVEQIVSALLGDHYVQLPATYMNLGPSTSHEMNVRPEQPQFSPMPGNVRRPRPLSEPPRPT

SEQ ID NO: 483 - protein, 530 aa, Homo sapiens
MGSNSGQAGRHIYKSLADDGPFDSVEPPKRPTSRLIMHSMAMFGREFCYAVEAAYVTPVLLSVGLPSSLYSIVWFLSPILGFLLQPVVGSASDHCRSRWGRRRPYILTLGVMMLVGMALYLNGATVVAALIANPRRKLVWAISVTMIGVVLFDFAADFIDGPIKAYLFDVCSHQDKEKGLHYHALFTGFGGALGYLLGAIDWAHLELGRLLGTEFQVMFFFSALVLTLCFTVHLCSISEAPLTEVAKGIPPQQTPQDPPLSSDGMYEYGSIEKVKNGYVNPELAMQGAKNKNHAEQTRRAMTLKSLLRALVNMPPHYRYLCISHLIGWTAFLSNMLFFTDFMGQIVYRGDPYSAHNSTEFLIYERGVEVGCWGLCINSVFSSLYSYFQKVLVSYIGLKGLYFTGYLLFGLGTGFIGLFPNVYSTLVLCSLFGVMSSTLYTVPFNLITEYHREEEKERQQAPGGDPDNSVRGKGMDCATLTCMVQLAQILVGGGLGFLVNTAGTVVVVVITASAVALIGCCFVALFVRYVD

SEQ ID NO: 484 - protein, 943 aa, Homo sapiens
MGPRKKSVKTCIMNNEIPEEMTADETKDYMNQLSHEVLCHIFRYLPLQDIMCMECLSRKLKEAVTLYLRVVRVVDLCAGRWWEYMPSGFTDASFLTLLKKMPDVEQLYGLHPRYLERRRVRGHEAFSIPGVLEALQACPNLVGVETSHLELVESIWTYMPHVHILGKFRNRNGAFPIPPENKLKIPIGAKIQTLHLVGVNVPEIPCIPMLRHLYMKWVRLTKPQPFKDFLCISLRTFVMRNCAGPTNSLKYVPLVTGLASARNLEHLEMVRVPFLGGLIQHVVEDSWRSGGFRNLHTIVLGACKNALEVDLGYLIITAARRLHEVRIQPSLTKDGVFSALKMAELEFPQFETLHLGYVDEFLLQSRMANADLVKYGLADVVENPGIITDIGMKAVNEVFSCIKYLAIYNCPHLHNPYNWISDHSRWTRLVDINLVRCHALKLDSFGQFIELLPSLEFISLDQMFREPPKGCARVGLSAGTGIGVSSALVSNQNSNNDDNNAQNNNANIHDNNHHHPDDSDEENDFRQDLQPGEQQFAADALNEMEDIVQEDGEVVAESGNNTPAHSQAIIPVDVDEEQAGPSGLQRVVKPTSITVHDSESDDEEDSLELQEVWIPKNGTRRYSEREEKTGESVQSRELSEVAKTKPRHAMKRKRTADKSTSTSDPVIEDDHVQVLVLKSKNLVGVTMTNCGITDLVLKDCPKMMFIHATRCRVLKHLKVENAPIVNRFDYAQCKKLNMDQVLDQILRMPPERNRIIYLRPMQQVDTLTLEQKLFSGPYPYHICIIHEFSNPPNVRNKVRIRSWMDTIANINQELIKYEFFPEATRSEEDLKKYPKYPWGREIYTLEGVVDGAPYSMISDFPWLRSLRAAEPNSFARYDFEDDEESTIYAPRRKGQLSADICMETIGEEISEMRQMKKGVFQRVVAIFIHYCDVNGEPVEDDYI

SEQ ID NO: 485 - protein, 440 aa, Homo sapiens
MAVKLGTLLLALALGLAQPASARRKLLVFLLDGFRSDYISDEALESLPGFKEIVSRGVKVDYLTPDFPSLSYPNYYTLMTGRHCEVHQMIGNYMWDPTTNKSFDIGVNKDSLMPLWWNGSEPLWVTLTKAKRKVYMYYWPGCEVEILGVRPTYCLEYKNVPTDINFANAVSDALDSFKSGRADLAAIYHERIDVEGHHYGPASPQRKDALKAVDTVLKYMTKWIQERGLQDRLNVIIFSDHGMTDIFWMDKVIELNKYISLNDLQQVKDRGPVVSLWPAPGKHSEIYNKLSTVEHMTVYEKEAIPSRFYYKKGKFVSPLTLVADEGWFITENREMLPFWMNSTGRREGWQRGWHGYDNELMDMRGIFLAFGPDFKSNFRAAPIRSVDVYNVMCNVVGITPLPNNGSWSRVMCMLKGRASTAPPVWPSHCALALILLFLLA

SEQ ID NO: 486 - protein, 948 aa, Homo sapiens
MVFLPLKWSLATMSFLLSSLLALLTVSTPSWCQSTEASPKRSDGTPFPWNKIRLPEYVIPVHYDLLIHANLTTLTFWGTTKVEITASQPTSTIILHSHHLQISRATLRKGAGERLSEEPLQVLEHPRQEQIALLAPEPLLVGLPYTVVIHYAGNLSETFHGFYKSTYRTKEGELRILASTQFEPTAARMAFPCFDEPAFKASFSIKIRREPRHLAISNMPLVKSVTVAEGLIEDHFDVTVKMSTYLVAFIISDFESVSKITKSGVKVSVYAVPDKINQADYALDAAVTLLEFYEDYFSIPYPLPKQDLAAIPDFQSGAMENWGLTTYRESALLFDAEKSSASSKLGITMTVAHELAHQWFGNLVTMEWWNDLWLNEGFAKFMEFVSVSVTHPELKVGDYFFGKCFDAMEVDALNSSHPVSTPVENPAQIREMFDDVSYDKGACILNMLREYLSADAFKSGIVQYLQKHSYKNTKNEDLWDSMASICPTDGVKGMDGFCSRSQHSSSSSHWHQEGVDVKTMMNTWTLQKGFPLITITVRGRNVHMKQEHYMKGSDGAPDTGYLWHVPLTFITSKSDMVHRFLLKTKTDVLILPEEVEWIKFNVGMNGYYIVHYEDDGWDSLTGLLKGTHTAVSSNDRASLINNAFQLVSIGKLSIEKALDLSLYLKHETEIMPVFQGLNELIPMYKLMEKRDMNEVETQFKAFLIRLLRDLIDKQTWTDEGSVSERMLRSQLLLLACVHNYQPCVQRAEGYFRKWKESNGNLSLPVDVTLAVFAVGAQSTEGWDFLYSKYQFSLSSTEKSQIEFALCRTQNKEKLQWLLDESFKGDKIKTQEFPQILTLIGRNPVGYPLAWQFLRKNWNKLVQKFELGSSSIAHMVMGTTNQFSTRTRLEEVKGFFSSLKENGSQLRCVQQTIETIEENIGWMDKNFDKIRVWLQSEKLEHDPEADATG

SEQ ID NO: 487 - protein, 1651 aa, Homo sapiens
MELSCSEAPLYGQMMIYAKFDKNVYLPEDAEFYFTYDGSHQRHVMIAERIEDNVLQSSVPGHGLQETVTVSVCLCSEGYSPVTMGSGSVTYVDNMACRLARLLVTQANRLTACSHQTLLTPFALTAGALPALDEELVLALTHLELPLEWTVLGSSSLEVSSHRESLLHLAMRWGLAKLSQFFLCLPGGVQALALPNEEGATPLDLALREGHSKLVEDVTNFQGRWSPSFSRVQLSEEASLHYIHSSETLTLTLNHTAEHLLEADIKLFRKYFWDRAFLVKAFEPEARPEERTAMPSSGAETEEEIKNSVSSRSAAEKEDIKRVKSLVVQHNEHEDQHSLDLDRSFDILKKSKPPSTLLAAGRLSDMLNGGDEVYANCMVIDQVGDLDISYINIEGITATTSPESRGCTLWPQSSKHTLPTETSPSVYPLSENVEGTAHTEAQQSFMSPSSSCASNLNLSFGWHGFEKEQSHLKKRSSSLDALDADSEGEGHSEPSHICYTPGSQSSSRTGIPSGDELDSFETNTEPDFNISRAESLPLSSNLQSKESLLSGVRSRSYSCSSPKISLGKTRLVRELTVCSSSEEQRAYSLSEPPRENRIQEEEWDKYIIPAKSESEKYKVSRTFSFLMNRMTSPRNKSKTKSKDAKDKEKLNRHQFAPGTFSGVLQCLVCDKTLLGKESLQCSNCNANVHKGCKDAAPACTKKFQEKYNKNKPQTILGNSSFRDIPQPGLSLHPSSSVPVGLPTGRRETVGQVHPLSRSVPGTTLESFRRSATSLESESDHNSCRSRSHSDELLQSMGSSPSTESFIMEDVVDSSLWSDLSSDAQEFEAESWSLVVDPSFCNRQEKDVIKRQDVIFELMQTEMHHIQTLFIMSEIFRKGMKEELQLDHSTVDKIFPCLDELLEIHRHFFYSMKERRQESCAGSDRNFVIDRIGDILVQQFSEENASKMKKIYGEFCCHHKEAVNLFKELQQNKKFQNFIKLRNSNLLARRRGIPECILLVTQRITKYPVLVERILQYTKERTEEHKDLRKALCLIKDMIATVDLKVNEYEKNQKWLEILNKIENKTYTKLKNGHVFRKQALMSEERTLLYDGLVYWKTATGRFKDILALLLTDVLLFLQEKDQKYIFAAVDQKPSVISLQKLIAREVANEERGMFLISASSAGPEMYEIHTNSKEERNNWMRRIQQAVESCPEEKGGRTSESDEDKRKAEARVAKIQQCQEILTNQDQQICAYLEEKLHIYAELGELSGFEDVHLEPHLLIKPDPGEPPQAASLLAAALKEAESLQVAVKASQMGAVSQSCEDSCGDSVLADTLSSHDVPGSPTASLVTGGREGRGCSDVDPGIQGVVTDLAVSDAGEKVECRNFPGSSQSEIIQAIQNLTRLLYSLQAALTIQDSHIEIHRLVLQQQEGLSLGHSILRGGPLQDQKSRDADRQHEELANVHQLQHQLQQEQRRWLRRCEQQQRAQATRESWLQERERECQSQEELLLRSRGELDLQLQEYQHSLERLREGQRLVEREQARMRAQQSLLGHWKHGRQRSLPAVLLPGGPEVMELNRSESLCHENSFFINEALVQMSFNTFNKLNPSVIHQDATYPTTQSHSDLVRTSEHQVDLKVDPSQPSNVSHKLWTAAGSGHQILPFHESSKDSCKNGN

SEQ ID NO: 488 - protein, 904 aa, Homo sapiens
MRQTLPCIYFWGGLLPFGMLCASSTTKCTVSHEVADCSHLKLTQVPDDLPTNITVLNLTHNQLRRLPAANFTRYSQLTSLDVGFNTISKLEPELCQKLPMLKVLNLQHNELSQLSDKTFAFCTNLTELHLMSNSIQKIKNNPFVKQKNLITLDLSHNGLSSTKLGTQVQLENLQELLLSNNKIQALKSEELDIFANSSLKKLELSSNQIKEFSPGCFHAIGRLFGLFLNNVQLGPSLTEKLCLELANTSIRNLSLSNSQLSTTSNTTFLGLKWTNLTMLDLSYNNLNVVGNDSFAWLPQLEYFFLEYNNIQHLFSHSLHGLFNVRYLNLKRSFTKQSISLASLPKIDDFSFQWLKCLEHLNMEDNDIPGIKSNMFTGLINLKYLSLSNSFTSLRTLTNETFVSLAHSPLHILNLTKNKISKIESDAFSWLGHLEVLDLGLNEIGQELTGQEWRGLENIFEIYLSYNKYLQLTRNSFALVPSLQRLMLRRVALKNVDSSPSPFQPLRNLTILDLSNNNIANINDDMLEGLEKLEILDLQHNNLARLWKHANPGGPIYFLKGLSHLHILNLESNGFDEIPVEVFKDLFELKIIDLGLNNLNTLPASVFNNQVSLKSLNLQKNLITSVEKKVFGPAFRNLTELDMRFNPFDCTCESIAWFVNWINETHTNIPELSSHYLCNTPPHYHGFPVRLFDTSSCKDSAPFELFFMINTSILLIFIFIVLLIHFEGWRISFYWNVSVHRVLGFKEIDRQTEQFEYAAYIIHAYKDKDWVWEHFSSMEKEDQSLKFCLEERDFEAGVFELEAIVNSIKRSRKIIFVITHHLLKDPLCKRFKVHHAVQQAIEQNLDSIILVFLEEIPDYKLNHALCLRRGMFKSHCILNWPVQKERIGAFRHKLQVALGSKNSVH

SEQ ID NO: 489 - protein, 1392 aa, Homo sapiens
MDSDSDSPFNYSWPSFPKMKIRRRTSKQDRSFDILKKSKPPSTLLAAGRLSDMLNGGDEVYANCMVIDQVGDLDISYINIEGITATTSPESRGCTLWPQSSKHTLPTETSPSVYPLSENVEGTAHTEAQQSFMSPSSSCASNLNLSFGWHGFEKEQSHLKKRSSSLDALDADSEGEGHSEPSHICYTPGSQSSSRTGIPSGDELDSFETNTEPDFNISRAESLPLSSNLQSKESLLSGVRSRSYSCSSPKISLGKTRLVRELTVCSSSEEQRAYSLSEPPRENRIQEEEWDKYIIPAKSESEKYKVSRTFSFLMNRMTSPRNKSKTKSKDAKDKEKLNRHQFAPGTFSGVLQCLVCDKTLLGKESLQCSNCNANVHKGCKDAAPACTKKFQEKYNKNKPQTILGNSSFRDIPQPGLSLHPSSSVPVGLPTGRRETVGQVHPLSRSVPGTTLESFRRSATSLESESDHNSCRSRSHSDELLQSMGSSPSTESFIMEDVVDSSLWSDLSSDAQEFEAESWSLVVDPSFCNRQEKDVIKRQDVIFELMQTEMHHIQTLFIMSEIFRKGMKEELQLDHSTVDKIFPCLDELLEIHRHFFYSMKERRQESCAGSDRNFVIDRIGDILVQQFSEENASKMKKIYGEFCCHHKEAVNLFKELQQNKKFQNFIKLRNSNLLARRRGIPECILLVTQRITKYPVLVERILQYTKERTEEHKDLRKALCLIKDMIATVDLKVNEYEKNQKWLEILNKIENKTYTKLKNGHVFRKQALMSEERTLLYDGLVYWKTATGRFKDILALLLTDVLLFLQEKDQKYIFAAVDQKPSVISLQKLIAREVANEERGMFLISASSAGPEMYEIHTNSKEERNNWMRRIQQAVESCPEEKGGRTSESDEDKRKAEARVAKIQQCQEILTNQDQQICAYLEEKLHIYAELGELSGFEDVHLEPHLLIKPDPGEPPQAASLLAAALKEAESLQVAVKASQMGAVSQSCEDSCGDSVLADTLSSHDVPGSPTASLVTGGREGRGCSDVDPGIQGVVTDLAVSDAGEKVECRNFPGSSQSEIIQAIQNLTRLLYSLQAALTIQDSHIEIHRLVLQQQEGLSLGHSILRGGPLQDQKSRDADRQHEELANVHQLQHQLQQEQRRWLRRCEQQQRAQATRESWLQERERECQSQEELLLRSRGELDLQLQEYQHSLERLREGQRLVEREQARMRAQQSLLGHWKHGRQRSLPAVLLPGGPEVMELNRSESLCHENSFFINEALVQMSFNTFNKLNPSVIHQDATYPTTQSHSDLVRTSEHQVDLKVDPSQPSNVSHKLWTAAGSGHQILPFHESSKDSCKNDLDTSHTESPTPHDSNSHRPQLQAFITEAKLNLPTRTMTRQDGETGDGAKENIVYL

SEQ ID NO: 490 - protein, 1193 aa, Homo sapiens
MMFRSDRMWSCHWKWKPSPLLFLFALYIMCVPHSVWGCANCRVVLSNPSGTFTSPCYPNDYPNSQACMWTLRAPTGYIIQITFNDFDIEEAPNCIYDSLSLDNGESQTKFCGATAKGLSFNSSANEMHVSFSSDFSIQKKGFNASYIRVAVSLRNQKVILPQTSDAYQVSVAKSISIPELSAFTLCFEATKVGHEDSDWTAFSYSNASFTQLLSFGKAKSGYFLSISDSKCLLNNALPVKEKEDIFAESFEQLCLVWNNSLGSIGVNFKRNYETVPCDSTISKVIPGNGKLLLGSNQNEIVSLKGDIYNFRLWNFTMNAKILSNLSCNVKGNVVDWQNDFWNIPNLALKAESNLSCGSYLIPLPAAELASCADLGTLCQDGIIYRISVVIQNILRHPEVKVQSKVAEWLNSTFQNWNYTVYVVNISFHLSAGEDKIKVKRSLEDEPRLVLWALLVYNATNNTNLEGKIIQQKLLKNNESLDEGLRLHTVNVRQLGHCLAMEEPKGYYWPSIQPSEYVLPCPDKPGFSASRICFYNATNPLVTYWGPVDISNCLKEANEVANQILNLTADGQNLTSANITNIVEQVKRIVNKEENIDITLGSTLMNIFSNILSSSDSDLLESSSEALKTIDELAFKIDLNSTSHVNITTRNLALSVSSLLPGTNAISNFSIGLPSNNESYFQMDFESGQVDPLASVILPPNLLENLSPEDSVLVRRAQFTFFNKTGLFQDVGPQRKTLVSYVMACSIGNITIQNLKDPVQIKIKHTRTQEVHHPICAFWDLNKNKSFGGWNTSGCVAHRDSDASETVCLCNHFTHFGVLMDLPRSASQLDARNTKVLTFISYIGCGISAIFSAATLLTYVAFEKLRRDYPSKILMNLSTALLFLNLLFLLDGWITSFNVDGLCIAVAVLLHFFLLATFTWMGLEAIHMYIALVKVFNTYIRRYILKFCIIGWGLPALVVSVVLASRNNNEVYGKESYGKEKGDEFCWIQDPVIFYVTCAGYFGVMFFLNIAMFIVVMVQICGRNGKRSNRTLREEVLRNLRSVVSLTFLLGMTWGFAFFAWGPLNIPFMYLFSIFNSLQGLFIFIFHCAMKENVQKQWRQHLCCGRFRLADNSDWSKTATNIIKKSSDNLGKSLSSSSIGSNSTYLTSKSKSSSTTYFKRNSHTDNVSYEHSFNKSGSLRQCFHGQVLVKTGPC

SEQ ID NO: 491 - protein, 233 aa, Homo sapiens
MSKLGKFFKGGGSSKSRAAPSPQEALVRLRETEEMLGKKQEYLENRIQREIALAKKHGTQNKRAALQALKRKKRFEKQLTQIDGTLSTIEFQREALENSHTNTEVLRNMGFAAKAMKSVHENMDLNKIDDLMQEITEQQDIAQEISEAFSQRVGFGDDFDEDELMAELEELEQEELNKKMTNIRLPNVPSSSLPAQPNRKPGMSSTARRSRAASSQRAEEEDDDIKQLAAWAT

SEQ ID NO: 492 - protein, 264 aa, Homo sapiens
MRTLWMALCALSRLWPGAQAGCAEAGRCCPGRDPACFARGWRLDRVYGTCFCDQACRFTGDCCFDYDRACPARPCFVGEWSPWSGCADQCKPTTRVRRRSVQQEPQNGGAPCPPLEERAGCLEYSTPQGQDCGHTYVPAFITTSAFNKERTRQATSPHWSTHTEDAGYCMEFKTESLTPHCALENWPLTRWMQYLREGYTVCVDCQPPAMNSVSLRCSGDGLDSDGNQTLHWQAIGNPRCQGTWKKVRRVDQCSCPAVHSFIFI

SEQ ID NO: 493 - protein, 375 aa, Homo sapiens
MDVTSQARGVGLEMYPGTAQPAAPNTTSPELNLSHPLLGTALANGTGELSEHQQYVIGLFLSCLYTIFLFPIGFVGNILILVVNISFREKMTIPDLYFINLAVADLILVADSLIEVFNLHERYYDIAVLCTFMSLFLQVNMYSSVFFLTWMSFDRYIALARAMRCSLFRTKHHARLSCGLIWMASVSATLVPFTAVHLQHTDEACFCFADVREVQWLEVTLGFIVPFAIIGLCYSLIVRVLVRAHRHRGLRPRRQKALRMILAVVLVFFVCWLPENVFISVHLLQRTQPGAAPCKQSFRHAHPLTGHIVNLAAFSNSCLNPLIYSFLGETFRDKLRLYIEQKTNLPALNRFCHAALKAVIPDSTEQSDVRFSSAV

SEQ ID NO: 494 - protein, 1203 aa, Homo sapiens
MGNLKSVAQEPGPPCGLGLGLGLGLCGKQGPATPAPEPSRAPASLLPPAPEHSPPSSPLTQPPEGPKFPRVKNWEVGSITYDTLSAQAQQDGPCTPRRCLGSLVFPRKLQGRPSPGPPAPEQLLSQARDFINQYYSSIKRSGSQAHEQRLQEVEAEVAATGTYQLRESELVFGAKQAWRNAPRCVGRIQWGKLQVFDARDCRSAQEMFTYICNHIKYATNRGNLRSAITVFPQRCPGRGDFRIWNSQLVRYAGYRQQDGSVRGDPANVEITELCIQHGWTPGNGRFDVLPLLLQAPDDPPELFLLPPELVLEVPLEHPTLEWFAALGLRWYALPAVSNMLLEIGGLEFPAAPFSGWYMSTEIGTRNLCDPHRYNILEDVAVCMDLDTRTTSSLWKDKAAVEINVAVLHSYQLAKVTIVDHHAATASFMKHLENEQKARGGCPADWAWIVPPISGSLTPVFHQEMVNYFLSPAFRYQPDPWKGSAAKGTGITRKKTFKEVANAVKISASLMGTVMAKRVKATILYGSETGRAQSYAQQLGRLFRKAFDPRVLCMDEYDVVSLEHETLVLVVTSTFGNGDPPENGESFAAALMEMSGPYNSSPRPEQHKSYKIRFNSISCSDPLVSSWRRKRKESSNTDSAGALGTLRFCVFGLGSRAYPHFCAFARAVDTRLEELGGERLLQLGQGDELCGQEEAFRGWAQAAFQAACETFCVGEDAKAAARDIFSPKRSWKRQRYRLSAQAEGLQLLPGLIHVHRRKMFQATIRSVENLQSSKSTRATILVRLDTGGQEGLQYQPGDHIGVCPPNRPGLVEALLSRVEDPPAPTEPVAVEQLEKGSPGGPPPGWVRDPRLPPCTLRQALTFFLDITSPPSPQLLRLLSTLAEEPREQQELEALSQDPRRYEEWKWFRCPTLLEVLEQFPSVALPAPLLLTQLPLLQPRYYSVSSAPSTHPGEIHLTVAVLAYRTQDGLGPLHYGVCSTWLSQLKPGDPVPCFIRGAPSFRLPPDPSLPCILVGPGTGIAPFRGFWQERLHDIESKGLQPTPMTLVFGCRCSQLDHLYRDEVQNAQQRGVFGRVLTAFSREPDNPKTYVQDILRTELAAEVHRVLCLERGHMFVCGDVTMATNVLQTVQRILATEGDMELDEAGDVIGVLRDQQRYHEDIFGLTLRTQEVTSRIRTQSFSLQERQLRGAVPWAFDPPGSDTNSP

SEQ ID NO: 495 - protein, 1812 aa, Homo sapiens
MAVDSAMELLFLDTFKHPSAEQSSHIDVVRFPCVVYINEVRVIPPGVRAHSSLPDNRAYGETSPHTFQLDLFFNNVSKPSAPVFDRLGSLEYDENTSIIFRPNSKVNTDGLVLRGWYNCLTLAIYGSVDRVISHDRDSPPPPPPPPPPPQPQPSLKRNPKHADGEKEDQFNGSPPRPQPRGPRTPPGPPPPDDDEDDPVPLPVSGDKEEDAPHREDYFEPISPDRNSVPQEGQYSDEGEVEEEQQEEGEEDEDDVDVEEEEDEDEDDRRTVDSIPEEEEEDEEEEGEEDEEGEGDDGYEQISSDEDGIADLERETFKYPNFDVEYTAEDLASVPPMTYDPYDRELVPLLYFSCPYKTTFEIEISRMKDQGPDKENSGAIEASVKLTELLDLYREDRGAKWVTALEEIPSLIIKGLSYLQLKNTKQDSLGQLVDWTMQALNLQVALRQPIALNVRQLKAGTKLVSSLAECGAQGVTGLLQAGVISGLFELLFADHVSSSLKLNAFKALDSVISMTEGMEAFLRGRQNEKSGYQKLLELILLDQTVRVVTAGSAILQKCHFYEVLSEIKRLGDHLAEKTSSLPNHSEPDHDTDAGLERTNPEYENEVEASMDMDLLESSNISEGEIERLINLLEEVFHLMETAPHTMIQQPVKSFPTMARITGPPERDDPYPVLFRYLHSHHFLELVTLLLSIPVTSAHPGVLQATKDVLKFLAQSQKGLLFFMSEYEATNLLIRALCHFYDQDEEEGLQSDGVIDDAFALWLQDSTQTLQCITELFSHFQRCTASEETDHSDLLGTLHNLYLITFNPVGRSAVGHVFSLEKNLQSLITLMEYYSKEALGDSKSKKSVAYNYACILILVVVQSSSDVQMLEQHAASLLKLCKADENNAKLQELGKWLEPLKNLRFEINCIPNLIEYVKQNIDNLMTPEGVGLTTALRVLCNVACPPPPVEGQQKDLKWNLAVIQLFSAEGMDTFIRVLQKLNSILTQPWRLHVNMGTTLHRVTTISMARCTLTLLKTMLTELLRGGSFEFKDMRVPSALVTLHMLLCSIPLSGRLDSDEQKIQNDIIDILLTFTQGVNEKLTISEETLANNTWSLMLKEVLSSILKVPEGFFSGLILLSELLPLPLPMQTTQVIEPHDISVALNTRKLWSMHLHVQAKLLQEIVRSFSGTTCQPIQHMLRRICVQLCDLASPTALLIMRTVLDLIVEDLQSTSEDKEKQYTSQTTRLLALLDALASHKACKLAILHLINGTIKGDERYAEIFQDLLALVRSPGDSVIRQQCVEYVTSILQSLCDQDIALILPSSSEGSISELEQLSNSLPNKELMTSICDCLLATLANSESSYNCLLTCVRTMMFLAEHDYGLFHLKSSLRKNSSALHSLLKRVVSTFSKDTGELASSFLEFMRQILNSDTIGCCGDDNGLMEVEGAHTSRTMSINAAELKQLLQSKEESPENLFLELEKLVLEHSKDDDNLDSLLDSVVGLKQMLESSGDPLPLSDQDVEPVLSAPESLQNLFNNRTAYVLADVMDDQLKSMWFTPFQAEEIDTDLDLVKVDLIELSEKCCSDFDLHSELERSFLSEPSSPGRTKTTKGFKLGKHKHETFITSSGKSEYIEPAKRAHVVPPPRGRGRGGFGQGIRPHDIFRQRKQNTSRPPSMHVDDFVAAESKEVVPQDGIPPPKRPLKVSQKISSRGGFSGNRGGRGAFHSQNRFFTPPASKGNYSRREGTRGSSWSAQNTPRGNYNESRGGQSNFNRGPLPPLRPLSSTGYRPSPRDRASRGRGGLGPSWASANSGSGGSRGKFVSGGSGRGRHVRSFTR

SEQ ID NO: 496 - protein, 369 aa, Homo sapiens
MADSAQAQKLVYLVTGGCGFLGEHVVRMLLQREPRLGELRVFDQHLGPWLEELKTGPVRVTAIQGDVTQAHEVAAAVAGAHVVIHTAGLVDVFGRASPKTIHEVNVQGTRNVIEACVQTGTRFLVYTSSMEVVGPNTKGHPFYRGNEDTPYEAVHRHPYPCSKALAEWLVLEANGRKVRGGLPLVTCALRPTGIYGEGHQIMRDFYRQGLRLGGWLFRAIPASVEHGRVYVGNVAWMHVLAARELEQRATLMGGQVYFCYDGSPYRSYEDFNMEFLGPCGLRLVGARPLLPYWLLVFLAALNALLQWLLRPLVLYAPLLNPYTLAVANTTFTVSTDKAQRHFGYEPLFSWEDSRTRTILWVQAATGSAQ

SEQ ID NO: 497 - protein, 720 aa, Homo sapiens
MDIQLDPARDDLPLMANTSHILVKHYVLDLDVDFESQVIEGTIVLFLEDGNRFKKQNSSIEEACQSESNKACKFGMPEPCHIPVTNARTFSSEMEYNDFAICSKGEKDTSDKDGNHDNQEHASGISSSKYCCDTGNHGSEDFLLVLDCCDLSVLKVEEVDVAAVPGLEKFTRSPELTVVSEEFRNQIVRELVTLPANRWREQLDYYARCSQAPGCGELLFDTDTWSLQIRKTGAQTATDFPHAIRIWYKTKPEGRSVTWTSDQSGRPCVYTVGSPINNRALFPCQEPPVAMSTWQATVRAAASFVVLMSGENSAKPTQLWEECSSWYYYVTMPMPASTFTIAVGCWTEMKMETWSSNDLATERPFSPSEANFRHVGVCSHMEYPCRFQNASATTQEIIPHRVFAPVCLTGACQETLLRLIPPCLSAAHSVLGAHPFSRLDVLIVPANFPSLGMARPSKDKTGHTSDSGASVIKHGLNPEKIFMQVHYLKGYFLLRFLAKRLGDETYFSFLRKFVHTFHGQLILSQDFLQMLLENIPEEKRLELSVENIYQDWLESSGIPKPLQRERRAGAECGLARQVRAEVTKWIGVNRRPRKRKRREKEEVFEKLLPDQLVLLLEHLLEQKTLSPRTLQSLQRTYHLQDQDAEVRHRWCELIVKHKFTKAYKSVERFLQEDQAMGVYLYGELMVSEDARQQQLARRCFERTKEQMDRSSAQVVAEMLF

SEQ ID NO: 498 - protein, 508 aa, Homo sapiens
MTSTCTNSTRESNSSHTCMPLSKMPISLAHGIIRSTVLVIFLAASFVGNIVLALVLQRKPQLLQVTNRFIFNLLVTDLLQISLVAPWVVATSVPLFWPLNSHFCTALVSLTHLFAFASVNTIVVVSVDRYLSIIHPLSYPSKMTQRRGYLLLYGTWIVAILQSTPPLYGWGQAAFDERNALCSMIWGASPSYTILSVVSFIVIPLIVMIACYSVVFCAARRQHALLYNVKRHSLEVRVKDCVENEDEEGAEKKEEFQDESEFRRQHEGEVKAKEGRMEAKDGSLKAKEGSTGTSESSVEARGSEEVRESSTVASDGSMEGKEGSTKVEENSMKADKGRTEVNQCSIDLGEDDMEFGEDDINFSEDDVEAVNIPESLPPSRRNSNSNPPLPRCYQCKAAKVIFIIIFSYVLSLGPYCFLAVLAVWVDVETQVPQWVITIIIWLFFLQCCIHPYVYGYMHKTIKKEIQDMLKKFFCKEKPPKEDSHPDLPGTEGGTEGKIVPSYDSATFP

SEQ ID NO: 499 - protein, 643 aa, Homo sapiens
MLLPCHWVLDATFSDGSLGQWVKNTCATYALSPVVLPPQPQPRKKATDKDYSAFHLGHLREVRLFLRGGTSDQRMDSLVLCPTYFKLWRTLSGSPGLQLSDLHFGSQPEGKFSLRRAVSVKQREEPQDWPLNEKRTLWKDSDLPTWRRGTGYTLSLPAVSPGKRLWGEKAGSLPESEPLFTYTLDEKVDKLVQFLLLKYQAKEPLTRAEMQMNVINTYTGYFPMIFRKAREFIEILFGISLTEVDPDHFYVFVNTLDLTCEGSLSDEQGMPQNRLLILILSVIFIKGNCASEEVIWEVLNAIGPWSALAGFADVLSRLALWESEGPEAFCEESGLRSAEGSVLDLANPQGLAGHRQEDGRRGLTEASPQQKKGGEDEDMPAAGMPPLPQSPPEIPPQGPPKISPQGPPQSPPQSPLDSCSSPLLWTRLDEESSSEEEDTATWHALPESESLPRYALDEKVAELVQFLLLKYQTKEPVTKAEMLTTVIKKYKDYFPMIFGKAHEFIELIFGIALTDMDPDNHSYFFEDTLDLTYEGSLIDDQGMPKNCLLILILSMIFIKGSCVPEEVIWEVLSAIGPIQRPAREVLEFLSKLSSIIPSAFPSWYMDALKDMEDRAQAIIDTTDDATAMASASPSVMSTNFCPE

SEQ ID NO: 500 - protein, 328 aa, Homo sapiens
MASRCSEPYPEVSRIPTVRGCNGSLSGALSCCEDSARGSGPPKAPTVAEGPSSCLRRNVISERERRKRMSLSCERLRALLPQFDGRREDMASVLEMSVQFLRLASALGPSQEQHAILASSKEMWHSLQEDVLQLTLSSQIQAGVPDPGTGASSGTRTPDVKAFLESPWSLDPASASPEPVPHILASSRQWDPASCTSLGTDKCEALLGLCQVRGGLPPFSEPSSLVPWPPGRSLPKAVRPPLSWPPFSQQQTLPVMSGEALGWLGQAGPLAMGAAPLGEPAKEDPMLAQEAGSALGSDVDDGTSFLLTAGPSSWPGEWGPGFRAGPPA

SEQ ID NO: 501 - protein, 1519 aa, Homo sapiens
MEPEPVEDCVQSTLAALYPPFEATAPTLLGQVFQVVERTYREDALRYTLDFLVPAKHLLAKVQQEACAQYSGFLFFHEGWPLCLHEQVVVQLAALPWQLLRPGDFYLQVVPSAAQAPRLALKCLAPGGGRVQEVPVPNEACAYLFTPEWLQGINKDRPTGRLSTCLLSAPSGIQRLPWAELICPRFVHKEGLMVGHQPSTLPPELPSGPPGLPSPPLPEEALGTRSPGDGHNAPVEGPEGEYVELLEVTLPVRGSPTDAEGSPGLSRVRTVPTRKGAGGKGRHRRHRAWMHQKGLGPRGQDGARPPGEGSSTGASPESPPGAEAVPEAAVLEVSEPPAEAVGEASGSCPLRPGELRGGGGGGQGAEGPPGTPRRTGKGNRRKKRAAGRGALSRGGDSAPLSPGDKEDASHQEALGNLPSPSEHKLPECHLVKEEYEGSGKPESEPKELKTAGEKEPQLSEACGPTEEGAGERELEGPGLLCMAGHTGPEGPLSDTPTPPLETVQEGKGDNIPEEALAVSVSDHPDVAWDLMASGFLILTGGVDQSGRALLTITPPCPPEEPPPSRDTLNTTLHYLHSLLRPDLQTLGLSVLLDLRQAPPLPPALIPALSQLQDSGDPPLVQRLLILIHDDLPTELCGFQGAEVLSENDLKRVAKPEELQWELGGHRDPSPSHWVEIHQEVVRLCRLCQGVLGSVRQAIEELEGAAEPEEEEAVGMPKPLQKVLADPRLTALQRDGGAILMRLRSTPSSKLEGQGPATLYQEVDEAIHQLVRLSNLHVQQQEQRQCLRRLQQVLQWLSGPGEEQLASFAMPGDTLSALQETELRFRAFSAEVQERLAQAREALALEENATSQKVLDIFEQRLEQVESGLHRALRLQRFFQQAHEWVDEGFARLAGAGPGREAVLAALALRRAPEPSAGTFQEMRALALDLGSPAALREWGRCQARCQELERRIQQHVGEEASPRGYRRRRADGASSGGAQWGPRSPSPSLSSLLLPSSPGPRPAPSHCSLAPCGEDYEEEGPELAPEAEGRPPRAVLIRGLEVTSTEVVDRTCSPREHVLLGRARGPDGPWGVGTPRMERKRSISAQQRLVSELIACEQDYVATLSEPVPPPGPELTPELRGTWAAALSARERLRSFHRTHFLRELQGCATHPLRIGACFLRHGDQFSLYAQYVKHRHKLENGLAALSPLSKGSMEAGPYLPRALQQPLEQLTRYGRLLEELLREAGPELSSECRALGAAVQLLREQEARGRDLLAVEAVRGCEIDLKEQGQLLHRDPFTVICGRKKCLRHVFLFEHLLLFSKLKGPEGGSEMFVYKQAFKTADMGLTENIGDSGLCFELWFRRRRAREAYTLQATSPEIKLKWTSSIAQLLWRQAAHNKELRVQQMVSMGIGNKPFLDIKALGERTLSALLTGRAARTRASVAVSSFEHAGPSLPGLSPGACSLPARVEEEAWDLDVKQISLAPETLDSSGDVSPGPRNSPSLQPPHPGSSTPTLASRGILGLSRQSHARALSDPTTPL

SEQ ID NO: 502 - protein, 303 aa, Homo sapiens
MADDQGCIEEQGVEDSANEDSVDAKPDRSSFVPSLFSKKKKNVTMRSIKTTRDRVPTYQYNMNFEKLGKCIIINNKNFDKVTGMGVRNGTDKDAEALFKCFRSLGFDVIVYNDCSCAKMQDLLKKASEEDHTNAACFACILLSHGEENVIYGKDGVTPIKDLTAHFRGDRCKTLLEKPKLFFIQACRGTELDDGIQADSGPINDTDANPRYKIPVEADFLFAYSTVPGYYSWRSPGRGSWFVQALCSILEEHGKDLEIMQILTRVNDRVARHFESQSDDPHFHEKKQIPCVVSMLTKELYFSQ

SEQ ID NO: 503 - protein, 751 aa, Homo sapiens
EIIVAHIEKCSMNQNGNSLKKLAPSGRISGLCFKKLNVTTPIHKIIVNRLARKVEVDSIVVPLPFSSQELSIEDSGSMYVITTPAGLIIKWSHLTGIIDIHFGFRFNLSSYTEGLCGICNEDPDDDLRMQNGTIITNMEDIGLFIESWEIEKSFEVTMRRPVRNCTEHDCSQCIDLLNRRIFIPCHDKVSPEDFCEKMWINYTYFWNYECDALSAYVALCNKFDICIQWRTPDYCSLSCPEGKEYQPCVRPCEARTCLNQWFYGHTSCLNLREDCVCKVGTILHRPHSAQCIPEKECACTDSEDQPRTAGEIWNGGIDECTLYKCLENGSIIPIEPDCDEEPTPVCEREAEVVMGIIDKWTCCSKEVCGCDTTLCETSIPTCTNSQKLIVGHSPLSCCPQYKCECDPLKCPSISTPECREDQFMIQVRQEEPCCFSPFCVCESCTKPVPLCHDGEFLTVDLNSTHFCCPQYYCVCEPNLCPMPLLNCAEDMNLVKENVSGQCCPTWHCEKDDVCVFQEVSVLNPGQSMIKYLEEDFCYAIECLEEKDNHTGFHTLNFTLVNCSKKCDVHQVYTPSPSDYGCCGTCKNVSCKFHMENGTSVVYAVGSTWHYNCTTYECVKTDEGAIILNYTMVCPPFNETECKMNEGIVKLYNEGCCKICKREERICQKVIIKSVIRKQDCMSQSPINVASCDGKCPSATIYNINIESHLRFCKCCRENGVRNLSVPLYCSGNGTEIMYTLQEPIDCTCQWN

SEQ ID NO: 504 - protein, 353 aa, Homo sapiens
MGQDQTKQQIEKGLQLYQSNQTEKALQVWTKVLEKSSDLMGRFRVLGCLVTAHSEMGRYKEMLKFAVVQIDTARELEDADFLLESYLNLARSNEKLCEFHKTISYCKTCLGLPGTRAGAQLGGQVSLSMGNAFLGLSVFQKALESFEKALRYAHNNDDAMLECRVCCSLGSFYAQVKDYEKALFFPCKAAELVNNYGKGWSLKYRAMSQYHMAVAYRLLGRLGSAMECCEESMKIALQHGDRPLQALCLLCFADIHRSRGDLELSQLKLHCLSESIYRSKGLQRELRAHVVRFHECVEETELYCGLCGESIGEKNSRLQALPCSHIFHLRCLQNNGTRSCPNCRRSSMKPGFV

SEQ ID NO: 505 - protein, 412 aa, Homo sapiens
MGQDQTKQQIEKGLQLYQSNQTEKALQVWTKVLEKSSDLMGRFRVLGCLVTAHSEMGRYKEMLKFAVVQIDTARELEDADFLLESYLNLARSNEKLCEFHKTISYCKTCLGLPGTRAGAQLGGQVSLSMGNAFLGLSVFQKALESFEKALRYAHNNDDAMLECRVCCSLGSFYAQVKDYEKALFFPCKAAELVNNYGKGWSLKYRAMSQYHMAVAYRLLGRLGSAMECCEESMKIALQHGDRPLQALCLLCFADIHRSRGDLETAFPRYDSAMSIMTEIGNRLGQVQALLGVAKCWVARKALDKALDAIERAQDLAEEVGNKLSQLKLHCLSESIYRSKGLQRELRAHVVRFHECVEETELYCGLCGESIGEKNSRLQALPCSHIFHLRCLQNNGTRSCPNCRRSSMKPGFV

SEQ ID NO: 506 - protein, 2527 aa, Homo sapiens
MASGSCQGCEEDEETLKKLIVRLNNVQEGKQIETLVQILEDLLVFTYSERASKLFQGKNIHVPLLIVLDSYMRVASVQQVGWSLLCKLIEVCPGTMQSLMGPQDVGNDWEVLGVHQLILKMLTVHNASVNLSVIGLKTLDLLLTSGKITLLILDEESDIFMLIFDAMHSFPANDEVQKLGCKALHVLFERVSEEQLTEFVENKDYMILLSALTNFKDEEEIVLHVLHCLHSLAIPCNNVEVLMSGNVRCYNIVVEAMKAFPMSERIQEVSCCLLHRLTLGNFFNILVLNEVHEFVVKAVQQYPENAALQISALSCLALLTETIFLNQDLEEKNENQENDDEGEEDKLFWLEACYKALTWHRKNKHVQEAACWALNNLLMYQNSLHEKIGDEDGHFPAHREVMLSMLMHSSSKEVFQASANALSTLLEQNVNFRKILLSKGIHLNVLELMQKHIHSPEVAESGCKMLNHLFEGSNTSLDIMAAVVPKILTVMKRHETSLPVQLEALRAILHFIVPGMPEESREDTEFHHKLNMVKKQCFKNDIHKLVLAALNRFIGNPGIQKCGLKVISSIVHFPDALEMLSLEGAMDSVLHTLQMYPDDQEIQCLGLSLIGYLITKKNVFIGTGHLLAKILVSSLYRFKDVAEIQTKGFQTILAILKLSASFSKLLVHHSFDLVIFHQMSSNIMEQKDQQFLNLCCKCFAKVAMDDYLKNVMLERACDQNNSIMVECLLLLGADANQAKEGSSLICQVCEKESSPKLVELLLNSGSREQDVRKALTISIGKGDSQIISLLLRRLALDVANNSICLGGFCIGKVEPSWLGPLFPDKTSNLRKQTNIASTLARMVIRYQMKSAVEEGTASGSDGNFSEDVLSKFDEWTFIPDSSMDSVFAQSDDLDSEGSEGSFLVKKKSNSISVGEFYRDAVLQRCSPNLQRHSNSLGPIFDHEDLLKRKRKILSSDDSLRSSKLQSHMRHSDSISSLASEREYITSLDLSANELRDIDALSQKCCISVHLEHLEKLELHQNALTSFPQQLCETLKSLTHLDLHSNKFTSFPSYLLKMSCIANLDVSRNDIGPSVVLDPTVKCPTLKQFNLSYNQLSFVPENLTDVVEKLEQLILEGNKISGICSPLRLKELKILNLSKNHISSLSENFLEACPKVESFSARMNFLAAMPFLPPSMTILKLSQNKFSCIPEAILNLPHLRSLDMSSNDIQYLPGPAHWKSLNLRELLFSHNQISILDLSEKAYLWSRVEKLHLSHNKLKEIPPEIGCLENLTSLDVSYNLELRSFPNEMGKLSKIWDLPLDELHLNFDFKHIGCKAKDIIRFLQQRLKKAVPYNRMKLMIVGNTGSGKTTLLQQLMKTKKSDLGMQSATVGIDVKDWPIQIRDKRKRDLVLNVWDFAGREEFYSTHPHFMTQRALYLAVYDLSKGQAEVDAMKPWLFNIKARASSSPVILVGTHLDVSDEKQRKACMSKITKELLNKRGFPAIRDYHFVNATEESDALAKLRKTIINESLNFKIRDQLVVGQLIPDCYVELEKIILSERKNVPIEFPVIDRKRLLQLVRENQLQLDENELPHAVHFLNESGVLLHFQDPALQLSDLYFVEPKWLCKIMAQILTVKVEGCPKHPKGIISRRDVEKFLSKKRKFPKNYMSQYFKLLEKFQIALPIGEEYLLVPSSLSDHRPVIELPHCENSEIIIRLYEMPYFPMGFWSRLINRLLEISPYMLSGRERALRPNRMYWRQGIYLNWSPEAYCLVGSEVLDNHPESFLKITVPSCRKGCILLGQVVDHIDSLMEEWFPGLLEIDICGEGETLLKKWALYSFNDGEEHQKILLDDLMKKAEEGDLLVNPDQPRLTIPISQIAPDLILADLPRNIMLNNDELEFEQAPEFLLGDGSFGSVYRAAYEGEEVAVKIFNKHTSLRLLRQELVVLCHLHHPSLISLLAAGIRPRMLVMELASKGSLDRLLQQDKASLTRTLQHRIALHVADGLRYLHSAMIIYRDLKPHNVLLFTLYPNAAIIAKIADYGIAQYCCRMGIKTSEGTPGFRAPEVARGNVIYNQQADVYSFGLLLYDILTTGGRIVEGLKFPNEFDELEIQGKLPDPVKEYGCAPWPMVEKLIKQCLKENPQERPTSAQVFDILNSAELVCLTRRILLPKNVIVECMVATHHNSRNASIWLGCGHTDRGQLSFLDLNTEGYTSEEVADSRILCLALVHLPVEKESWIVSGTQSGTLLVINTEDGKKRHTLEKMTDSVTCLYCNSFSKQSKQKNFLLVGTADGKLAIFEDKTVKLKGAAPLKILNIGNVSTPLMCLSESTNSTERNVMWGGCGTKIFSFSNDFTIQKLIETRTSQLFSYAAFSDSNIITVVVDTALYIAKQNSPVVEVWDKKTEKLCGLIDCVHFLREVMVKENKESKHKMSYSGRVKTLCLQKNTALWIGTGGGHILLLDLSTRRLIRVIYNFCNSVRVMMTAQLGSLKNVMLVLGYNRKNTEGTQKQKEIQSCLTVWDINLPHEVQNLEKHIEVRKELAEKMRRTSVE

SEQ ID NO: 507 - protein, 778 aa, Homo sapiens
MQQESERCRVRARRPDMALYVPKARRGAVLLKTGDEEESCGSPNSVVKEKQKESSLSQKEVFKDKPEARRLNINPDRKEHNCREEKKSSTKLRMDTCLQKTNRVCSKRGTTESKEVLSQGQQQGAPNAGVITNAPLQRHFKPKKVECLEVETTDVTGHERILLSQACLEISEAQVPSKPFQNVEFCDFSRHEPDGEAFEDKDLEGRIETDTKVLEILYEFPRVFSSVMKPENMIVPIKLSSDSEIVQQSMQTSDGILNPSSGGITTTSVPGSPDGVFDQTCVDFEVESVGGIANSTGFILDQKDTDSIPATMGHISLSESTNDTVSPVMIRECEKNDSTADELHVKHEPPDTAVLAHETHRDSGFKNVGDITNKACMMDTTGMSCSDHVTVDSPYVVAVRIADETSINTRSFSKFVGMSADATPLHVARSGNDTEDFSNPSACSDIYGESISSHFTESTGKLIESLSDCASSLPIKKIAGSNYNTFLDSELSMLNGTKVLSDSAVGIDLGSTGDTTEALHELRTAEEFKTEEQDDSGSIEFGVSFPDRESSSMETSIEPKATETSHTEGITAIEESWESMFNDDGDCLDPRLLQELSGNTKSRESIQEPRSDYYNHEVPDIDLSDCEFPHVIEIYDFPQEFHTEDLLRVFCSYQKKGFDIKWVDDTHALGVFSSPITARDALGIKHTMVKIRPLSQATRAAKAKARAYAEFLQPAKERPETSAALARRLVISALGVRSKQSKTEREAELKKLQEARERKRLEAKQREDIWEGRDQSTV

SEQ ID NO: 508 - protein, 499 aa, Homo sapiens
MDTSPLCFSILLVLCIFIQSSALGQSLKPEPFGRRAQAVETNKTLHEMKTRFLLFGETNQGCQIRINHPDTLQECGFNSSLPLVMIIHGWSVDGVLENWIWQMVAALKSQPAQPVNVGLVDWITLAHDHYTIAVRNTRLVGKEVAALLRWLEESVQLSRSHVHLIGYSLGAHVSGFAGSSIGGTHKIGRITGLDAAGPLFEGSAPSNRLSPDDANFVDAIHTFTREHMGLSVGIKQPIGHYDFYPNGGSFQPGCHFLELYRHIAQHGFNAITQTIKCSHERSVHLFIDSLLHAGTQSMAYPCGDMNSFSQGLCLSCKKGRCNTLGYHVRQEPRSKSKRLFLVTRAQSPFKVYHYQFKIQFINQTETPIQTTFTMSLLGTKEKMQKIPITLGKGIASNKTYSFLITLDVDIGELIMIKFKWENSAVWANVWDTVQTIIPWSTGPRHSGLVLKTIRVKAGETQQRMTFCSENTDDLLLRPTQEKIFVKCEIKSKTSKRKIR

SEQ ID NO: 509 - protein, 1061 aa, Homo sapiens
MGRHVATSCHVAWLLVLISGCWGQVNRLPFFTNHFFDTYLLISEDTPVGSSVTQLLAQDMDNDPLVFGVSGEEASRFFAVEPDTGVVWLRQPLDRETKSEFTVEFSVSDHQGVITRKVNIQVGDVNDNAPTFHNQPYSVRIPENTPVGTPIFIVNATDPDLGAGGSVLYSFQPPSQFFAIDSARGIVTVIRELDYETTQAYQLTVNATDQDKTRPLSTLANLAIIITDVQDMDPIFINLPYSTNIYEHSPPGTTVRIITAIDQDKGRPRGIGYTIVSGNTNSIFALDYISGVLTLNGLLDRENPLYSHGFILTVKGTELNDDRTPSDATVTTTFNILVIDINDNAPEFNSSEYSVAITELAQVGFALPLFIQVVDKDENLGLNSMFEVYLVGNNSHHFIISPTSVQGKADIRIRVAIPLDYETVDRYDFDLFANESVPDHVGYAKVKITLINENDNRPIFSQPLYNISLYENVTVGTSVLTVLATDNDAGTFGEVSYFFSDDPDRFSLDKDTGLIMLIARLDYELIQRFTLTIIARDGGGEETTGRVRINVLDVNDNVPTFQKDAYVGALRENEPSVTQLVRLRATDEDSPPNNQITYSIVSASAFGSYFDISLYEGYGVISVSRPLDYEQISNGLIYLTVMAMDAGNPPLNSTVPVTIEVFDENDNPPTFSKPAYFVSVVENIMAGATVLFLNATDLDRSREYGQESIIYSLEGSTQFRINARSGEITTTSLLDRETKSEYILIVRAVDGGVGHNQKTGIATVNITLLDINDNHPTWKDAPYYINLVEMTPPDSDVTTVVAVDPDLGENGTLVYSIQPPNKFYSLNSTTGKIRTTHAMLDRENPDPHEAELMRKIVVSVTDCGRPPLKATSSATVFVNLLDLNDNDPTFQNLPFVAEVLEGIPAGVSIYQVVAIDLDEGLNGLVSYRMPVGMPRMDFLINSSSGVVVTTTELDRERIAEYQLRVVASDAGTPTKSSTSTLTIHVLDVNDETPTFFPAVYNVSVSEDVPREFRVVWLNCTDNDVGLNAELSYFITGAAPASAHLCRPPGALPPPLPDGQPD

SEQ ID NO: 510 - protein, 752 aa, Homo sapiens
MGPLMVLFCLLFLYPGLADSAPSCPQNVNISGGTFTLSHGWAPGSLLTYSCPQGLYPSPASRLCKSSGQWQTPGATRSLSKAVCKPVRCPAPVSFENGIYTPRLGSYPVGGNVSFECEDGFILRGSPVRQCRPNGMWDGETAVCDNGAGHCPNPGISLGAVRTGFRFGHGDKVRYRCSSNLVLTGSSERECQGNGVWSGTEPICRQPYSYDFPEDVAPALGTSFSHMLGATNPTQKTKESLGRKIQIQRSGHLNLYLLLDCSQSVSENDFLIFKESASLMVDRIFSFEINVSVAIITFASEPKVLMSVLNDNSRDMTEVISSLENANYKDHENGTGTNTYAALNSVYLMMNNQMRLLGMETMAWQEIRHAIILLTDGKSNMGGSPKTAVDHIREILNINQKRNDYLDIYAIGVGKLDVDWRELNELGSKKDGERHAFILQDTKALHQVFEHMLDVSKLTDTICGVGNMSANASDQERTPWHVTIKPKSQETCRGALISDQWVLTAAHCFRDGNDHSLWRVNVGDPKSQWGKEFLIEKAVISPGFDVFAKKNQGILEFYGDDIALLKLAQKVKMSTHARPICLPCTMEANLALRRPQGSTCRDHENELLNKQSVPAHFVALNGSKLNINLKMGVEWTSCAEVVSQEKTMFPNLTDVREVVTDQFLCSGTQEDESPCKGESGGAVFLERRFRFFQVGLVSWGLYNPCLGSADKNSRKRAPRSKVPPPRDFHINLFRMQPWLRQHLGDVLNFLPL

SEQ ID NO: 511 - protein, 1216 aa, Homo sapiens
MARNCSECKEKRAAHILCTYCNRWLCSSCTEEHRHSPVPGGPFFPRAQKGSPGVNGGPGDFTLYCPLHTQEVLKLFCETCDMLTCHSCLVVEHKEHRCRHVEEVLQNQRMLLEGVTTQVAHKKSSLQTSAKQIEDRIFEVKHQHRKVENQIKMAKMVLMNELNKQANGLIEELEGITNERKRKLEQQLQSIMVLNRQFEHVQNFINWAVCSKTSVPFLFSKELIVFQMQRLLETSCNTDPGSPWSIRFTWEPNFWTKQLASLGCITTEGGQMSRADAPAYGGLQGSSPFYQSHQSPVAQQEALSHPSHKFQSPAVCSSSVCCSHCSPVSPSLKGQVPPPSIHPAHSFRQPPEMVPQQLGSLQCSALLPREKELACSPHPPKLLQPWLETQPPVEQESTSQRLGQQLTSQPVCIVPPQDVQQGAHAQPTLQTPSIQVQFGHHQKLKLSHFQQQPQQQLPPPPPPLPHPPPPLPPPPQQPHPPLPPSQHLASSQHESPPGPACSQNMDIMHHKFELEEMQKDLELLLQAQQPSLQLSQTKSPQHLQQTIVGQINYIVRQPAPVQSQSQEETLQATDEPPASQGSKPALPLDKNTAAALPQASGEETPLSVPPVDSTIQHSSPNVVRKHSTSLSIMGFSNTLEMELSSTRLERPLEPQIQSVSNLTAGAPQAVPSLLSAPPKMVSSLTSVQNQAMPSLTTSHLQTVPSLVHSTFQSMPNLISDSPQAMASLASDHPQAGPSLMSGHTQAVPSLATCPLQSIPPVSDMQPETGSSSSSGRTSGSLCPRDGADPSLENALCKVKLEEPINLSVKKPPLAPVVSTSTALQQYQNPKECENFEQGALELDAKENQSIRAFNSEHKIPYVRLERLKICAASSGEMPVFKLKPQKNDQDGSFLLIIECGTESSSMSIKVSQDRLSEATQAPGLEGRKVTVTSLAGQRPPEVEGTSPEEHRLIPRTPGAKKGPPAPIENEDFCAVCLNGGELLCCDRCPKVFHLSCHVPALLSFPGGEWVCTLCRSLTQPEMEYDCENACYNQPGMRASPGLSMYDQKKCEKLVLSLCCNNLSLPFHEPVSPLARHYYQIIKRPMDLSIIRRKLQKKDPAHYTTPEEVVSDVRLMFWNCAKFNYPDSEVAEAGRCLEVFFEGWLKEIYPEKRFAQPRQEDSDSEEVSSESGCSTPQGFPWPPYMQEGIQPKRRRRHMENERAKRMSFRLANSISQV

SEQ ID NO: 512 - protein, 468 aa, Homo sapiens
MAARGSGPRALRLLLLVQLVAGRCGLAGAAGGAQRGLSEPSSIAKHEDSLLKDLFQDYERWVRPVEHLNDKIKIKFGLAISQLVDVDEKNQLMTTNVWLKQEWIDVKLRWNPDDYGGIKVIRVPSDSVWTPDIVLFDNADGRFEGTSTKTVIRYNGTVTWTPPANYKSSCTIDVTFFPFDLQNCSMKFGSWTYDGSQVDIILEDQDVDKRDFFDNGEWEIVSATGSKGNRTDSCCWYPYVTYSFVIKRLPLFYTLFLIIPCIGLSFLTVLVFYLPSNEGEKICLCTSVLVSLTVFLLVIEEIIPSSSKVIPLIGEYLVFTMIFVTLSIMVTVFAINIHHRSSSTHNAMAPLVRKIFLHTLPKLLCMRSHVDRYFTQKEETESGSGPKSSRNTLEAALDSIRYITRHIMKENDVREVVEDWKFIAQVLDRMFLWTFLFVSIVGSLGLFVPVIYKWANILIPVHIGNANK

SEQ ID NO: 513 - protein, 2248 aa, Homo sapiens
MMDSENKPENDEDEKINKEAQDLTKLSSHNEDGGPVSDVIASFPENSMGKRGFSESSNSDSVVIGEDRNKHASKRRKLDEAEPLKSGKQGICRLETSESSVTEGGIALDETGKETFLSDCTVGGTCLPNALSPSCNFSTIDVVSLKTDTEKTSAQEMVSLDLERESPFPPKEISVSCTIGNVDTVLKCSICGHLFSSCSDLEKHAESHMQQPKEHTCCHCSHKAESSSALHMHIKQAHGPQKVFSCDLCGFQCSEENLLNAHYLGKTHLRRQNLAARGGFVQILTKQPFPKKSRTMATKNVHSKPRTSKSIAKNSDSKGLRNVGSTFKDFRGSISKQSGSSSELLVEMMPSRNTLSQEVEIVEEHVTSLGLAQNPENQSRKLDTLVTSEGLLEKLESTKNTLQAAHGNSVTSRPRPERNILVLGNSFRRRSSTFTLKGQAKKRFNLLGIKRGTSETQRMYMKHLRTQMKTHDAESVLKHLEACSSVQRVCVTTSETQEAEQGQGSARPPDSGLHSLTVKPASGSQTLCACTDCGQVATNRTDLEIHVKRCHAREMKFYCRTCDFSSMSRRDLDEHLHSNQHQQTASVLSCQCCSFISLDEINLRDHMKEKHNMHFLCTPCNLFFLSEKDVEEHKATEKHINSLVQPKTLQSSNSDLVLQTLPLSTLESENAKESMDDSGKASQEEPLKSRVSHGNEVRHSSKPQFQCKKCFYKTRSSTVLTRHIKLRHGQDYHFLCKACNLYSLSKEGMEKHIKRSKHLENAKKNNIGLSFEECIERVCIGANDKKEEFDVSGNGRIEGHIGVQLQEHSYLEKGMLASEELSQSGGSTKDDELASTTTPKRGRPKGNISRTCSHCGLLASSITNLTVHIRRKHSHQYSYLCKVCKYYTVTKGDMERHCATKKHKGRVEIEASGKHSSDIIVGPEGGSLEAGKKNAGSAVTMSDEHANKPAESPTSVLEKPDRGNSIEAEVENVFHSLDGEVNSHLLDKKEQISSEPEDFAQPGDVYSQRDVTGTGENKCLHCEFSAHSSASLELHVKRKHTKEFEFYCMACDYYAVTRREMTRHAATEKHKMKRQSYLNSANVEAGSADMSKNIIMPEEEHQQNSEEFQIISGQPSDTLKSRNAADCSILNENTNLDMSKVLCAADSVEVETEEESNFNEDHSFCETFQQAPVKDKVRKPEEMMSLTMSSNYGSPSRFQNENSGSSALNCETAKKNHEISNDAGELRVHCEGEGGNAGDGGGVVPHRHLCPVTLDGERSAESPVLVVTRITREQGNLESGGQNRVARGHGLEDLKGVQEDPVLGNKEILMNSQHETEFILEEDGPASDSTVESSDVYETIISIDDKGQAMYSFGRFDSSIIRIKNPEDGELIDQSEEGLIATGVRISELPLKDCAQGVKKKKSEGSSIGESTRIRCDDCGFLADGLSGLNVHIAMKHPTKEKHFHCLLCGKSFYTESNLHQHLASAGHMRNEQASVEELPEGGATFKCVKCTEPFDSEQNLFLHIKGQHEELLREVNKYIVEDTEQINREREENQGNVCKYCGKMCRSSNSMAFLAHIRTHTGSKPFKCKICHFATAQLGDARNHVKRHLGMREYKCHVCGVAFVMKKHLNTHLLGKHGVGTPKERKFTCHLCDRSFTEKWALNNHMKLHTGEKPFKCTWPTCHYSFLTASAMKDHYRTHTGEKSFLCDLCGFAGGTRHALTKHRRQHTGEKPFKCDECNFASTTQSHLTRHKRVHTGEKPYRCPWCDYRSNCAENIRKHILHTGKHEGVKMYNCPKCDYGTNVPVEFRNHLKEQHPDIENPDLAYLHAGIVSKSYECRLKGQGATFVETDSPFTAAALAEEPLVKEKPLRSSRRPAPPPEQVQQVIIFQGYDGEFALDPSVEETAAATLQTLAMAGQVARVVHITEDGQVIATSQSGAHVGSVVPGPILPEQLADGATQVVVVGGSMEGHGMDESLSPGGAVIQQVTKQEILNLSEAGVAPPEASSALDALLCAVTELGEVEGRAGLEEQGRPGAKDVLIQLPGQEVSHVAADPEAPEIQMFPQAQESPAAVEVLTQVVHPSAAMASQERAQVAFKKMVQGVLQFAVCDTAAAGQLVKDGVTQVVVSEEGAVHMVAGEGAQIIMQEAQGEHMDLVESDGEISQIIVTEELVQAMVQESSGGFSEGTTHYILTELPPGVQDEPGLYSHTVLETADSQELLQAGATLGTEAGAPSRAEQLASVVIYTQEGSSAAAAIQSQRESSELQEA

SEQ ID NO: 514 - protein, 332 aa, Homo sapiens [sequence omitted]

SEQ ID NO: 515 - protein, 967 aa, Homo sapiens
MAKGFYISKSLGILGILLGVAAVCTIIALSVVYSQEKNKNANSSPVASTTPSASATTNPASATTLDQSKAWNRYRLPNTLKPDSYRVTLRPYLTPNDRGLYVFKGSSTVRFTCKEATDVIIIHSKKLNYTLSQGHRVVLRGVGGSQPPDIDKTELVEPTEYLVVHLKGSLVKDSQYEMDSEFEGELADDLAGFYRSEYMEGNVRKVVATTQMQAADARKSFPCFDEPAMKAEFNITLIHPKDLTALSNMLPKGPSTPLPEDPNWNVTEFHTTPKMSTYLLAFIVSEFDYVEKQASNGVLIRIWARPSAIAAGHGDYALNVTGPILNFFAGHYDTPYPLPKSDQIGLPDFNAGAMENWGLVTYRENSLLFDPLSSSSSNKERVVTVIAHELAHQWFGNLVTIEWWNDLWLNEGFASYVEYLGADYAEPTWNLKDLMVLNDVYRVMAVDALASSHPLSTPASEINTPAQISELFDAISYSKGASVLRMLSSFLSEDVFKQGLASYLHTFAYQNTIYLNLWDHLQEAVNNRSIQLPTTVRDIMNRWTLQMGFPVITVDTSTGTLSQEHFLLDPDSNVTRPSEFNYVWIVPITSIRDGRQQQDYWLIDVRAQNDLFSTSGNEWVLLNLNVTGYYRVNYDEENWRKIQTQLQRDHSAIPVINRAQIINDAFNLASAHKVPVTLALNNTLFLIEERQYMPWEAALSSLSYFKLMFDRSEVYGPMKNYLKKQVTPLFIHFRNNTNNWREIPENLMDQYSEVNAISTACSNGVPECEEMVSGLFKQWMENPNNNPIHPNLRSTVYCNAIAQGGEEEWDFAWEQFRNATLVNEADKLRAALACSKELWILNRYLSYTLNPDLIRKQDATSTIISITNNVIGQGLVWDFVQSNWKKLFNDYGGGSFSFSNLIQAVTRRFSTEYELQQLEQFKKDNEETGFGSGTRALEQALEKTKANIKWVKENKEVVLQWFTENSK

SEQ ID NO: 516 - protein, 399 aa, Homo sapiens
MAEAMDLGKDPNGPTHSSTLFVRDDGSSMSFYVRPSPAKRRLSTLILHGGGTVCRVQEPGAVLLAQPGEALAEASGDFISTQYILDCVERNERLELEAYRLGPASAADTGSEAKPGALAEGAAEPEPQRHAGRIAFTDADDVAILTYVKENARSPSSVTGNALWKAMEKSSLTQHSWQSLKDRYLKHLRGQEHKYLLGDAPVSPSSQKLKRKAEEDPEAADSGEPQNKRTPDLPEEEYVKEEIQENEEAVKKMLVEATREFEEVVVDESPPDFEIHITMCDDDPPTPEEDSETQPDEEEEEEEEKVSQPEVGAAIKIIRQLMEKFNLDLSTVTQAFLKNSGELEATSAFLASGQRADGYPIWSRQDDIDLQKDDEDTREALVKKFGAQNVARRIEFRKK

SEQ ID NO: 517 - protein, 2803 aa, Homo sapiens
MDGVAEFSEYVSETVDVPSPFDLLEPPTSGGFLKLSKPCCYIFPGGRGDSALFAVNGFNILVDGGSDRKSCFWKLVRHLDRIDSVLLTHIGADNLPGINGLLQRKVAELEEEQSQGSSSYSDWVKNLISPELGVVFFNVPEKLRLPDASRKAKRSIEEACLTLQHLNRLGIQAEPLYRVVSNTIEPLTLFHKMGVGRLDMYVLNPVKDSKEMQFLMQKWAGNSKAKTGIVLPNGKEAEISVPYLTSITALVVWLPANPTEKIVRVLFPGNAPQNKILEGLEKLRHLDFLRYPVATQKDLASGAVPTNLKPSKIKQRADSKESLKATTKTAVSKLAKREEVVEEGAKEARSELAKELAKTEKKAKESSEKPPEKPAKPERVKTESSEALKAEKRKLIKDKVGKKHLKEKISKLEEKKDKEKKEIKKERKELKKDEGRKEEKKDAKKEEKRKDTKPELKKISKPDLKPFTPEVRKTLYKAKVPGRVKIDRSRAIRGEKELSSEPQTPPAQKGTVPLPTISGHRELVLSSPEDLTQDFEEMKREERALLAEQRDTGLGDKPFPLDTAEEGPPSTAIQGTPPSVPGLGQEEHVMKEKELVPEVPEEQGSKDRGLDSGAETEEEKDTWEEKKQREAERLPDRTEAREESEPEVKEDVIEKAELEEMEEVHPSDEEEEDATKAEGFYQKHMQEPLKVTPRSREAFGGRELGLQGKAPEKETSLFLSSLTTPAGATEHVSYIQDETIPGYSETEQTISDEEIHDEPEERPAPPRFHTSTYDLPGPEGAGPFEASQPADSAVPATSGKVYGTPETELTYPTNIVAAPLAEEEHVSSATSITECDKLSSFATSVAEDQSVASLTAPQTEETGKSSLLLDTVTSIPSSRTEATQGLDYVPSAGTISPTSSLEEDKGFKSPPCEDFSVTGESEKRGEIIGKGLSGERAVEEEEEETANVEMSEKLCSQYGTPVFSAPGHALHPGEPALGEAEERCLSPDDSTVKMASPPPSGPPSATHTPFHQSPVEEKSEPQDFQEADSWGDTKRTPGVGKEDAAEETVKPGPEEGTLEKEEKVPPPRSPQAQEAPVNIDEGLTGCTIQLLPAQDKAIVFEIMEAGEPTGPILGAEALPGGLRTLPQEPGKPQKDEVLRYPDRSLSPEDAESLSVLSVPSPDTANQEPTPKSPCGLTEQYLHKDRWPEVSPEDTQSLSLSEESPSKETSLDVSSKQLSPESLGTLQFGELNLGKEEMGHLMQAEDTSHHTAPMSVPEPHAATASPPTDGTTRYSAQTDITDDSLDRKSPASSFSHSTPSGNGKYLPGAITSPDEHILTPDSSFSKSPESLPGPALEDIAIKWEDKVPGLKDRTSEQKKEPEPKDEVLQQKDKTLEHKEVVEPKDTAIYQKDEALHVKNEAVKQQDKALEQKGRDLEQKDTALEQKDKALEPKDKDLEEKDKALEQKDKIPEEKDKALEQKDTALEQKDKALEPKDKDLEQKDRVLEQKEKIPEEKDKALDQKVRSVEHKAPEDTVAEMKDRDLEQTDKAPEQKHQAQEQKDKVSEKKDQALEQKYWALGQKDEALEQNIQALEENHQTQEQESLVQEDKTRKPKMLEEKSPEKVKAMEEKLEALLEKTKALGLEESLVQEGRAREQEEKYWRGQDVVQEWQETSPTREEPAGEQKELAPAWEDTSPEQDNRYWRGREDVALEQDTYWRELSCERKVWFPHELDGQGARPHYTEERESTFLDEGPDDEQEVPLREHATRSPWASDFKDFQESSPQKGLEVERWLAESPVGLPPEEEDKLTRSPFEIISPPASPPEMVGQRVPSAPGQESPIPDPKLMPHMKNEPTTPSWLADIPPWVPKDRPLPPAPLSPAPGPPTPAPESHTPAPFSWGTAEYDSVVAAVQEGAAELEGGPYSPLGKDYRKAEGEREEEGRAEAPDKSSHSSKVPEASKSHATTEPEQTEPEQREPTPYPDERSFQYADIYEQMMLTGLGPACPTREPPLGAAGDWPPCLSTKEAAAGRNTSAEKELSSPISPKSLQSDTPTFSYAALAGPTVPPRPEPGPSMEPSLTPPAVPPRAPILSKGPSPPLNGNILSCSPDRRSPSPKESGRSHWDDSTSDSELEKGAREQPEKEAQSPSPPHPIPMGSPTLWPETEAHVSPPLDSHLGPARPSLDFPASAFGFSSLQPAPPQLPSPAEPRSAPCGSLAFSGDRALALAPGPPTRTRHDEYLEVTKAPSLDSSLPQLPSPSSPGAPLLSNLPRPASPALSEGSSSEATTPVISSVAERFSPSLEAAEQESGELDPGMEPAAHSLWDLTPLSPAPPASLDLALAPAPSLPGDMGDGILPCHLECSEAATEKPSPFQVPSEDCAANGPTETSPNPPGPAPAKAENEEAAACPAWERGAWPEGAERSSRPDTLLSPEQPVCPAGGSGGPPSSASPEVEAGPQGCATEPRPHRGELSPSFLNPPLPPSIDDRDLSTEEVRLVGRGGRRRVGGPGTTGGPCPVTDETPPTSASDSGSSQSDSDVPPETEECPSITAEAALDSDEDGDFLPVDKAGGVSGTHHPRPGHDPPPLPQPDPRPSPPRPDVCMADPEGLSSESGRVERLREKEKVQGRVGRRAPGKAKPASPARRLDLRGKRSPTPGKGPADRASRAPPRPRSTTSQVTPAEEKDGHSPMSKGLVNGLKAGPMALSSKGSSGAPVYVDLAYIPNHCSGKTADLDFFRRVRASYYVVSGNDPANGEPSRAVLDALLEGKAQWGENLQVTLIPTHDTEVTREWYQQTHEQQQQLNVLVLASSSTVVMQDESFPACKIEF

SEQ ID NO: 518 - protein, 390 aa, Homo sapiens
MESETEPEPVTLLVKSPNQRHRDLELSGDRGWSVGHLKAHLSRVYPERPRPEDQRLIYSGKLLLDHQCLRDLLPKEKRHVLHLVCNVKSPSKMPEINAKVAESTEEPAGSNRGQYPEDSSSDGLRQREVLRNLSSPGWENISRPEAAQQAFQGLGPGFSGYTPYGWLQLSWFQQIYARQYYMQYLAATAASGAFVPPPSAQEIPVVSAPAPAPIHNQFPAENQPANQNAAPQVVVNPGANQNLRMNAQGGPIVEEDDEINRDWLDWTYSAATFSVFLSILYFYSSLSRFLMVMGATVVMYLHHVGWFPFRPRPVQNFPNDGPPPDVVNQDPNNNLQEGTDPETEDPNHLPPDRDVLDGEQTSPSFMSTAWLVFKTFFASLLPEGPPAIAN

SEQ ID NO: 519 - protein, 1449 aa, Homo sapiens
MEPSALRKAGSEQEEGFEGLPRRVTDLGMVSNLRRSNSSLFKSWRLQCPFGNNDKQESLSSWIPENIKKKECVYFVESSKLSDAGKVVCQCGYTHEQHLEEATKPHTFQGTQWDPKKHVQEMPTDAFGDIVFTGLSQKVKKYVRVSQDTPSSVIYHLMTQHWGLDVPNLLISVTGGAKNFNMKPRLKSIFRRGLVKVAQTTGAWIITGGSHTGVMKQVGEAVRDFSLSSSYKEGELITIGVATWGTVHRREGLIHPTGSFPAEYILDEDGQGNLTCLDSNHSHFILVDDGTHGQYGVEIPLRTRLEKFISEQTKERGGVAIKIPIVCVVLEGGPGTLHTIDNATTNGTPCVVVEGSGRVADVIAQVANLPVSDITISLIQQKLSVFFQEMFETFTESRIVEWTKKIQDIVRRRQLLTVFREGKDGQQDVDVAILQALLKASRSQDHFGHENWDHQLKLAVAWNRVDIARSEIFMDEWQWKPSDLHPTMTAALISNKPEFVKLFLENGVQLKEFVTWDTLLYLYENLDPSCLFHSKLQMHHVAQVLRELLGDFTQPLYPRPRHNDRLRLLLPVPHVKLNVQGVSLRSLYKRSSGHVTFTMDPIRDLLIWAIVQNRRELAGIIWAQSQDCIAAALACSKILKELSKEEEDTDSSEEMLALAEEYEHRAIGVFTECYRKDEERAQKLLTRVSEAWGKTTCLQLALEAKDMKFVSHGGIQAFLTKVWWGQLSVDNGLWRVTLCMLAFPLLLTGLISFREKRLQDVGTPAARARAFFTAPVVVFHLNILSYFAFLCLFAYVLMVDFQPVPSWCECAIYLWLFSLVCEEMRQLFYDPDECGLMKKAALYFSDFWNKLDVGAILLFVAGLTCRLIPATLYPGRVILSLDFILFCLRLMHIFTISKTLGPKIIIVKRMMKDVFFFLFLLAVWVVSFGVAKQAILIHNERRVDWLFRGAVYHSYLTIFGQIPGYIDGVNFNPEHCSPNGTDPYKPKCPESDATQQRPAFPEWLTVLLLCLYLLFTNILLLNLLIAMFNYTFQQVQEHTDQIWKFQRHDLIEEYHGRPAAPPPFILLSHLQLFIKRVVLKTPAKRHKQLKNKLEKNEEAALLSWEIYLKENYLQNRQFQQKQRPEQKIEDISNKVDAMVDLLDLDPLKRSGSMEQRLASLEEQVAQTAQALHWIVRTLRASGFSSEADVPTLASQKAAEEPDAEPGGRKKTEEPGDSYHVNARHLLYPNCPVTRFPVPNEKVPWETEFLIYDPPFYTAERKDAAAMDPMGENPMGRTGLRGRGSLSCFGPNHTLYPMVTRWRRNEDGAICRKSIKKMLEVLVVKLPLSEHWALPGGSREPGEMLPRKLKRILRQEHWPSFENLLKCGMEVYKGYMDDPRNTDNAWIETVAVSVHFQDQNDVELNRLNSNLHACDSGASIRWQVVDRRIPLYANHKTLLQKAAAEFGAHY

SEQ ID NO: 520 - protein, 1503 aa, Homo sapiens
MEPSALRKAGSEQEEGFEGLPRRVTDLGMVSNLRRSNSSLFKSWRLQCPFGNNDKQESLSSWIPENIKKKECVYFVESSKLSDAGKVVCQCGYTHEQHLEEATKPHTFQGTQWDPKKHVQEMPTDAFGDIVFTGLSQKVKKYVRVSQDTPSSVIYHLMTQHWGLDVPNLLISVTGGAKNFNMKPRLKSIFRRGLVKVAQTTGAWIITGGSHTGVMKQVGEAVRDFSLSSSYKEGELITIGVATWGTVHRREGLIHPTGSFPAEYILDEDGQGNLTCLDSNHSHFILVDDGTHGQYGVEIPLRTRLEKFISEQTKERGGVAIKIPIVCVVLEGGPGTLHTIDNATTNGTPCVVVEGSGRVADVIAQVANLPVSDITISLIQQKLSVFFQEMFETFTESRIVEWTKKIQDIVRRRQLLTVFREGKDGQQDVDVAILQALLKASRSQDHFGHENWDHQLKLAVAWNRVDIARSEIFMDEWQWKPSDLHPTMTAALISNKPEFVKLFLENGVQLKEFVTWDTLLYLYENLDPSCLFHSKLQKVLVEDPERPACAPAAPRLQMHHVAQVLRELLGDFTQPLYPRPRHNDRLRLLLPVPHVKLNVQGVSLRSLYKRSSGHVTFTMDPIRDLLIWAIVQNRRELAGIIWAQSQDCIAAALACSKILKELSKEEEDTDSSEEMLALAEEYEHRAIGVFTECYRKDEERAQKLLTRVSEAWGKTTCLQLALEAKDMKFVSHGGIQAFLTKVWWGQLSVDNGLWRVTLCMLAFPLLLTGLISFREKRLQDVGTPAARARAFFTAPVVVFHLNILSYFAFLCLFAYVLMVDFQPVPSWCECAIYLWLFSLVCEEMRQLFYDPDECGLMKKAALYFSDFWNKLDVGAILLFVAGLTCRLIPATLYPGRVILSLDFILFCLRLMHIFTISKTLGPKIIIVKRMMKDVFFFLFLLAVWVVSFGVAKQAILIHNERRVDWLFRGAVYHSYLTIFGQIPGYIDGVNFNPEHCSPNGTDPYKPKCPESDATQQRPAFPEWLTVLLLCLYLLFTNILLLNLLIAMFNYTFQQVQEHTDQIWKFQRHDLIEEYHGRPAAPPPFILLSHLQLFIKRVVLKTPAKRHKQLKNKLEKNEEAALLSWEIYLKENYLQNRQFQQKQRPEQKIEDISNKVDAMVDLLDLDPLKRSGSMEQRLASLEEQVAQTAQALHWIVRTLRASGFSSEADVPTLASQKAAEEPDAEPGGRKKTEEPGDSYHVNARHLLYPNCPVTRFPVPNEKVPWETEFLIYDPPFYTAERKDAAAMDPMGDTLEPLSTIQYNVVDGLRDRRSFHGPYTVQAGLPLNPMGRTGLRGRGSLSCFGPNHTLYPMVTRWRRNEDGAICRKSIKKMLEVLVVKLPLSEHWALPGGSREPGEMLPRKLKRILRQEHWPSFENLLKCGMEVYKGYMDDPRNTDNAWIETVAVSVHFQDQNDVELNRLNSNLHACDSGASIRWQVVDRRIPLYANHKTLLQKAAAEFGAHY

SEQ ID NO: 521 - protein, 336 aa, Homo sapiens
MTTLSPENSLSARQSASFILVKRKPPIDKTEWDSFFDESGHLAKSRDFICVNILERGLHPFVRTEAWKFLTGYFSWQSSQDERLTVDSMRRKNYKALCQMYEKIQPLLENLHRNFTETRNNIARDIQKIYDKDPLGNVLIDKKRLEKILLLSYVCNTQAEYQQGFHEMMMLFQLMVEHDHETFWLFQFFLQKTEHSCVINIGVAKNLDMLSTLITFLDPVFAEHLKGKGAGAVQSLFPWFCFCFQRAFKSFDDVWRLWEVLLTGKPCRNFQVLVAYSMLQMVREQVLQESMGGDDILLACNNLIDLDADELISAACVVYAELIQKDVPQTLKDFFL

SEQ ID NO: 522 - protein, 1040 aa, Homo sapiens
MGEEGGSASHDEEERASVLLGHSPGCEMCSQEAFQAQRSQLVELLVSGSLEGFESVLDWLLSWEVLSWEDYEGFHLLGQPLSHLARRLLDTVWNKGTWACQKLIAAAQEAQADSQSPKLHGCWDPHSLHPARDLQSHRPAIVRRLHSHVENMLDLAWERGFVSQYECDEIRLPIFTPSQRARRLLDLATVKANGLAAFLLQHVQELPVPLALPLEAATCKKYMAKLRTTVSAQSRFLSTYDGAETLCLEDIYTENVLEVWADVGMAGPPQKSPATLGLEELFSTPGHLNDDADTVLVVGEAGSGKSTLLQRLHLLWAAGQDFQEFLFVFPFSCRQLQCMAKPLSVRTLLFEHCCWPDVGQEDIFQLLLDHPDRVLLTFDGFDEFKFRFTDRERHCSPTDPTSVQTLLFNLLQGNLLKNARKVVTSRPAAVSAFLRKYIRTEFNLKGFSEQGIELYLRKRHHEPGVADRLIRLLQETSALHGLCHLPVFSWMVSKCHQELLLQEGGSPKTTTDMYLLILQHFLLHATPPDSASQGLGPSLLRGRLPTLLHLGRLALWGLGMCCYVFSAQQLQAAQVSPDDISLGFLVRAKGVVPGSTAPLEFLHITFQCFFAAFYLALSADVPPALLRHLFNCGRPGNSPMARLLPTMCIQASEGKDSSVAALLQKAEPHNLQITAAFLAGLLSREHWGLLAECQTSEKALLRRQACARWCLARSLRKHFHSIPPAAPGEAKSVHAMPGFIWLIRSLYEMQEERLARKAARGLNVGHLKLTFCSVGPTECAALAFVLQHLRRPVALQLDYNSVGDIGVEQLLPCLGVCKALYLRDNNISDRGICKLIECALHCEQLQKLALFNNKLTDGCAHSMAKLLACRQNFLALRLGNNYITAAGAQVLAEGLRGNTSLQFLGFWGNRVGDEGAQALAEALGDHQSLRWLSLVGNNIGSVGAQALALMLAKNVMLEELCLEENHLQDEGVCSLAEGLKKNSSLKILKLSNNCITYLGAEALLQALERNDTILEVWLRGNTFSLEEVDKLGCRDTRLLL

SEQ ID NO: 523 - protein, 129 aa, Homo sapiens
MASPEHPGSPGCMGPITQCTARTQQEAPATGPDLPHPGPDGHLDTHSGLSSNSSMTTRELQQYWQNQKCRWKHVKLLFEIASARIEERKVSKFVMGKSRPGEMTYPGSRGETGTAPEPDPRCPRQSDML

SEQ ID NO: 524 - protein, 317 aa, Homo sapiens
MSQVTNTTQEGIYFILTDIPGFEASHIWISIPVCCLYTISIMGNTTILTVIRTEPSVHQRMYLFLSMLALTDLGLTLTTLPTVMQLLWFNVRRISSEACFAQFFFLHGFSFMESSVLLAMSVDCYVAICCPLHYASILTNEVIGRTGLAIICCCVLAVLPSLFLLKRLPFCHSHLLSRSYCLHQDMIRLVCADIRLNSWYGFALALLIIIVDPLLIVISYTLILKNILGTATWAERLRALNNCLSHILAVLVLYIPMVGVSMTHRFAKHASPLVHVIMANIYLLAPPVMNPIIYSVKNKQIQWGMLNFLSLKNMHSR

SEQ ID NO: 525 - protein, 1832 aa, Homo sapiens
MEDTPPSLSCSDCQRHFPSLPELSRHRELLHPSPNQDSEEADSIPRPYRCQQCGRGYRHPGSLVNHRRTHETGLFPCTTCGKDFSNPMALKSHMRTHAPEGRRRHRPPRPKEATPHLQGETVSTDSWGQRLGSSEGWENQTKHTEETPDCESVPDPRAASGTWEDLPTRQREGLASHPGPEDGADGWGPSTNSARAPPLPIPASSLLSNLEQYLAESVVNFTGGQEPTQSPPAEEERRYKCSQCGKTYKHAGSLTNHRQSHTLGIYPCAICFKEFSNLMALKNHSRLHAQYRPYHCPHCPRVFRLPRELLEHQQSHEGERQEPRWEEKGMPTTNGHTDESSQDQLPSAQMLNGSAELSTSGELEDSGLEEYRPFRCGDCGRTYRHAGSLINHRKSHQTGVYPCSLCSKQLFNAAALKNHVRAHHRPRQGVGENGQPSVPPAPLLLAETTHKEEEDPTTTLDHRPYKCSECGRAYRHRGSLVNHRHSHRTGEYQCSLCPRKYPNLMALRNHVRVHCKAARRSADIGAEGAPSHLKVELPPDPVEAEAAPHTDQDHVCKHEEEATDITPAADKTAAHICSICGLLFEDAESLERHGLTHGAGEKENSRTETTMSPPRAFACRDCGKSYRHSGSLINHRQTHQTGDFSCGACAKHFHTMAAMKNHLRRHSRRRSRRHRKRAGGASGGREAKLLAAESWTRELEDNEGLESPQDPSGESPHGAEGNLESDGDCLQAESEGDKCGLERDETHFQGDKESGGTGEGLERKDASLLDNLDIPGEEGGGTHFCDSLTGVDEDQKPATGQPNSSSHSANAVTGWQAGAAHTCSDCGHSFPHATGLLSHRPCHPPGIYQCSLCPKEFDSLPALRSHFQNHRPGEATSAQPFLCCLCGMIFPGRAGYRLHRRQAHSSSGMTEGSEEEGEEEGVAEAAPARSPPLQLSEAELLNQLQREVEALDSAGYGHICGCCGQTYDDLGSLERHHQSQSSGTTADKAPSPLGVAGDAMEMVVDSVLEDIVNSVSGEGGDAKSQEGAGTPLGDSLCIQGGESLLEAQPRPFRCNQCGKTYRHGGSLVNHRKIHQTGDFLCPVCSRCYPNLAAYRNHLRNHPRCKGSEPQVGPIPEAAGSSELQVGPIPEGGSNKPQHMAEEGPGQAEVEKLQEELKVEPLEEVARVKEEVWEETTVKGEEIEPRLETAEKGCQTEASSERPFSCEVCGRSYKHAGSLINHRQSHQTGHFGCQACSKGFSNLMSLKNHRRIHADPRRFRCSECGKAFRLRKQLASHQRVHMERRGGGGTRKATREDRPFRCGQCGRTYRHAGSLLNHRRSHETGQYSCPTCPKTYSNRMALKDHQRLHSENRRRRAGRSRRTAVRCALCGRSFPGRGSLERHLREHEETEREPANGQGGLDGTAASEANLTGSQGLETQLGGAEPVPHLEDGVPRPGERSQSPIRAASSEAPEPLSWGAGKAGGWPVGGGLGNHSGGWVPQFLTRSEEPEDSVHRSPCHAGDCQLNGPTLSHMDSWDNRDNSSQLQPGSHSSCSQCGKTYCQSGSLLNHNTNKTDRHYCLLCSKEFLNPVATKSHSHNHIDAQTFACPDCGKAFESHQELASHLQAHARGHSQVPAQMEEARDPKAGTGEDQVVLPGQGKAQEAPSETPRGPGESVERARGGQAVTSMAAEDKERPFRCTQCGRSYRHAGSLLNHQKAHTTGLYPCSLCPKLLPNLLSLKNHSRTHTDPKRHCCSICGKAFRTAARLEGHGRVHAPREGPFTCPHCPRHFRRRISFVQHQQQHQEEWTVAGSGAPVAPVTGRGDLPLPPPPTPTTPLLDPSPQWPADLSFSL

SEQ ID NO: 526 - protein, 531 aa, Homo sapiens
MGFLHVGQDGLELPTSGDPPASASQSAGITGVSHRTQPPCFEGLTSKDLVREEKTRKRKRKAKESGMALLQGLLTFRDVAIEFSQEEWKCLDPAQRTLYRDVMLENYRNLVSLDTSSKCMMKMFSSTGQGNTEVVHTGTLQIHASHHIGDTCFQEIEKDIHDFVFQWQENETNGHEALMTKTKKLMSSTERHDQRHAGNKPIKNELGSSFHSHLPEVHIFHPEGKIGNQVEKAINDAFSVSASQRISCRPKTRISNKYRNNFLQSSLLTQKREVHTREKSFQRNESGKAFNGSSLLKKHQIIHLGDKQYKCDVCGKDFHQKRYLACHRCHTGENPYTCNECGKTFSHNSALLVHKAIHTGEKPYKCNECGKVFNQQSNLARHHRVHTGEKPYKCEECDKVFSRKSHLERHRRIHTGEKPYKCKVCDKAFRRDSHLAQHTVIHTGEKPYKCNECGKTFVQNSSLVMHKVIHTGEKRYKCNECGKVFNHKSNLACHRRLHTGEKPYKCNECGKVFNRKSNLERHHRLHTGKKS

SEQ ID NO: 527 - protein, 494 aa, Homo sapiens
MLASGMLLVALLVCLTVMVLMSVWQQRKSKGKLPPGPTPLPFIGNYLQLNTEQMYNSLMKISERYGPVFTIHLGPRRVVVLCGHDAVREALVDQAEEFSGRGEQATFDWVFKGYGVVFSNGERAKQLRRFSIATLRDFGVGKRGIEERIQEEAGFLIDALRGTGGANIDPTFFLSRTVSNVISSIVFGDRFDYKDKEFLSLLRMMLGIFQFTSTSTGQLYEMFSSVMKHLPGPQQQAFQLLQGLEDFIAKKVEHNQRTLDPNSPRDFIDSFLIRMQEEEKNPNTEFYLKNLVMTTLNLFIGGTETVSTTLRYGFLLLMKHPEVEAKVHEEIDRVIGKNRQPKFEDRAKMPYMEAVIHEIQRFGDVIPMSLARRVKKDTKFRDFFLPKGTEVYPMLGSVLRDPSFFSNPQDFNPQHFLNEKGQFKKSDAFVPFSIGKRNCFGEGLARMELFLFFTTVMQNFRLKSSQSPKDIDVSPKHVGFATIPRNYTMSFLPR

SEQ ID NO: 528 - protein, 670 aa, Homo sapiens
MAEVVAEVAEMPTQMSPGAVEMSTPMSAEMMEMSTEVTEMTPGEALASSLFFQHHQFMCSECGSLYNTLEEVLSHQEQHMLAVSEEEALTTQNVGLEPELVPGAEGPFQCGECSQLILSPGELLAHQDAHLRESANQIQYQCWDCQELFPSPELWVAHRKAQHLSATVAEPPVPPPLPPPTPLPPPSPPSEVKMEPYECPECSTLCATPEEFLEHQGTHFDSLEKEERNGLEEEEEDDEEDEEDDEEMEDEEAMAEVGDDAVGGDESTAGWAQGCGDCPQHQPSAGARRQHRRTAHSPASATHPFHCSQCQRSFSSANRLQAHGRAHVGGTHECTTCSKVFKKAASLEQHLRLHRGEARYLCVDCGRGFGTELTLVAHRRAHTANPLHRCRCGKTFSNMTKFLYHRRTHAGKSGAPPTGATAPPAPAEPTPPPPPPAPPAQLPCPQCSKSFASASRLSRHRRAVHGPPERRHRCGVCGKGFKKLIHVRNHLRTHTGERPFQCHSCGKTFASLANLSRHQLTHTGARPYQCLDCGKRFTQSSNLQQHRRLHLRPVAFARAPRLPITGLYNKSPYYCGTCGRWFRAMAGLRLHQRVHARARTLTLQPPRSPSPAPPPPPEPQQTIMCTELGETIAIIETSQPLALEDTLQLCQAALGASEAGGLLQLDTAFV

SEQ ID NO: 529 - protein, 114 aa, Homo sapiens
MAGLALQPGTALLCYSCKAQVSNEDCLQVENCTQLGEQCWTARIRAVGLLTVISKGCSLNCVDDSQDYYVGKKNITCCDTDLCNASGAHALQPAAAILALLPALGLLLWGPGQL

SEQ ID NO: 530 - protein, 406 aa, Homo sapiens
MSGAPTAGAALMLCAATAVLLSAQGGPVQSKSPRFASWDEMNVLAHGLLQLGQGLREHAERTRSQLSALERRLSACGSACQGTEGSTDLPLAPESRVDPEVLHSLQTQLKAQNSRIQQLFHKVAQQQRHLEKQHLRIQHLQSQFGLLDHKHLDHEVAKPARRKRLPEMAQPVDPAHNVSRLHRLPRDCQELFQVGERQSGLFEIQPQGSPPFLVNCKMTSDGGWTVIQRRHDGSVDFNRPWEAYKAGFGDPHGEFWLGLEKVHSITGDRNSRLAVQLRDWDGNAELLQFSVHLGGEDTAYSLQLTAPVAGQLGATTVPPSGLSVPFSTWDQDHDLRRDKNCAKSLSGGWWFGTCSHSNLNGQYFRSIPQQRQKLKKGIFWKTWRGRYYPLQATTMLIQPMAAEAAS

SEQ ID NO: 531 - protein, 244 aa, Homo sapiens
MPLLTLYLLLFWLSGYSIVTQITGPTTVNGLERGSLTVQCVYRSGWETYLKWWCRGAIWRDCKILVKTSGSEQEVKRDRVSIKDNQKNRTFTVTMEDLMKTDADTYWCGIEKTGNDLGVTVQVTIDPAPVTQEETSSSPTLTGHHLDNRSEGSQAANYRPAAHQAQAPEAQCPPAPHLHHIAAAFGGRLTLGLEDDEVPAESSRDVPRAGTAAPGGRPLLCRPDPAAGRNLPAKGYHEAFLCPG

SEQ ID NO: 532 - protein, 165 aa, Homo sapiens
MGAPTLPPAWQPFLKDHRISTFKNWPFLEGCACTPERMAEAGFIHCPTENEPDLAQCFFCFKELEGWEPDDDPIGPGTVAYACNTSTLGGRGGRITREEHKKHSSGCAFLSVKKQFEELTLGEFLKLDRERAKNKIAKETNNKKKEFEETAEKVRRAIEQLAAMD

SEQ ID NO: 533 - protein, 445 aa, Homo sapiens
MTMFENVTRALARQLNPRGDLTPLDSLIDFKRFHPFCLVLRKRKSTLFWGARYVRTDYTLLDVLEPGSSPSDPTDTGNFGFKNMLDTRVEGDVDVPKTVKVKGTAGLSQNSTLEVQTLSVAPKALETVQERKLAADHPFLKEMQDQGENLYVVMEVVETVQEVTLERAGKAEACFSLPFFAPLGLQGSINHKEAVTIPKGCVLAFRVRQLMVKGKDEWDIPHICNDNMQTFPPGEKSGEEKVILIQASDVGDVHEGFRTLKEEVQRETQQVEKLSRVGQSSLLSSLSKLLGKKKELQDLELALEGALDKGHEVTLEALPKDVLLSKEAVGAILYFVGALTELSEAQQKLLVKSMEKKILPVQLKLVESTMEQNFLLDKEGVFPLQPELLSSLGDEELTLTEALVGLSGLEVQRSGPQYMWDPDTLPRLCALYAGLSLLQQLTKAS

SEQ ID NO: 534 - protein, 2752 aa, Homo sapiens
MYNGIGLPTPRGSGTNGYVQRNLSLVRGRRGERPDYKGEEELRRLEAALVKRPNPDILDHERKRRVELRCLELEEMMEEQGYEEQQIQEKVATFRLMLLEKDVNPGGKEETPGQRPAVTETHQLAELNEKKNERLRAAFGISDSYVDGSSFDPQRRAREAKQPAPEPPKPYSLVRESSSSRSPTPKQKKKKKKKDRGRRSESSSPRRERKKSSKKKKHRSESESKKRKHRSPTPKSKRKSKDKKRKRSRSTTPAPKSRRAHRSTSADSASSSDTSRSRSRSAAAKTHTTALAGRSPSPASGRRGEGDAPFSEPGTTSTQRPSSPETATKQPSSPYEDKDKDKKEKSATRPSPSPERSSTGPEPPAPTPLLAERHGGSPQPLATTPLSQEPVNPPSEASPTRDRSPPKSPEKLPQSSSSESSPPSPQPTKVSRHASSSPESPKPAPAPGSHREISSSPTSKNRSHGRAKRDKSHSHTPSRRMGRSRSPATAKRGRSRSRTPTKRGHSRSRSPQWRRSRSAQRWGRSRSPQRRGRSRSPQRPGWSRSRNTQRRGRSRSARRGRSHSRSPATRGRSRSRTPARRGRSRSRTPARRRSRSRTPTRRRSRSRTPARRGRSRSRTPARRRSRTRSPVRRRSRSRSPARRSGRSRSRTPARRGRSRSRTPARRGRSRSRTPARRSGRSRSRTPARRGRSRSRTPRRGRSRSRSLVRRGRSHSRTPQRRGRSGSSSERKNKSRTSQRRSRSNSSPEMKKSRISSRRSRSLSSPRSKAKSRLSLRRSLSGSSPCPKQKSQTPPRRSRSGSSQPKAKSRTPPRRSRSSSSPPPKQKSKTPSRQSHSSSSPHPKVKSGTPPRQGSITSPQANEQSVTPQRRSCFESSPDPELKSRTPSRHSCSGSSPPRVKSSTPPRQSPSRSSSPQPKVKAIISPRQRSHSGSSSPSPSRVTSRTTPRRSRSVSPCSNVESRLLPRYSHSGSSSPDTKVKPETPPRQSHSGSISPYPKVKAQTPPGPSLSGSKSPCPQEKSKDSLVQSCPGSLSLCAGVKSSTPPGESYFGVSSLQLKGQSQTSPDHRSDTSSPEVRQSHSESPSLQSKSQTSPKGGRSRSSSPVTELASRSPIRQDRGEFSASPMLKSGMSPEQSRFQSDSSSYPTVDSNSLLGQSRLETAESKEKMALPPQEDATASPPRQKDKFSPFPVQDRPESSLVFKDTLRTPPRERSGAGSSPETKEQNSALPTSSQDEELMEVVEKSEEPAGQILSHLSSELKEMSTSNFESSPEVEERPAVSLTLDQSQSQASLEAVEVPSMASSWGGPHFSPEHKELSNSPLRENSFGSPLEFRNSGPLGTEMNTGFSSEVKEDLNGPFLNQLETDPSLDMKEQSTRSSGHSSSELSPDAVEKAGMSSNQSISSPVLDAVPRTPSRERSSSASSPEMKDGLPRTPSRRSRSGSSPGLRDGSGTPSRHSLSGSSPGMKDIPRTPSRGRSECDSSPEPKALPQTPRPRSRSPSSPELNNKCLTPQRERSGSESSVDQKTVARTPLGQRSRSGSSQELDVKPSASPQERSESDSSPDSKAKTRTPLRQRSRSGSSPEVDSKSRLSPRRSRSGSSPEVKDKPRAAPRAQSGSDSSPEPKAPAPRALPRRSRSGSSSKGRGPSPEGSSSTESSPEHPPKSRTARRGSRSSPEPKTKSRTPPRRRSSRSSPELTRKARLSRRSRSASSSPETRSRTPPRHRRSPSVSSPEPAEKSRSSRRRRSASSPRTKTTSRRGRSPSPKPRGLQRSRSRSRREKTRTTRRRDRSGSSQSTSRRRQRSRSRSRVTRRRRGGSGYHSRSPARQESSRTSSRRRRGRSRTPPTSRKRSRSRTSPAPWKRSRSRASPATHRRSRSRTPLISRRRSRSRTSPVSRRRSRSRTSVTRRRSRSRASPVSRRRSRSRTPPVTRRRSRSRTPTTRRRSRSRTPPVTRRRSRSRTPPVTRRRSRSRTSPITRRRSRSRTSPVTRRRSRSRTSPVTRRRSRSRTSPVTRRRSRSRTPPAIRRRSRSRTPLLPRKRSRSRSPLAIRRRSRSRTPRTARGKRSLTRSPPAIRRRSASGSSSDRSRSATPPATRNHSGSRTPPVALNSSRMSCFSRPSMSPTPLDRCRSPGMLEPLGSSRTPMSVLQQAGGSMMDGPGPRIPDHQRTSVPENHAQSRIALALTAISLGTARPPPSMSAAGLAARMSQVPAPVPLMSLRTAPAANLASRIPAASAAAMNLASARTPAIPTAVNLADSRTPAAAAAMNLASPRTAVAPSAVNLADPRTPTAPAVNLAGARTPAALAALSLTGSGTPPTAANYPSSSRTPQAPASANLVGPRSAHATAPVNIAGSRTAAALAPASLTSARMAPALSGANLTSPRVPLSAYERVSGRTSPPLLDRARSRTPPSAPSQSRMTSERAPSPSSRMGQAPSQSLLPPAQDQPRSPVPSAFSDQSRCLIAQTTPVAGSQSLSSGAVATTTSSAGDHNGMLSVPAPGVPHSDVGEPPASTGAQQPSALAALQPAKERRSSSSSSSSSSSSSSSSSSSSSSSSSGSSSSDSEGSSLPVQPEVALKRVPSPTPAPKEAVREGRPPEPTPAKRKRRSSSSSSSSSSSSSSSSSSSSSSSSSSSSSSSSSSSSSSSSSSPSPAKPGPQALPKPASPKKPPPGERRSRSPRKPIDSLRDSRSLSYSPVERRRPSPQPSPRDQQSSSSERGSRRGQRGDSRSPSHKRRRETPSPRPMRHRSSRSP

SEQ ID NO: 535 - protein, 1275 aa, Homo sapiens
MENFILYEEIGRGSKTVVYKGRRKGTINFVAILCTDKCKRPEITNWVRLTREIKHKNIVTFHEWYETSNHLWLVVELCTGGSLKTVIAQDENLPEDVVREFGIDLISGLHHLHKLGILFCDISPRKILLEGPGTLKFSNFCLAKVEGENLEEFFALVAAEEGGGDNGENVLKKSMKSRVKGSPVYTAPEVVRGADFSISSDLWSLGCLLYEMFSGKPPFFSESISELTEKILCEDPLPPIPKDSSRPKASSDFINLLDGLLQRDPQKRLTWTRLLQHSFWKKAFAGADQESSVEDLSLSRNTMECSGPQDSKELLQNSQSRQAKGHKSGQPLGHSFRLENPTEFRPKSTLEGQLNESMFLLSSRPTPRTSTAVEVSPGEDMTHCSPQKTSPLTKITSGHLSQQDLESQMRELIYTDSDLVVTPIIDNPKIMKQPPVKFDAKILHLPTYSVDKLLFLKDQDWNDFLQQVCSQIDSTEKSMGASRAKLNLLCYLCVVAGHQEVATRLLHSPLFQLLIQHLRIAPNWDIRAKVAHVIGLLASHTAELQENTPVVEAIVLLTELIRENFRNSKLKQCLLPTLGELIYLVATQEEKKKNPRECWAVPLAAYTVLMRCLREGEERVVNHMAAKIIENVCTTFSAQSQGFITGEIGPILWYLFRHSTADSLRITAVSALCRITRHSPTAFQNVIEKVGLNSVINSLASAICKVQQYMLTLFAAMLSCGIHLQRLIQEKGFVSTIIRLLDSPSTCIRAKAFLVLLYILIYNREMLLLSCQARLVMYIERDSRKTTPGKEQQSGNEYLSKCLDLLICHIVQELPRILGDILNSLANVSGRKHPSTVQVKQLKLCLPLMPVVLHLVTSQVFRPQVVTEEFLFSYGTILSHIKSVDSGETNIDGAIGLTASEEFIKITLSAFEAIIQYPILLKDYRSTVVDYILPPLVSLVQSQNVEWRLFSLRLLSETTSLLVNQEFGDGKEKASVDSDSNLLALIRDVLLPQYEHILLEPDPVPAYALKLLVAMTEHNPTFTRLVEESKLIPLIFEVTLEHQESILGNTMQSVIALLSNLVACKDSNMELLYEQGLVSHICNLLTETATLCLDVDNKNNNEMAAPLLFSLLDILHSMLTYTSGIVRLALQAQKSGSGEDPQAAEDLLLLNRPLTDLISLLIPLLPNEDPEIFDVSSKCLSILVQLYGGENPDSLSPENVEIFAHLLTSKEDPKEQKLLLRILRRMITSNEKHLESLKNAGSLLRALERLAPGSGSFADSAVAPLALEILQAVGH

SEQ ID NO: 536 - protein, 553 aa, Homo sapiens
MAAPAGGGGSAVSVLAPNGRRHTVKVTPSTVLLQVLEDTCRRQDFNPCEYDLKFQRSVLDLSLQWRFANLPNNAKLEMVPASRSREGPENMVRIALQLDDGSRLQDSFCSGQTLWELLSHFPQIRECLQHPGGATPVCVYTRDEVTGEAALRGTTLQSLGLTGGSATIRFVMKCYDPVGKTPGSLGSSASAGQAAASAPLPLESGELSRGDLSRPEDADTSGPCCEHTQEKQSTRAPAAAPFVPFSGGGQRLGGPPGPTRPLTSSSAKLPKSLSSPGGPSKPKKSKSGQDPQQEQEQERERDPQQEQERERPVDREPVDREPVVCHPDLEERLQAWPAELPDEFFELTVDDVRRRLAQLKSERKRLEEAPLVTKAFREAQIKEKLERYPKVALRVLFPDRYVLQGFFRPSETVGDLRDFVRSHLGNPELSFYLFITPPKTVLDDHTQTLFQANLFPAALVHLGAEEPAGVYLEPGLLEHAISPSAADVLVARYMSRAAGSPSPLPAPDPAPKSEPAAEEGALVPPEPIPGTAQPVKRSLGKVPKWLKLPASKR

SEQ ID NO: 537 - protein, 1118 aa, Homo sapiens
MPAVASVPKELYLSSSLKDLNKKTEVKPEKISTKSYVHSALKIFKTAEECRLDRDEERAYVLYMKYVTVYNLIKKRPDFKQQQDYFHSILGPGNIKKAVEEAERLSESLKLRYEEAEVRKKLEEKDRQEEAQRLQQKRQETGREDGGTLAKGSLENVLDSKDKTQKSNGEKNEKCETKEKGAITAKELYTMMTDKNISLIIMDARRMQDYQDSCILHSLSVPEEAISPGVTASWIEAHLPDDSKDTWKKRGNVEYVVLLDWFSSAKDLQIGTTLRSLKDALFKWESKTVLRNEPLVLEGGYENWLLCYPQYTTNAKVTPPPRRQNEEVSISLDFTYPSLEESIPSKPAAQTPPASIEVDENIELISGQNERMGPLNISTPVEPVAASKSDVSPIIQPVPSIKNVPQIDRTKKPAVKLPEEHRIKSESTNHEQQSPQSGKVIPDRSTKPVVFSPTLMLTDEEKARIHAETALLMEKNKQEKELRERQQEEQKEKLRKEEQEQKAKKKQEAEENEITEKQQKAKEEMEKKESEQAKKEDKETSAKRGKEITGVKRQSKSEHETSDAKKSVEDRGKRCPTPEIQKKSTGDVPHTSVTGDSGSGKPFKIKGQPESGILRTGTFREDTDDTERNKAQREPLTRARSEEMGRIVPGLPSGWAKFLDPITGTFRYYHSPTNTVHMYPPEMAPSSAPPSTPPTHKAKPQIPAERDREPSKLKRSYSSPDITQAIQEEEKRKPTVTPTVNRENKPTCYPKAEISRLSASQIRNLNPVFGGSGPALTGLRNLGNTCYMNSILQCLCNAPHLADYFNRNCYQDDINRSNLLGHKGEVAEEFGIIMKALWTGQYRYISPKDFKITIGKINDQFAGYSQQDSQELLLFLMDGLHEDLNKADNRKRYKEENNDHLDDFKAAEHAWQKHKQLNESIIVALFQGQFKSTVQCLTCHKKSRTFEAFMYLSLPLASTSKCTLQDCLRLFSKEEKLTDNNRFYCSHCRARRDSLKKIEIWKLPPVLLVHLKRFSYDGRWKQKLQTSVDFPLENLDLSQYVIGPKNNLKKYNLFSVSNHYGGLDGGHYTAYCKNAARQRWFKFDDHEVSDISVSSVKSSAAYILFYTSLGPRVTDVAT

SEQ ID NO: 538 - protein, 419 aa, Homo sapiens
MPAENSPAPAYKVSSHGGDSGLDGLGGPGVQLGSPDKKKRKANTQGPSFPPLSEYAPPPNPNSDHLVAANPFDDNYNTISYKPLPSSNPYLGPGYPGFGGYSTFRMPPHVPPRMSSPYCGPYSLRNQPHPFPQNPLGMGFNRPHAFNFGPHDNSSFGNPSYNNALSQNVNMPNQHFRQNPAENFSQIPPQNASQVSNPDLASNFVPGNNSNFTSPLESNHSFIPPPNTFGQAKAPPPKQDFTQGATKNTNQNSSAHPPHLNMDDTVNQSNIELKNVNRNNAVNQENSRSSSTEATNNNPANGTQNKPRQPRGAADACTTEKSNKSSLHPNRHGHSSSDPVYPCGICTNEVNDDQDAILCEASCQKWFHRICTGMTETAYGLLTAEASAVWGCDTCMADKDVQLMRTRETFGPSAVGSDA

SEQ ID NO: 539 - protein, 1767 aa, Homo sapiens
MEPWSSRWKTKRWLWDFTVTTLALTFLFQAREVRGAAPVDVLKALDFHNSPEGISKTTGFCTNRKNSKGSDTAYRVSKQAQLSAPTKQLFPGGTFPEDFSILFTVKPKKGIQSFLLSIYNEHGIQQIGVEVGRSPVFLFEDHTGKPAPEDYPLFRTVNIADGKWHRVAISVEKKTVTMIVDCKKKTTKPLDRSERAIVDTNGITVFGTRILDEEVFEGDIQQFLITGDPKAAYDYCEHYSPDCDSSAPKAAQAQEPQIDEANIVDDFQEYNYGTMESYQTEAPRHVSGTNEPNPVEEIFTEEYLTGEDYDSQRKNSEDTLYENKEIDGRDSDLLVDGDLGEYDFYEYKEYEDKPTSPPNEEFGPGVPAETDITETSINGHGAYGEKGQKGEPAVVEPGMLVEGPPGPAGPAGIMGPPGLQGPTGPPGDPGDRGPPGRPGLPGADGLPGPPGTMLMLPFRYGGDGSKGPTISAQEAQAQAILQQARIALRGPPGPMGLTGRPGPVGGPGSSGAKGESGDPGPQGPRGVQGPPGPTGKPGKRGRPGADGGRGMPGEPGAKGDRGFDGLPGLPGDKGHRGERGPQGPPGPPGDDGMRGEDGEIGPRGLPGEAGPRGLLGPRGTPGAPGQPGMAGVDGPPGPKGNMGPQGEPGPPGQQGNPGPQGLPGPQGPIGPPGEKGPQGKPGLAGLPGADGPPGHPGKEGQSGEKGALGPPGPQGPIGYPGPRGVKGADGVRGLKGSKGEKGEDGFPGFKGDMGLKGDRGEVGQIGPRGEDGPEGPKGRAGPTGDPGPSGQAGEKGKLGVPGLPGYPGRQGPKGSTGFPGFPGANGEKGARGVAGKPGPRGQRGPTGPRGSRGARGPTGKPGPKGTSGGDGPPGPPGERGPQGPQGPVGFPGPKGPPGPPGKDGLPGHPGQRGETGFQGKTGPPGPGGVVGPQGPTGETGPIGERGHPGPPGPPGEQGLPGAAGKEGAKGDPGPQGISGKDGPAGLRGFPGERGLPGAQGAPGLKGGEGPQGPPGPVGSPGERGSAGTAGPIGLPGRPGPQGPPGPAGEKGAPGEKGPQGPAGRDGVQGPVGLPGPAGPAGSPGEDGDKGEIGEPGQKGSKGDKGENGPPGPPGLQGPVGAPGIAGGDGEPGPRGQQGMFGQKGDEGARGFPGPPGPIGLQGLPGPPGEKGENGDVGPMGPPGPPGPRGPQGPNGADGPQGPPGSVGSVGGVGEKGEPGEAGNPGPPGEAGVGGPKGERGEKGEAGPPGAAGPPGAKGPPGDDGPKGNPGPVGFPGDPGPPGEPGPAGQDGVGGDKGEDGDPGQPGPPGPSGEAGPPGPPGKRGPPGAAGAEGRQGEKGAKGEAGAEGPPGKTGPVGPQGPAGKPGPEGLRGIPGPVGEQGLPGAAGQDGPPGPMGPPGLPGLKGDPGSKGEKGHPGLIGLIGPPGEQGEKGDRGLPGTQGSPGAKGDGGIPGPAGPLGPPGPPGLPGPQGPKGNKGSTGPAGQKGDSGLPGPPGSPGPPGEVIQPLPILSSKKTRRHTEGMQADADDNILDYSDGMEEIFGSLNSLKQDIEHMKFPMGTQTNPARTCKDLQLSHPDFPDGEYWIDPNQGCSGDSFKVYCNFTSGGETCIYPDKKSEGVRISSWPKEKPGSWFSEFKRGKLLSYLDVEGNSINMVQMTFLKLLTASARQNFTYHCHQSAAWYDVSSGSYDKALRFLGSNDEEMSYDNNPFIKTLYDGCASRKGYEKTVIEINTPKIDQVPIVDVMINDFGDQNQKFGFEVGPVCFLG

SEQ ID NO: 540 - protein, 4493 aa, Homo sapiens
MPRPGTMALCLLTLVLSLLPPQAAAEQDLSVNRAVWDGGGCISQGDVLNRQCQQLSQHVRTGSAANTATGTTSTNVVEPRMYLSCSTNPEMTSIESSVTSDTPGVSSTRMTPTESRTTSESTSDSTTLFPSSTEDTSSPTTPEGTDVPMSTPSEESISSTMAFVSTAPLPSFEAYTSLTYKVDMSTPLTTSTQASSSPTTPESTTIPKSTNSEGSTPLTSMPASTMKVASSEAITLLTTPVEISTPVTISAQASSSPTTAEGPSLSNSAPSGGSTPLTRMPLSVMLVVSSEASTLSTTPAATNIPVITSTEASSSPTTAEGTSIPTSTYTEGSTPLTSTPASTMPVATSEMSTLSITPVDTSTLVTTSTEPSSLPTTAEATSMLTSTLSEGSTPLTNMPVSTILVASSEASTTSTIPVDSKTFVTTASEASSSPTTAEDTSIATSTPSEGSTPLTSMPVSTTPVASSEASNLSTTPVDSKTQVTTSTEASSSPPTAEVNSMPTSTPSEGSTPLTSMSVSTMPVASSEASTLSTTPVDTSTPVTTSSEASSSSTTPEGTSIPTSTPSEGSTPLTNMPVSTRLVVSSEASTTSTTPADSNTFVTTSSEASSSSTTAEGTSMPTSTYSERGTTITSMSVSTTLVASSEASTLSTTPVDSNTPVTTSTEATSSSTTAEGTSMPTSTYTEGSTPLTSMPVNTTLVASSEASTLSTTPVDTSTPVTTSTEASSSPTTADGASMPTSTPSEGSTPLTSMPVSKTLLTSSEASTLSTTPLDTSTHITTSTEASCSPTTTEGTSMPISTPSEGSPLLTSIPVSITPVTSPEASTLSTTPVDSNSPVTTSTEVSSSPTPAEGTSMPTSTYSEGRTPLTSMPVSTTLVATSAISTLSTTPVDTSTPVTNSTEARSSPTTSEGTSMPTSTPGEGSTPLTSMPDSTTPVVSSEARTLSATPVDTSTPVTTSTEATSSPTTAEGTSIPTSTPSEGTTPLTSTPVSHTLVANSEASTLSTTPVDSNTPLTTSTEASSPPPTAEGTSMPTSTPSEGSTPLTRMPVSTTMVASSETSTLSTTPADTSTPVTTYSQASSSSTTADGTSMPTSTYSEGSTPLTSVPVSTRLVVSSEASTLSTTPVDTSIPVTTSTEASSSPTTAEGTSIPTSPPSEGTTPLASMPVSTTLVVSSEANTLSTTPVDSKTQVATSTEASSPPPTAEVTSMPTSTPGERSTPLTSMPVRHTPVASSEASTLSTSPVDTSTPVTTSAETSSSPTTAEGTSLPTSTTSEGSTLLTSIPVSTTLVTSPEASTLLTTPVDTKGPVVTSNEVSSSPTPAEGTSMPTSTYSEGRTPLTSIPVNTTLVASSAISILSTTPVDNSTPVTTSTEACSSPTTSEGTSMPNSNPSEGTTPLTSIPVSTTPVVSSEASTLSATPVDTSTPGTTSAEATSSPTTAEGISIPTSTPSEGKTPLKSIPVSNTPVANSEASTLSTTPVDSNSPVVTSTAVSSSPTPAEGTSIAISTPSEGSTALTSIPVSTTTVASSEINSLSTTPAVTSTPVTTYSQASSSPTTADGTSMQTSTYSEGSTPLTSLPVSTMLVVSSEANTLSTTPIDSKTQVTASTEASSSTTAEGSSMTISTPSEGSPLLTSIPVSTTPVASPEASTLSTTPVDSNSPVITSTEVSSSPTPAEGTSMPTSTYTEGRTPLTSITVRTTPVASSAISTLSTTPVDNSTPVTTSTEARSSPTTSEGTSMPNSTPSEGTTPLTSIPVSTTPVLSSEASTLSATPIDTSTPVTTSTEATSSPTTAEGTSIPTSTLSEGMTPLTSTPVSHTLVANSEASTLSTTPVDSNSPVVTSTAVSSSPTPAEGTSIATSTPSEGSTALTSIPVSTTTVASSETNTLSTTPAVTSTPVTTYAQVSSSPTTADGSSMPTSTPREGRPPLTSIPVSTTTVASSEINTLSTTLADTRTPVTTYSQASSSPTTADGTSMPTPAYSEGSTPLTSMPLSTTLVVSSEASTLSTTPVDTSTPATTSTEGSSSPTTAGGTSIQTSTPSERTTPLAGMPVSTTLVVSSEGNTLSTTPVDSKTQVTNSTEASSSATAEGSSMTISAPSEGSPLLTSIPLSTTPVASPEASTLSTTPVDSNSPVITSTEVSSSPIPTEGTSMQTSTYSDRRTPLTSMPVSTTVVASSAISTLSTTPVDTSTPVTNSTEARSSPTTSEGTSMPTSTPSEGSTPFTSMPVSTMPVVTSEASTLSATPVDTSTPVTTSTEATSSPTTAEGTSIPTSTLSEGTTPLTSIPVSHTLVANSEVSTLSTTPVDSNTPFTTSTEASSPPPTAEGTSMPTSTSSEGNTPLTRMPVSTTMVASFETSTLSTTPADTSTPVTTYSQAGSSPTTADDTSMPTSTYSEGSTPLTSVPVSTMPVVSSEASTHSTTPVDTSTPVTTSTEASSSPTTAEGTSIPTSPPSEGTTPLASMPVSTTPVVSSEAGTLSTTPVDTSTPMTTSTEASSSPTTAEDIVVPISTASEGSTLLTSIPVSTTPVASPEASTLSTTPVDSNSPVVTSTEISSSATSAEGTSMPTSTYSEGSTPLRSMPVSTKPLASSEASTLSTTPVDTSIPVTTSTETSSSPTTAKDTSMPISTPSEVSTSLTSILVSTMPVASSEASTLSTTPVDTRTLVTTSTGTSSSPTTAEGSSMPTSTPGERSTPLTNILVSTTLLANSEASTLSTTPVDTSTPVTTSAEASSSPTTAEGTSMRISTPSDGSTPLTSILVSTLPVASSEASTVSTTAVDTSIPVTTSTEASSSPTTAEVTSMPTSTPSETSTPLTSMPVNHTPVASSEAGTLSTTPVDTSTPVTTSTKASSSPTTAEGIVVPISTASEGSTLLTSIPVSTTPVASSEASTLSTTPVDTSIPVTTSTEGSSSPTTAEGTSMPISTPSEVSTPLTSILVSTVPVAGSEASTLSTTPVDTRTPVTTSAEASSSPTTAEGTSMPISTPGERRTPLTSMSVSTMPVASSEASTLSRTPADTSTPVTTSTEASSSPTTAEGTGIPISTPSEGSTPLTSIPVSTTPVAIPEASTLSTTPVDSNSPVVTSTEVSSSPTPAEGTSMPISTYSEGSTPLTGVPVSTTPVTSSAISTLSTTPVDTSTPVTTSTEAHSSPTTSEGTSMPTSTPSEGSTPLTYMPVSTMLVVSSEDSTLSATPVDTSTPVTTSTEATSSTTAEGTSIPTSTPSEGMTPLTSVPVSNTPVASSEASILSTTPVDSNTPLTTSTEASSSPPTAEGTSMPTSTPSEGSTPLTSMPVSTTTVASSETSTLSTTPADTSTPVTTYSQASSSPPIADGTSMPTSTYSEGSTPLTNMSFSTTPVVSSEASTLSTTPVDTSTPVTTSTEASLSPTTAEGTSIPTSSPSEGTTPLASMPVSTTPVVSSEVNTLSTTPVDSNTLVTTSTEASSSPTIAEGTSLPTSTTSEGSTPLSIMPLSTTPVASSEASTLSTTPVDTSTPVTTSSPTNSSPTTAEVTSMPTSTAGEGSTPLTNMPVSTTPVASSEASTLSTTPVDSNTFVTSSSQASSSPATLQVTTMRMSTPSEGSSSLTTMLLSSTYVTSSEASTPSTPSVDRSTPVTTSTQSNSTPTPPEVITLPMSTPSEVSTPLTIMPVSTTSVTISEAGTASTLPVDTSTPVITSTQVSSSPVTPEGTTMPIWTPSEGSTPLTTMPVSTTRVTSSEGSTLSTPSVVTSTPVTTSTEAISSSATLDSTTMSVSMPMEISTLGTTILVSTTPVTRFPESSTPSIPSVYTSMSMTTASEGSSSPTTLEGTTTMPMSTTSERSTLLTTVLISPISVMSPSEASTLSTPPGDTSTPLLTSTKAGSFSIPAEVTTIRISITSERSTPLTTLLVSTTLPTSFPGASIASTPPLDTSTTFTPSTDTASTPTIPVATTISVSVITEGSTPGTTIFIPSTPVTSSTADVFPATTGAVSTPVITSTELNTPSTSSSSTTTSFSTTKEFTTPAMTTAAPLTYVTMSTAPSTPRTTSRGCTTSASTLSATSTPHTSTSVTTRPVTPSSESSRPSTITSHTIPPTFPPAHSSTPPTTSASSTTVNPEAVTTMTTRTKPSTRTTSFPTVTTTAVPTNTTIKSNPTSTPTVPRTTTCFGDGCQNTASRCKNGGTWDGLKCQCPNLYYGELCEEVVSSIDIGPPETISAQMELTVTVTSVKFTEELKNHSSQEFQEFKQTFTEQMNIVYSGIPEYVGVNITKLRLGSVVVEHDVLLRTKYTPEYKTVLDNATEVVKEKITKVTTQQIMINDICSDMMCFNTTGTQVQNITVTQYDPEEDCRKMAKEYGDYFVVEYRDQKPYCISPCEPGFSVSKNCNLGKCQMSLSGPQCLCVTTETHWYSGETCNQGTQKSLVYGLVGAGVVLMLIILVALLMLVFRSKREVKRQKYRLSQLYKWQEEDSGPAPGTFQNIGFDICQDDDSIHLESIYSNFQPSLRHIDPETKIRIQRPQVMTTSF

SEQ ID NO: 541 - protein, 298 aa, Homo sapiens
MDTGVWGWGAAACRWGPAERAAGSLNAASLREEQLHLSLLVSSGWRTISFHVVPVVRRKLGAPALEGVQQMPGFPEGSLRRILSQGVDLVPASAQLWRTSTDYLLTRLLGELGSLQGHRLDSLSILDRVNHESWRDSGQTDGLTFGHLKMVLLWASVLFLAPEDWAELQGAVYRLLVVLLCCLATRKLPHFLHPQRNLLQGSGLDLGAIYQRVEGFASQPEAALRIHATHLGRSPPPRIGSGLKALLQLPASDPTYWATAYFDVLLDKFQVFNIQDKDRISAMQSIFQKTRTLGGEES

SEQ ID NO: 542 - protein, 1332 aa, Homo sapiens
MESHSRAGKSRKSAKFRSISRSLMLCNAKTSDDGSSPDEKYPDPFEISLAQGKEGIFHSSVQLADTSEAGPSSVPDLALASEAAQLQAAGNDRGKTCRRIFFMKESSTASSREKPGKLEAQSSNFLFPKACHQRARSNSTSVNPYCTREIDFPMTKKSAAPTDRQPYSLCSNRKSLSQQLDCPAGKAAGTSRPTRSLSTAQLVQPSGGLQASVISNIVLMKGQAKGLGFSIVGGKDSIYGPIGIYVKTIFAGGAAAADGRLQEGDEILELNGESMAGLTHQDALQKFKQAKKGLLTLTVRTRLTAPPSLCSHLSPPLCRSLSSSTCITKDSSSFALESPSAPISTAKPNYRIMVEVSLQKEAGVGLGIGLCSVPYFQCISGIFVHTLSPGSVAHLDGRLRCGDEIVEISDSPVHCLTLNEVYTILSHCDPGPVPIIVSRHPDPQVSEQQLKEAVAQAVENTKFGKERHQWSLEGVKRLESSWHGRPTLEKEREKNSAPPHRRAQKVMIRSSSDSSYMSGSPGGSPGSGSAEKPSSDVDISTHSPSLPLAREPVVLSIASSRLPQESPPLPESRDSHPPLRLKKSFEILVRKPMSSKPKPPPRKYFKSDSDPQKSLEERENSSCSSGHTPPTCGQEARELLPLLLPQEDTAGRSPSASAGCPGPGIGPQTKSSTEGEPGWRRASPVTQTSPIKHPLLKRQARMDYSFDTTAEDPWVRISDCIKNLFSPIMSENHGHMPLQPNASLNEEEGTQGHPDGTPPKLDTANGTPKVYKSADSSTVKKGPPVAPKPAWFRQSLKGLRNRASDPRGLPDPALSTQPAPASREHLGSHIRASSSSSSIRQRISSFETFGSSQLPDKGAQRLSLQPSSGEAAKPLGKHEEGRFSGLLGRGAAPTLVPQQPEQVLSSGSPAASEARDPGVSESPPPGRQPNQKTLPPGPDPLLRLLSTQAEESQGPVLKMPSQRARSFPLTRSQSCETKLLDEKTSKLYSISSQVSSAVMKSLLCLPSSISCAQTPCIPKEGASPTSSSNEDSAANGSAETSALDTGFSLNLSELREYTEGLTEAKEDDDGDHSSLQSGQSVISLLSSEELKKLIEEVKVLDEATLKQLDGIHVTILHKEEGAGLGFSLAGGADLENKVITVHRVFPNGLASQEGTIQKGNEVLSINGKSLKGTTHHDALAILRQAREPRQAVIVTRKLTPEAMPDLNSSTDSAASASAASDVSVESTAEATVCTVTLEKMSAGLGFSLEGGKGSLHGDKPLTINRIFKGAASEQSETVQPGDEILQLGGTAMQGLTRFEAWNIIKALPDGPVTIVIRRKSLQSKETTAAGDS

SEQ ID NO: 543 - protein, 986 aa, Homo sapiens
MVSKSDQLLIVVSILEGRHFPKRPKHMLVVEAKFDGEQLATDPVDHTDQPEFATELAWEIDRKALHQHRLQRTPIKLQCFALDPVTSAKETIGYIVLDLRTAQETKQAPKWYQLLSNKYTKFKSEIQISIALETDTKPPVDSFKAKGAPPRDGKVPAILAGLDPRDIVAVLNEEGGYHQIGPAEYCTDSFIMSVTIAFATQLEQLIPCTMKLPERQPEFFFYYSLLGNDVTNEPFNDLINPNFEPERASVRIRSSVEILRVYLALQSKLQIHLCCGDQSLGSTEIPLTGLLKKGSTEINQHPVTVEGAFTLDPPNRAKQKLAPIPVELAPTVGVSVALQREGIDSQSLIELKTQNEHEPEHSKKKVLTPIKEKTLTGPKSPTVSPVPSHNQSPPTKDDATESEVESLQYDKDTKPNPKASSSVPASLAQLVTTSNASEVASGQKIAVPATSHHFCFSIDLRSIHALEIGFPINCILRYSYPFFGSAAPIMTNPPVEVRKNMEVFLPQSYCAFDFATMPHQLQDTFLRIPLLVELWHKDKMSKDLLLGIARIQLSNILSSEKTRFLGSNGEQCWRQTYSESVPVIAAQGSNNRIADLSYTVTLEDYGLVKMREIFISDSSQGVSAVQQKPSSLPPAPCPSEIQTEPRETLEYKAALELEMWKEMQEDIFENQLKQKELAHMQALAEEWKKRDRERESLVKKKVAEYTILEGKLQKTLIDLEKREQQLASVESELQREKKELQSERQRNLQELQDSIRRAKEDCIHQVELERLKIKQLEEDKHRLQQQLNDAENKYKILEKEFQQFKDQQNNKPEIRLQSEINLLTLEKVELERKLESATKSKLHYKQQWGRALKELARLKQREQESQMARLKKQQEELEQMRLRYLAAEEKDTVKTERQELLDIRNELNRLRQQEQKQYQDSTEIASGKKDGPHGSVLEEGLDDYLTRLIEERDTLMRTGVYNHEDRIISELDRQIREILAKSNASN

SEQ ID NO: 544 - protein, 532 aa, Homo sapiens
MACLLRSFQRISAGVFFLALWGMVVGDKLLVVPQDGSHWLSMKDIVEVLSDRGHEIVVVVPEVNLLLKESKYYTRKIYPVPYDQEELKNRYQSFGNNHFAERSFLTAPQTEYRNNMIVIGLYFINCQSLLQDRDTLNFFKESKFDALFTDPALPCGVILAEYLGLPSVYLFRGFPCSLEHTFSRSPDPVSYIPRCYTKFSDHMTFSQRVANFLVNLLEPYLFYCLFSKYEELASAVLKRDVDIITLYQKVSVWLLRYDFVLEYPRPVMPNMVFIGGINCKKRKDLSQEFEAYINASGEHGIVVFSLGSMVSEIPEKKAMAIADALGKIPQTVLWRYTGTRPSNLANNTILVKWLPQNDLLGHPMTRAFITHAGSHGVYESICNGVPMVMMPLFGDQMDNAKRMETKGAGVTLNVLEMTSEDLENALKAVINDKSYKENIMRLSSLHKDRPVEPLDLAVFWVEFVMRHKGAPHLRPAAHDLTWYQYHSLDVIGFLLAVVLTVAFITFKCCAYGYRKCLGKKGRVKKAHKSKTH

SEQ ID NO: 545 - protein, 692 aa, Homo sapiens
MGTVSSRRSWWPLPLLLLLLLLLGPAGARAQEDEDGDYEELVLALRSEEDGLAEAPEHGTTATFHRCAKDPWRLPGTYVVVLKEETHLSQSERTARRLQAQAARRGYLTKILHVFHGLLPGFLVKMSGDLLELALKLPHVDYIEEDSSVFAQSIPWNLERITPPRYRADEYQPPDGGSLVEVYLLDTSIQSDHREIEGRVMVTDFENVPEEDGTRFHRQASKCDSHGTHLAGVVSGRDAGVAKGASMRSLRVLNCQGKGTVSGTLIGLEFIRKSQLVQPVGPLVVLLPLAGGYSRVLNAACQRLARAGVVLVTAAGNFRDDACLYSPASAPEVITVGATNAQDQPVTLGTLGTNFGRCVDLFAPGEDIIGASSDCSTCFVSQSGTSQAAAHVAGIAAMMLSAEPELTLAELRQRLIHFSAKDVINEAWFPEDQRVLTPNLVAALPPSTHGAGWQLFCRTVWSAHSGPTRMATAVARCAPDEELLSCSSFSRSGKRRGERMEAQGGKLVCRAHNAFGGEGVYAIARCCLLPQANCSVHTAPPAEASMGTRVHCHQQGHVLTGCSSHWEVEDLGTHKPPVLRPRGQPNQCVGHREASIHASCCHAPGLECKVKEHGIPAPQEQVTVACEEGWTLTGCSALPGTSHVLGAYAVDNTCVVRSRDVSTTGSTSEGAVTAVAICCRSRHLAQASQELQ

SEQ ID NO: 546 - protein, 617 aa, Homo sapiens
MRPPQCLLHTPSLASPLLLLLLWLLGGGVGAEGREDAELLVTVRGGRLRGIRLKTPGGPVSAFLGIPFAEPPMGPRRFLPPEPKQPWSGVVDATTFQSVCYQYVDTLYPGFEGTEMWNPNRELSEDCLYLNVWTPYPRPTSPTPVLVWIYGGGFYSGASSLDVYDGRFLVQAERTVLVSMNYRVGAFGFLALPGSREAPGNVGLLDQRLALQWVQENVAAFGGDPTSVTLFGESAGAASVGMHLLSPPSRGLFHRAVLQSGAPNGPWATVGMGEARRRATQLAHLVGCPPGGTGGNDTELVACLRTRPAQVLVNHEWHVLPQESVFRFSFVPVVDGDFLSDTPEALINAGDFHGLQVLVGVVKDEGSYFLVYGAPGFSKDNESLISRAEFLAGVRVGVPQVSDLAAEAVVLHYTDWLHPEDPARLREALSDVVGDHNVVCPVAQLAGRLAAQGARVYAYVFEHRASTLSWPLWMGVPHGYEIEFIFGIPLDPSRNYTAEEKIFAQRLMRYWANFARTGDPNEPRDPKAPQWPPYTAGAQQYVSLDLRPLEVRRGLRAQACAFWNRFLPKLLSATASEAPSTCPGFTHGEAAPRPGLPLPLLLLHQLLLLFLSHLRRL

SEQ ID NO: 547 - protein, 303 aa, Homo sapiens
MADAASQVLLGSGLTILSQPLMYVKVLIQVGYEPLPPTIGRNIFGRQVCQLPGLFSYAQHIASIDGRRGLFTGLTPRLCSGVLGTVVHGKVLQHYQESDKGEELGPGNVQKEVSSSFDHVIKETTREMIARSAATLITHPFHVITLRSMVQFIGRESKYCGLCDSIITIYREEGILGFFAGLVPRLLGDILSLWLCNSLAYLVNTYALDSGVSTMNEMKSYSQAVTGFFASMLTYPFVLVSNLMAVNNCGLAGGCPPYSPIYTSWIDCWCMLQKEGNMSRGNSLFFRKVPFGKTYCCDLKMLI

SEQ ID NO: 548 - protein, 2608 aa, Homo sapiens
MDGRDFAPPPHLLSERGSLGHRSAAAAARLAPAGPAAQPPAHFQPGKYFPSPLPMASHTASSRLMGSSPASSFMGSFLTSSLGSAASTHPSGPSSSPPEQAYRGSHPTTSQIWFSHSHEAPGYPRFSGSLASTFLPVSHLDHHGNSNVLYGQHRFYGTQKDNFYLRNLPPQPTLLPANHNFPSVARAAPAHPMGSCSRDRDRGEAGSLQKGPKDFDRFLVGKELGREKAGKAAEGKERPAAEEDGGKERHKLVLPVPADGHCREGGPAPRGACEGRPKHLTSCLLNTKVLNGEMGRAALASCAGGMLGRPGTGVVTSGRCAKEAAGPPEPGPAFSECLERRQMLHHTASYAGPPPPLSTAAGSFPCLQLHGGPDGLCPLQDKAPRDLKASGPTFVPSVGHLADKGRPFQAAEACAVAGEGKDRHLEGTMAPDHAAPYGVSYAHLKAEGKGERRPGGFEAALNPRLKGLDYLSSAGPEASFPGLPKSGLDKSGYFELPTSSQDCARPGHQDPLGGKAPQACCTLDKTVGKEAPAGPPGAQKVARIRHQQHLMAAEVEQGGIGAEAKRKSLELASLGYSGPHLPPWGVQAGQGTAMAISEERKAGAYLDPFGSGLQQAALLPQELPAPPDEVSAMKNLLKYSSQALVVGQKAPLVGLGGLKASCIQQEAKFLSSKGPGQSERPDCARSREHDTTHGDGEVRQPPVGIAVALARQKDTVSRSEAAYGTNTARQGRAAPAFKGGGGPRSTHALDLEAEEERTRLCDDRLGLASRELLLQDSKDRVEFARIHPPSSCPGDLAPHLMMQSGQLGGDPAPHTHPHPPWLPRTRSPSLWMGGHSYGLGHPALHQNLPPGFPASVAGPVPSVFPLPQDAPTQLVILPSEPTPHSAPHALADVMDQASLWPPMYGGRGPASHMQHPGQLPVYSRPQLLRQQELYALQQQRAAQFQRKPEDQHLDLEEPAQEKAPKSTHKPVALTPTAPGAPSPAAGPTKLPPCCHPPDPKPPASSPTPPPRPSAPCTLNVCPASSPGPGSRVRSAEEKNGEGQQSTADIITSEPDLPPGYLRPMAGLGFSLPSDVHSSNLEDPETMQTTAPGAQPEPTRTFLPGEPPPCSPRSLEEPGLLSGAREATQDLAATPYPTERGPQGKAADPSPLEGLQELQCAALLEAGGPEATGQAHSTQGGAREERSREEGEQGPSSGASSQVLEQRAGSPGALEDEGEQPAPEEDELEEDELGQQSMEDSEEDCGGAPDNSHPPRALPGLDALVAATINLGDLPSDSPPDPQPPAASGPPSTVPLPHSSGIHGIALLSELADLAIQRQRSERTVPEEEEDVLAFNLQHLATLATAWSLVEAAGLDSSTAPAQPPTANPCSGPRLTPRMQILQRKDTWTPKTKPVCPLKAAIDRLDTQEVGMRVRLAELQRRYKEKQRELARLQRKHDHERDESSRSPARRGPGRPRKRKHSSSLPAPRPTGPLPRSDGKKVKAVRTSLGLLCAELRGGSGGEPAKKRSKLERSVYAGLQTASVEKAQCKKSSCQGGLAPSVAHRVAQLKPKVKSKGLPTGLSSFQQKEATPGGRIREKLSRAKSAKVSGATRHPQPKGHGSRETPRCPAQPSVAASQEAGSGYDSEDCEGLLGTEAPPREAGLLLHTGASVAVLGPSPSSVVKMEANQKAKKKKERQGLLGACRLSSPESEVKIKRRSVKAKVGTTLERAPGQRPPGALGKKKAKGKAKGSLRAEPGATPSRDALFNPSRAFACREEGSQLASERLKRATRKGTVLQPVLRRKNGALSITLATRNAKAILGKGRKLSKVKHKAGKQGKGRAVSRLLESFAVEEDFEFDDNSSFSEEEEDEEEEEEDSGPLSAEQSAALARSCAIHKEDLRDGLPVLIPKEDSLLYAGSVRTLQPPDIYSIVIEGERGNRQRIYSLEQLLQEAVLDVRPQSSRYLPPGTRVCAYWSQKSRCLYPGNVVRGASGDEDEDLDSVVVEFDDGDTGHIAVSNVRLLPPDFKIQCTEPSPALLVSSSCRRTKKVSSEAPPPSEAATPSLSPKAQDGPEALKTPGKKSISKDKAGKAELLTSGAKSPTGASDHFLGRRGSPLLSWSAVAQTKRKAVAAASKGPGVLQNLFQLNGSSKKLRAREALFPVHSVATPIFGNGFRADSFSSLASSYAPFVGGTGPGLPRGAHKLLRAKKAERVEAEKGGRRRAGGEFLVKLDHEGVTSPKNKTCKALLMGDKDFSPKLGRPLPSPSYVHPALVGKDKKGRAPIPPLPMGLALRKYAGQAEFPLPYDSDCHSSFSDEDEDGPGLAAGVPSRFLARLSVSSSSSGSSTSSSSGSVSTSSLCSSDNEDSSYSSDDEDPALLLQTCLTHPVPTLLAQPEALRSKGSGPHAHAQRCFLSRATVAGTGAGSGPSSSSKSKLKRKEALSFSKAKELSRRQRPPSVENRPKISAFLPARQLWKWSGNPTQRRGMKGKARKLFYKAIVRGEETLRVGDCAVFLSAGRPNLPYIGRIESMWESWGSNMVVKVKWFYHPEETKLGKRQCDGKNALYQSCHEDENDVQTISHKCQVVAREQYEQMARSRKCQDRQDLYYLAGTYDPTTGRLVTADGVPILC

SEQ ID NO: 549 - protein, 980 aa, Homo sapiens
MALAVLRVLEPFPTETPPLAVLLPPGGPWPAAELGLVLALRPAGESPAGPALLVAALEGPDAGTEEQGPGPPQLLVSRALLRLLALGSGAWVRARAVRRPPALGWALLGTSLGPGLGPRVGPLLVRRGETLPVPGPRVLETRPALQGLLGPGTRLAVTELRGRARLCPESGDSSRPPPPPVVSSFAVSGTVRRLQGVLGGTGDSLGVSRSCLRGLGLFQGEWVWVAQARESSNTSQPHLARVQVLEPRWDLSDRLGPGSGPLGEPLADGLALVPATLAFNLGCDPLEMGELRIQRYLEGSIAPEDKGSCSLLPGPPFARELHIEIVSSPHYSTNGNYDGVLYRHFQIPRVVQEGDVLCVPTIGQVEILEGSPEKLPRWREMFFKVKKTVGEAPDGPASAYLADTTHTSLYMVGSTLSPVPWLPSEESTLWSSLSPPGLEALVSELCAVLKPRLQPGGALLTGTSSVLLRGPPGCGKTTVVAAACSHLGLHLLKVPCSSLCAESSGAVETKLQAIFSRARRCRPAVLLLTAVDLLGRDRDGLGEDARVMAVLRHLLLNEDPLNSCPPLMVVATTSRAQDLPADVQTAFPHELEVPALSEGQRLSILRALTAHLPLGQEVNLAQLARRCAGFVVGDLYALLTHSSRAACTRIKNSGLAGGLTEEDEGELCAAGFPLLAEDFGQALEQLQTAHSQAVGAPKIPSVSWHDVGGLQEVKKEILETIQLPLEHPELLSLGLRRSGLLLHGPPGTGKTLLAKAVATECSLTFLSVKGPELINMYVGQSEENVREVFARARAAAPCIIFFDELDSLAPSRGRSGDSGGVMDRVVSQLLAELDGLHSTQDVFVIGATNRPDLLDPALLRPGRFDKLVFVGANEDRASQLRVLSAITRKFKLEPSVSLVNVLDCCPPQLTGADLYSLCSDAMTAALKRRVHDLEEGLEPGSSALMLTMEDLLQAAARLQPSVSEQELLRYKRIQRKFAAC

SEQ ID NO: 550 - protein, 1076 aa, Homo sapiens
MAEFTSYKETASSRHLRFKLQSLSRRLDELEEATKNLQKAEDELLDLQDKVIQAEGSNSSMLAEIEVLRQRVLRIEGKDEEIKRAEDLCRLMKEKLEEEENLTRELKSEIERLQKRMAELEKLEEAFSRSKNDCTQLCLSLNEERNLTKKISSELEMLRVKVKELESSEDRLDKTEQSLASELEKLKSLTLSFVSERKYLNEKEKENEKLIKELTQKLEQNKKMNRDYTRNASNLERNDLRIEDGISSTLPSKESRRKGGLDYLKQVENETRNKSENEKNRNQEDNKVKDLNQEIEKLKTQIKHFESLEEELKKMKSKNNDLQDNYLSEQNKNKLLASQLEEIKLQIKKQKELENGEVEGEDAFLSSKGRHERTKFRGHGSEASVSKHTARELSPQHKRERLRNREFALNNENYSLSNRQVSSPSFTNRRAAKASHMGVSTDSGTQETKKTEDRFVPGSSQSEGKKSREQPSVLSRYPPAAQEHSKAWKGTSKPGTESGLKGKVEKTTRTFSDTTHGSVPSDPLGRADKASDTSSETVFGKRGHVLGNGSQVTQAANSGCSKAIGALASSRRSSSEGLSKGKKAANGLEADNSCPNSKAPVLSKYPYSCRSQENILQGFSTSHKEGVNQPAAVVMEDSSPHEALRCRVIKSSGREKPDSDDDLDIASLVTAKLVNTTITPEPEPKPQPNSREKAKTRGAPRTSLFENDKDAGMENESVKSVRASTNTMELPDTNGAGVKSQRPFSPREALRSRAIIKPVIVDKDVKKIMGGSGTETTLEKQKPVSKPGPNKVTSSITIYPSDSSSPRAAPGEALRERHTSTSNIQVGLAELTSVSNHVSSPFELSIHKHDITLQLAEAERMADGPLKDRPETVVSRSSIIIKPSDPVERNSHAPPAETIRWKSHSAPSEVGFSDARHVTVRNAWKSRRDLKSLEDPPTRIGKNVESTNSNAYTQRSSTDFSELEQPRSCLFEQGTRRVGPSSGDAPEPSSRRTQSSLTVSEVLTRRNRVGDTITVAAWNHSASMEEEGEDCTLSVYRQLHNSLDPSELPGKQGLPESGRVRAEERLRPTRPCAEEN

SEQ ID NO: 551 - protein, 345 aa, Homo sapiens
MPMQLLLTDFIIFSIRFIINSMEARNQTAISKFLLLGLIEDPELQPVLFSLFLSMYLVTILGNLLILLAVISDSHLHTPMYFFLSNLSFLDICLSTTTIPKMLVNIQAQNRSITYSGCLTQICFVLFFAGLENCLLAAMAYDRYVAICHPLRYTVIMNPRLCGLLILLSLLTSVVNALLLSLMVLRLSFCTDLEIPLFFCELAQVIQLTCSDTLINNILIYFAACIFGGVPLSGIILSYTQITSCVLRMPSASGKHKAVSTCGSHLSIVLLFYGAGLGVYISSVVTDSPRKTAVASVMYSVFPQMVNPFIYSLRNKDMKGTLRKFIGRIPSLLWCAICFGFRFLE

SEQ ID NO: 552 - protein, 337 aa, Homo sapiens
MTMMAHQYPSWIFINEKTFITREQLNSLLKTYNIFYENQKNLHILYGETEDGKLIVEGMLDIFWGVKRPIQLKIQDEKPFSSFTSMKSSDVFSSKGMTRWGEFDDLYRISELDRTQIPMSEKRNSQEDYLSYHSNTLKPHAKDEPDSPVLYRTMSEAALVRKRMKPLMMDRKERQKNRASINGHFYNHETSIFIPAFESETKVRVNSNMRTEEVIKQLLQKFKIENSPQDFALHIIFATGEQRRLKKTDIPLLQRLLQGPSEKNARIFLMDKDAEEISSDVAQYINFHFSLLESILQRLNEEEKREIQRIVTKFNKEKAIILKCLQNKLVIKTETTV

SEQ ID NO: 553 - protein, 1582 aa, Homo sapiens
MPLAFCGSENHSAAYRVDQGVLNNGCFVDALNVVPHVFLLFITFPILFIGWGSQSSKVHIHHSTWLHFPGHNLRWILTFMLLFVLVCEIAEGILSDGVTESHHLHLYMPAGMAFMAAVTSVVYYHNIETSNFPKLLIALLVYWTLAFITKTIKFVKFLDHAIGFSQLRFCLTGLLVILYGMLLLVEVNVIRVRRYIFFKTPREVKPPEDLQDLGVRFLQPFVNLLSKGTYWWMNAFIKTAHKKPIDLRAIGKLPIAMRALTNYQRLCEAFDAQVRKDIQGTQGARAIWQALSHAFGRRLVLSSTFRILADLLGFAGPLCIFGIVDHLGKENDVFQPKTQFLGVYFVSSQEFLANAYVLAVLLFLALLLQRTFLQASYYVAIETGINLRGAIQTKIYNKIMHLSTSNLSMGEMTAGQICNLVAIDTNQLMWFFFLCPNLWAMPVQIIVGVILLYYILGVSALIGAAVIILLAPVQYFVATKLSQAQRSTLEYSNERLKQTNEMLRGIKLLKLYAWENIFRTRVETTRRKEMTSLRAFAIYTSISIFMNTAIPIAAVLITFVGHVSFFKEADFSPSVAFASLSLFHILVTPLFLLSSVVRSTVKALVSVQKLSEFLSSAEIREEQCAPHEPTPQGPASKYQAVPLRVVNRKRPAREDCRGLTGPLQSLVPSADGDADNCCVQIMGGYFTWTPDGIPTLSNITIRIPRGQLTMIVGQVGCGKSSLLLAALGEMQKVSGAVFWSSSLPDSEIGEDPSPERETATDLDIRKRGPVAYASQKPWLLNATVEENIIFESPFNKQRYKMVIEACSLQPDIDILPHGDQTQIGERGINLSGGQRQRISVARALYQHANVVFLDDPFSALDIHLSDHLMQAGILELLRDDKRTVVLVTHKLQYLPHADWIIAMKDGTIQREGTLKDFQRSECQLFEHWKTLMNRQDQELEKETVTERKATEPPQGLSRAMSSRDGLLQDEEEEEEEAAESEEDDNLSSMLHQRAEIPWRACAKYLSSAGILLLSLLVFSQLLKHMVLVAIDYWLAKWTDSALTLTPAARNCSLSQECTLDQTVYAMVFTVLCSLGIVLCLVTSVTVEWTGLKVAKRLHRSLLNRIILAPMRFFETTPLGSILNRFSSDCNTIDQHIPSTLECLSRSTLLCVSALAVISYVTPVFLVALLPLAIVCYFIQKYFRVASRDLQQLDDTTQLPLLSHFAETVEGLTTIRAFRYEARFQQKLLEYTDSNNIASLFLTAANRWLEVRMEYIGACVVLIAAVTSISNSLHRELSAGLVGLGLTYALMVSNYLNWMVRNLADMELQLGAVKRIHGLLKTEAESYEGLLAPSLIPKNWPDQGKIQIQNLSVRYDSSLKPVLKHVNALIAPGQKIGICGRTGSGKSSFSLAFFRMVDTFEGHIIIDGIDIAKLPLHTLRSRLSIILQDPVLFSGTIRFNLDPERKCSDSTLWEALEIAQLKLVVKALPGGLDAIITEGGENFSQGQRQLFCLARAFVRKTSIFIMDEATASIDMATENILQKVVMTAFADRTVVTIAHRVHTILSADLVIVLKRGAILEFDKPEKLLSRKDSVFASFVRADK

SEQ ID NO: 554 - protein, 881 aa, Homo sapiens
MAADKGPAAGPRSRAAMAQWRKKKGLRKRRGAASQARGSDSEDGEFEIQAEDDARARKLGPGRPLPTFPTSECTSDVEPDTREMVRAQNKKKKKSGGFQSMGLSYPVFKGIMKKGYKVPTPIQRKTIPVILDGKDVVAMARTGSGKTACFLLPMFERLKTHSAQTGARALILSPTRELALQTLKFTKELGKFTGLKTALILGGDRMEDQFAALHENPDIIIATPGRLVHVAVEMSLKLQSVEYVVFDEADRLFEMGFAEQLQEIIARLPGGHQTVLFSATLPKLLVEFARAGLTEPVLIRLDVDTKLNEQLKTSFFLVREDTKAAVLLHLLHNVVRPQDQTVVFVATKHHAEYLTELLTTQRVSCAHIYSALDPTARKINLAKFTLGKCSTLIVTDLAARGLDIPLLDNVINYSFPAKGKLFLHRVGRVARAGRSGTAYSLVAPDEIPYLLDLHLFLGRSLTLARPLKEPSGVAGVDGMLGRVPQSVVDEEDSGLQSTLEASLELRGLARVADNAQQQYVRSRPAPSPESIKRAKEMDLVGLGLHPLFSSRFEEEELQRLRLVDSIKNYRSRATIFEINASSRDLCSQVMRAKRQKDRKAIARFQQGQQGRQEQQEGPVGPAPSRPALQEKQPEKEEEEEAGESVEDIFSEVVGRKRQRSGPNRGAKRRREEARQRDQEFYIPYRPKDFDSERGLSISGEGGAFEQQAAGAVLDLMGDEAQNLTRGRQQLKWDRKKKRFVGQSGQEDKKKIKTESGRYISSSYKRDLYQKWKQKQKIDDRDSDEEGASDRRGPERRGGKRDRGQGASRPHAPGTPAGRVRPELKTKQQILKQRRRAQKLHFLQRGGLKQLSARNRRRVQELQQGAFGRGARSKKGKMRKRM

SEQ ID NO: 555 - protein, 1050 aa, Homo sapiens
MALYDEDLLKNPFYLALQKCRPDLCSKVAQIHGIVLVPCKGSLSSSIQSTCQFESYILIPVEEHFQTLNGKDVFIQGNRIKLGAGFACLLSVPILFEETFYNEKEESFSILCIAHPLEKRESSEEPLAPSDPFSLKTIEDVREFLGRHSERFDRNIASFHRTFRECERKSLRHHIDSANALYTKCLQQLLRDSHLKMLAKQEAQMNLMKQAVEIYVHHEIYNLIFKYVGTMEASEDAAFNKITRSLQDLQQKDIGVKPEFSFNIPRAKRELAQLNKCTSPQQKLVCLRKVVQLITQSPSQRVNLETMCADDLLSVLLYLLVKTEIPNWMANLSYIKNFRFSSLAKDELGYCLTSFEAAIEYIRQGSLSAKPPESEGFGDRLFLKQRMSLLSQMTSSPTDCLFKHIASGNQKEVERLLSQEDHDKDTVQKMCHPLCFCDDCEKLVSGRLNDPSVVTPFSRDDRGHTPLHVAAVCGQASLIDLLVSKGAMVNATDYHGATPLHLACQKGYQSVTLLLLHYKASAEVQDNNGNTPLHLACTYGHEDCVKALVYYDVESCRLDIGNEKGDTPLHIAARWGYQGVIETLLQNGASTEIQNRLKETPLKCALNSKILSVMEAYHLSFERRQKSSEAPVQSPQRSVDSISQESSTSSFSSMSASSRQEETKKDYREVEKLLRAVADGDLEMVRYLLEWTEEDLEDAEDTVSAADPEFCHPLCQCPKCAPAQKRLAKVPASGLGVNVTSQDGSSPLHVAALHGRADLIPLLLKHGANAGARNADQAVPLHLACQQGHFQVVKCLLDSNAKPNKKDLSGNTPLIYACSGGHHELVALLLQHGASINASNNKGNTALHEAVIEKHVFVVELLLLHGASVQVLNKRQRTAVDCAEQNSKIMELLQVVPSCVASLDDVAETDRKEYVTVKIRKKWNSKLYDLPDEPFTRQFYFVHSAGQFKGKTSREIMARDRSVPNLTEGSLHEPGRQSVTLRQNNLPAQSGSHAAEKGNSDWPERPGLTQTGPGHRRMLRRHTVEDAVVSQGPEAAGPLSTPQEVSASRS

SEQ ID NO: 556 - protein, 357 aa, Homo sapiens
MNWVNKSVPQEFILLVFSDQPWLEIPPFVMFLFSYILTIFGNLTIILVSHVDFKLHTPMYFFLSNLSLLDLCYTTSTVPQMLVNICNTRKVISYGGCVAQLFIFLALGSTECLLLAVMCFDRFVAICRPLHYSIIMHQRLCFQLAAASWISGFSNSVLQSTWTLKMPLCGHKEVDHFFCEVPALLKLSCVDTTANEAELFFISVLFLLIPVTLILISYAFIVQAVLRIQSAEGQRKAFGTCGSHLIVVSLFYGTAISMYLQPPSPSSKDRGKMVSLFCGIIAPMLNPLIYTLRNKEVKEAFKRLVAKSLLNQEIRNMQMISFAKDTVLTYLTNFSASCPIFVITIENYCNLPQRKFP

SEQ ID NO: 557 - protein, 1608 aa, Homo sapiens
MVQKKKFCPRLLDYLVIVGARHPSSDSVAQTPELLRRYPLEDHTEFPLPPDVVFFCQPEGCLSVRQRRMSLRDDTSFVFTLTDKDTGVTRYGICVNFYRSFQKRISKEKGEGGAGSRGKEGTHATCASEEGGTESSESGSSLQPLSADSTPDVNQSPRGKRRAKAGSRSRNSTLTSLCVLSHYPFFSTFRECLYTLKRLVDCCSERLLGKKLGIPRGVQRDTMWRIFTGSLLVEEKSSALLHDLREIEAWIYRLLRSPVPVSGQKRVDIEVLPQELQPALTFALPDPSRFTLVDFPLHLPLELLGVDACLQVLTCILLEHKVVLQSRDYNALSMSVMAFVAMIYPLEYMFPVIPLLPTCMASAEQLLLAPTPYIIGVPASFFLYKLDFKMPDDVWLVDLDSNRVIAPTNAEVLPILPEPESLELKKHLKQALASMSLNTQPILNLEKFHEGQEIPLLLGRPSNDLQSTPSTEFNPLIYGNDVDSVDVATRVAMVRFFNSANVLQGFQMHTRTLRLFPRPVVAFQAGSFLASRPRQTPFAEKLARTQAVEYFGEWILNPTNYAFQRIHNNMFDPALIGDKPKWYAHQLQPIHYRVYDSNSQLAEALSVPPERDSDSEPTDDSGSDSMDYDDSSSSYSSLGDFVSEMMKCDINGDTPNVDPLTHAALGDASEVEIDELQNQKEAEEPGPDSENSQENPPLRSSSSTTASSSPSTVIHGANSEPADSTEMDDKAAVGVSKPLPSVPPSIGKSNVDRRQAEIGEGSVRRRIYDNPYFEPQYGFPPEEDEDEQGESYTPRFSQHVSGNRAQKLLRPNSLRLASDSDAESDSRASSPNSTVSNTSTEGFGGIMSFASSLYRNHSTSFSLSNLTLPTKGAREKATPFPSLKVFGLNTLMEIVTEAGPGSGEGNRRALVDQKSSVIKHSPTVKREPPSPQGRSSNSSENQQFLKEVVHSVLDGQGVGWLNMKKVRRLLESEQLRVFVLSKLNRMVQSEDDARQDIIPDVEISRKVYKGMLDLLKCTVLSLEQSYAHAGLGGMASIFGLLEIAQTHYYSKEPDKRKRSPTESVNTPVGKDPGLAGRGDPKAMAQLRVPQLGPRAPSATGKGPKELDTRSLKEENFIASIGPEVIKPVFDLGETEEKKSQISADSGVSLTSSSQRTDQDSVIGVSPAVMIRSSSQDSEVSTVVSNSSGETLGADSDLSSNAGDGPGGEGSVHLASSRGTLSDSEIETNSATSTIFGKAHSLKPSIKEKLAGSPIRTSEDVSQRVYLYEGLLGKERSTLWDQMQFWEDAFLDAVMLEREGMGMDQGPQEMIDRYLSLGEHDRKRLEDDEDRLLATLLHNLISYMLLMKVNKNDIRKKVRRLMGKSHIGLVYSQQINEVLDQLANLNGRDLSIWSSGSRHMKKQTFVVHAGTDTNGDIFFMEVCDDCVVLRSNIGTVYERWWYEKLINMTYCPKTKVLCLWRRNGSETQLNKFYTKKCRELYYCVKDSMERAAARQQSIKPGPELGGEFPVQDLKTGEGGLLQVTLEGINLKFMHNQVFIELNHIKKCNTVRGVFVLEEFVPEIKEVVSHKYKTPMAHEICYSVLCLFSYVAAVHSSEEDLRTPPRPVSS

SEQ ID NO: 558 - protein, 2511 aa, Homo sapiens
MEEVVIAGMSGKLPESENLQEFWDNLIGGVDMVTDDDRRWKAGLYGLPRRSGKLKDLSRFDASFFGVHPKQAHTMDPQLRLLLEVTYEAIVDGGINPDSLRGTHTGVWVGVSGSETSEALSRDPETLVGYSMVGCQRAMMANRLSFFFDFRGPSIALDTACSSSLMALQNAYQAIHSGQCPAAIVGGINVLLKPNTSVQFLRLGMLSPEGTCKAFDTAGNGYCRSEGVVAVLLTKKSLARRVYATILNAGTNTDGFKEQGVTFPSGDIQEQLIRSLYQSAGVAPESFEYIEAHGTGTKVGDPQELNGITRALCATRQEPLLIGSTKSNMGHPEPASGLAALAKVLLSLEHGLWAPNLHFHSPNPEIPALLDGRLQVVDQPLPVRGGNVGINSFGFGGSNVHIILRPNTQPPPAPAPHATLPRLLRASGRTPEAVQKLLEQGLRHSQDLAFLSMLNDIAAVPATAMPFRGYAVLGGERGGPEVQQVPAGERPLWFICSGMGTQWRGMGLSLMRLDRFRDSILRSDEAVKPFGLKVSQLLLSTDESTFDDIVHSFVSLTAIQIGLIDLLSCMGLRPDGIVGHSLGEVACGYADGCLSQEEAVLAAYWRGQCIKEAHLPPGAMAAVGLSWEECKQRCPPGVVPACHNSKDTVTISGPQAPVFEFVEQLRKEGVFAKEVRTGGMAFHSYFMEAIAPPLLQELKKVIREPKPRSARWLSTSIPEAQWHSSLARTSSAEYNVNNLVSPVLFQEALWHVPEHAVVLEIAPHALLQAVLKRGLKPSCTIIPLMKKDHRDNLEFFLAGIGRLHLSGIDANPNALFPPVEFPAPRGTPLISPLIKWDHSLAWDVPAAEDFPNGSGSPSAAIYNIDTSSESPDHYLVDHTLDGRVLFPATGYLSIVWKTLARALGLGVEQLPVVFEDVVLHQATILPKTGTVSLEVRLLEASRAFEVSENGNLVVSGKVYQWDDPDPRLFDHPESPTPNPTEPLFLAQAEVYKELRLRGYDYGPHFQGILEASLEGDSGRLLWKDNWVSFMDTMLQMSILGSAKHGLYLPTRVTAIHIDPATHRQKLYTLQDKAQVADVVVSRWLRVTVAGGVHISGLHTESAPRRQQEQQVPILEKFCFTPHTEEGCLSERAALQEELQLCKGLVQALQTKVTQQGLKMVVPGLDGAQIPRDPSQQELPRLLSAACRLQLNGNLQLELAQVLAQERPKLPEDPLLSGLLDSPALKACLDTAVENMPSLKMKVVEVLAGHGHLYSRIPGLLSPHPLLQLSYTATDRHPQALEAAQAELQQHDVAQGQWDPADPAPSALGSADLLVCNCAVAALGDPASALSNMVAALREGGFLLLHTLLRGHPLGDIVAFLTSTEPQYGQGILSQDAWESLFSRVSLRLVGLKKSFYGSTLFLCRRPTPQDSPIFLPVDDTSFRWVESLKGILADEDSSRPVWLKAINCATSGVVGLVNCLRREPGGNRLRCVLLSNLSSTSHVPEVDPGSAELQKVLQGDLVMNVYRDGAWGAFRHFLLEEDKPEEPTAHAFVSTLTRGDLSSIRWVCSSLRHAQPTCPGAQLCTVYYASLNFRDIMLATGKLSPDAIPGKWTSQDSLLGMEFSGRDASGKRVMGLVPAKGLATSVLLSPDFLWDVPSNWTLEEAASVPVVYSTAYYALVVRGRVRPGETLLIHSGSGGVGQAAIAIALSLGCRVFTTVGSAEKRAYLQARFPQLDSTSFANSRDTSFEQHVLWHTGGKGVDLVLNSLAEEKLQASVRCLATHGRFLEIGKFDLSQNHPLGMAIFLKNVTFHGVLLDAFFNESSADWREVWALVQAGIRDGVVRPLKCTVFHGAQVEDAFRYMAQGKHIGKVVVQVLAEEPEAVLKGAKPKLMSAISKTFCPAHKSYIIAGGLGGFGLELAQWLIQRGVQKLVLTSRSGIRTGYQAKQVRRWRRQGVQVQVSTSNISSLEGARGLIAEAAQLGPVGGVFNLAVVLRDGLLENQTPEFFQDVCKPKYSGTLNLDRVTREACPELDYFVVFSSVSCGRGNAGQSNYGFANSAMERICEKRRHEGLPGLAVQWGAIGDVGILVETMSTNDTIVSGTLPQRMASCLEVLDLFLNQPHMVLSSFVLAEKAAAYRDRDSQRDLVEAVAHILGIRDLAAVNLDSSLADLGLDSLMSVEVRQTLERELNLVLSVREVRQLTLRKLQELSSKADEASELACPTPKEDGLAQQQTQLNLRSLLVNPEGPTLMRLNSVQSSERPLFLVHPIEGSTTVFHSLASRLSIPTYGLQCTRAAPLDSIHSLAAYYIDCIRQVQPEGPYRVAGYSYGACVAFEMCSQLQAQQSPAPTHNSLFLFDGSPTYVLAYTQSYRAKLTPGCEAEAETEAICFFVQQFTDMEHNRVLEALLPLKGLEERVAAAVDLIIKSHQGLDRQELSFAARSFYYKLRAAEQYTPKAKYHGNVMLLRAKTGGAYGEDLGADYNLSQVCDGKVSVHVIEGDHRTLLEGSGLESIISIIHSSLAEPRVSVREG

SEQ ID NO: 559 - protein, 1481 aa, Homo sapiens
MSKTLKKKKHWLSKVQECAVSWAGPPGDFGAEIRGGAERGEFPYLGRLREEPGGGTCCVVSGKAPSPGDVLLEVNGTPVSGLTNRDTLAVIRHFREPIRLKTVKPGKVINKDLRHYLSLQFQKGSIDHKLQQVIRDNLYLRTIPCTTRAPRDGEVPGVDYNFISVEQFKALEESGALLESGTYDGNFYGTPKPPAEPSPFQPDPVDQVLFDNEFDAESQRKRTTSVSKMERMDSSLPEEEEDEDKEAINGSGNAENRERHSESSDWMKTVPSYNQTNSSMDFRNYMMRDETLEPLPKNWEMAYTDTGMIYFIDHNTKTTTWLDPRLCKKAKAPEDCEDGELPYGWEKIEDPQYGTYYVDHLNQKTQFENPVEEAKRKKQLGQVEIGSSKPDMEKSHFTRDPSQLKGVLVRASLKKSTMGFGFTIIGGDRPDEFLQVKNVLKDGPAAQDGKIAPGDVIVDINGNCVLGHTHADVVQMFQLVPVNQYVNLTLCRGYPLPDDSEDPVVDIVAATPVINGQSLTKGETCMNPQDFKPGAMVLEQNGKSGHTLTGDGLNGPSDASEQRVSMASSGSSQPELVTIPLIKGPKGFGFAIADSPTGQKVKMILDSQWCQGLQKGDIIKEIYHQNVQNLTHLQVVEVLKQFPVGADVPLLILRGGPPSPTKTAKMKTDKKENAGSLEAINEPIPQPMPFPPSIIRSGSPKLDPSEVYLKSKTLYEDKPPNTKDLDVFLRKQESGFGFRVLGGDGPDQSIYIGAIIPLGAAEKDGRLRAADELMCIDGIPVKGKSHKQVLDLMTTAARNGHVLLTVRRKIFYGEKQPEDDSSQAFISTQNGSPRLNRAEVPARPAPQEPYDVVLQRKENEGFGFVILTSKNKPPPGVIPHKIGRVIEGSPADRCGKLKVGDHISAVNGQSIVELSHDNIVQLIKDAGVTVTLTVIAEEEHHGPPSGTNSARQSPALQHRPMGQSQANHIPGDRSALEGEIGKDVSTSYRHSWSDHKHLAQPDTAVISVVGSRHNQNLGCYPVELERGPRGFGFSLRGGKEYNMGLFILRLAEDGPAIKDGRIHVGDQIVEINGEPTQGITHTRAIELIQAGGNKVLLLLRPGTGLIPDHGDWDINNPSSSNVIYDEQSPLPPSSHFASIFEESHVPVIEESLRVQICEKAEELKDIVPEKKSTLNENQPEIKHQSLLQKNVSKRDPPSSHGHSNKKNLLKVENGVTRRGRSVSPKKPASQHSEEHLDKIPSPLKNNPKRRPRDQSLSPSKGENKSCQVSTRAGSGQDQCRKSRGRSASPKKQQKIEGSKAPSNAEAKLLEGKSRRIAGYTGSNAEQIPDGKEKSDVIRKDAKQNQLEKSRTRSPEKKIKRMVEKSLPSKMTNKTTSKEVSENEKGKKVTTGETSSSNDKIGENVQLSEKRLKQEPEEKVVSNKTEDHKGKELEAADKNKETGRFKPESSSPVKKTLITPGPWKVPSGNKVTGTIGMAEKRQ

SEQ ID NO: 560 - protein, 497 aa, Homo sapiens
MASPAPPEHAEEGCPAPAAEEQAPPSPPPPQASPAERQQQEEEAQEAGAAEGAGLQVEEAAGRAAAAVTWLLGEPVLWLGCRADELLSWKRPLRSLLGFVAANLLFWFLALTPWRVYHLISVMILGRVIMQIIKDMVLSRTRGAQLWRSLSESWEVINSKPDERPRLSHCIAESWMNFSIFLQEMSLFKQQSPGKFCLLVCSVCTFFTILGSYIPGVILSYLLLLCAFLCPLFKCNDIGQKIYSKIKSVLLKLDFGIGEYINQKKRERSEADKEKSHKDDSELDFSALCPKISLTVAAKELSVSDTDVSEVSWTDNGTFNLSEGYTPQTDTSDDLDRPSEEVFSRDLSDFPSLENGMGTNDEDELSLGLPTELKRKKEQLDSGHRPSKETQSAAGLTLPLNSDQTFHLMSNLAGDVITAAVTAAIKDQLEGVQQALSQAAPIPEEDTDTEEGDDFELLDQSELDQIESELGLTQDQEAEAQQNKKSSGFLSNLLGGH

SEQ ID NO: 561 - protein, 744 aa, Homo sapiens
MDHAEENEILAATQRYYVERPIFSHPVLQERLHTKDKVPDSIADKLKQAFTCTPKKIRNIIYMFLPITKWLPAYKFKEYVLGDLVSGISTGVLQLPQGLAFAMLAAVPPIFGLYSSFYPVIMYCFLGTSRHISIGPFAVISLMIGGVAVRLVPDDIVIPGGVNATNGTEARDALRVKVAMSVTLLSGIIQFCLGVCRFGFVAIYLTEPLVRGFTTAAAVHVFTSMLKYLFGVKTKRYSGIFSVVYSTVAVLQNVKNLNVCSLGVGLMVFGLLLGGKEFNERFKEKLPAPIPLEFFAVVMGTGISAGFNLKESYNVDVVGTLPLGLLPPANPDTSLFHLVYVDAIAIAIVGFSVTISMAKTLANKHGYQVDGNQELIALGLCNSIGSLFQTFSISCSLSRSLVQEGTGGKTQLAGCLASLMILLVILATGFLFESLPQAVLSAIVIVNLKGMFMQFSDLPFFWRTSKIELTIWLTTFVSSLFLGLDYGLITAVIIALLTVIYRTQSPSYKVLGKLPETDVYIDIDAYEEVKEIPGIKIFQINAPIYYANSDLYSNALKRKTGVNPAVIMGARRKAMRKYAKEVGNANMANATVVKADAEVDGEDATKPEEEDGEVKYPPIVIKSTFPEEMQRFMPPGDNVHTVILDFTQVNFIDSVGVKTLAGIVKEYGDVGIYVYLAGCSAQVVNDLTRNRFFENPALWELLFHSIHDAVLGSQLREALAEQEASAPPSQEDLEPNATPATPEA

SEQ ID NO: 562 - protein, 529 aa, Homo sapiens
MSVKWTSVILLIQLSFCFSSGNCGKVLVWAAEYSHWMNIKTILDELIQRGHEVTVLASSASILFDPNNSSALKIEIYPTSLTKTELENFIMQQIKRWSDLPKDTFWLYFSQVQEIMSIFGDITRKFCKDVVSNKKFMKKVQESRFDVIFADAIFPCSELLAELFNIPFVYSLSFSPGYTFEKHSGGFIFPPSYVPVVMSELTDQMTFMERVKNMIYVLYFDFWFEIFDMKKWDQFYSEVLGRPTTLSETMGKADVWLIRNSWNFQFPYPLLPNVDFVGGLHCKPAKPLPKEMEDFVQSSGENGVVVFSLGSMVSNMTEERANVIASALAQIPQKVLWRFDGNKPDTLGLNTRLYKWIPQNDLLGHPKTRAFITHGGANGIYEAIYHGIPMVGIPLFADQPDNIAHMKARGAAVRVDFNTMSSTDLLNALKRVINDPSYKENVMKLSRIQHDQPVKPLDRAVFWIEFVMRHKGAKHLRVAAHDLTWFQYHSLDVIGFLLVCVATVIFIVTKCCLFCFWKFARKAKKGKND

SEQ ID NO: 563 - protein, 146 aa, Homo sapiens
MHPLLNPLLLALGLMALLLTTVIALTCLGGFASPGPVPPSTALRELIEELVNITQNQKAPLCNGSMVWSINLTAGMYCAALESLINVSGCSAIEKTQRMLSGFCPHKVSAGQFSSLHVRDTKIEVAQFVKDLLLHLKKLFREGQFN

SEQ ID NO: 564 - protein, 1007 aa, Homo sapiens
MGSGGDSLLGGRGSLPLLLLLIMGGMAQDSPPQILVHPQDQLFQGPGPARMSCQASGQPPPTIRWLLNGQPLSMVPPDPHHLLPDGTLLLLQPPARGHAHDGQALSTDLGVYTCEASNRLGTAVSRGARLSVAVLREDFQIQPRDMVAVVGEQFTLECGPPWGHPEPTVSWWKDGKPLALQPGRHTVSGGSLLMARAEKSDEGTYMCVATNSAGHRESRAARVSIQEPQDYTEPVELLAVRIQLENVTLLNPDPAEGPKPRPAVWLSWKVSGPAAPAQSYTALFRTQTAPGGQGAPWAEELLAGWQSAELGGLHWGQDYEFKVRPSSGRARGPDSNVLLLRLPEKVPSAPPQEVTLKPGNGTVFVSWVPPPAENHNGIIRGYQVWSLGNTSLPPANWTVVGEQTQLEIATHMPGSYCVQVAAVTGAGAGEPSRPVCLLLEQAMERATQEPSEHGPWTLEQLRATLKRPEVIATCGVALWLLLLGTAVCIHRRRRARVHLGPGLYRYTSEDAILKHRMDHSDSQWLADTWRSTSGSRDLSSSSSLSSRLGADARDPLDCRRSLLSWDSRSPGVPLLPDTSTFYGSLIAELPSSTPARPSPQVPAVRRLPPQLAQLSSPCSSSDSLCSRRGLSSPRLSLAPAEAWKAKKKQELQHANSSPLLRGSHSLELRACELGNRGSKNLSQSPGAVPQALVAWRALGPKLLSSSNELVTRHLPPAPLFPHETPPTQSQQTQPPVAPQAPSSILLPAAPIPILSPCSPPSPQASSLSGPSPASSRLSSSSLSSLGEDQDSVLTPEEVALCLELSEGEETPRNSVSPMPRAPSPPTTYGYISVPTASEFTDMGRTGGGVGPKGGVLLCPPRPCLTPTPSEGSLANGWGSASEDNAASARASLVSSSDGSFLADAHFARALAVAVDSFGFGLEPREADCVFIDASSPPSPRDEIFLTPNLSLPLWEWRPDWLEDMEVSHTQRLGRGMPPWPPDSQISSQRSQLHCRMPKAGASPVDYS

SEQ ID NO: 565 - protein, 1320 aa, Homo sapiens
MFGLDQFEPQVNSRNAGQGERNFNETGLSMNTHFKAPAFHTGGPPGPVDPAMSALGEPPILGMNMEPYGFHARGHSELHAGGLQAQPVHGFFGGQQPHHGHPGSHHPHQHHPHFGGNFGGPDPGASCLHGGRLLGYGGAAGGLGSQPPFAEGYEHMAESQGPESFGPQRPGNLPDFHSSGASSHAVPAPCLPLDQSPNRAASFHGLPSSSGSDSHSLEPRRVTNQGAVDSLEYNYPGEAPSGHFDMFSPSDSEGQLPHYAAGRQVPGGAFPGASAMPRAAGMVGLSKMHAQPPQQQPQQQQQPQQQQQQHGVFFERFSGARKMPVGLEPSVGSRHPLMQPPQQAPPPPQQQPPQQPPQQQPPPPPGLLVRQNSCPPALPRPQQGEAGTPSGGLQDGGPMLPSQHAQFEYPIHRLENRSMHPYSEPVFSMQHPPPQQAPNQRLQHFDAPPYMNVAKRPRFDFPGSAGVDRCASWNGSMHNGALDNHLSPSAYPGLPGEFTPPVPDSFPSGPPLQHPAPDHQSLQQQQQQQQQQQQQQQQQQQQQQQQQQQQRQNAALMIKQMASRNQQQRLRQPNLAQLGHPGDVGQGGLVHGGPVGGLAQPNFEREGGSTGAGRLGTFEQQAPHLAQESAWFSGPHPPPGDLLPRRMGGSGLPADCGPHDPSLAPPPPPGGSGVLFRGPLQEPMRMPGEGHVPALPSPGLQFGGSLGGLGQLQSPGAGVGLPSAASERRPPPPDFATSALGGQPGFPFGAAGRQSTPHSGPGVNSPPSAGGGGGSSGGGGGGGAYPPQPDFQPSQRTSASKLGALSLGSFNKPSSKDNLFGQSCLAALSTACQNMIASLGAPNLNVTFNKKNPPEGKRKLSQNETDGAAVAGNPGSDYFPGGTAPGAPGPGGPSGTSSSGSKASGPPNPPAQGDGTSLSPNYTLESTSGNDGKPVSGGGGRGRGRRKRDSGHVSPGTFFDKYSAAPDSGGAPGVSPGQQQASGAAVGGSSAGETRGAPTPHEKALTSPSWGKGAELLLGDQPDLIGSLDGGAKSDSSSPNVGEFASDEVSTSYANEDEVSSSSDNPQALVKASRSPLVTGSPKLPPRGVGAGEHGPKAPPPALGLGIMSNSTSTPDSYGGGGGPGHPGTPGLEQVRTPTSSSGAPPPDEIHPLEILQAQIQLQRQQFSISEDQPLGLKGGKKGECAVGASGAQNGDSELGSCCSEAVKSAMSTIDLDSLMAEHSAAWYMPADKALVDSADDDKTLAPWEKAKPQNPNSKEAHDLPANKASASQPGSHLQCLSVHCTDDVGDAKARASVPTWRSLHSDISNRFGTFVAALT

SEQ ID NO: 566 - protein, 557 aa, Homo sapiens
MAFMEKPPAGKVLLDDTVPLTAAIEASQSLQSHTEYIIRVQRGISVENSWQIVRRYSDFDLLNNSLQIAGLSLPLPPKKLIGNMDREFIAERQKGLQNYLNVITTNHILSNCELVKKFLDPNNYSANYTEIALQQVSMFFRSEPKWEVVEPLKDIGWRIRKKYFLMKIKNQPKERLVLSWADLGPDKYLSDKDFQCLIKLLPSCLHPYIYRVTFATANESSALLIRMFNEKGTLKDLIYKAKPKDPFLKKYCNPKKIQGLELQQIKTYGRQILEVLKFLHDKGFPYGHLHASNVMLDGDTCRLLDLENSLLGLPSFYRSYFSQFRKINTLESVDVHCFGHLLYEMTYGRPPDSVPVDSFPPAPSMAVVAVLESTLSCEACKNGMPTISRLLQMPLFSDVLLTTSEKPQFKIPTKLKEALRIAKECIEKRLIEEQKQIHQHRRLTRAQSHHGSEEERKKRKILARKKSKRSALENSEEHSAKYSNSNNSGISALPPPPPPPPPPAAPLPPASTEAPAQLSSQAVNGMSRGALLSSIQNFQKGTLRKAKTCDHSAPKIG

SEQ ID NO: 567 - protein, 1899 aa, Homo sapiens
MRSRLPPALAALGAALLLSSIEAEGMECLTRAEADIVLLVDGSWSIGRANFRTVRSFISRIVEVFDIGPKRVQIALAQYSGDPRTEWQLNAHRDKKSLLQAVANLPYKGGNTLTGMALNFIRQQNFRTQAGMRPRARKIGVLITDGKSQDDVEAPSKKLKDEGVELFAIGIKNADEVELKMIATDPDDTHAYNVADFESLSRIVDDLTINLCNSVKGPGDLEAPSNLVISERTHRSFRVSWTPPSDSVDRYKVEYYPVSGGKRQEFYVSRMETSTVLKDLKPETEYVVNVYSVVEDEYSEPLKGTEKTLPVPVVSLNIYDVGPTTMHVQWQPVGGATGYILSYKPVKDTEPTRPKEVRLGPTVNDMQLTDLVPNTEYAVTVQAVLHDLTSEPVTVREVTLPLPRPQDLKLRDVTHSTMNVFWEPVPGKVRKYIVRYKTPEEDVKEVEVDRSETSTSLKDLFSQTLYTVSVSAVHDEGESPPVTAQETTRPVPAPTNLKITEVTSEGFRGTWDHGASDVSLYRITWAPFGSSDKMETILNGDENTLVFENLNPNTIYEVSITAIYPDESESDDLIGSERTLPILTTQAPKSGPRNLQVYNATSNSLTVKWDPASGRVQKYRITYQPSTGEGNEQTTTIGGRQNSVVLQKLKPDTPYTITVSSLYPDGEGGRMTGRGKTKPLNTVRNLRVYDPSTSTLNVRWDHAEGNPRQYKLFYAPAAGGPEELVPIPGNTNYAILRNLQPDTSYTVTVVPVYTEGDGGRTSDTGRTLMRGLARNVQVYNPTPNSLDVRWDPAPGPVLQYRVVYSPVDGTRPSESIVVPGNTRMVHLERLIPDTLYSVNLVALYSDGEGNPSPAQGRTLPRSGPRNLRVFGETTNSLSVAWDHADGPVQQYRIIYSPTVGDPIDEYTTVPGRRNNVILQPLQPDTPYKITVIAVYEDGDGGHLTGNGRTVGLLPPQNIHISDEWYTRFRVSWDPSPSPVLGYKIVYKPVGSNEPMEAFVGEMTSYTLHNLNPSTTYDVNVYAQYDSGLSVPLTDQGTTLYLNVTDLKTYQIGWDTFCVKWSPHRAATSYRLKLSPADGTRGQEITVRGSETSHCFTGLSPDTDYGVTVFVQTPNLEGPGVSVKEHTTVKPTEAPTEPPTPPPPPTIPPARDVCKGAKADIVFLTDASWSIGDDNFNKVVKFIFNTVGGFDEISPAGIQVSFVQYSDEVKSEFKLNTYNDKALALGALQNIRYRGGNTRTGKALTFIKEKVLTWESGMRKNVPKVLVVVTDGRSQDEVKKAALVIQQSGFSVFVVGVADVDYNELANIASKPSERHVFIVDDFESFEKIEDNLITFVCETATSSCPLIYLDGYTSPGFKMLEAYNLTEKNFASVQGVSLESGSFPSYSAYRIQKNAFVNQPTADLHPNGLPPSYTIILLFRLLPETPSDPFAIWQITDRDYKPQVGVIADPSSKTLSFFNKDTRGEVQTVTFDTEEVKTLFYGSFHKVHIVVTSKSVKIYIDCYEIIEKDIKEAGNITTDGYEILGKLLKGERKSAAFQIQSFDIVCSPVWTSRDRCCDIPSRRDEGKCPAFPNSCTCTQDSVGPPGPPGPAGGPGAKGPRGERGISGAIGPPGPRGDIGPPGPQGPPGPQGPNGLSIPGEQGRQGMKGDAGEPGLPGRTGTPGLPGPPGPMGPPGDRGFTGKDGAMGPRGPPGPPGSPGSPGVTGPSGKPGKPGDHGRPGPSGLKGEKGDRGDIASQNMMRAVARQVCEQLISGQMNRFNQMLNQIPNDYQSSRNQPGPPGPPGPPGSAGARGEPGPGGRPGFPGTPGMQGPPGERGLPGEKGERGTGSSGPRGLPGPPGPQGESRTGPPGSTGSRGPPGPPGRPGNSGIRGPPGPPGYCDSSQCASIPYNGQGYPGSG

SEQ ID NO: 568 - protein, 430 aa, Homo sapiens
MTTSPILQLLLRLSLCGLLLQRAETGSKGQTAGELYQRWERYRRECQETLAAAEPPSVAAGFVLRQCGSDGQWGLWRDHTQCENPEKNEAFLDQRLILERLQVMYTVGYSLSLATLLLALLILSLFRRLHCTRNYIHINLFTSFMLRAAAILSRDRLLPRPGPYLGDQALALWNQALAACRTAQIVTQYCVGANYTWLLVEGVYLHSLLVLVGGSEEGHFRYYLLLGWGAPALFVIPWVIVRYLYENTQCWERNEVKAIWWIIRTPILMTILINFLIFIRILGILLSKLRTRQMRCRDYRLRLARSTLTLVPLLGVHEVVFAPVTEEQARGALRFAKLGFEIFLSSFQGFLVSVLYCFINKEVQSEIRRGWHHCRLRRSLGEEQRQLPERAFRALPSGSGPGEVPTSRGLSSGTLPGPGNEASRELESYC

SEQ ID NO: 569 - protein, 413 aa, Homo sapiens [sequence omitted]

SEQ ID NO: 570 - protein, 584 aa, Homo sapiens
MDLLWMPLLLVAACVSAVHSSPEVNAGVSSIHITKPVHILEERSLLVLTPAGLTQMLNQTRFLMVLFHNPSSKQSRNLAEELGKAVEIMGKGKNGIGFGKVDITIEKELQQEFGITKAPELKLFFEGNRSEPISCKGVVESAALVVWLRRQISQKAFLFNSSEQVAEFVISRPLVIVGFFQDLEEEVAELFYDVIKDFPELTFGVITIGNVIGRFHVTLDSVLVFKKGKIVNRQKLINDSTNKQELNRVIKQHLTDFVIEYNTENKDLISELHIMSHMLLFVSKSSESYGIIIQHYKLASKEFQNKILFILVDADEPRNGRVFKYFRVTEVDIPSVQILNLSSDARYKMPSDDITYESLKKFGRSFLSKNATKHQSSEEIPKYWDQGLVKQLVGKNFNVVVFDKEKDVFVMFYAPWSKKCKMLFPLLEELGRKYQNHSTIIIAKIDVTANDIQLMYLDRYPFFRLFPSGSQQAVLYKGEHTLKGFSDFLESHIKTKIEDEDELLSVEQNEVIEEEVLAEEKEVPMMRKGLPEQQSPELENMTKYVSKLEEPAGKKKTSEEVVVVVAKPKGPPVQKKKPKVKEEL

SEQ ID NO: 571 - protein, 757 aa, Homo sapiens
MPALPLDQLQITHKDPKTGKLRTSPALHPEQKADRYFVLYKPPPKDNIPALVEEYLERATFVANDLDWLLALPHDKFWCQVIFDETLQKCLDSYLRYVPRKFDEGVASAPEVVDMQKRLHRSVFLTFLRMSTHKESKDHFISPSAFGEILYNNFLFDIPKILDLCVLFGKGNSPLLQKMIGNIFTQQPSYYSDLDETLPTILQVFSNILQHCGLQGDGANTTPQKLEERGRLTPSDMPLLELKDIVLYLCDTCTTLWAFLDIFPLACQTFQKHDFCYRLASFYEAAIPEMESAIKKRRLEDSKLLGDLWQRLSHSRKKLMEIFHIILNQICLLPILESSCDNIQGFIEEFLQIFSSLLQEKRFLRDYDALFPVAEDISLLQQASSVLDETRTAYILQAVESAWEGVDRRKATDAKDPSVIEEPNGEPNGVTVTAEAVSQASSHPENSEEEECMGAAAAVGPAMCGVELDSLISQVKDLLPDLGEGFILACLEYYHYDPEQVINNILEERLAPTLSQLDRNLDREMKPDPTPLLTSRHNVFQNDEFDVFSRDSVDLSRVHKGKSTRKEENTRSLLNDKRAVAAQRQRYEQYSVVVEEVPLQPGESLPYHSVYYEDEYDDTYDGNQVGANDADSDDELISRRPFTIPQVLRTKVPREGQEEDDDDEEDDADEEAPKPDHFVQDPAVLREKAEARRMAFLAKKGYRHDSSTAVAGSPRGHGQSRETTQERRKKEANKATRANHNRRTMADRKRSKGMIPS

SEQ ID NO: 572 - protein, 387 aa, Homo sapiens
MPVPASWPHPPGPFLLLTLLLGLTEVAGEEELQMIQPEKLLLVTVGKTATLHCTVTSLLPVGPVLWFRGVGPGRELIYNQKEGHFPRVTTVSDLTKRNNMDFSIRISSITPADVGTYYCVKFRKGSPENVEFKSGPGTEMALGAKPSAPVVLGPAARTTPEHTVSFTCESHGFSPRDITLKWFKNGNELSDFQTNVDPTGQSVAYSIRSTARVVLDPWDVRSQVICEVAHVTLQGDPLRGTANLSEAIRVPPTLEVTQQPMRVGNQVNVTCQVRKFYPQSLQLTWSENGNVCQRETASTLTENKDGTYNWTSWFLVNISDQRDDVVLTCQVKHDGQLAVSKRLALEVTVHQKDQSSDATPGPASSLTALLLIAVLLGPIYVPWKQKT

SEQ ID NO: 573 - protein, 1687 aa, Homo sapiens
MTSSSPAGLEGSDLSSINTMMSAVMSVGKVTENGGSPQGIKSPSKPPGPNRIGRRNQETKEEKSSYNCPLCEKICTTQHQLTMHIRQHNTDTGGADHSCSICGKSLSSASSLDRHMLVHSGERPYKCTVCGQSFTTNGNMHRHMKIHEKDPNSATATAPPSPLKRRRLSSKRKLSHDAESEREDPAPAKKMVEDGQSGDLEKKADEVFHCPVCFKEFVCKYGLETHMETHSDNPLRCDICCVTFRTHRGLLRHNALVHKQLPRDAMGRPFIQNNPSIPAGFHDLGFTDFSCRKFPRISQAWCETNLRRCISEQHRFVCDTCDKAFPMLCSLALHKQTHVAADQGQEKPQATPLPGDALDQKGFLALLGLQHTKDVRPAPAEEPLPDDNQAIQLQTLKCQLPQDPGCTNLLSLSPFEAASLGGSLTVLPATKDSIKHLSLQPFQKGFIIQPDSSIVVKPISGESAIELADIQQILKMAASAPPQISLPPFSKAPAAPLQAIFKHMPPLKPKPLVTPRTVVATSTPPPLINAQQASPGCISPSLPPPPLKLLKGSVEAASNAHLLQSKSGTQPHAATRLSLQQPRAELPGQPEMKTQLEQDSIIEALLPLSMEAKIKQEITEGELKAFMTAPGGKKTPAMRKVLYPCRFCNQVFAFSGVLRAHVRSHLGISPYQCNICDYIAADKAALIRHLRTHSGERPYICKICHYPFTVKANCERHLRKKHLKATRKDIEKNIEYVSSSAAELVDAFCAPDTVCRLCGEDLKHYRALRIHMRTHCGRGLGGGHKGRKPFECKECSAAFAAKRNCIHHILKQHLHVPEQDIESYVLAADGLGPAEAPAAEASGRGEDSGCAALGDCKPLTAFLEPQNGFLHRGPTQPPPPHVSIKLEPASSFAVDFNEPLDFSQKGLALVQVKQENISFLSPSSLVPYDCSMEPIDLSIPKNFRKGDKDLATPSEAKKPEEEAGSSEQPSPCPAPGPSLPVTLGPSGILESPMAPAPAATPEPPAQPLQGPVQLAVPIYSSALVSSPPLVGSSALLSGTALLRPLRPKPPLLLPKPPVTEELPPLASIAQIISSVSSAPTLLKTKVADPGPASTGSNTTASDSLGGSVPKAATTATPAATTSPKESSEPPAPASSPEAASPTEQGPAGTSKKRGRKRGMRSRPRANSGGVDLDSSGEFASIEKMLATTDTNKFSPFLQTAEDNTQDEVAGAPADHHGPSDEEQGSPPEDKLLRAKRNSYTNCLQKITCPHCPRVFPWASSLQRHMLTHTDSQSDAETAAAAGEVLDLTSRDREQPSEGATELRQVAGDAPVEQATAETASPVHREEHGRGESHEPEEEHGTEESTGDADGAEEDASSNQSLDLDFATKLMDFKLAEGDGEAGAGGAASQEQKLACDTCGKSFKFLGTLSRHRKAHGRQEPKDEKGDGASTAEEGPQPAPEQEEKPPETPAEVVESAPGAGEAPAEKLAEETEGPSDGESAAEKRSSEKSDDDKKPKTDSPKSVASKADKRKKVCSVCNKRFWSLQDLTRHMRSHTGERPYKCQTCERTFTLKHSLVRHQRIHQKARHAKHHGKDSDKEERGEEDSENESTHSGNNAVSENEAELAPNASNHMAVTRSRKEGLASATKDCSHREEKVTAGWPSEPGQGDLNPESPAALGQDLLEPRSKRPAHPILATADGASQLVGME

SEQ ID NO: 574 - protein, 361 aa, Homo sapiens
MDPLGAAKPQWPWRRCLAALLFQLLVAVCFFSYLRVSRDDATGSPRAPSGSSRQDTTPTRPTLLILLRTWPFHIPVALSRCSEMVPGTADCHITADRKVYPQADMVIVHHWDIMSNPKSRLPPSPRPQGQRWIWFNLEPPPNCQHLEALDRYFNLTMSYRSDSDIFTPYGWLEPWSGQPAHPPLNLSAKTELVAWAVSNWKPDSARVRYYQSLQAHLKVDVYGRSHKPLPKGTMMETLSRYKFYLAFENSLHPDYITEKLWRNALEAWAVPVVLGPSRSNYERFLPPDAFIHVDDFQSPKDLARYLQELDKDHARYLSYFRWRETLRPRSFSWALDFCKACWKLQQESRYQTVRSIAAWFT

SEQ ID NO: 575 - protein, 517 aa, Homo sapiens
MAQPVHSLCSAFGLQCCLLFLLASWGAGATTFQEYQKTGELSTSDHIFPLTPGLVYSIPFDHIVLHSGQRPPELPKSTEIHEQKRHCNTTRHSKPTDKPTGNSKTIDHKSSTDNHEAPPTSEENSSNQGKDPMIRNQRSVDPADSTTTHKESAGKKHITPAPKSKINCRKSTTGKSTVTRKSDKTGRPLEKSMSTLDKTSTSSHKTTTSFHNSGNSQTKQKSTSFPEKITAASKTTYKTTGTPEESEKTEDSRTTVASDKLLTKTTKNIQETISANELTQSLAEPTEHGGRTANENNTPSPAEPTENRERTANENKKTICTKGKNTPVPEKPTENLGNTTLTTETIKAPVKSTENPEKTAAVTKTIKPSVKVTGDKSLTTTSSHLNKTEVTHQVPTGSFTLITSRTKLSSITSEATGNESHPYLNKDGSQKGIHAGQMGENDSFPAWAIVIVVLVAVILLLVFLGLIFLVSYMMRTRRTLTQNTQYNDAEDEGGPNSYPVYLMEQQNLGMGQIPSPR

SEQ ID NO: 576 - protein, 670 aa, Homo sapiens
MGETEKRIETHRIRCLSKLKMFLLAITCAFVSKTLSGSYMNSMLTQIERQFNIPTSLVGFINGSFEIGNLLLIIFVSYFGTKLHRPIMIGIGCVVMGLGCFLKSLPHFLMNQYEYESTVSVSGNLSSNSFLCMENGTQILRPTQDPSECTKEVKSLMWVYVLVGNIVRGMGETPILPLGISYIEDFAKFENSPLYIGLVETGAIIGPLIGLLLASFCANVYVDTGFVNTDDLIITPTDTRWVGAWWFGFLICAGVNVLTAIPFFFLPNTLPKEGLETNADIIKNENEDKQKEEVKKEKYGITKDFLPFMKSLSCNPIYMLFILVSVIQFNAFVNMISFMPKYLEQQYGISSSDAIFLMGIYNLPPICIGYIIGGLIMKKFKITVKQAAHIGCWLSLLEYLLYFLSFLMTCENSSVVGINTSYEGIPQDLYVENDIFADCNVDCNCPSKIWDPVCGNNGLSYLSACLAGCETSIGTGINMVFQNCSCIQTSGNSSAVLGLCDKGPDCSLMLQYFLILSAMSSFIYSLAAIPGYMVLLRCMKSEEKSLGVGLHTFCTRVFAGIPAPIYFGALMDSTCLHWGTLKCGESGACRIYDSTTFRYIYLGLPAALRGSSFVPALIILILLRKCHLPGENASSGTELIETKVKGKENECKDIYQKSTVLKDDELKTKL

SEQ ID NO: 577 - protein, 1261 aa, Homo sapiens
MGTGDFICISMTGGAPWGFRLQGGKEQKQPLQVAKIRNQSKASGSGLCEGDEVVSINGNPCADLTYPEVIKLMESITDSLQMLIKRPSSGISEALISENENKNLEHLTHGGYVESTTLQIRPATKTQCTEFFLAPVKTEVPLAENQRSGPDCAGSLKEETGPSYQRAPQMPDSQRGRVAEELILREKVEAVQPGPVVELQLSLSQERHKGASGPLVALPGAEKSKSPDPDPNLSHDRIVHINSIPTNEKADPFLRSSKIIQISSGRELRVIQESEAGDAGLPRVEVILDCSDRQKTEGCRLQAGKECVDSPVEGGQSEAPPSLVSFAVSSEGTEQGEDPRSEKDHSRPHKHRARHARLRRSESLSEKQVKEAKSKCKSIALLLTDAPNPNSKGVLMFKKRRRRARKYTLVSYGTGELEREADEEEEGDKEDTCEVAFLGASESEVDEELLSDVDDNTQVVNFDWDSGLVDIEKKLNRGDKMEMLPDTTGKGALMFAKRRERMDQITAQKEEDKVGGTPSREQDAAQTDGLRTTTSYQRKEEESVRTQSSVSKSYIEVSHGLGHVPQQNGFSGTSETANIQRMVPMNRTAKPFPGSVNQPATPFSPTRNMTSPIADFPAPPPYSAVTPPPDAFSRGVSSPIAGPAQPPPWPQPAPWSQPAFYDSSERIASRDERISVPAKRTGILQEAKRRSTTKPMFTFKEPKVSPNPELLSLLQNSEGKRGTGAGGDSGPEEDYLSLGAEACNFMQSSSAKQKTPPPVAPKPAVKSSSSQPVTPVSPVWSPGVAPTQPPAFPTSNPSKGTVVSSIKIAQPSYPPARPASTLNVAGPFKGPQAAVASQNYTPKPTVSTPTVNAVQPGAVGPSNELPGMSGRGAQLFAKRQSRMEKYVVDSDTVQAHAARAQSPTPSLPASWKYSSNVRAPPPVAYNPIHSPSYPLAALKSQPSAAQPSKMGKKKGKKPLNALDVMKHQPYQLNASLFTFQPPDAKDGLPQKSSVKVNSALAMKQALPPRPVNAASPTNVQASSVYSVPAYTSPPSFFAEASSPVSASPVPVGIPTSPKQESASSSYFVAPRPKFSAKKSGVTIQESGRSLSLPGRSVPPPISTSPWVYQPTYSYSSKPTDGLEKANKRPTPWEAAAKSPLGLVDDAFQPRNIQESIVANVVSAARRKVLPGPPEDWNERLSYIPQTQKAYMGSCGRQEYNVTANNNMSTTSQYGSQLPYAYYRQASRNDSAIMSMETRSDYCLPVADYNYNPHPRGWRRQT

SEQ ID NO: 578 - protein, 491 aa, Homo sapiens
MKRMVSWSFHKLKTMKHLLLLLLCVFLVKSQGVNDNEEGFFSARGHRPLDKKREEAPSLRPAPPPISGGGYRARPAKAAATQKKVERKAPDAGGCLHADPDLGVLCPTGCQLQEALLQQERPIRNSVDELNNNVEAVSQTSSSSFQYMYLLKDLWQKRQKQVKDNENVVNEYSSELEKHQLYIDETVNSNIPTNLRVLRSILENLRSKIQKLESDVSAQMEYCRTPCTVSCNIPVVSGKECEEIIRKGGETSEMYLIQPDSSVKPYRVYCDMNTENGGWTVIQNRQDGSVDFGRKWDPYKQGFGNVATNTDGKNYCGLPGEYWLGNDKISQLTRMGPTELLIEMEDWKGDKVKAHYGGFTVQNEANKYQISVNKYRGTAGNALMDGASQLMGENRTMTIHNGMFFSTYDRDNDGWLTSDPRKQCSKEDGGGWWYNRCHAANPNGRYYWGGQYTWDMAKHGTDDGVVWMNWKGSWYSMRKMSMKIRPFFPQQ

SEQ ID NO: 579 - protein, 974 aa, Homo sapiens
MAGRVPSLLVLLVFPSSCLAFRSPLSVFKRFKETTRPFSNECLGTTRPVVPIDSSDFALDIRMPGVTPKQSDTYFCMSMRIPVDEEAFVIDFKPRASMDTVHHMLLFGCNMPSSTGSYWFCDEGTCTDKANILYAWARNAPPTRLPKGVGFRVGGETGSKYFVLQVHYGDISAFRDNNKDCSGVSLHLTRLPQPLIAGMYLMMSVDTVIPAGEKVVNSDISCHYKNYPMHVFAYRVHTHHLGKVVSGYRVRNGQWTLIGRQSPQLPQAFYPVGHPVDVSFGDLLAARCVFTGEGRTEATHIGGTSSDEMCNLYIMYYMEAKHAVSFMTCTQNVAPDMFRTIPPEANIPIPVKSDMVMMHEHHKETEYKDKIPLLQQPKREEEEVLDQGDFYSLLSKLLGEREDVVHVHKYNPTEKAESESDLVAEIANVVQKKDLGRSDAREGAEHERGNAILVRDRIHKFHRLVSTLRPPESRVFSLQQPPPGEGTWEPEHTGDFHMEEALDWPGVYLLPGQVSGVALDPKNNLVIFHRGDHVWDGNSFDSKFVYQQIGLGPIEEDTILVIDPNNAAVLQSSGKNLFYLPHGLSIDKDGNYWVTDVALHQVFKLDPNNKEGPVLILGRSMQPGSDQNHFCQPTDVAVDPGTGAIYVSDGYCNSRIVQFSPSGKFITQWGEESSGSSPLPGQFTVPHSLALVPLLGQLCVADRENGRIQCFKTDTKEFVREIKHSSFGRNVFAISYIPGLLFAVNGKPHFGDQEPVQGFVMNFSNGEIIDIFKPVRKHFDMPHDIVASEDGTVYIGDAHTNTVWKFTLTEKLEHRSVKKAGIEVQEIKEAEAVVETKMENKPTSSELQKMQEKQKLIKEPGSGVPVVLITTLLVIPVVVLLAIAIFIRWKKSRAFGADSEHKLETSSGRVLGRFRGKGSGGLNLGNFFASRKGYSRKGFDRLSTEGSDQEKEDDGSESEEEYSAPLPALAPSSS

SEQ ID NO: 580 - protein, 1393 aa, Homo sapiens
MLSRPKPGESEVDLLHFQSQFLAAGAAPAVQLVKKGNRGGGDANSDRPPLQDHRDVVMLDNLPDLPPALVPSPPKRARPSPGHCLPEDEDPEERLRRHDQHITAVLTKIIERDTSSVAVNLPVPSGVAFPAVFLRSRDTQGKSATSGKRSIFAQEIAARRIAEAKGPSVGEVVPNVGPPEGAVTCETPTPRNQGCQLPGSSHSFQGPNLVTGKGLRDQEAEQEAQTIHEENIARLQAMAPEEILQEQQRLLAQLDPSLVAFLRSHSHTQEQTGETASEEQRPGGPSANVTKEEPLMSAFASEPRKRDKLEPEAPALALPVTPQKEWLHMDTVELEKLHWTQDLPPVRRQQTQERMQARFSLQGELLAPDVDLPTHLGLHHHGEEAERAGYSLQELFHLTRSQVSQQRALALHVLAQVISRAQAGEFGDRLAGSVLSLLLDAGFLFLLRFSLDDRVDGVIATAIRALRALLVAPGDEELLDSTFSWYHGALTFPLMPSQEDKEDEDEDEECPAGKAKRKSPEEESRPPPDLARHDVIKGLLATSLLPRLRYVLEVTYPGPAVVLDILAVLIRLARHSLESATRVLECPRLIETIVREFLPTSWSPVGAGPTPSLYKVPCATAMKLLRVLASAGRNIAARLLSSFDLRSRLCRIIAEAPQELALPPEEAEMLSTEALRLWAVAASYGQGGYLYRELYPVLMRALQVVPRELSTHPPQPLSMQRIASLLTLLTQLTLAAGSTPAETISDSAEASLSATPSLVTWTQVSGLQPLVEPCLRQTLKLLSRPEMWRAVGPVPVACLLFLGAYYQAWSQQPSSCPEDWLQDMQRLSEELLLPLLSQPTLGSLWDSLRHCSLLCNPLSCVPALEAPPSLVSLGCSGGCPRLSLAGSASPFPFLTALLSLLNTLAQIHKGLCGQLAAILAAPGLQNYFLQCVAPGAAPHLTPFSAWALRHEYHLQYLALALAQKAAALQPLPATHAALYHGMALALLSRLLPGSEYLTHELLLSCVFRLEFLPERTSGGPEAADFSDQLSLGSSRVPRCGQGTLLAQACQDLPSIRNCYLTHCSPARASLLASQALHRGELQRVPTLLLPMPTEPLLPTDWPFLPLIRLYHRASDTPSGLSPTDTMGTAMRVLQWVLVLESWRPQALWAVPPAARLARLMCVFLVDSELFRESPVQHLVAALLAQLCQPQVLPNLNLDCRLPGLTSFPDLYANFLDHFEAVSFGDHLFGALVLLPLQRRFSVTLRLALFGEHVGALRALSLPLTQLPVSLECYTVPPEDNLALLQLYFRTLVTGALRPRWCPVLYAVAVAHVNSFIFSQDPQSSDEVKAARRSMLQKTWLLADEGLRQHLLHYKLPNSTLPEGFELYSQLPPLRQHYLQRLTSTVLQNGVSET

SEQ ID NO: 581 - protein, 459 aa, Homo sapiens
MTILGTTFGMVFSLLQVVSGESGYAQNGDLEDAELDDYSFSCYSQLEVNGSQHSLTCAFEDPDVNITNLEFEICGALVEVKCLNFRKLQEIYFIETKKFLLIGKSNICVKVGEKSLTCKKIDLTTIVKPEAPFDLSVVYREGANDFVVTFNTSHLQKKYVKVLMHDVAYRQEKDENKWTHVNLSSTKLTLLQRKLQPAAMYEIKVRSIPDHYFKGFWSEWSPSYYFRTPEINNSSGEMDPILLTISILSFFSVALLVILACVLWKKRIKPIVWPSLPDHKKTLEHLCKKPRKNLNVSFNPESFLDCQIHRVDDIQARDEVEGFLQDTFPQQLEESEKQRLGGDVQSPNCPSEDVVITPESFGRDSSLTCLAGNVSACDAPILSSSRSLDCRESGKNGPHVYQDLLLSLGTTNSTLPPPFSLQSGILTLNPVAQGQPILTSLGSNQEEAYVTMSSFYQNQ

SEQ ID NO: 582 - protein, 640 aa, Homo sapiens
MGQPSLTWMLMVVVASWFITTAATDTSEARWCSECHSNATCTEDEAVTTCTCQEGFTGDGLTCVDLDECAIPGAHNCSANSSCVNTPGSFSCVCPEGFRLSPGLGCTDVDECAEPGLSHCHALATCVNVVGSYLCVCPAGYRGDGWHCECSPGSCGPGLDCVPEGDALVCADPCQAHRTLDEYWRSTEYGEGYACDTDLRGWYRFVGQGGARMAETCVPVLRCNTAAPMWLNGTHPSSDEGIVSRKACAHWSGHCCLWDASVQVKACAGGYYVYNLTAPPECHLAYCTDPSSVEGTCEECSIDEDCKSNNGRWHCQCKQDFNITDISLLEHRLECGANDMKVSLGKCQLKSLGFDKVFMYLSDSRCSGFNDRDNRDWVSVVTPARDGPCGTVLTRNETHATYSNTLYLADEIIIRDLNIKINFACSYPLDMKVSLKTALQPMVSALNIRVGGTGMFTVRMALFQTPSYTQPYQGSSVTLSTEAFLYVGTMLDGGDLSRFALLMTNCYATPSSNATDPLKYFIIQDRCPHTRDSTIQVVENGESSQGRFSVQMFRFAGNYDLVYLHCEVYLCDTMNEKCKPTCSGTRFRSGSVIDQSRVLNLGPITRKGVQATVSRAFSSLGLLKVWLPLLLSATLTLTFQ

SEQ ID NO: 583 - protein, 1044 aa, Homo sapiens
MGVALRKLTQWTAAGHGTGILEITPLNEAILKEIIVFVESFIYKHPQEAKFVFVEPLEWNTSLAPSAFESGYVVSETTVKSEEVDKNGQPLLFLSVPQIKIRSFGQLSRLLLIAKTGKLKEAQACVEANRDPIVKILGSDYNTMKENSIALNILGKITRDDDPESEIKMKIAMLLKQLDLHLLNHSLKHISLEISLSPMTVKKDIELLKRFSGKGNQTVLESIEYTSDYEFSNGCRAPPWRQIRGEICYVLVKPHDGETLCITCSAGGVFLNGGKTDDEGDVNYERKGSIYKNLVTFLREKSPKFSENMSKLGISFSEDQQKEKDQLGKAPKKEEAAALRKDISGSDKRSLEKNQINFWRNQMTKRWEPSLNWKTTVNYKGKGSAKEIQEDKHTGKLEKPRPSVSHGRAQLLRKSAEKIEETVSDSSSESEEDEEPPDHRQEASADLPSEYWQIQKLVKYLKGGNQTATVIALCSMRDFSLAQETCQLAIRDVGGLEVLINLLETDEVKCKIGSLKILKEISHNPQIRQNIVDLGGLPIMVNILDSPHKSLKCLAAETIANVAKFKRARRVVRQHGGITKLVALLDCAHDSTKPAQSSLYEARDVEVARCGALALWSCSKSHTNKEAIRKAGGIPLLARLLKTSHENMLIPVVGTLQECASEENYRAAIKAERIIENLVKNLNSENEQLQEHCAMAIYQCAEDKETRDLVRLHGGLKPLASLLNNTDNKERLAAVTGAIWKCSISKENVTKFREYKAIETLVGLLTDQPEEVLVNVVGALGECCQERENRVIVRKCGGIQPLVNLLVGINQALLVNVTKAVGACAVEPESMMIIDRLDGVRLLWSLLKNPHPDVKASAAWALCPCIKNAKDAGEMVRSFVGGLELIVNLLKSDNKEVLASVCAAITNIAKDQENLAVITDHGVVPLLSKLANTNNNKLRHHLAEAISRCCMWGRNRVAFGEHKAVAPLVRYLKSNDTNVHRATAQALYQLSEDADNCITMHENGAVKLLLDMVGSPDQDLQEAAAGCISNIRRLALATEKARYT

SEQ ID NO: 584 - protein, 99 aa, Homo sapiens
MTSKLAVALLAAFLISAALCEGAVLPRSAKELRCQCIKTYSKPFHPKFIKELRVIESGPHCANTEIIVKLSDGRELCLDPKENWVQRVVEKFLKRAENS

SEQ ID NO: 585 - protein, 375 aa, Homo sapiens
MSTAGKVIKCKAAVLWEVKKPFSIEDVEVAPPKAYEVRIKMVAVGICHTDDHVVSGNLVTPLPVILGHEAAGIVESVGEGVTTVKPGDKVIPLFTPQCGKCRVCKNPESNYCLKNDLGNPRGTLQDGTRRFTCRGKPIHHFLGTSTFSQYTVVDENAVAKIDAASPLEKVCLIGCGFSTGYGSAVNVAKVTPGSTCAVFGLGGVGLSAVMGCKAAGAARIIAVDINKDKFAKAKELGATECINPQDYKKPIQEVLKEMTDGGVDFSFEVIGRLDTMMASLLCCHEACGTSVIVGVPPASQNLSINPMLLLTGRTWKGAVYGGFKSKEGIPKLVADFMAKKFSLDALITHVLPFEKINEGFDLLHSGKSIRTVLTF

SEQ ID NO: 586 - protein, 647 aa, Homo sapiens
MAAPAGGGGSAVSVLAPNGRRHTVKVTPSTVLLQVLEDTCRRQDFNPCEYDLKFQRSVLDLSLQWRFANLPNNAKLEMVPASRSREGPENMVRIALQLDDGSRLQDSFCSGQTLWELLSHFPQIRECLQHPGGATPVCVYTRDEVTGEAALRGTTLQSLGLTGGSATIRFVMKCYDPVGKTPGSLGSSASAGQAAASAPLPLESGELSRGDLSRPEDADTSGPCCEHTQEKQSTRAPAAAPFVPFSGGGQRLGGPPGPTRPLTSSSAKLPKSLSSPGGPSKPKKSKSGQDPQQEQEQERERDPQQEQERERPVDREPVDREPVVCHPDLEERLQAWPAELPDEFFELTVDDVRRRLAQLKSERKRLEEAPLVTKAFREAQIKEKLERYPKVALRVLFPDRYVLQGFFRPSETVGDLRDFVRSHLGNPELSFYLFITPPKTVLDDHTQTLFQPQLGDRVAPFTLGPSLKRCLGPEQRTRLPVVGDGGDVDSGRLLFWGPSRGRASPSTGQPPCHPVCRPSSPPSPRPSSGDPSRVKAGHKHVGTGRANLFPAALVHLGAEEPAGVYLEPGLLEHAISPSAADVLVARYMSRAAGSPSPLPAPDPAPKSEPAAEEGALVPPEPIPGTAQPVKRSLGKVPKWLKLPASKR

SEQ ID NO: 587 - protein, 314 aa, Homo sapiens
MENNTEVTEFILVGLTDDPELQIPLFIVFLFIYLITLVGNLGMIELILLDSCLHTPMYFFLSNLSLVDFGYSSAVTPKVMVGFLTGDKFILYNACATQFFFFVAFITAESFLLASMAYDRYAALCKPLHYTTTMTTNVCACLAIGSYICGFLNASIHTGNTFRLSFCRSNVVEHFFCDAPPLLTLSCSDNYISEMVIFFVVGFNDLFSILVILISYLFIFITIMKMRSPEGRQKAFSTCASHLTAVSIFYGTGIFMYLRPNSSHFMGTDKMASVFYAIVIPMLNPLVYSLRNKEVKSAFKKTVGKAKASIGFIF

SEQ ID NO: 588 - protein, 670 aa, Homo sapiens
MEEFRRSYSRLCRESGAEPQEAVLQQLHQLPRGRLDLATQSLTVETCRALGKLLPRETLCTELVLSDCMLSEEGATLLLRGLCANTVLRFLDLKGNNLRAAGAEALGKLLQQNKSIQSLTLEWNSLGTWDDAFATFCGGLAANGALQRLDLRNNQISHKGAEELALALKGNTTLQQLDLRWNNVGLLGGRALMNCLPSNRTLWRLDLAGNNIPGDVLRAVEQAMGHSQDRLTTFQENQARTHVLSKEVQHLREEKSKQFLDLMETIDKQREEMAKSSRASAARVGQLQEALNERHSIINALKAKLQMTEAALALSEQKAQDLGELLATAEQEQLSLSQRQAKELKLEQQEAAERESKLLRDLSAANEKNLLLQNQVDELERKFRCQQEQLFQTRQEMTSMSAELKMRAIQAEERLDMEKRRCRQSLEDSESLRIKEVEHMTRHLEESEKAMQERVQRLEAARLSLEEELSRVKAAALSERGQAEEELIKAKSQARLEEQQRLAHLEDKLRLLAQARDEAQGACLQQKQVVAEAQTRVSQLGLQVEGLRRRLEELQQELSLKDQERVAEVSRVRVELQEQNGRLQAELAAQEALREKAAALERQLKVMASDHREALLDRESENASLREKLRLREAEIARIRDEEAQRASFLQNAVLAYVQASPVRTLSPPK

SEQ ID NO: 589 - protein, 195 aa, Homo sapiens
MENHKSNNKENITIVDISRKINQLPEAERNLLENGSVYVGLNAALCGLIANSLFRRILNVTKARIAAGLPMAGIPFLTTDLTYRCFVSFPLNTGDLDCETCTITRSGLTGLVIGGLYPVFLAIPVNGGLAARYQSALLPHKGNILSYWIRTSKPVFRKMLFPILLQTMFSAYLGSEQYKLLIKALQLSEPGKEIH

SEQ ID NO: 590 - protein, 510 aa, Homo sapiens
MDGFYDQQVPFMVPGKSRSEECRGRPVIDRKRKFLDTDLAHDSEELFQDLSQLQEAWLAEAQVPDDEQFVPDFQSDNLVLHAPPPTKIKRELHSPSSELSSCSHEQALGANYGEKCLYNYCAYDRKPPSGFKPLTPPTTPLSPTHQNPLFPPPQATLPTSGHAPAAGPVQGVGPAPAPHSLPEPGPQQQTFAVPRPPHQPLQMPKMMPENQYPSEQRFQRQLSEPCHPFPPQPGVPGDNRPSYHRQMSEPIVPAAPPPPQGFKQEYHDPLYEHGVPGMPGPPAHGFQSPMGIKQEPRDYCVDSEVPNCQSSYMRGGYFSSSHEGFSYEKDPRLYFDDTCVVPERLEGKVKQEPTMYREGPPYQRRGSLQLWQFLVTLLDDPANAHFIAWTGRGMEFKLIEPEEVARRWGIQKNRPAMNYDKLSRSLRYYYEKGIMQKVAGERYVYKFVCDPDALFSMAFPDNQRPFLKAESECHLSEEDTLPLTHFEDSPAYLLDMDRCSSLPYAEGFAY

SEQ ID NO: 591 - protein, 230 aa, Homo sapiens
MLKNPYTIKKQPLHQFVQRPLFPLPAAFYHPVRYMFIQTQDTPNPNSLKFIPGKPVLETRTMDFPTPAAAFRSPLARQLFRIEGVKSVFFGPDFITVTKENEELDWNLLKPDIYATIMDFFASGLPLVTEETPSGEAGSEEDDEVVAMIKELLDTRIRPTVQEDGGDVIYKGFEDGIVQLKLQGSCTSCPSSIITLKNGIQNMLQFYIPEVEGVEQVMDDESDEKEANSP

SEQ ID NO: 592 - protein, 153 aa, Homo sapiens
MLRLRSGLRHLRATPNTRGSARLLCAEMPKKAGATTKGKSQSKEPERPLPPLGPVAVDPKGCVTIAIHAKPGSKQNAVTDLTAEAVNVAIAAPPSEGEANAELCRYLSKVLELRKSDVVLDKGGKSREKVVKLLASTTPEEILEKLKKEAKKT

SEQ ID NO: 593 - protein, 156 aa, Homo sapiens
MEPAAGSSMEPSADWLATAAARGRVEEVRALLEAGALPNAPNSYGRRPIQVMMMGSARVAELLLLHGAEPNCADPATLTRPVHDAAREGFLDTLVVLHRAGARLDVRDAWGRLPVDLAEELGHRDVARYLRAAAGGTRGSNHARIDAAEGPSDIPD

SEQ ID NO: 594 - protein, 173 aa, Homo sapiens
MAPVLSKDSADIESILALNPRTQTHATLCSTSAKKLDKKHWKRNPDKNCFNCEKLENNFDDIKHTTLGERGALREAMRCLKCADAPCQKSCPTNLDIKSFITSIANKNYYGAAKMIFSDNPLGLTCGMVCPTSDLCVGGCNLYATEEGPINIGGLQQFATETLILAFSLMNHL

SEQ ID NO: 595 - protein, 323 aa, Homo sapiens
MGNSASRSDFEWVYTDQPHTQRRKEILAKYPAIKALMRPDPRLKWAVLVLVLVQMLACWLVRGLAWRWLLFWAYAFGGCVNHSLTLAIHDISHNAAFGTGRAARNRWLAVFANLPVGVPYAASFKKYHVDHHRYLGGDGLDVDVPTRLEGWFFCTPARKLLWLVLQPFFYSLRPLCVHPKAVTRMEVLNTLVQLAADLAIFALWGLKPVVYLLASSFLGLGLHPISGHFVAEHYMFLKGHETYSYYGPLNWITFNVGYHVEHHDFPSIPGYNLPLVRKIAPEYYDHLPQHHSWVKVLWDFVFEDSLGPYARVKRVYRLAKDGL

SEQ ID NO: 596 - protein, 1798 aa, Homo sapiens
MELTSRERGRGQPLPWELRLGLLLSVLAATLAQAPAPDVPGCSRGSCYPATGDLLVGRADRLTASSTCGLNGPQPYCIVSHLQDEKKCFLCDSRRPFSARDNPHSHRIQNVVTSFAPQRRAAWWQSENGIPAVTIQLDLEAEFHFTHLIMTFKTFRPAAMLVERSADFGRTWHVYRYFSYDCGADFPGVPLAPPRHWDDVVCESRYSEIEPSTEGEVIYRVLDPAIPIPDPYSSRIQNLLKITNLRVNLTRLHTLGDNLLDPRREIREKYYYALYELVVRGNCFCYGHASECAPAPGAPAHAEGMVHGACICKHNTRGLNCEQCQDFYRDLPWRPAEDGHSHACRKCECHGHTHSCHFDMAVYLASGNVSGGVCDGCQHNTAGRHCELCRPFFYRDPTKDLRDPAVCRSCDCDPMGSQDGGRCDSHDDPALGLVSGQCRCKEHVVGTRCQQCRDGFFGLSISDRLGCRRCQCNARGTVPGSTPCDPNSGSCYCKRLVTGRGCDRCLPGHWGLSHDLLGCRPCDCDVGGALDPQCDEGTGQCHCRQHMVGRRCEQVQPGYFRPFLDHLIWEAEDTRGQVLDVVERLVTPGETPSWTGSGFVRLQEGQTLEFLVASVPKAMDYDLLLRLEPQVPEQWAELELIVQRPGPVPAHSLCGHLVPKDDRIQGTLQPHARYLIFPNPVCLEPGISYKLHLKLVRTGGSAQPETPYSGPGLLIDSLVLLPRVLVLEMFSGGDAAALERQATFERYQCHEEGLVPSKTSPSEACAPLLISLSTLIYNGALPCQCNPQGSLSSECNPHGGQCLCKPGVVGRRCDLCAPGYYGFGPTGCQACQCSHEGALSSLCEKTSGQCLCRTGAFGLRCDRCQRGQWGFPSCRPCVCNGHADECNTHTGACLGCRDHTGGEHCERCIAGFHGDPRLPYGGQCRPCPCPEGPGSQRHFATSCHQDEYSQQIVCHCRAGYTGLRCEACAPGHFGDPSRPGGRCQLCECSGNIDPMDPDACDPHTGQCLRCLHHTEGPHCAHCKPGFHGQAARQSCHRCTCNLLGTNPQQCPSPDQCHCDPSSGQCPCLPNVQGPSCDRCAPNFWNLTSGHGCQPCACHPSRARGPTCNEFTGQCHCRAGFGGRTCSECQELHWGDPGLQCHACDCDSRGIDTPQCHRFTGHCSCRPGVSGVRCDQCARGFSGIFPACHPCHACFGDWDRVVQDLAARTQRLEQRAQELQQTGVLGAFESSFWHMQEKLGIVQGIVGARNTSAASTAQLVEATEELRREIGEATEHLTQLEADLTDVQDENFNANHALSGLERDRLALNLTLRQLDQHLDLLKHSNFLGAYDSIRHAHSQSAEAERRANTSALAVPSPVSNSASARHRTEALMDAQKEDFNSKHMANQRALGKLSAHTHTLSLTDINELVCGAPGDAPCATSPCGGAGCRDEDGQPRCGGLSCNGAAATADLALGRARHTQAELQRALAEGGSILSRVAETRRQASEAQQRAQAALDKANASRGQVEQANQELQELIQSVKDFLNQEGADPDSIEMVATRVLELSIPASAEQIQHLAGAIAERVRSLADVDAILARTVGDVRRAEQLLQDARRARSWAEDEKQKAETVQAALEEAQRAQGIAQGAIRGAVADTRDTEQTLYQVQERMAGAERALSSAGERARQLDALLEALKLKRAGNSLAASTAEETAGSAQGRAQEAEQLLRGPLGDQYQTVKALAERKAQGVLAAQARAEQLRDEARDLLQAAQDKLQRLQELEGTYEENERALESKAAQLDGLEARMRSVLQAINLQVQIYNTCQ

SEQ ID NO: 597 - protein, 529 aa, Homo sapiens
MSRQLNIKSSGDKGNFSVHSAVVPRKAVGSLASYCAAGRGAGAGFGSRSLYSLGGNRRISFNVAGGGVRAGGYGFRPGSGYGGGRASGFAGSMFGSVALGPACLSVCPPGGIHQVTVNKSLLAPLNVELDPEIQKVRAQEREQIKVLNDKFASFIDKVRFLEQQNQVLETKWELLQQLDLNNCKKNLEPILEGYISNLRKQLETLSGDRVRLDSELRSMRDLVEDYKKRYEVEINRRTTAENEFVVLKKDADAAYAVKVELQAKVDSLDKEIKFLKCLYDAEIAQIQTHASETSVILSMDNNRDLDLDSIIAEVRMHYEEIALKSKAEAEALYQTKIQELQLAASRHGDDLKHTRSEMVELNRLIQRIRCEIGNVKKQRASLETAIADAEQRGDNALKDAQAKLDELEGALHQAKEELARMLREYQELMSLKLALDMEIATYRKLLEGEECRMSGENPSSVSISVISSSSYSYHHPSSAGVDLGASAVAGSSGSTQSGQTKTTEARGGDLKDTQGKSTPASIPARKATR

SEQ ID NO: 598 - protein, 1161 aa, Homo sapiens
MDEETRHSLECIQANQIFPRKQLIREDENLQVPFLELHGESTEFVGRAEDAIIALSNYRLHIKFKESLVNVPLQLIESVECRDIFQLHLTCKDCKVIRCQFSTFEQCQEWLKRLNNAIRPPAKIEDLFSFAYHAWCMEVYASEKEQHGDLCRPGEHVTSRFKNEVERMGFDMNNAWRISNINEKYKLCGSYPQELIVPAWITDKELESVSSFRSWKRIPAVIYRHQSNGAVIARCGQPEVSWWGWRNADDEHLVQSVAKACASDSRSSGSKLSTRNTSRDFPNGGDLSDVEFDSSLSNASGAESLAIQPQKLLILDARSYAAAVANRAKGGGCECPEYYPNCEVVFMGMANIHSIRRSFQSLRLLCTQMPDPGNWLSALESTKWLHHLSVLLKSALLVVHAVDQDQRPVLVHCSDGWDRTPQIVALAKLLLDPYYRTIEGFQVLVEMEWLDFGHKFADRCGHGENSDDLNERCPVFLQWLDCVHQLQRQFPCSFEFNEAFLVKLVQHTYSCLFGTFLCNNAKERGEKHTQERTCSVWSLLRAGNKAFKNLLYSSQSEAVLYPVCHVRNLMLWSAVYLPCPSPTTPVDDSCAPYPAPGTSPDDPPLSRLPKTRSYDNLTTACDNTVPLASRRCSDPSLNEKWQEHRRSLELSSLAGPGEDPLSADSLGKPTRVPGGAELSVAAGVAEGQMENILQEATKEESGVEEPAHRAGIEIQEGKEDPLLEKESRRKTPEASAIGLHQDPELGDAALRSHLDMSWPLFSQGISEQQSGLSVLLSSLQVPPRGEDSLEVPVEQFRIEEIAEGREEAVLPIPVDAKVGYGTSQSCSLLPSQVPFETRGPNVDSSTDMLVEDKVKSVSGPQGHHRSCLVNSGKDRLPQTMEPSPSETSLVERPQVGSVVHRTSLGSTLSLTRSPCALPLAECKEGLVCNGAPETENRASEQPPGLSTLQMYPTPNGHCANGEAGRSKDSLSRQLSAMSCSSAHLHSRNLHHKWLHSHSGRPSATSSPDQPSRSHLDDDGMSVYTDTIQQRLRQIESGHQQEVETLKKQVQELKSRLESQYLTSSLHFNGDFGDEVMTRWLPDHLAAHCYACDSAFWLASRKHHCRNCGNVFCSSCCNQKVPVPSQQLFEPSRVCKSCYSSLHPTSSSIDLELDKPIAATSN

SEQ ID NO: 599 - protein, 995 aa, Homo sapiens
MEDEAVLDRGASFLKHVCDEEEVEGHHTIYIGVHVPKSYRRRRRHKRKTGHKEKKEKERISENYSDKSDIENADESSSSILKPLISPAAERIRFILGEEDDSPAPPQLFTELDELLAVDGQEMEWKETARWIKFEEKVEQGGERWSKPHVATLSLHSLFELRTCMEKGSIMLDREASSLPQLVEMIVDHQIETGLLKPELKDKVTYTLLRKHRHQTKKSNLRSLADIGKTVSSASRMFTNPDNGSPAMTHRNLTSSSLNDISDKPEKDQLKNKFMKKLPRDAEASNVLVGEVDFLDTPFIAFVRLQQAVMLGALTEVPVPTRFLFILLGPKGKAKSYHEIGRAIATLMSDEVFHDIAYKAKDRHDLIAGIDEFLDEVIVLPPGEWDPAIRIEPPKSLPSSDKRKNMYSGGENVQMNGDTPHDGGHGGGGHGDCEELQRTGRFCGGLIKDIKRKAPFFASDFYDALNIQALSAILFIYLATVTNAITFGGLLGDATDNMQGVLESFLGTAVSGAIFCLFAGQPLTILSSTGPVLVFERLLFNFSKDNNFDYLEFRLWIGLWSAFLCLILVATDASFLVQYFTRFTEEGFSSLISFIFIYDAFKKMIKLADYYPINSNFKVGYNTLFSCTCVPPDPANISISNDTTLAPEYLPTMSSTDMYHNTTFDWAFLSKKECSKYGGNLVGNNCNFVPDITLMSFILFLGTYTSSMALKKFKTSPYFPTTARKLISDFAIILSILIFCVIDALVGVDTPKLIVPSEFKPTSPNRGWFVPPFGENPWWVCLAAAIPALLVTILIFMDQQITAVIVNRKEHKLKFIPMPVLYGVFLYMGVASLNGVQFMDRLKLLLMPLKHQPDFIYLRHVPLRRVHLFTFLQVLCLALLWILKSTVAAIIFPVMILALVAVRKGMDYLFSQHDLSFLDDVIPEKDKKKKEDEKKKKKKKGSLDSDNDDSDCPYSEKVPSIKIPMDIMEQQPFLSDSKPSDRERSPTFLERHTSC

SEQ ID NO: 600 - protein, 960 aa, Homo sapiens
MLVVEAKFDGEQLATDPVDHTDQPEFATELAWEIDRKALHQHRLQRTPIKLQCFALDPVTSAKETIGYIVLDLRTAQETKQAPKWYQLLSNKYTKFKSEIQISIALETDTKPPVDSFKAKGAPPRDGKVPAILAGLDPRDIVAVLNEEGGYHQIGPAEYCTDSFIMSVTIAFATQLEQLIPCTMKLPERQPEFFFYYSLLGNDVTNEPFNDLINPNFEPERASVRIRSSVEILRVYLALQSKLQIHLCCGDQSLGSTEIPLTGLLKKGSTEINQHPVTVEGAFTLDPPNRAKQKLAPIPVELAPTVGVSVALQREGIDSQSLIELKTQNEHEPEHSKKKVLTPIKEKTLTGPKSPTVSPVPSHNQSPPTKDDATESEVESLQYDKDTKPNPKASSSVPASLAQLVTTSNASEVASGQKIAVPATSHHFCFSIDLRSIHALEIGFPINCILRYSYPFFGSAAPIMTNPPVEVRKNMEVFLPQSYCAFDFATMPHQLQDTFLRIPLLVELWHKDKMSKDLLLGIARIQLSNILSSEKTRFLGSNGEQCWRQTYSESVPVIAAQGSNNRIADLSYTVTLEDYGLVKMREIFISDSSQGVSAVQQKPSSLPPAPCPSEIQTEPRETLEYKAALELEMWKEMQEDIFENQLKQKELAHMQALAEEWKKRDRERESLVKKKVAEYTILEGKLQKTLIDLEKREQQLASVESELQREKKELQSERQRNLQELQDSIRRAKEDCIHQVELERLKIKQLEEDKHRLQQQLNDAENKYKILEKEFQQFKDQQNNKPEIRLQSEINLLTLEKVELERKLESATKSKLHYKQQWGRALKELARLKQREQESQMARLKKQQEELEQMRLRYLAAEEKDTVKTERQELLDIRNELNRLRQQEQKQYQDSTEIASGKKDGPHGSVLEEGLDDYLTRLIEERDTLMRTGVYNHEDRIISELDRQIREILAKSNASN

SEQ ID NO: 601 - protein, 916 aa, Homo sapiens
METSQETSLFLVKILEELDSKQNTVSYQDLCKSLCARFDLSQLAKLRSVLFYTACLDPNFPATLFKDKMKCTVNNQQSKKIMVAADIVTIFNLIQMNGGAAKEKLPTGRQKVRKKEASFESCRSDTEICNAAECEPLNCELSERSFSRGYPIRQSSKCRKMDCKDCPQFVPASEPNFLLGVSKEVKNRAASLDRLQALAPYSVTSPQPCEMQRTYFPMNIENESISDQDSLPINQSIKETFISNEEPFVVQSCVQKRNIFKEDFHNLMAVSPSLVGPISKAENEHREPQSRKEPHKPPFFNHSFEMPYNSQYLNPVYSPVPDKRRAKHESLDDLQASTYFGPTPVMGTQEARRCLGKPNKQTPWPAKSWSLNTEEVPDFERSFFNRNPSEEKLHYPNASSQTPNFPAPERRPTYLVPKDQQPILPIAYAAKQNGLKSKEISSPVDLEKHEPVKKFKDKSINCTSGQLSSDTSSVGTQTEHVLEPKKCRDLCTSGQGKYSDRHTMKHSDDDSEIVSDDISDIFRFLDDMSISGSTGVIQSSCYNSTGSLSQLHKSDCDSSPEHNLTKIANGVPNSKGDKGNRPENTHHSEEELKTSVCKLVLRIGEIERKLESLSGVRDEISQVLGKLNKLDQKMQQPEKVSVQIDLNSLTSEGPSDDSASPRMFHAHSGSHGPKLENNPDWCCSDASGSNSESLRVKALKKSLFTRPSSRSLTEENSATESKIASISNSPRDWRTITYTNRVGLNEEEIKDTGPGDNKDWHRKSKEADRQYDIPPQHRLPKQPKDGFLVEQVFSPHPYPASLKAHMKSNPLYTDMRLTELAEVKRGQPSWTIEEYARNAGDKGKLTALDLQTQESLNPNNLEYWMEDIYTPGYDSLLKRKEAEFRRAKVCKIAALIAAAACTVILVIVVPICTMKS

SEQ ID NO: 602 - protein, 452 aa, Homo sapiens
MVQGGFPEKIRQRYADLPGELHIIELEKDKNGLGLSLAGNKDRSRMSIFVVGINPEGPAAADGRMRIGDELLEINNQILYGRSHQNASAIIKTAPSKVKLVFIRNEDAVNQMAVTPFPVPSSSPSSIEDQSGTEPISSEEDGSVEVGIKQLPESESFKLAVSQMKQQKYPTKVSFSSQEIPLAPASSYHSTDADFTGYGGFQAPLSVDPATCPIVPGQEMIIEISKGRSGLGLSIVGGKDTPLFWRLGSPRAWSQHLVRAFMLHHPVTEVEGQNAIVIHEVYEEGAAARDGRLWAGDQILEVNGVDLRNSSHEEAITALRQTPQKVRLVVYRDEAHYRDEENLEIFPVDLQKKAGRGLGLSIVGKRNGSGVFISDIVKGGAADLDGRLIQGDQILSVNGEDMRNASQETVATILKCAQGLVQLEIGRLRAGSWTSARTTSQNSQVVDGFSSD

SEQ ID NO: 603 - protein, 681 aa, Homo sapiens
MGSPVHRVSLGDTWSRQMHPDIESERYMQSFDVERLTNILDGGAQNTALRRKVESIIHSYPEFSCKDNYFMTQNERYKAAMRRAFHIRLIARRLGWLEDGRELGYAYRALSGDVALNIHRVFVRALRSLGSEEQIAKWDPLCKNIQIIATYAQTELGHGTYLQGLETEATYDAATQEFVIHSPTLTATKWWPGDLGRSATHALVQAQLICSGARRGMHAFIVPIRSLQDHTPLPGIIIGDIGPKMDFDQTDNGFLQLNHVRVPRENMLSRFAQVLPDGTYVKLGTAQSNYLPMVVVRVELLSGEILPILQKACVIAMRYSVIRRQSRLRPSDPEAKVLDYQTQQQKLFPQLAISYAFHFLAVSLLEFFQHSYTAILNQDFSFLPELHALSTGMKAMMSEFCTQGAEMCRRACGGHGYSKLSGLPSLVTKLSASCTYEGENTVLYLQVARFLVKSYLQTQMSPGSTPQRSLSPSVAYLTAPDLARCPAQRAADFLCPELYTTAWAHVAVRLIKDSVQHLQTLTQSGADQHEAWNQTTVIHLQAAKVHCYYVTVKGFTEALEKLENEPAIQQVLKRLCDLHAIHGILTNSGDFLHDAFLSGAQVDMARTAYLDLLRLIRKDAILLTDAFDFTDQCLNSALGCYDGNVYERLFQWAQKSPTNTQENPAYEEYIRPLLQSWRSKL

SEQ ID NO: 604 - protein, 1079 aa, Homo sapiens
MVCSAAPLLLLATTLPLLGSPVAQASQPVSETGVRPREGLQRRQWGPLIGRDKAWNERIDRPFPACPIPLSSSFGRWPKGQTMWAQTSTLTLTEEELGQSQAGGESGSGQLLDQENGAGESALVSVYVHLDFPDKTWPPELSRTLTLPAASASSSPRPLLTGLRLTTECNVNHKGNFYCACLSGYQWNTSICLHYPPCQSLHNHQPCGCLVFSHPEPGYCQLLPPGSPVTCLPAVPGILNLNSQLQMPGDTLSLTLHLSQEATNLSWFLRHPGSPSPILLQPGTQVSVTSSHGQAALSVSNMSHHWAGEYMSCFEAQGFKWNLYEVVRVPLKATDVARLPYQLSISCATSPGFQLSCCIPSTNLAYTAAWSPGEGSKASSFNESGSQCFVLAVQRCPMADTTYACDLQSLGLAPLRVPISITIIQDGDITCPEDASVLTWNVTKAGHVAQAPCPESKRGIVRRLCGADGVWGPVHSSCTDARLLALFTRTKLLQAGQGSPAEEVPQILAQLPGQAAEASSPSDLLTLLSTMKYVAKVVAEARIQLDRRALKNLLIATDKVLDMDTRSLWTLAQARKPWAGSTLLLAVETLACSLCPQDHPFAFSLPNVLLQSQLFGPTFPADYSISFPTRPPLQAQIPRHSLAPLVRNGTEISITSLVLRKLDHLLPSNYGQGLGDSLYATPGLVLVISIMAGDRAFSQGEVIMDFGNTDGSPHCVFWDHSLFQGRGGWSKEGCQAQVASASPTAQCLCQHLTAFSVLMSPHTVPEEPALALLTQVGLGASILALLVCLGVYWLVWRVVVRNKISYFRHAALLNMVFCLLAADTCFLGAPFLSPGPRSPLCLAAAFLCHFLYLATFFWMLAQALVLAHQLLFVFHQLAKHRVLPLMVLLGYLCPLGLAGVTLGLYLPQGQYLREGECWLDGKGGALYTFVGPVLAIIGVNGLVLAMAMLKLLRPSLSEGPPAEKRQALLGVIKALLILTPIFGLTWGLGLATLLEEVSTVPHYIFTILNTLQGVFILLFGCLMDRKIQEALRKRFCRAQAPSSTISLVSCCLQILSCASKSMSEGIPWPSSEDMGTARS

SEQ ID NO: 605 - protein, 753 aa, Homo sapiens
MERRAWSLQCTAFVLFCAWCALNSAKAKRQFVNEWAAEIPGGPEAASAIAEELGYDLLGQIGSLENHYLFKHKNHPRRSRRSAFHITKRLSDDDRVIWAEQQYEKERSKRSALRDSALNLFNDPMWNQQWYLQDTRMTAALPKLDLHVIPVWQKGITGKGVVITVLDDGLEWNHTDIYANYDPEASYDFNDNDHDPFPRYDPTNENKHGTRCAGEIAMQANNHKCGVGVAYNSKVGGIRMLDGIVTDAIEASSIGFNPGHVDIYSASWGPNDDGKTVEGPGRLAQKAFEYGVKQGRQGKGSIFVWASGNGGRQGDNCDCDGYTDSIYTISISSASQQGLSPWYAEKCSSTLATSYSSGDYTDQRITSADLHNDCTETHTGTSASAPLAAGIFALALEANPNLTWRDMQHLVVWTSEYDPLANNPGWKKNGAGLMVNSRFGFGLLNAKALVDLADPRTWRSVPEKKECVVKDNDFEPRALKANGEVIIEIPTRACEGQENAIKSLEHVQFEATIEYSRRGDLHVTLTSAAGTSTVLLAERERDTSPNGFKNWDFMSVHTWGENPIGTWTLRITDMSGRIQNEGRIVNWKLILHGTSSQPEHMKQPRVYTSYNTVQNDRRGVEKMVDPGEEQPTQENPKENTLVSKSPSSSSVGGRRDELEEGAPSQAMLRLLQSAFSKNSPPKQSPKKSPSAKLNIPYENFYEALEKLNKPSQLKDSEDSLYNDYVDVFYNTKPYKHRDDRLLQALVDILNEEN

SEQ ID NO: 606 - protein, 472 aa, Homo sapiens
MGCDRNCGLIAGAVIGAVLAVFGGILMPVGDLLIQKTIKKQVVLEEGTIAFKNWVKTGTEVYRQFWIFDVQNPQEVMMNSSNIQVKQRGPYTYRVRFLAKENVTQDAEDNTVSFLQPNGAIFEPSLSVGTEADNFTVLNLAVAAASHIYQNQFVQMILNSLINKSKSSMFQVRTLRELLWGYRDPFLSLVPYPVTTTVGLFYPYNNTADGVYKVFNGKDNISKVAIIDTYKGKRNLSYWESHCDMINGTDAASFPPFVEKSQVLQFFSSDICRSIYAVFESDVNLKGIPVYRFVLPSKAFASPVENPDNYCFCTEKIISKNCTSYGVLDISKCKEGRPVYISLPHFLYASPDVSEPIDGLNPNEEEHRTYLDIEPITGFTLQFAKRLQVNLLVKPSEKIQVLKNLKRNYIVPILWLNETGTIGDEKANMFRSQVTGKINLLGLIEMILLSVGVVMFVAFMISYCACRSKTIK

SEQ ID NO: 607 - protein, 582 aa, Homo sapiens
MSPAPRPPRCLLLPLLTLGTALASLGSAQSSSFSPEAWLQQYGYLPPGDLRTHTQRSPQSLSAAIAAMQKFYGLQVTGKADADTMKAMRRPRCGVPDKFGAEIKANVRRKRYAIQGLKWQHNEITFCIQNYTPKVGEYATYEAIRKAFRVWESATPLRFREVPYAYIREGHEKQADIMIFFAEGFHGDSTPFDGEGGFLAHAYFPGPNIGGDTHFDSAEPWTVRNEDLNGNDIFLVAVHELGHALGLEHSSDPSAIMAPFYQWMDTENFVLPDDDRRGIQQLYGGESGFPTKMPPQPRTTSRPSVPDKPKNPTYGPNICDGNFDTVAMLRGEMFVFKERWFWRVRNNQVMDGYPMPIGQFWRGLPASINTAYERKDGKFVFFKGDKHWVFDEASLEPGYPKHIKELGRGLPTDKIDAALFWMPNGKTYFFRGNKYYRFNEELRAVDSEYPKNIKVWEGIPESPRGSFMGSDEVFTYFYKGNKYWKFNNQKLKVEPGYPKSALRDWMGCPSGGRPDEGTEEETEVIIIEVDEEGGGAVSAAAVVLPVLLLLLVLAVGLAVFFFRRHGTPRRLLYCQRSLLDKV

SEQ ID NO: 608 - protein, 285 aa, Homo sapiens
MMAVDIEYRYNCMAPSLRQERFAFKISPKPSKPLRPCIQLSSKNEASGMVAPAVQEKKVKKRVSFADNQGLALTMVKVFSEFDDPLDMPFNITELLDNIVSLTTAESESFVLDFSQPSADYLDFRNRLQADHVCLENCVLKDKAIAGTVKVQNLAFEKTVKIRMTFDTWKSYTDFPCQYVKDTYAGSDRDTFSFDISLPEKIQSYERMEFAVYYECNGQTYWDSNRGKNYRIIRAELKSTQGMTKPHSGPDLGISFDQFGSPRCSYGLFPEWPSYLGYEKLGPYY

SEQ ID NO: 609 - protein, 1060 aa, Homo sapiens
MELWAPQRLPQTRGKATAPSKDPDRGFRRDGHHRPVPHSWHNGERFHQWQDNRGSPQPQQEPRADHQQQPHYASRPGDWHQPVSGVDYYEGGYRNQLYSRPGYENSYQSYQSPTMREEYAYGSYYYHGHPQWLQEERVPRQRSPYIWHEDYREQKYLDEHHYENQHSPFGTNSETHFQSNSRNPCKDSPASNSGQEWPGELFPGSLLAEAQKNKPSLASESNLLQQRESGLSSSSYELSQYIRDAPERDDPPASAAWSPVQADVSSAGPKAPMKFYIPHVPVSFGPGGQLVHVGPSSPTDGQAALVELHSMEVILNDSEEQEEMRSFSGPLIREDVHKVDIMTFCQQKAAQSCKSETLGSRDSALLWQLLVLLCRQNGSMVGSDIAELLMQDCKKLEKYKRQPPVANLINLTDEDWPVLSSGTPNLLTGEIPPSVETPAQIVEKFTRLLYYGRKKEALEWAMKNHLWGHALFLSSKMDPQTYSWVMSGFTSTLALNDPLQTLFQLMSGRIPQAATCCGEKQWGDWRPHLAVILSNQAGDPELYQRAIVAIGDTLAGKGLVEAAHFCYLMAHVPFGHYTVKTDHLVLLGSSHSQEFLKFATTEAIQRTEIFEYCQMLGRPKSFIPSFQVYKLLYASRLADYGLVSQALHYCEAIGAAVLSQGESSHPVLLVELIKLAEKLKLSDPLVLERRSGDRDLEPDWLAQLRRQLEQKVAGDIGDPHPTRSDISGAGGTTTENTFYQDFSGCQGYSEAPGYRSALWLTPEQTCLLQPSPQQPFPLQPGSYPAGGGAGQTGTPRPFYSVPETHLPGTGSSVAVTEATGGTVWEEMLQTHLGPGENTVSQETSQPPDGQEVISKPQTPLAARPRSISESSASSAKEDEKESSDEADKNSPRNTAQRGKLGDGKEHTKSSGFGWFSWFRSKPTKNASPAGDEDSSDSPDSEETPRASSPHQAGLGLSLTPSPESPPLPDVSAFSRGRGGGEGRGSASSGGAAAGAGVGGLSGPESVSFELCSNPGVLLPPPALKGAVPLYNPSQVPQLPTATSLNRPNRLAQRRYPTQPC

SEQ ID NO: 610 - protein, 499 aa, Homo sapiens
MAQFAFESDLHSLLQLDAPIPNAPPARWQRKAKEAAGPAPSPMRAANRSHSAGRTPGRTPGKSSSKVQTTPSKPGGDRYIPHRSAAQMEVASFLLSKENQPENSQTPTKKEHQKAWALNLNGFDVEEAKILRLSGKPQNAPEGYQNRLKVLYSQKATPGSSRKTCRYIPSLPDRILDAPEIRNDYYLNLVDWSSGNVLAVALDNSVYLWSASSGDILQLLQMEQPGEYISSVAWIKEGNYLAVGTSSAEVQLWDVQQQKRLRNMTSHSARVGSLSWNSYILSSGSRSGHIHHHDVRVAEHHVATLSGHSQEVCGLRWAPDGRHLASGGNDNLVNVWPSAPGEGGWVPLQTFTQHQGAVKAVAWCPWQSNVLATGGGTSDRHIRIWNVCSGACLSAVDAHSQVCSILWSPHYKELISGHGFAQNQLVIWKYPTMAKVAELKGHTSRVLSLTMSPDGATVASAAADETLRLWRCFELDPARRREREKASAAKSSLIHQGIR

SEQ ID NO: 611 - protein, 317 aa, Homo sapiens
MLRNGSIVTEFILVGFQQSSTSTRALLFALFLALYSLTMAMNGLIIFITSWTDPKLNSPMYFFLGHLSLLDVCFITTTIPQMLIHLVVRDHIVSFVCCMTQMYFVFCVGVAECILLAFMAYDRYVAICYPLNYVPIISQKVCVRLVGTAWFFGLINGIFLEYISFREPFRRDNHIESFFCEAPIVIGLSCGDPQFSLWAIFADAIVVILSPMVLTVTSYVHILATILSKASSSGRGKTFSTCASHLTVVIFLYTSAMFSYMNPHSTHGPDKDKPFSLLYTIITPMCNPIIYSFRNKEIKEAMVRALGRTRLAQPQSV

SEQ ID NO: 612 - protein, 352 aa, Homo sapiens
MTSSLLLAFLLLAPTTVATPRAGGQCPACGGPTLELESQRELLLDLAKRSILDKLHLTQRPTLNRPVSRAALRTALQHLHGVPQGALLEDNREQECEIISFAETGLSTINQTRLDFHFSSDRTAGDREVQQASLMFFVQLPSNTTWTLKVRVLVLGPHNTNLTLATQYLLEVDASGWHQLPLGPEAQAACSQGHLTLELVLEGQVAQSSVILGGAAHRPFVAARVRVGGKHQIHRRGIDCQGGSRMCCRQEFFVDFREIGWHDWIIQPEGYAMNFCIGQCPLHIAGMPGIAASFHTAVLNLLKANTAAGTTGGGSCCVPTARRPLSLLYYDRDSNIVKTDIPDMVVEACGCS

SEQ ID NO: 613 - protein, 629 aa, Homo sapiens
MTAEGPSPPARWHRRLPGLWAAALLLLGLPRLSVRADGKFFVLESQNGSQGLQLEAARLSCKSRGAHLASADELRRVVQDCSFAVCTTGWLADGTLGTTVCSKGSGEQQIMRAVDVRIESNPVPGGTYSALCIKDEEKPCGDPPSFPHTILQGRTGLEMGDELLYVCAPGHIMGHRETAFTLLCNSCGEWYGLVQACGKDEAEAHIDYEDNFPDDRSVSFRELMEDSRTEADEDRGQGDSSEEAPKQDRLVSISVGRENIARDKVFVPTTGLPGAGSSVPADSPGSRLLQKHLFWFPAEAFHKPGLEKEVDDDTKKQFSAGDNHSGVKLVPGEPETKVIYGNTDGPSGPFVGKNDSKAGDPVVSSSDESWLDGYPVTEGAWRKTEAEEEEDGDRGDGSVGLDENVLVTPDQPILVEVKKPKSSTLTPSEGMTHSSVLPSQMLDVEALALRPVNASETEGIGDGDLTKYQSTLPWRFITEESPMATLSYELTSSTLEILTVNTVKQTPNHIPSTIMATTQPPVETTVPEIQDSFPYLLSEDFFGQEGPGPGASEELHPTLESCVGDGCPGLSRGPVIATIVTVLCLLLLLAGVGMVWGYRKCQHKSSVYKLNVGQRQARHYHQQIEMEKV

SEQ ID NO: 614 - protein, 419 aa, Homo sapiens
MLAAAFADSNSSSMNVSFAHLHFAGGYLPSDSQDWRTIIPALLVAVCLVGFVGNLCVIGILLHNAWKGKPSMIHSLILNLSLADLSLLLFSAPIRATAYSKSVWDLGWFVCKSSDWFIHTCMAAKSLTIVVVAKVCFMYASDPAKQVSIHNYTIWSVLVAIWTVASLLPLPEWFFSTIRHHEGVEMCLVDVPAVAEEFMSMFGKLYPLLAFGLPLFFASFYFWRAYDQCKKRGTKTQNLRNQIRSKQVTVMLLSIAIISALLWLPEWVAWLWVWHLKAAGPAPPQGFIALSQVLMFSISSANPLIFLVMSEEFREGLKGVWKWMITKKPPTVSESQETPAGNSEGLPDKVPSPESPASIPEKEKPSSPSSGKGKTEKAEIPILPDVEQFWHERDTVPSVQDNDPIPWEHEDQETGEGVK

SEQ ID NO: 615 - protein, 811 aa, Homo sapiens
MRLIRNIYIFCSIVMTAEGDAPELPEERELMTNCSNMSLRKVPADLTPATTTLDLSYNLLFQLQSSDFHSVSKLRVLILCHNRIQQLDLKTFEFNKELRYLDLSNNRLKSVTWYLLAGLRYLDLSFNDFDTMPICEEAGNMSHLEILGLSGAKIQKSDFQKIAHLHLNTVFLGFRTLPHYEEGSLPILNTTKLHIVLPMDTNFWVLLRDGIKTSKILEMTNIDGKSQFVSYEMQRNLSLENAKTSVLLLNKVDLLWDDLFLILQFVWHTSVEHFQIRNVTFGGKAYLDHNSFDYSNTVMRTIKLEHVHFRVFYIQQDKIYLLLTKMDIENLTISNAQMPHMLFPNYPTKFQYLNFANNILTDELFKRTIQLPHLKTLILNGNKLETLSLVSCFANNTPLEHLDLSQNLLQHKNDENCSWPETVVNMNLSYNKLSDSVFRCLPKSIQILDLNNNQIQTVPKETIHLMALRELNIAFNFLTDLPGCSHFSRLSVLNIEMNFILSPSLDFVQSCQEVKTLNAGRNPFRCTCELKNFIQLETYSEVMMVGWSDSYTCEYPLNLRGTRLKDVHLHELSCNTALLIVTIVVIMLVLGLAVAFCCLHFDLPWYLRMLGQCTQTWHRVRKTTQEQLKRNVRFHAFISYSEHDSLWVKNELIPNLEKEDGSILICLYESYFDPGKSISENIVSFIEKSYKSIFVLSPNFVQNEWCHYEFYFAHHNLFHENSDHIILILLEPIPFYCIPTRYHKLKALLEKKAYLEWPKDRRKCGLFWANLRAAINVNVLATREMYELQTFTELNEESRGSTISLMRTDCL

SEQ ID NO: 616 - protein, 177 aa, Homo sapiens
MNWFGSNFFRCPEDLSLLNIYSPLLSHMSSEDEHFISNLRGHVPASAVVKQPVRGASGRTTITAIVQTGGGWSTGLFSVCRDRRICFCGLFCPMCLECDIARHYGECLCWPLLPGSTFALRIGTRERHKIQGTLCEDWLAVHCCWAFSICQVARELKMRTSQVYEICAVPMTKDTLV

SEQ ID NO: 617 - protein, 626 aa, Homo sapiens
MNVEVVKVMPQDLVTFKDVAIDFSQEEWQWMNPAQKRLYRSMMLENYQSLVSLGLCISKPYVISLLEQGREPWEMTSEMTRSPFSDWESIYVTQELPLKQFMYDDACMEGITSYGLECSTFEENWKWEDLFEKQMGSHEMFSKKEIITHKETITKETEFKYTKFGKCIHLENIEESIYNHTSDKKSFSKNSMVIKHKKVYVGKKLFKCNECDKTFTHSSSLTVHFRIHTGEKPYACEECGKAFKQRQHLAQHHRTHTGEKLFECKECRKAFKQSEHLIQHQRIHTGEKPYKCKECRKAFRQPAHLAQHQRIHTGEKPYECKECGKAFSDGSSFARHQRCHTGKRPYECIECGKAFRYNTSFIRHWRSYHTGEKPFNCIDCGKAFSVHIGLILHRRIHTGEKPYKCGVCGKTFSSGSSRTVHQRIHTGEKPYECDICGKDFSHHASLTQHQRVHSGEKPYECKECGKAFRQNVHLVSHLRIHTGEKPYECKECGKAFRISSQLATHQRIHTGEKPYECIECGNAFKQRSHLAQHQKTHTGEKPYECNECGKAFSQTSNLTQHQRIHTGEKPYKCTECGKAFSDSSSCAQHQRLHTGQRPYQCFECGKAFRRKLSLICHQRSHTGEEP

SEQ ID NO: 618 - protein, 178 aa, Homo sapiens
MSFVGENSGVKMGSEDWEKDEPQCCLEDPAGSPLEPGPSLPTMNFVHTKIFFALASSLSSASAEKGSPILLGVSKGEFCLYCDKDKGQSHPSLQLKKEKLMKLAAQKESARRPFIFYRAQVGSWNMLESAAHPGWFICTSCNCNEPVGVTDKFENRKHIEFSFQPVCKAEMSPSEVSD

SEQ ID NO: 619 - protein, 555 aa, Homo sapiens
MDVSSEHTKDPGGEGGDGESLAARPSKIKASSGPPTSPEPGELESEPEEEEEEQAASQGGTAADEQAEAPKGLTAAEAAGEEGPGEPGRPAEPQPEPEEPAEVGAEEPAQPEPGAGPEELEAEAGAEELEQAAEGKEVRFQASLPLTRIDEEEAAAAPEAETERVEGEEEDKEETQRDGAESKERDGEGRPAKSQEEGKRLYGRDEFEDLEWSEEVQKLQEQQLRSDLLDQYRSLLVERNRSQRYNLYLQHKIFEALRRKKGLEAAEVADRGAEAEAPEKEQAYLRHLGMLEELKKQQADDLQWYHQELGQLKRQCQEKLTRVEKEWRRFQALKKQVVMQAMGSCRMRGGRQAALREVEQIQALEDKKEKEMSAVRLENIQLKQSLVHFETRMRTQEDLTQGLLLIDFEQLKIENQTFNEKIEERNEELLKLRSKVTNSVQVITHVKEKLHFMDMENACKKTQLAEIEAQAALGRDILTKTKQAREGLRTDNIRLNQKCGLLGKDSLLRDLEEKVDKTELLHRRLESLKRHHASLTLSCRGVRQKIREAKAFLPS

SEQ ID NO: 620 - protein, 979 aa, Homo sapiens
MSYDYHQNWGRDGGPRSSGGGYGGGPAGGHGGNRGSGGGGGGGGGGRGGRGRHPGHLKGREIGMWYAKKQGQKNKEAERQERAVVHMDERREEQIVQLLNSVQAKNDKESEAQISWFAPEDHGYGTEVSTKNTPCSENKLDIQEKKLINQEKKMFRIRNRSYIDRDSEYLLQENEPDGTLDQKLLEDLQKKKNDLRYIEMQHFREKLPSYGMQKELVNLIDNHQVTVISGETGCGKTTQVTQFILDNYIERGKGSACRIVCTQPRRISAISVAERVAAERAESCGSGNSTGYQIRLQSRLPRKQGSILYCTTGIILQWLQSDPYLSSVSHIVLDEIHERNLQSDVLMTVVKDLLNFRSDLKVILMSATLNAEKFSEYFGNCPMIHIPGFTFPVVEYLLEDVIEKIRYVPEQKEHRSQFKRGFMQGHVNRQEKEEKEAIYKERWPDYVRELRRRYSASTVDVIEMMEDDKVDLNLIVALIRYIVLEEEDGAILVFLPGWDNISTLHDLLMSQVMFKSDKFLIIPLHSLMPTVNQTQVFKRTPPGVRKIVIATNIAETSITIDDVVYVIDGGKIKETHFDTQNNISTMSAEWVSKANAKQRKGRAGRVQPGHCYHLYNGLRASLLDDYQLPEILRTPLEELCLQIKILRLGGIAYFLSRLMDPPSNEAVLLSIRHLMELNALDKQEELTPLGVHLARLPVEPHIGKMILFGALFCCLDPVLTIAASLSFKDPFVIPLGWEEARRRGFRYEKDYCWEYFLSSNTLQMLHNMKGQFAEHLLGAGFVSSRNPKDPESNINSDNEKIIKAVICAGLYPKVAKIRLNLGKKRKMVKVYTKTDGLVAVHPKSVNVEQTDFHYNWLIYHLKMRTSSIYLYDCTEVSPYCLLFFGGDISIQKDNDQETIAVDEWIVFQSPARIAHLVKELRKELDILLQEKIESPHPVDWNDTKSRDCAVLSAIIDLIKTQEKATPRNFPPRFQDGYYS

SEQ ID NO: 621 - protein, 481 aa, Homo sapiens
MRGLPRKREAWTQPHPLEALYESLRVLEKDTSATSQSVNGSPQAEQPSLESTSKEAFFSRVETFSSLKWAGKPFELSPLVCAKYGWVTVECDMLKCSSCQAFLCASLQPAFDFDRYKQRCAELKKALCTAHEKFCFWPDSPSPDRFGMLPLDEPAILVSEFLDRFQSLCHLDLQLPSLRPEDLKTMCLTEDKISLLLHLLEDELDHRTDERKTTIKLGSDIQVHVTACILSVCGWACSSSLESMQLSLITCSQCMRKVGLWGFQQIESSMTDLDASFGLTSSPIPGLEGRPERLPLVPESPRRMMTRSQDATFSPGSEQAEKSPGPIVSRTRSWDSSSPVDRPEPEAASPTTRTRPVTRSMGTGDTPGLEVPSSPLRKAKRARLCSSSSSDTSSRSFFDPTSQHRDWCPWVNITLGKESRENGGTEPDASAPAEPGWKAVLTILLAHKQSSQPAETDSMSLSEKSRKVFRIFRQWESLCSC

SEQ ID NO: 622 - protein, 671 aa, Homo sapiens
MRPKRLGRCCAGSRLGPGDPAALTCAPSPSASPAPEPSAQPQARGTGQRVGSRATSGSQFLSEARTGARPASEAGAKAGARRPSAFSAIQGDVRSMPDNSDAPWTRFVFQGPFGSRATGRGTGKAAGIWKTPAAYVGRRPGVSGPERAAFIRELEEALCPNLPPPVKKITQEDVKVMLYLLEELLPPVWESVTYGMVLQRERDLNTAARIGQSLVKQNSVLMEENSKLEALLGSAKEEILYLRHQVNLRDELLQLYSDSDEEDEDEEEEEEEKEAEEEQEEEEAEEDLQCAHPCDAPKLISQEALLHQHHCPQLEALQEKLRLLEEENHQLREEASQLDTLEDEEQMLILECVEQFSEASQQMAELSEVLVLRLENYERQQQEVARLQAQVLKLQQRCRMYGAETEKLQKQLASEKEIQMQLQEESVWVGSQLQDLREKYMDCGGMLIEMQEEVKTLRQQPPVSTGSATHYPYSVPLETLPGFQETLAEELRTSLRRMISDPVYFMERNYEMPRGDTSSLRYDFRYSEDREQVRGFEAEEGLMLAADIMRGEDFTPAEEFVPQEELGAAKKVPAEEGVMEEAELVSEETEGWEEVELELDEATRMNVVTSALEASGLGPSHLDMNYVLQQLANWQDAHYRRQLRWKMLQKGECPHGALPAASRTSCRSSCR

SEQ ID NO: 623 - protein, 414 aa, Homo sapiens
MVQKKPAELQGFHRSFKGQNPFELAFSLDQPDHGDSDFGLQCSARPDMPASQPIDIPDAKKRGKKKKRGRATDSFSGRFEDVYQLQEDVLGEGAHARVQTCINLITSQEYAVKIIEKQPGHIRSRVFREVEMLYQCQGHRNVLELIEFFEEEDRFYLVFEKMRGGSILSHIHKRRHFNELEASVVVQDVASALDFLHNKGIAHRDLKPENILCEHPNQVSPVKICDFDLGSGIKLNGDCSPISTPELLTPCGSAEYMAPEVVEAFSEEASIYDKRCDLWSLGVILYILLSGYPPFVGRCGSDCGWDRGEACPACQNMLFESIQEGKYEFPDKDWAHISCAAKDLISKLLVRDAKQRLSAAQVLQHPWVQGCAPENTLPTPMVLQRWDSHFLLPPHPCRIHVRPGGLVRTVTVNE

SEQ ID NO: 624 - protein, 2429 aa, Homo sapiens
MPAILVASKMKSGLPKPVHSAAPILHVPPARAGPQPCYLKLGSKVEVSKTTYPSQIPLKSQVLQGLQEPAGEGLPLRKSGSVENGFDTQIYTDWANHYLAKSGHKRLIRDLQQDVTDGVLLAQIIQVVANEKIEDINGCPKNRSQMIENIDACLNFLAAKGINIQGLSAEEIRNGNLKAILGLFFSLSRYKQQQQQPQKQHLSSPLPPAVSQVAGAPSQCQAGTPQQQVPVTPQAPCQPHQPAPHQQSKAQAEMQSRLPGPTARVSAAGSEAKTRGGSTTANNRRSQSFNNYDKSKPVTSPPPPPSSHEKEPLASSASSHPGMSDNAPASLESGSSSTPTNCSTSSAIPQPGAATKPWRSKSLSVKHSATVSMLSVKPPGPEAPRPTPEAMKPAPNNQKSMLEKLKLFNSKGGSKAGEGPGSRDTSCERLETLPSFEESEELEAASRMLTTVGPASSSPKIALKGIAQRTFSRALTNKKSSLKGNEKEKEKQQREKDKEKSKDLAKRASVTERLDLKEEPKEDPSGAAVPEMPKKSSKIASFIPKGGKLNSAKKEPMAPSHSGIPKPGMKSMPGKSPSAPAPSKEGERSRSGKLSSGLPQQKPQLDGRHSSSSSSLASSEGKGPGGTTLNHSISSQTVSGSVGTTQTTGSNTVSVQLPQPQQQYNHPNTATVAPFLYRSQTDTEGNVTAESSSTGVSVEPSHFTKTGQPALEELTGEDPEARRLRTVKNIADLRQNLEETMSSLRGTQVTHSTLETTFDTNVTTEMSGRSILSLTGRPTPLSWRLGQSSPRLQAGDAPSMGNGYPPRANASRFINTESGRYVYSAPLRRQLASRGSSVCHVDVSDKAGDEMDLEGISMDAPGYMSDGDVLSKNIRTDDITSGYMTDGGLGLYTRRLNRLPDGMAVVRETLQRNTSLGLGDADSWDDSSSVSSGISDTIDNLSTDDINTSSSISSYANTPASSRKNLDVQTDAEKHSQVERNSLWSGDDVKKSDGGSDSGIKMEPGSKWRRNPSDVSDESDKSTSGKKNPVISQTGSWRRGMTAQVGITMPRTKPSAPAGALKTPGTGKTDDAKVSEKGRLSPKASQVKRSPSDAGRSSGDESKKPLPSSSRTPTANANSFGFKKQSGSAAGLAMITASGVTVTSRSATLGKIPKSSALVSRSAGRKSSMDGAQNQDDGYLALSSRTNLQYRSLPRPSKSNSRNGAGNRSSTSSIDSNISSKSAGLPVPKLREPSKTALGSSLPGLVNQTDKEKGISSDNESVASCNSVKVNPAAQPVSSPAQTSLQPGAKYPDVASPTLRRLFGGKPTKQVPIATAENMKNSVVISNPHATMTQQGNLDSPSGSGVLSSGSSSPLYSKNVDLNQSPLASSPSSAHSAPSNSLTWGTNASSSSAVSKDGLGFQSVSSLHTSCESIDISLSSGGVPSHNSSTGLIASSKDDSLTPFVRTNSVKTTLSESPLSSPAASPKFCRSTLPRKQDSDPHLDRNTLPKKGLRYTPTSQLRTQEDAKEWLRSHSAGGLQDTAANSPFSSGSSVTSPSGTRFNFSQLASPTTVTQMSLSNPTMLRTHSLSNADGQYDPYTDSRFRNSSMSLDEKSRTMSRSGSFRDGFEEVHGSSLSLVSSTSSVYSTPEEKCQSEIRKLRRELDASQEKVSALTTQLTANAHLVAAFEQSLGNMTIRLQSLTMTAEQKDSELNELRKTIELLKKQNAAAQAAINGVINTPELNCKGNGTAQSADLRIRRQHSSDSVSSINSATSHSSVGSNIESDSKKKKRKNWLRSSFKQAFGKKKSPKSASSHSDIEEMTDSSLPSSPKLPHNGSTGSTPLLRNSHSNSLISECMDSEAETVMQLRNELRDKEMKLTDIRLEALSSAHQLDQLREAMNRMQSEIEKLKAENDRLKSESQGSGCSRAPSQVSISASPRQSMGLSQHSLNLTESTSLDMLLDDTGECSARKEGGRHVKIVVSFQEEMKWKEDSRPHLFLIGCIGVSGKTKWDVLDGVVRRLFKEYIIHVDPVSQLGLNSDSVLGYSIGEIKRSNTSETPELLPCGYLVGENTTISVTVKGLAENSLDSLVFESLIPKPILQRYVSLLIEHRRIILSGPSGTGKTYLANRLSEYIVLREGRELTDGVIATFNVDHKSSKELRQYLSNLADQCNSENNAVDMPLVIILDNLHHVSSLGEIFNGLLNCKYHKCPYIIGTMNQATSSTPNLQLHHNFRWVLCANHTEPVKGFLGRFLRRKLMETEISGRVRNMELVKIIDWIPKVWHHLNRFLEAHSSSDVTIGPRLFLSCPIDVDGSRVWFTDLWNYSIIPYLLEAVREGLQLYGRRAPWEDPAKWVMDTYPWAASPQQHEWPPLLQLRPEDVGFDGYSMPREGSTSKQMPPSDAEGDPLMNMLMRLQEAANYSSPQSYDSDSNSNSHHDDILDSSLESTL

SEQ ID NO: 625 - protein, 683 aa, Homo sapiens
MAAAVAAPLAAGGEEAAATTSVPGSPGLPGRRSAERALEEAVATGTLNLSNRRLKHFPRGAARSYDLSDITQADLSRNRFPEVPEAACQLVSLEGLSLYHNCLRCLNPALGNLTALTYLNLSRNQLSLLPPYICQLPLRVLIVSNNKLGALPPDIGTLGSLRQLDVSSNELQSLPSELCGLSSLRDLNVRRNQLSTLPEELGDLPLVRLDFSCNRVSRIPVSFCRLRHLQVILLDSNPLQSPPAQVCLKGKLHIFKYLSTEAGQRGSALGDLAPSRPPSFSPCPAEDLFPGHRYDGGLDSGFHSVDSGSKRWSGNESTDEFSELSFRISELAREPRGPRERKEDGSADGDPVQIDFIDSHVPGEDEERGTVEEQRPPELSPGAGDRERAPSSRREEPAGEERRRPDTLQLWQERERRQQQQSGAWGAPRKDSLLKPGLRAVVGGAAAVSTQAMHNGSPKSSASQAGAAAGQGAPAPAPASQEPLPIAGPATAPAPRPLGSIQRPNSFLFRSSSQSGSGPSSPDSVLRPRRYPQVPDEKDLMTQLRQVLESRLQRPLPEDLAEALASGVILCQLANQLRPRSVPFIHVPSPAVPKLSALKARKNVESFLEACRKMGVPEADLCSPSDLLQGTARGLRTALEAVKRVGGKALPPLWPPSGLGGFVVFYVVLMLLLYVTYTRLLGS

SEQ ID NO: 626 - protein, 2615 aa, Homo sapiens
MKILLIIFVLIIWTETLADQSPGPGPVYADVVFLVDSSDHLGPKSFPFVKTFINKMINSLPIEANKYRVALAQYSDEFHSEFHLSTFKGRSPMLNHLKKNFQFIGGSLQIGKALQEAHRTYFSAPINGRDRKQFPPILVVLASAESEDEVEEASKALQKDGVKIISVGVQKASEENLKAMATSHFHFNLRTIRDLSTFSQNMTQIIKDVTKYKEGAVDADMQVHFPISCQKDSLADLVFLVDESLGTGGNLRHLQTFLENITSSMDVKENCMRLGLMSYSNSAKTISFLKSSTTQSEFQQQIKNLSIQVGKSNTGAAIDQMRRDGFSESYGSRRAQGVPQIAVLVTHRPSDDEVHDAALNLRLEDVNVFALSIQGANNTQLEEIVSYPPEQTISTLKSYADLETYSTKFLKKLQNEIWSQISTYAEQRNLDKTGCVDTKEADIHFLIDGSSSIQEKQFEQIKRFMLEVTEMFSIGPDKVRVGVVQYSDDTEVEFYITDYSNDIDLRKAIFNIKQLTGGTYTGKALDYILQIIKNGMKDRMSKVPCYLIVLTDGMSTDRVVEPAKRLRAEQITVHAVGIGAANKIELQEIAGKEERVSFGQNFDALKSIKNEVVREICAEKGCEDMKADIMFLVDSSWSIGNENFRKMKIFMKNLLTKIQIGADKTQIGVVQFSDKTKEEFQLNRYFTQQEISDAIDRMSLINEGTLTGKALNFVGQYFTHSKGARLGAKKFLILITDGVAQDDVRDPARILRGKDVTIFSVGVYNANRSQLEEISGDSSLVFHVENFDHLKALERKLIFRVCALHDCKRITLLDVVFVLDHSGSIKKQYQDHMINLTIHLVKKADVGRDRVQFGALKYSDQPNILFYLNTYSNRSAIIENLRKRRDTGGNTYTAKALKHANALFTEEHGSRIKQNVKQMLIVITDGESHDHDQLNDTALELRNKGITIFAVGVGKANQKELEGMAGNKNNTIYVDNFDKLKDVFTLVQERMCTEAPEVCHLQEADVIFLCDGSDRVSNSDFVTMTTFLSDLIDNFDIQSQRMKIGMAQFGSNYQSIIELKNSLTKTQWKTQIQNVSKSGGFPRIDFALKKVSNMFNLHAGGRRNAGVPQTLVVITSGDPRYDVADAVKTLKDLGICVLVLGIGDVYKEHLLPITGNSEKIITFQDFDKLKNVDVKKRIIREICQSCGKTNCFMDIVVGFDISTHVQGQPLFQGHPQLESYLPGILEDISSIKGVSCGAGTEAQVSLAFKVNSDQGFPAKFQIYQKAVFDSLLQVNVSGPTHLNAQFLRSLWDTFKDKSASRGQVLLIFSDGLQSESNIMLENQSDRLREAGLDALLVVSLNTTAHHEFSSFEFGKRFDYRTHLTIGMRELGKKLSQYLGNIAERTCCCTFCKCPGIPGPHGTRGLQAMKGSQGLKGSRGHRGEDGNPGVRGDTGPQGDKGIAGCPGAWGQKGLKGFSGPKGGHGDDGIDGLDGEEGCHGFPGIKGEKGDPGSQGSPGSRGAPGQYGEKGFPGDPGNPGQNNNIKGQKGSKGEQGRQGRSGQKGVQGSPSSRGSRGREGQRGLRGVSGEPGNPGPTGTLGAEGLQGPQGSQGNPGRKGEKGSQGQKGPQGSPGLMGAKGSTGRPGLLGKKGEPGLPGDLGPVGQTGQRGRQGDSGIPGYGQMGRKGVKGPRGFPGDAGQKGDIGNPGIPGGPGPKGFRGLALTVGLKGEEGSRGLPGPPGQRGIKGMAGQPVYSQCDLIRFLREHSPCWKEKCPAYPTELVFALDNSYDVTEESFNKTRDIITSIVNDLNIRENNCPVGARVAMVSYNSGTSYLIRWSDYNRKKQLLQQLSQIKYQDTTEPRDVGNAMRFVTRNVFKRTYAGANVRRVAVFFSNGQTASRSSIITATMEFSALDISPTVFAFDERVFLEAFGFDNTGTFQVIPVPPNGENQTLERLRRCALCYDKCFPNACIREAFLPEDSYMDVVFLIDNSRNIAKDEFKAVKALVSSVIDNFNIASDPLISDSGDRIALLSYSPWESSRRKMGTVKTEFDFITYDNQLLMKNHIQTSFQQLNGEATIGRALLWTTENLFPETPYLRKHKVIFVVSAGENYERKEFVKMMALRAKCQGYVIFVISLGSTRKDDMEELASYPLDQHLIQLGRIHKPDLNYIAKFLKPFLYSVRRGFNQYPPPMLEDACRLINLGGENIQNDGFQFVTELQEDFLGGNGFIGQELNSGRESPFVKTEDNGSDYLVYLPSQMFEPQKLMINYEKDQKSAEIASLTSGHENYGRKEEPDHTYEPGDVSLQEYYMDVAFLIDASQRVGSDEFKEVKAFITSVLDYFHIAPTPLTSTLGDRVAVLSYSPPGYMPNTEECPVYLEFDLVTYNSIHQMKHHLQDSQQLNGDVFIGHALQWTIDNVFVGTPNLRKNKVIFVISAGETNSLDKDVLRNVSLRAKCQGYSIFVFSFGPKHNDKELEELASHPLDHHLVQLGRTHKPDWNYIIKFVKPFVHLIRRAINKYPTEDMKATCVNMTSPNPENGGTENTVLLLPGIYEIKTENGDLFDEFDSQAQHLLVLGNNHSSGSETATDLMQKLYLLFSTEKLAMKDKEKAHLEEISALVVDKQQEKEDKEMEATDI

SEQ ID NO: 627 - protein, 192 aa, Homo sapiens
MSGCDRRETETKGKNSFKKRLRGPKVKNLNPKKFSIHDQDHKVLVLDSGNLIAVPDKNYIRPEIFFALASSLSSASAEKGSPILLGVSKGEFCLYCDKDKGQSHPSLQLKKEKLMKLAAQKESARRPFIFYRAQVGSWNMLESAAHPGWFICTSCNCNEPVGVTDKFENRKHIEFSFQPVCKAEMSPSEVSD

SEQ ID NO: 628 - protein, 271 aa, Homo sapiens
MFGLKRNAVIGLNLYCGGAGLGAGSGGATRPGGRLLATEKEASARREIGGGEAGAVIGGSAGASPPSTLTPDSRRVARPPPIGAEVPDVTATPARLLFFAPTRRAAPLEEMEAPAADAIMSPEEELDGYEPEPLGKRPAVLPLLELVGESGNNTSTDGSLPSTPPPAEEEEDELYRQSLEIISRYLREQATGAKDTKPMGRSGATSRKALETLRRVGDGVQRNHETAFQGWVCGVLPCRGPRRWHQECAAGFCRCCWSRSWFGISNKIALL

SEQ ID NO: 629 - protein, 427 aa, Homo sapiens
MGTPKPRILPWLVSQLDLGQLEGVAWVNKSRTRFRIPWKHGLRQDAQQEDFGIFQAWAEATGAYVPGRDKPDLPTWKRNFRSALNRKEGLRLAEDRSKDPHDPHKIYEFVNSGVGDFSQPDTSPDTNGGGSTSDTQEDILDELLGNMVLAPLPDPGPPSLAVAPEPCPQPLRSPSLDNPTPFPNLGPSENPLKRLLVPGEEWEFEVTAFYRGRQVFQQTISCPEGLRLVGSEVGDRTLPGWPVTLPDPGMSLTDRGVMSYVRHVLSCLGGGLALWRAGQWLWAQRLGHCHTYWAVSEELLPNSGHGPDGEVPKDKEGGVFDLGPFIVDLITFTEGSGRSPRYALWFCVGESWPQDQPWTKRLVMVKVVPTCLRALVEMARVGGASSLENTVDLHISNSHPLSLTSDQYKAYLQDLVEGMDFQGPGES

SEQ ID NO: 630 - protein, 158 aa, Homo sapiens
MNKQRGTYSEVSLAQDPKRQQRKLKGNKISISGTKQEIFQVELNLQNASSDHQGNDKTYHCKGLLPPPEKLTAEVLGIICIVLMATVLKTIVLIPCIGVLEQNNFSLNRRMQKARHCGHCPEEWITYSNSCYYIGKERRTWEERVCWPVLRRTLICFL

SEQ ID NO: 631 - protein, 1660 aa, Homo sapiens
MMDSENKPENDEDEKINKEAQDLTKLSSHNEDGGPVSDVIASFPENSMGKRGFSESSNSDSVVIGEDRNKHASKRRKLDEAEPLKSGKQGICRLETSESSVTEGGIALDETGKETFLSDCTVGGTCLPNALSPSCNFSTIDVVSLKTDTEKTSAQEMVSLDLERESPFPPKEISVSCTIGNVDTVLKCSICGHLFSSCSDLEKHAESHMQQPKEHTCCHCSHKAESSSALHMHIKQAHGPQKVFSCDLCGFQCSEENLLNAHYLGKTHLRRQNLAARGGFVQILTKQPFPKKSRTMATKNVHSKPRTSKSIAKNSDSKGLRNVGSTFKDFRGSISKQSGSSSELLVEMMPSRNTLSQEVEIVEEHVTSLGLAQNPENQSRKLDTLVTSEGLLEKLESTKNTLQAAHGNSVTSRPRPERNILVLGNSFRRRSSTFTLKGQAKKRFNLLGIKRGTSETQRMYMKHLRTQMKTHDAESVLKHLEACSSVQRVCVTTSETQEAEQGQGSARPPDSGLHSLTVKPASGSQTLCACTDCGQVATNRTDLEIHVKRCHAREMKFYCRTCDFSSMSRRDLDEHLHSNQHQQTASVLSCQCCSFISLDEINLRDHMKEKHNMHFLCTPCNLFFLSEKDVEEHKATEKHINSLVQPKTLQSSNSDLVLQTLPLSTLESENAKESMDDSGKASQEEPLKSRVSHGNEVRHSSKPQFQCKKCFYKTRSSTVLTRHIKLRHGQDYHFLCKACNLYSLSKEGMEKHIKRSKHLENAKKNNIGLSFEECIERVCIGANDKKEEFDVSGNGRIEGHIGVQLQEHSYLEKGMLASEELSQSGGSTKDDELASTTTPKRGRPKGNISRTCSHCGLLASSITNLTVHIRRKHSHQYSYLCKVCKYYTVTKGDMERHCATKKHKGRVEIEASGKHSSDIIVGPEGGSLEAGKKNAGSAVTMSDEHANKPAESPTSVLEKPDRGNSIEAEVENVFHSLDGEVNSHLLDKKEQISSEPEDFAQPGDVYSQRDVTGTGENKCLHCEFSAHSSASLELHVKRKHTKEFEFYCMACDYYAVTRREMTRHAATEKHKMKRQSYLNSANVEAGSADMSKNIIMPEEEHQQNSEEFQIISGQPSDTLKSRNAADCSILNENTNLDMSKVLCAADSVEVETEEESNFNEDHSFCETFQQAPVKDKVRKPEEMMSLTMSSNYGSPSRFQNENSGSSALNCETAKKNHEISNDAGELRVHCEGEGGNAGDGGGVVPHRHLCPVTLDGERSAESPVLVVTRITREQGNLESGGQNRVARGHGLEDLKGVQEDPVLGNKEILMNSQHETEFILEEDGPASDSTVESSDVYETIISIDDKGQAMYSFGRFDSSIIRIKNPEDGELIDQSEEGLIATGVRISELPLKDCAQGVKKKKSEGSSIGESTRIRCDDCGFLADGLSGLNVHIAMKHPTKEKHFHCLLCGKSFYTESNLHQHLASAGHMRNEQASVEELPEGGATFKCVKCTEPFDSEQNLFLHIKGQHEELLREVNKYIVEDTEQINREREENQGNVCKYCGKMCRSSNSMAFLAHIRTHTGSKPFKCKICHFATAQLGDARNHVKRHLGMREYKCHVCGVAFVMKKHLNTHLLGKHGVGTPKERVKVAYRKIGTLPGIQNNRNASSASEAQSLCEHFS

SEQ ID NO: 632 - protein, 602 aa, Homo sapiens
MRSMKALQKALSRAGSHCGRGGWGHPSRSPLLGGGVRHHLSEAAAQGRETPHSHQPQHQDHDSSESGMLSRLGDLLFYTIAEGQERIPIHKFTTALKATGLQTSDPRLRDCMSEMHRVVQESSSGGLLDRDLFRKCVSSNIVLLTQAFRKKFVIPDFEEFTGHVDRIFEDVKELTGGKVAAYIPQLAKSNPDLWGVSLCTVDGQRHSVGHTKIPFCLQSCVKPLTYAISISTLGTDYVHKFVGKEPSGLRYNKLSLNEEGIPHNPMVNAGAIVVSSLIKMDCNKAEKFDFVLQYLNKMAGNEYMGFSNATFQSEKETGDRNYAIGYYLKEKKCFPKGVDMMAALDLYFQLCSVEVTCESGSVMAATLANGGICPITGESVLSAEAVRNTLSLMHSCGMYDFSGQFAFHVGLPAKSAVSGAILLVVPNVMGMMCLSPPLDKLGNSHRGTSFCQKLVSLFNFHNYDNLRHCARKLDPRREGAEIRNKTVVNLLFAAYSGDVSALRRFALSAMDMEQKDYDSRTALHVAAAEGHIEVVKFLIEACKVNPFAKDRWGNIPLDDAVQFNHLEVVKLLQDYQDSYTLSETQAEAAAEALSKENLESMV

SEQ ID NO: 633 - protein, 471 aa, Homo sapiens
MPAPQRKHRRGGFSHRCFPTPQTAMTPQPAGPPDGGWGWVVAAAAFAINGLSYGLLRSLGLAFPDLAEHFDRSAQDTAWISALALAVQQAASPVGSALSTRWGARPVVMVGGVLASLGFVFSAFASDLLHLYLGLGLLAGFGWALVFAPALGTLSRYFSRRRVLAVGLALTGNGASSLLLAPALQLLLDTFGWRGALLLLGAITLHLTPCGALLLPLVLPGDPPAPPRSPLAALGLSLFTRRAFSIFALGTALVGGGYFVPYVHLAPHALDRGLGGYGAALVVAVAAMGDAGARLVCGWLADQGWVPLPRLLAVFGALTGLGLWVVGLVPVVGGEESWGGPLLAAAVAYGLSAGSYAPLVFGVLPGLVGVGGVVQATGLVMMLMSLGGLLGPPLSGFLRDETGDFTASFLLSGSLILSGSFIYIGLPRALPSCGPASPPATPPPETGELLPAPQAVLLSPGGPGSTLDTTC

SEQ ID NO: 634 - protein, 916 aa, Homo sapiens
MESGQPARRIAMAPLLEYERQLVLELLDTDGLVVCARGLGADRLLYHFLQLHCHPACLVLVLNTQPAEEEYFINQLKIEGVEHLPRRVTNEITSNSRYEVYTQGGVIFATSRILVVDFLTDRIPSDLITGILVYRAHRIIESCQEAFILRLFRQKNKRGFIKAFTDNAVAFDTGFCHVERVMRNLFVRKLYLWPRFHVAVNSFLEQHKPEVVEIHVSMTPTMLAIQTAILDILNACLKELKCHNPSLEVEDLSLENAIGKPFDKTIRHYLDPLWHQLGAKTKSLVQDLKILRTLLQYLSQYDCVTFLNLLESLRATEKAFGQNSGWLFLDSSTSMFINARARVYHLPDAKMSKKEKISEKMEIKEGEETKKELVLESNPKWEALTEVLKEIEAENKESEALGGPGQVLICASDDRTCSQLRDYITLGAEAFLLRLYRKTFEKDSKAEEVWMKFRKEDSSKRIRKSHKRPKDPQNKERASTKERTLKKKKRKLTLTQMVGKPEELEEEGDVEEGYRREISSSPESCPEEIKHEEFDVNLSSDAAFGILKEPLTIIHPLLGCSDPYALTRVLHEVEPRYVVLYDAELTFVRQLEIYRASRPGKPLRVYFLIYGGSTEEQRYLTALRKEKEAFEKLIREKASMVVPEEREGRDETNLDLVRGTASADVSTDTRKAGGQEQNGTQQSIVVDMREFRSELPSLIHRRGIDIEPVTLEVGDYILTPEMCVERKSISDLIGSLNNGRLYSQCISMSRYYKRPVLLIEFDPSKPFSLTSRGALFQEISSNDISSKLTLLTLHFPRLRILWCPSPHATAELFEELKQSKPQPDAATALAITADSETLPESEKYNPGPQDFLLKMPGVNAKNCRSLMHHVKNIAELAALSQDELTSILGNAANAKQLYDFIHTSFAEVVSKGKGKK

SEQ ID NO: 635 - protein, 580 aa, Homo sapiens
MWRPVQLCHFHSALLHSRQKPWPSPAVFFRRNVRGLPPRFSSPTPLWRKVLSTAVVGAPLLLGARYVMAEAREKRRMRLVVDGMGRFGRSLKVGLQISLDYWWCTNVVLRGVEENSPGYLEVMSACHQRAADALVAGAISNGGLYVKLGQGLCSFNHLLPPEYTRTLRVLEDRALKRGFQEVDELFLEDFQALPHELFQEFDYQPIAAASLAQVHRAKLHDGTSVAVKVQYIDLRDRFDGDIHTLELLLRLVEVMHPSFGFSWVLQDLKGTLAQELDFENEGRNAERCARELAHFPYVVVPRVHWDKSSKRVLTADFCAGCKVNDVEAIRSQGLAVHDIAEKLIKAFAEQIFYTGFIHSDPHPGNVLVRKGPDGKAELVLLDHGLYQFLEEKDRAALCQLWRAIILRDDAAMRAHAAALGVQDYLLFAEMLMQRPVRLGQLWGSHLLSREEAAYMVDMARERFEAVMAVLRELPRPMLLVLRNINTVRAINVALGAPVDRYFLMAKRAVRGWSRLAGATYRGVYGTSLLRHAKVVWEMLKFEVALRLETLAMRLTALLARALVHLSLVPPAEELYQYLET

SEQ ID NO: 636 - protein, 2087 aa, Homo sapiens
METESESSTLGDDSVFWLESEVIIQVTDCEEEEREEKFRKMKSSVHSEEDDFVPELHRNVHPRERPDWEETLSAMARGADVPEIPGDLTLKTCGSTASMKVKHVKKLPFTKGHFPKMAECAHFHYENVEFGSIQLSLSEEQNEVMKNGCESKELVYLVQIACQGKSWIVKRSYEDFRVLDKHLHLCIYDRRFSQLSELPRSDTLKDSPESVTQMLMAYLSRLSAIAGNKINCGPALTWMEIDNKGNHLLVHEESSINTPAVGAAHVIKRYTARAPDELTLEVGDIVSVIDMPPKVLSTWWRGKHGFQVGLFPGHCVELINQKVPQSVTNSVPKPVSKKHGKLITFLRTFMKSRPTKQKLKQRGILKERVFGCDLGEHLLNSGFEVPQVLQSCTAFIERYGIVDGIYRLSGVASNIQRLRHEFDSEHVPDLTKEPYVQDIHSVGSLCKLYFRELPNPLLTYQLYEKFSDAVSAATDEERLIKIHDVIQQLPPPHYRTLEFLMRHLSLLADYCSITNMHAKNLAIVWAPNLLRSKQIESACFSGTAAFMEVRIQSVVVEFILNHVDVLFSGRISMAMQEGAASLSRPKSLLVSSPSTKLLTLEEAQARTQAQVNSPIVTENKYIEVGEGPAALQGKFHTIIEFPLERKRPQNKMKKSPVGSWRSFFNLGKSSSVSKRKLQRNESEPSEMKAMALKGGRAEGTLRSAKSEESLTSLHAVDGDSKLFRPRRPRSSSDALSASFNGEMLGNRCNSYDNLPHDNESEEEGGLLHIPALMSPHSAEDVDLSPPDIGVASLDFDPMSFQCSPPKAESECLESGASFLDSPGYSKDKPSANKKDAETGSSQCQTPGSTASSEPVSPLQEKLSPFFTLDLSPTEDKSSKPSSFTEKVVYAFSPKIGRKLSKSPSMSISEPISVTLPPRVSEVIGTVSNTTAQNASSSTWDKCVEERDATNRSPTQIVKMKTNETVAQEAYESEVQPLDQVAAEEVELPGKEDQSVSSSQSKAVASGQTQTGAVTHDPPQDSVPVSSVSLIPPPPPPKNVARMLALALAESAQQASTQSLKRPGTSQAGYTNYGDIAVATTEDNLSSSYSAVALDKAYFQTDRPAEQFHLQNNAPGNCDHPLPETTATGDPTHSNTTESGEQHHQVDLTGNQPHQAYLSGDPEKARITSVPLDSEKSDDHVSFPEDQSGKNSMPTVSFLDQDQSPPRFYSGDQPPSYLGASVDKLHHPLEFADKSPTPPNLPSDKIYPPSGSPEENTSTATMTYMTTTPATAQMSTKEASWDVAEQPTTADFAAATLQRTHRTNRPLPPPPSQRSAEQPPVVGQVQAATNIGLNNSHKVQGVVPVPERPPEPRAMDDPASAFISDSGAAAAQCPMATAVQPGLPEKVRDGARVPLLHLRAESVPAHPCGFPAPLPPTRMMESKMIAAIHSSSADATSSSNYHSFVTASSTSVDDALPLPLPVPQPKHASQKTVYSSFARPDVTTEPFGPDNCLHFNMTPNCQYRPQSVPPHHNKLEQHQVYGARSEPPASMGLRYNTYVAPGRNASGHHSKPCSRVEYVSSLSSSVRNTCYPEDIPPYPTIRRVQSLHAPPSSMIRSVPISRTEVPPDDEPAYCPRPLYQYKPYQSSQARSDYHVTQLQPYFENGRVHYRYSPYSSSSSSYYSPDGALCDVDAYGTVQLRPLHRLPNRDFAFYNPRLQGKSLYSYAGLAPRPRANVTGYFSPNDHNVVSMPPAADVKHTYTSWDLEDMEKYRMQSIRRESRARQKVKGPVMSQYDNMTPAVQDDLGGIYVIHLRSKSDPGKTGLLSVAEGKESRHAAKAISPEGEDRFYRRHPEAEMDRAHHHGGHGSTQPEKPSLPQKQSSLRSRKLPDMGCSLPEHRAHQEASHRQFCESKNGPPYPQGAGQLDYGSKGIPDTSEPVSYHNSGVKYAASGQESLRLNHKEVRLSKEMERPWVRQPSAPEKHSRDCYKEEEHLTQSIVPPPKPERSHSLKLHHTQNVERDPSVLYQYQPHGKRQSSVTVVSQYDNLEDYHSLPQHQRGVFGGGGMGTYVPPGFPHPQSRTYATALGQGAFLPAELSLQHPETQIHAE

SEQ ID NO: 637 - protein, 1123 aa, Homo sapiens
MPIVDKLKEALKPGRKDSADDGELGKLLASSAKKVLLQKIEFEPASKSFSYQLEALKSKYVLLNPKTEGASRHKSGDDPPARRQGSEHTYESCGDGVPAPQKVLFPTERLSLRWERVFRVGAGLHNLGNTCFLNATIQCLTYTPPLANYLLSKEHARSCHQGSFCMLCVMQNHIVQAFANSGNAIKPVSFIRDLKKIARHFRFGNQEDAHEFLRYTIDAMQKACLNGCAKLDRQTQATTLVHQIFGGYLRSRVKCSVCKSVSDTYDPYLDVALEIRQAANIVRALELFVKADVLSGENAYMCAKCKKKVPASKRFTIHRTSNVLTLSLKRFANFSGGKITKDVGYPEFLNIRPYMSQNNGDPVMYGLYAVLVHSGYSCHAGHYYCYVKASNGQWYQMNDSLVHSSNVKVVLNQQAYVLFYLRIPGSKKSPEGLISRTGSSSLPGRPSVIPDHSKKNIGNGIISSPLTGKRQDSGTMKKPHTTEEIGVPISRNGSTLGLKSQNGCIPPKLPSGSPSPKLSQTPTHMPTILDDPGKKVKKPAPPQHFSPRTAQGLPGTSNSNSSRSGSQRQGSWDSRDVVLSTSPKLLATATANGHGLKGNDESAGLDRRGSSSSSPEHSASSDSTKAPQTPRSGAAHLCDSQETNCSTAGHSKTPPSGADSKTVKLKSPVLSNTTTEPASTMSPPPAKKLALSAKKASTLWRATGNDLRPPPPSPSSDLTHPMKTSHPVVASTWPVHRARAVSPAPQSSSRLQPPFSPHPTLLSSTPKPPGTSEPRSCSSISTALPQVNEDLVSLPHQLPEASEPPQSPSEKRKKTFVGEPQRLGSETRLPQHIREATAAPHGKRKRKKKKRPEDTAASALQEGQTQRQPGSPMYRREGQAQLPAVRRQEDGTQPQVNGQQVGCVTDGHHASSRKRRRKGAEGLGEEGGLHQDPLRHSCSPMGDGDPEAMEESPRKKKKKKRKQETQRAVEEDGHLKCPRSAKPQDAVVPESSSCAPSANGWCPGDRMGLSQAPPVSWNGERESDVVQELLKYSSDKAYGRKVLTWDGKMSAVSQDAIEDSRQARTETVVDDWDEEFDRGKEKKIKKFKREKRRNFNAFQKLQTRRNFWSVTHPAKAASLSYRR

SEQ ID NO: 638 - protein, 504 aa, Homo sapiens
MGIKTALPAAELGLYSLVLSGALAYAGRGLLEASQDGAHRKAFRESVRPGWEYIGRKMDVADFEWVMWFTSFRNVIIFALSGHVLFAKLCTMVAPKLRSWMYAVYGALAVMGTMGPWYLLLLLGHCVGLYVASLLGQPWLCLGLGLASLASFKMDPLISWQSGFVTGTFDLQEVLFHGGSSFTVLRCTSFALESCAHPDRHYSLADLLKYNFYLPFFFFGPIMTFDRFHAQVSQVEPVRREGELWHIRAQAGLSVVAIMAVDIFFHFFYILTIPSDLKFANRLPDSALAGLAYSNLVYDWVKAAVLFGVVNTVACLDHLDPPQPPKCITALYVFAETHFDRGINDWLCKYVYNHIGGEHSAVIPELAATVATFAITTLWLGPCDIVYLWSFLNCFGLNFELWMQKLAEWGPLARIEASLSVQMSRRVRALFGAMNFWAIIMYNLVSLNSLKFTELVARRLLLTGFPQTTLSILFVTYCGVQLVKERERTLALEEEQKQDKEKPE

SEQ ID NO: 639 - protein, 367 aa, Homo sapiens
MEPIYEEYLANHGTIVKPYYWLSFSLDCSNCPYHIRTGEEARVSLTEFCQIFGFPYGTTFPQTKHLTFYELKTSSGSLVQKGHASSCTGNYIHPESMLFEMNGYLDSAIYNNDSIRHIILYSNNSPCNEANHCCISKMYNFLITYPGITLSIYFSQLYHTEMDFPASAWNREALRSLASLWPRVVLSPISGGIWHSVLHSFISGVSGSHVFQPILTGRALADRHNAYEINAITGVKPYFTDVLLQTKRNPNTKAQEALESYPLNNAFPGQFFQMPSGQLQPNLPPDLRAPVVFVLVPLRDLPPMHMGQNPNKPRNIVRHLNMPQMSFQETKDLGRLPTGRSVEIVEITEQFASSKEADEKKKKKGKK

SEQ ID NO: 640 - protein, 327 aa, Homo sapiens
MNILFLQWKVKLPPQKEVITSDELMAHLGNCLLSIKPQEKSEGLQLNFQQNVDDAMTVLPKLATGLDVNVRFTGVSDFEYTPECSVFDLLGIPLYHGWLVDPQSPEAVRAVGKLSYNQLVERIITCKHSSDTNLVTEGLIAEQFLETTAAQLTYHGLCELTAAAKEGELSVFFRNNHFSTMTKHKSHLYLLVTDQGFLQEEQVVWESLHNVDGDSCFCDSDFHLSHSLGKGPGAEGGSGSPETQLQVDQDYLIALSLQQQQPRGPLGLTDLELAQQLQQEEYQQQQAAQPVRMRTRVLSLQGRGATSGRPAGERRQRPKHESDCILL

SEQ ID NO: 641 - protein, 1647 aa, Homo sapiens
MVQKKKFCPRLLDYLVIVGARHPSSDSVAQTPELLRRYPLEDHTEFPLPPDVVFFCQPEGCLSVRQRRMSLRDDTSFVFTLTDKDTGVTRYGICVNFYRSFQKRISKEKGEGGAGSRGKEGTHATCASEEGGTESSESGSSLQPLSADSTPDVNQSPRGKRRAKAGSRSRNSTLTSLCVLSHYPFFSTFRECLYTLKRLVDCCSERLLGKKLGIPRGVQRDTMWRIFTGSLLVEEKSSALLHDLREIEAWIYRLLRSPVPVSGQKRVDIEVLPQELQPALTFALPDPSRFTLVDFPLHLPLELLGVDACLQVLTCILLEHKVVLQSRDYNALSMSVMAFVAMIYPLEYMFPVIPLLPTCMASAEQLLLAPTPYIIGVPASFFLYKLDFKMPDDVWLVDLDSNRVIAPTNAEVLPILPEPESLELKKHLKQALASMSLNTQPILNLEKFHEGQEIPLLLGRPSNDLQSTPSTEFNPLIYGNDVDSVDVATRVAMVRFFNSANVLQGFQMHTRTLRLFPRPVVAFQAGSFLASRPRQTPFAEKLARTQAVEYFGEWILNPTNYAFQRIHNNMFDPALIGDKPKWYAHQLQPIHYRVYDSNSQLAEALSVPPERDSDSEPTDDSGSDSMDYDDSSSSYSSLGDFVSEMMKCDINGDTPNVDPLTHAALGDASEVEIDELQNQKEAEEPGPDSENSQENPPLRSSSSTTASSSPSTVIHGANSEPADSTEMDDKAAVGVSKPLPSVPPSIGKSNVDRRQAEIGEGSVRRRIYDNPYFEPQYGFPPEEDEDEQGESYTPRFSQHVSGNRAQKLLRPNSLRLASDSDAESDSRASSPNSTVSNTSTEGFGGIMSFASSLYRNHSTSFSLSNLTLPTKGAREKATPFPSLKVFGLNTLMEIVTEAGPGSGEGNRRALVDQKSSVIKHSPTVKREPPSPQGRSSNSSENQQFLKEVVHSVLDGQGVGWLNMKKVRRLLESEQLRVFVLSKLNRMVQSEDDARQDIIPDVEISRKVYKGMLDLLKCTVLSLEQSYAHAGLGGMASIFGLLEIAQTHYYSKEPDKRKRSPTESVNTPVGKDPGLAGRGDPKAMAQLRVPQLGPRAPSATGKGPKELDTRSLKEENFIASIELWNKHQEVKKQKALEKQRPEVIKPVFDLGETEEKKSQISADSGVSLTSSSQRTDQDSVIGVSPAVMIRSSSQDSEVSTVVSNSSGETLGADSDLSSNAGDGPGGEGSVHLASSRGTLSDSEIETNSATSTIFGKAHSLKPSIKEKLAGSPIRTSEDVSQRVYLYEGLLGRDKGSMWDQLEDAAMETFSISKERSTLWDQMQFWEDAFLDAVMLEREGMGMDQGPQEMIDRYLSLGEHDRKRLEDDEDRLLATLLHNLISYMLLMKVNKNDIRKKVRRLMGKSHIGLVYSQQINEVLDQLANLNGRDLSIWSSGSRHMKKQTFVVHAGTDTNGDIFFMEVCDDCVVLRSNIGTVYERWWYEKLINMTYCPKTKVLCLWRRNGSETQLNKFYTKKCRELYYCVKDSMERAAARQQSIKPGPELGGEFPVQDLKTGEGGLLQVTLEGINLKFMHNQVFIELNHIKKCNTVRGVFVLEEFVPEIKEVVSHKYKTPMAHEICYSVLCLFSYVAAVHSSEEDLRTPPRPVSS

SEQ ID NO: 642 - protein, 142 aa, Homo sapiens
MRLSWFRVLTVLSICLSAVATATGAEGKRKLQIGVKKRVDHCPIKSRKGDVLHMHYTGKLEDGTEFDSSLPQNQPFVFSLGTGQVIKGWDQGLLGMCEGEKRKLVIPSELGYGERGAPPKIPGGATLVFEVELLKIERRTEL

SEQ ID NO: 643 - protein, 745 aa, Homo sapiens
MEVMNLMEQPIKVTEWQQTYTYDSGIHSGANTCVPSVSSKGIMEEDEACGRQYTLKKTTTYTQGVPPSQGDLEYQMSTTARAKRVREAMCPGVSGEDSSLLLATQVEGQATNLQRLAEPSQLLKSAIVHLINYQDDAELATRALPELTKLLNDEDPVVVTKAAMIVNQLSKKEASRRALMGSPQLVAAVVRTMQNTSDLDTARCTTSILHNLSHHREGLLAIFKSGGIPALVRMLSSPVESVLFYAITTLHNLLLYQEGAKMAVRLADGLQKMVPLLNKNNPKFLAITTDCLQLLAYGNQESKLIILANGGPQALVQIMRNYSYEKLLWTTSRVLKVLSVCPSNKPAIVEAGGMQALGKHLTSNSPRLVQNCLWTLRNLSDVATKQEGLESVLKILVNQLSVDDVNVLTCATGTLSNLTCNNSKNKTLVTQNSGVEALIHAILRAGDKDDITEPAVCALRHLTSRHPEAEMAQNSVRLNYGIPAIVKLLNQPNQWPLVKATIGLIRNLALCPANHAPLQEAAVIPRLVQLLVKAHQDAQRHVAAGTQQPYTDGVRMEEIVEGCTGALHILARDPMNRMEIFRLNTIPLFVQLLYSSVENIQRVAAGVLCELAQDKEAADAIDAEGASAPLMELLHSRNEGTATYAAAVLFRISEDKNPDYRKRVSVELTNSLFKHDPAAWEAAQSMIPINEPYGDDMDATYRPMYSSDVPLDPLEMHMDMDGDYPIDTYSDGLRPPYPTADHMLA

SEQ ID NO: 644 - protein, 719 aa, Homo sapiens
MGFSNMEDDGPEEEERVAEPQANFNTPQALRFEELLANLLNEQHQIAKELFEQLKMKKPSAKQQKEVEKVKPQCKEVHQTLILDPAQRKRLQQQMQQHVQLLTQIHLLATCNPNLNPEASSTRICLKELGTFAQSSIALHHQYNPKFQTLFQPCNLMGAMQLIEDFSTHVSIDCSPHKTVKKTANEFPCLPKQVAWILATSKVFMYPELLPVCSLKAKNPQDKILFTKAEDNKYLLTCKTARQLTVRIKNLNMNRAPDNIIKFYKKTKQLPVLGKCCEEIQPHQWKPPIEREEHRLPFWLKASLPSIQEELRHMADGAREVGNMTGTTEINSDQGLEKDNSELGSETRYPLLLPKGVVLKLKPVADRFPKKAWRQKRSSVLKPLLIQPSPSLQPSFNPGKTPAQSTHSEAPPSKMVLRIPHPIQPATVLQTVPGVPPLGVSGGESFESPAALPAMPPEARTSFPLSESQTLLSSAPVPKVMMPSPASSMFRKPYVRRRPSKRRGARAFRCIKPAPVIHPASVIFTVPATTVKIVSLGGGCNMIQPVNAAVAQSPQTIPIATLLVNPTSFPCPLNQPLVASSVSPLIVSGNSVNLPIPSTPEDKAHMNVDIACAVADGENAFQGLEPKLEPQELSPLSATVFPKVEHSPGPPPVDKQCQEGLSENSAYRWTVVKTEEGRQALEPLPQGIQESLNNSSPGDLEEVVKMEPEDATEEISGFL

SEQ ID NO: 645 - protein, 1344 aa, Homo sapiens
MTRKRTYWVPNSSGGLVNRGIDIGDDMVSGLIYKTYTLQDGPWSQQERNPEAPGRAAVPPWGKYDAALRTMIPFRPKPRFPAPQPLDNAGLFSYLTVSWLTPLMIQSLRSRLDENTIPPLSVHDASDKNVQRLHRLWEEEVSRRGIEKASVLLVMLRFQRTRLIFDALLGICFCIASVLGPILIIPKILEYSEEQLGNVVHGVGLCFALFLSECVKSLSFSSSWIINQRTAIRFRAAVSSFAFEKLIQFKSVIHITSGEAISFFTGDVNYLFEGVCYGPLVLITCASLVICSISSYFIIGYTAFIAILCYLLVFPLAVFMTRMAVKAQHHTSEVSDQRIRVTSEVLTCIKLIKMYTWEKPFAKIIEDLRRKERKLLEKCGLVQSLTSITLFIIPTVATAVWVLIHTSLKLKLTASMAFSMLASLNLLRLSVFFVPIAVKGLTNSKSAVMRFKKFFLQESPVFYVQTLQDPSKALVFEEATLSWQQTCPGIVNGALELERNGHASEGMTRPRDALGPEEEGNSLGPELHKINLVVSKGMMLGVCGNTGSGKSSLLSAILEEMHLLEGSVGVQGSLAYVPQQAWIVSGNIRENILMGGAYDKARYLQVLHCCSLNRDLELLPFGDMTEIGERGLNLSGGQKQRISLARAVYSDRQIYLLDDPLSAVDAHVGKHIFEECIKKTLRGKTVVLVTHQLQYLEFCGQIILLENGKICENGTHSELMQKKGKYAQLIQKMHKEATSDMLQDTAKIAEKPKVESQALATSLEESLNGNAVPEHQLTQEEEMEEGSLSWRVYHHYIQAAGGYMVSCIIFFFVVLIVFLTIFSFWWLSYWLEQGSGTNSSRESNGTMADLGNIADNPQLSFYQLVYGLNALLLICVGVCSSGIFTKVTRKASTALHNKLFNKVFRCPMSFFDTIPIGRLLNCFAGDLEQLDQLLPIFSEQFLVLSLMVIAVLLIVSVLSPYILLMGAIIMVICFIYYMMFKKAIGVFKRLENYSRSPLFSHILNSLQGLSSIHVYGKTEDFISQFKRLTDAQNNYLLLFLSSTRWMALRLEIMTNLVTLAVALFVAFGISSTPYSFKVMAVNIVLQLASSFQATARIGLETEAQFTAVERILQYMKMCVSEAPLHMEGTSCPQGWPQHGEIIFQDYHMKYRDNTPTVLHGINLTIRGHEVVGIVGRTGSGKSSLGMALFRLVEPMAGRILIDGVDICSIGLEDLRSKLSVIPQDPVLLSGTIRFNLDPFDRHTDQQIWDALERTFLTKAIILIDEATASIDMETDTLIQRTIREAFQGCTVLVIAHRVTTVLNCDHILVMGNGKVVEFDRPEVLRKKPGSLFAALMATATSSLR

SEQ ID NO: 646 - protein, 1300 aa, Homo sapiens
MGTGPAQTPRSTRAGPEPSPAPPGPGDTGDSDVTQEGSGPAGIRGGETVIRAGMGDSPGRGAPERRHKAQPGRARKYEWRPEGPTSMGSLGQREDLQDEDRNSAFTWKVQANNRAYNGQFKEKVILCWQRKKYKTNVIRTAKYNFYSFLPLNLYEQFHRVSNLFFLIIIILQSIPDISTLPWFSLSTPMVCLLFIRATRDLVDDMGRHKSDRAINNRPCQILMGKSFKQKKWQDLCVGDVVCLRKDNIVPADMLLLASTEPSSLCYVETVDIDGETNLKFRQALMVTHKELATIKKMASFQGTVTCEAPNSRMHHFVGCLEWNDKKYSLDIGNLLLRGCRIRNTDTCYGLVIYAGFDTKIMKNCGKIHLKRTKLDLLMNKLVVVIFISVVLVCLVLAFGFGFSVKEFKDHHYYLSGVHGSSVAAESFFVFWSFLILLSVTIPMSMFILSEFIYLGNSVFIDWDVQMYYKPQDVPAKARSTSLNDHLGQVEYIFSDKTGTLTQNILTFNKCCISGRVYGPDSEATTRPKENPYLWNKFADGKLLFHNAALLHLVRTNGDEAVREFWRLLAICHTVMVRESPRERPDQLLYQAASPDEGALVTAARNFGYVFLSRTQDTVTIMELGEERVYQVLAIMDFNSTRKRMSVLVRKPEGAICLYTKGADTVIFERLHRRGAMEFATEEALAAFAQETLRTLCLAYREVAEDIYEDWQQRHQEASLLLQNRAQALQQLLGATAIEDRLQDGVPETIKCLKKSNIKIWVLTGDKQETAVNIGFACELLSENMLILEEKEISRILETYWENSNNLLTRESLSQVKLALVINGDFLDKLLVSLRKEPRALAQNVNMDEAWQELGQSRRDFLYARRLSLLCRRFGLPLAAPPAQDSRARRSSEVLQERAFVDLASKCQAVICCRVTPKQKALIVALVKKYHQVVTLAIGDGANDINMIKTADVGVGLAGQEGMQAVQNSDFVLGQFCFLQRLLLVHGRWSYVRICKFLRYFFYKSMASMMVQVWFACYNGFTGQPLYEGWFLALFNLLYSTLPVLYIGLFEQDVSAEQSLEKPELYVVGQKDELFNYWVFVQAIAHGVTTSLVNFFMTLWISRDTAGPASFSDHQSFAVVVALSCLLSITMEVILIIKYWTALCVATILLSLGFYAIMTTTTQSFWLFRVSPTTFPFLYADLSVMSSPSILLVVLLSVSINTFPVLALRVIFPALKELRAKEEKVEEGPSEEIFTMEPLPHVHRESRARRSSYAFSHREGYANLITQGTILRRGPGVSSDIASESLDPSDEEAASSPKESQ

SEQ ID NO: 647 - protein, 511 aa, Homo sapiens
MKLSKKDRGEDEESDSAKKKLDWSCSLLVASLAGAFGSSFLYGYNLSVVNAPTPYIKAFYNESWERRHGRPIDPDTLTLLWSVTVSIFAIGGLVGTLIVKMIGKVLGRKHTLLANNGFAISAALLMACSLQAGAFEMLIVGRFIMGIDGGVALSVLPMYLSEISPKEIRGSLGQVTAIFICIGVFTGQLLGLPELLGKESTWPYLFGVIVVPAVVQLLSLPFLPDSPRYLLLEKHNEARAVKAFQTFLGKADVSQEVEEVLAESRVQRSIRLVSVLELLRAPYVRWQVVTVIVTMACYQLCGLNAIWFYTNSIFGKAGIPPAKIPYVTLSTGGIETLAAVFSGLVIEHLGRRPLLIGGFGLMGLFFGTLTITLTLQDHAPWVPYLSIVGILAIIASFCSGPGGIPFILTGEFFQQSQRPAAFIIAGTVNWLSNFAVGLLFPFIQKSLDTYCFLVFATICITGAIYLYFVLPETKNRTYAEISQAFSKRNKAYPPEEKIDSAVTDGKINGRP

SEQ ID NO: 648 - protein, 591 aa, Homo sapiens
MWERLNCAAEDFYSRLLQKFNEEKKGIRKDPFLYEADVQVQLISKGQPNPLKNILNENDIVFIVEKVPLEKEETSHIEELQSEETAISDFSTGENVGPLALPVGKARQLIGLYTMAHNPNMTHLKINLPVTALPPLWVRCDSSDPEGTCWLGAELITTNNSITGIVLYVVSCKADKNYSVNLENLKNLHKKRHHLSTVTSKGFAQYELFKSSALDDTITASQTAIALDISWSPVDEILQIPPLSSTATLNIKVESGEPRGPLNHLYRELKFLLVLADGLRTGVTEWLEPLEAKSAVELVQEFLNDLNKLDGFGDSTKKDTEVETLKHDTAAVDRSVKRLFKVRSDLDFAEQLWCKMSSSVISYQDLVKCFTLIIQSLQRGDIQPWLHSGSNSLLSKLIHQSYHGTMDTVSLSGTIPVQMLLEIGLDKLKKDYISFFIGQELASLNHLEYFIAPSVDIQEQVYRVQKLHHILEILVSCMPFIKSQHELLFSLTQICIKYYKQNPLDEQHIFQLPVRPTAVKNLYQSEKPQKWRVEIYSGQKKIKTVWQLSDSSPIDHLNFHKPDFSELTLNGSLEERIFFTNMVTCSQVHFK

SEQ ID NO: 649 - protein, 218 aa, Homo sapiens
MPMILGYWDIRGLAHAIRLLLEYTDSSYEEKKYTMGDAPDYDRSQWLNEKFKLGLDFPNLPYLIDGAHKITQSNAILCYIARKHNLCGETEEEKIRVDILENQTMDNHMQLGMICYNPEFEKLKPKYLEELPEKLKLYSEFLGKRPWFAGNKITFVDFLVYDVLDLHRIFEPKCLDAFPNLKDFISRFEGLEKISAYMKSSRFLPRPVFSKMAVWGNK

SEQ ID NO: 650 - protein, 299 aa, Homo sapiens
MLGWVQRVLPQPPGTPRKTKMQEEEEVEPEPEMEAEVEPEPNPEEAETESESMPPEESFKEEEVAVADPSPQETKEAALTSTISLRAQGAEISEMNSPSRRVLTWLMKGVEKVIPQPVHSITEDPAQILGHGSTGDTGCTDEPNEALEAQDTRPGLRLLLWLEQNLERVLPQPPKSSEVWRDEPAVATGAASDPAPPGRPQEMGPKLQARETPSLPTPIPLQPKEEPKEAPAPEPQPGSQAQTSSLPPTRDPARLVAWVLHRLEMALPQPVLHGKIGEQEPDSPGICDVQTRVMGAGGL

SEQ ID NO: 651 - protein, 337 aa, Homo sapiens
MGPRARPALLLLMLLQTAVLQGRLLRSHSLHYLFMGASEQDLGLSLFEALGYVDDQLFVFYDHESRRVEPRTPWVSSRISSQMWLQLSQSLKGWDHMFTVDFWTIMENHNHSKESHTLQVILGCEMQEDNSTEGYWKYGYDGQDHLEFCPDTLDWRAAEPRAWPTKLEWERHKIRARQNRAYLERDCPAQLQQLLELGRGVLDQQVPPLVKVTHHVTSSVTTLRCRALNYYPQNITMKWLKDKQPMDAKEFEPKDVLPNGDGTYQGWITLAVPPGEEQRYTCQVEHPGLDQPLIVIWEPSPSGTLVIGVISGIAVFVVILFIGILFIILRKRQGSSF

SEQ ID NO: 652 - protein, 985 aa, Homo sapiens
MPVPSRHINIGRSQSWDAAGWYEGPWENAESLRPLGRRSSLTYGTAEGTWFEPNHRPQDAALPVAAEPYLYREAVYNSVAARKGSTPDFTFYDSRQAVMSGRSPLLPREYYSDPSGAARVPKEPPLYRDPGVSRPVPSYGVLGSRTSWDPMQGRSPALQDAGHLYRDPGGKMIPQGRQTQSRAASPGRYGREQPDTRYGAEVPAYPLSQVFSDISERPIDPAPARQVAPTCLVVDPSSAAAPEGSTGVAPGALNRGYGPARESIPSKMAYETYEADLSTFQGPGGKRTVLPEFLAFLRAEGLAEATLGALLQQGFDSPAVLATLEDADIKSVAPNLGQARVLSRLANSCRTEMQLRRQDRGGPLPRARSSSFSHRSELLHGDLASLGAAAPLQTASPRAGDPARRPSSAPSQHLLETAATYSAPGVGTHAPHFPSNSGYSSPTPCALTARLSPTYPLQAGVALTNPGPSNPLHPGPRTAYSTAYTVPMELLKRERNVAASPLPSPHGSPQVLRKPGAPLGPSTLPPASQSLHTPHSPYQKVARRTGAPIIVSTMLAPEPSIRPQIMNGPLHPRPLVALLDGRDCTVEMPILKDLATVAFCDAQSTQEIHEKVLNEAVGAMMYHTITLTREDLEKFKALRVIVRIGSGYDNVDIKAAGELGIAVCNIPSAAVEETADSTICHILNLYRRNTWLYQALREGTRVQSVEQIREVASGAARIRGETLGLIGFGRTGQAVAVRAKAFGFSVIFYDPYLQDGIERSLGVQRVYTLQDLLYQSDCVSLHCNLNEHNHHLINDFTIKQMRQGAFLVNAARGGLVDEKALAQALKEGRIRGAALDVHESEPFSFAQGPLKDAPNLICTPHTAWYSEQASLEMREAAATEIRRAITGRIPESLRNCVNKEFFVTSAPWSVIDQQAIHPELNGATYRYPPGIVGVAPGGLPAAMEGIIPGGIPVTHNLPTVAHPSQAPSPNQPTKHGDNREHPNEQ

SEQ ID NO: 653 - protein, 846 aa, Homo sapiens
MGIQGLLQFIKEASEPIHVRKYKGQVVAVDTYCWLHKGAIACAEKLAKGEPTDRYVGFCMKFVNMLLSHGIKPILVFDGCTLPSKKEVERSRRERRQANLLKGKQLLREGKVSEARECFTRSINITHAMAHKVIKAARSQGVDCLVAPYEADAQLAYLNKAGIVQAIITEDSDLLAFGCKKVILKMDQFGNGLEIDQARLGMCRQLGDVFTEEKFRYMCILSGCDYLSSLRGIGLAKACKVLRLANNPDIVKVIKKIGHYLKMNITVPEDYINGFIRANNTFLYQLVFDPIKRKLIPLNAYEDDVDPETLSYAGQYVDDSIALQIALGNKDINTFEQIDDYNPDTAMPAHSRSHSWDDKTCQKSANVSSIWHRNYSPRPESGTVSDAPQLKENPSTVGVERVISTKGLNLPRKSSIVKRPRSAELSEDDLLSQYSLSFTKKTKKNSSEGNKSLSFSEVFVPDLVNGPTNKKSVSTPPRTRNKFATFLQRKNEESGAVVVPGTRSRFFCSSDSTDCVSNKVSIQPLDETAVTDKENNLHESEYGDQEGKRLVDTDVARNSSDDIPNNHIPGDHIPDKATVFTDEESYSFESSKFTRTISPPTLGTLRSCFSWSGGLGDFSRTPSPSPSTALQQFRRKSDSPTSLPENNMSDVSQLKSEESSDDESHPLREEACSSQSQESGEFSLQSSNASKLSQCSSKDSDSEESDCNIKLLDSQSDQTSKLRLSHFSKKDTPLRNKVPGLYKSSSADSLSTTKIKPLGPARASGLSKKPASIQKRKHHNAENKPGLQIKLNELWKNFGFKKDSEKLPPCKKPLSPVRDNIQLTPEAEEDIFNKPECGRVQRAIFQ

SEQ ID NO: 654 - protein, 860 aa, Homo sapiens
MSRGGSYPHLLWDVRKRSLGLEDPSRLRSRYLGRREFIQRLKLEATLNVHDGCVNTICWNDTGEYILSGSDDTKLVISNPYSRKVLTTIRSGHRANIFSAKFLPCTNDKQIVSCSGDGVIFYTNVEQDAETNRQCQFTCHYGTTYEIMTVPNDPYTFLSCGEDGTVRWFDTRIKTSCTKEDCKDDILINCRRAATSVAICPPIPYYLAVGCSDSSVRIYDRRMLGTRATGNYAGRGTTGMVARFIPSHLNNKSCRVTSLCYSEDGQEILVSYSSDYIYLFDPKDDTARELKTPSAEERREELRQPPVKRLRLRGDWSDTGPRARPESERERDGEQSPNVSLMQRMSDMLSRWFEEASEVAQSNRGRGRSRPRGGTSQSDISTLPTVPSSPDLEVSETAMEVDTPAEQFLQPSTSSTMSAQAHSTSSPTESPHSTPLLSSPDSEQRQSVEASGHHTHHQSDNNNEKLSPKPGTGEPVLSLHYSTEGTTTSTIKLNFTDEWSSIASSSRGIGSHCKSEGQEESFVPQSSVQPPEGDSETKAPEESSEDVTKYQEGVSAENPVENHINITQSDKFTAKPLDSNSGERNDLNLDRSCGVPEESASSEKAKEPETSDQTSTESATNENNTNPEPQFQTEATGPSAHEETSTRDSALQDTDDSDDDPVLIPGARYRAGPGDRRSAVARIQEFFRRRKERKEMEELDTLNIRRPLVKMVYKGHRNSRTMIKEANFWGANFVMSGSDCGHIFIWDRHTAEHLMLLEADNHVVNCLQPHPFDPILASSGIDYDIKIWSPLEESRIFNRKLADEVITRNELMLEETRNTITVPASFMLRMLASLNHIRADRLEGDRSEGSGQENENEDEE

SEQ ID NO: 655 - protein, 365 aa, Homo sapiens
MWLRSHRQLCLAFLLVCVLSVIFFLHIHQDSFPHGLGLSILCPDRRLVTPPVAIFCLPGTAMGPNASSSCPQHPASLSGTWTVYPNGRFGNQMGQYATLLALAQLNGRRAFILPAMHAALAPVFRITLPVLAPEVDSRTPWRELQLHDWMSEEYADLRDPFLKLSGFPCSWTFFHHLREQIRREFTLHDHLREEAQSVLGQLRLGRTGDRPRTFVGVHVRRGDYLQVMPQRWKGVVGDSAYLRQAMDWFRARHEAPVFVVTSNGMEWCKENIDTSQGDVTFAGDGQEATPWKDFALLTQCNHTIMTIGTFGFWAAYLAGGDTVYLANFTLPDSEFLKIFKPEAAFLPEWVGINADLSPLWTLAKP

SEQ ID NO: 656 - protein, 163 aa, Homo sapiens
MGNCAKRPWRRGPKDRELRPEEIEELQVAFQEFDRDRDGYIGCRELGACMRTLGYMPTEMELIEISQQISGGKVDFEDFVELMGPKLLAETADMIGVRELRDAFREFDTNGDGRISVGELRAALKALLGERLSQREVDEILQDVDLNGDGLVDFEEFVRMMSR

SEQ ID NO: 657 - protein, 1268 aa, Homo sapiens
MSSVAVLTQESFAEHRSGLVPQQIKVATLNSEEESDPPTYKDAFPPLPEKAACLESAQEPAGAWGNKIRPIKASVITQVFHVPLEERKYKDMNQFGEGEQAKICLEIMQRTGAHLELSLAKDQGLSIMVSGKLDAVMKARKDIVARLQTQASATVAIPKEHHRFVIGKNGEKLQDLELKTATKIQIPRPDDPSNQIKITGTKEGIEKARHEVLLISAEQDKRAVERLEVEKAFHPFIAGPYNRLVGEIMQETGTRINIPPPSVNRTEIVFTGEKEQLAQAVARIKKIYEEKKKKTTTIAVEVKKSQHKYVIGPKGNSLQEILERTGVSVEIPPSDSISETVILRGEPEKLGQALTEVYAKANSFTVSSVAAPSWLHRFIIGKKGQNLAKITQQMPKVHIEFTEGEDKITLEGPTEDVNVAQEQIEGMVKDLINRMDYVEINIDHKFHRHLIGKSGANINRIKDQYKVSVRIPPDSEKSNLIRIEGDPQGVQQAKRELLELASRMENERTKDLIIEQRFHRTIIGQKGERIREIRDKFPEVIINFPDPAQKSDIVQLRGPKNEVEKCTKYMQKMVADLVENSYSISVPIFKQFHKNIIGKGGANIKKIREESNTKIDLPAENSNSETIIITGKRANCEAARSRILSIQKDLANIAEVEVSIPAKLHNSLIGTKGRLIRSIMEECGGVHIHFPVEGSGSDTVVIRGPSSDVEKAKKQLLHLAEEKQTKSFTVDIRAKPEYHKFLIGKGGGKIRKVRDSTGARVIFPAAEDKDQDLITIIGKEDAVREAQKELEALIQNLDNVVEDSMLVDPKHHRHFVIRRGQVLREIAEEYGGVMVSFPRSGTQSDKVTLKGAKDCVEAAKKRIQEIIEDLEAQVTLECAIPQKFHRSVMGPKGSRIQQITRDFSVQIKFPDREENAVHSTEPVVQENGDEAGEGREAKDCDPGSPRRCDIIIISGRKEKCEAAKEALEALVPVTIEVEVPFDLHRYVIGQKGSGIRKMMDEFEVNIHVPAPELQSDIIAITGLAANLDRAKAGLLERVKELQAEQEDRALRSFKLSVTVDPKYHPKIIGRKGAVITQIRLEHDVNIQFPDKDDGNQPQDQITITGYEKNTEAARDAILRIVGELEQMVSEDVPLDHRVHARIIGARGKAIRKIMDEFKVDIRFPQSGAPDPNCVTVTGLPENVEEAIDHILNLEEEYLADVVDSEALQVYMKPPAHEEAKAPSRGFVVRDAPWTASSSEKAPDMSSSEEFPSFGAQVAPKTLPWGPKR

SEQ ID NO: 658 - protein, 527 aa, Homo sapiens
MESAAALHFSRPASLLLLLLSLCALVSAQFIVVGPTDPILATVGENTTLRCHLSPEKNAEDMEVRWFRSQFSPAVFVYKGGRERTEEQMEEYRGRTTFVSKDISRGSVALVIHNITAQENGTYRCYFQEGRSYDEAILHLVVAGLGSKPLISMRGHEDGGIRLECISRGWYPKPLTVWRDPYGGVAPALKEVSMPDADGLFMVTTAVIIRDKSVRNMSCSINNTLLGQKKESVIFIPESFMPSVSPCAVALPIIVVILMIPIAVCIYWINKLQKEKKILSGEKEFERETREIALKELEKERVQKEEELQVKEKLQEELRWRRTFLHAVDVVLDPDTAHPDLFLSEDRRSVRRCPFRHLGESVPDNPERFDSQPCVLGRESFASGKHYWEVEVENVIEWTVGVCRDSVERKGEVLLIPQNGFWTLEMHKGQYRAVSSPDRILPLKESLCRVGVFLDYEAGDVSFYNMRDRSHIYTCPRSAFSVPVRPFFRLGCEDSPIFICPALTGANGVTVPEEGLTLHRVGTHQSL

SEQ ID NO: 659 - protein, 956 aa, Homo sapiens
MASKRKSTTPCMIPVKTVVLQDASMEAQPAETLPEGPQQDLPPEASAASSEAAQNPSSTDGSTLANGHRSTLDGYLYSCKYCDFRSHDMTQFVGHMNSEHTDFNKDPTFVCSGCSFLAKTPEGLSLHNATCHSGEASFVWNVAKPDNHVVVEQSIPESTSTPDLAGEPSAEGADGQAEIIITKTPIMKIMKGKAEAKKIHTLKENVPSQPVGEALPKLSTGEMEVREGDHSFINGAVPVSQASASSAKNPHAANGPLIGTVPVLPAGIAQFLSLQQQPPVHAQHHVHQPLPTAKALPKVMIPLSSIPTYNAAMDSNSFLKNSFHKFPYPTKAELCYLTVVTKYPEEQLKIWFTAQRLKQGISWSPEEIEDARKKMFNTVIQSVPQPTITVLNTPLVASAGNVQHLIQAALPGHVVGQPEGTGGGLLVTQPLMANGLQATSSPLPLTVTSVPKQPGVAPINTVCSNTTSAVKVVNAAQSLLTACPSITSQAFLDASIYKNKKSHEQLSALKGSFCRNQFPGQSEVEHLTKVTGLSTREVRKWFSDRRYHCRNLKGSRAMIPGDHSSIIIDSVPEVSFSPSSKVPEVTCIPTTATLATHPSAKRQSWHQTPDFTPTKYKERAPEQLRALESSFAQNPLPLDEELDRLRSETKMTRREIDSWFSERRKKVNAEETKKAEENASQEEEEAAEDEGGEEDLASELRVSGENGSLEMPSSHILAERKVSPIKINLKNLRVTEANGRNEIPGLGACDPEDDESNKLAEQLPGKVSCKKTAQQRHLLRQLFVQTQWPSNQDYDSIMAQTGLPRPEVVRWFGDSRYALKNGQLKWYEDYKRGNFPPGLLVIAPGNRELLQDYYMTHKMLYEEDLQNLCDKTQMSSQQVKQWFAEKMGEETRAVADTGSEDQGPGTGELTAVHKGMGDTYSEVSENSESWEPRVPEASSEPFDTSSPQAGRQLETD

SEQ ID NO: 660 - protein, 537 aa, Homo sapiens
MGGAGILLLLLAGAGVVVAWRPPKGKCPLRCSCSKDSALCEGSPDLPVSFSPTLLSLSLVRTGVTQLKAGSFLRIPSLHLLLFTSNSFSVIEDDAFAGLSHLQYLFIEDNEIGSISKNALRGLRSLTHLSLANNHLETLPRFLFRGLDTLTHVDLRGNPFQCDCRVLWLLQWMPTVNASVGTGACAGPASLSHMQLHHLDPKTFKCRAIELSWFQTVGESALSVEPFSYQGEPHIVLAQPFAGRCLILSWDYSLQRFRPEEELPAASVVSCKPLVLGPSLFVLAARLWGGSQLWARPSPGLRLAPTQTLAPRRLLRPNDAELLWLEGQPCFVVADASKAGSTTLLCRDGPGFYPHQSLHAWHRDTDAEALELDGRPHLLLASASQRPVLFHWTGGRFERRTDIPEAEDVYATRHFQAGGDVFLCLTRYIGDSMVMRWDGSMFRLLQQLPSRGAHVFQPLLIARDQLAILGSDFAFSQVLRLEPDKGLLEPLQELGPPALVAPRAFAHITMAGRRFLFAACFKGPTQIYQHHEIDLSA

SEQ ID NO: 661 - protein, 953 aa, Homo sapiens
MEESSSVAMLVPDIGEQEAILTAESIISPSLEIDEQRKTKPDPLIHVIQKLSKIVENEKSQKCLLIGKKRPRSSAATHSLETQELCEIPAKVIQSPAADTRRAEMSQTNFTPDTLAQNEGKAMSYQCSLCKFLSSSFSVLKDHIKQHGQQNEVILMCSECHITSRSQEELEAHVVNDHDNDANIHTQSKAQQCVSPSSSLCRKTTERNETIPDIPVSVDNLQTHTVQTASVAEMGRRKWYAYEQYGMYRCLFCSYTCGQQRMLKTHAWKHAGEVDCSYPIFENENEPLGLLDSSAAAAPGGVDAVVIAIGESELSIHNGPSVQVQICSSEQLSSSSPLEQSAERGVHLSQSVTLDPNEEEMLEVISDAEENLIPDSLLTSAQKIISSSPNKKGHVNVIVERLPSAEETLSQKRFLMNTEMEEGKDLSLTEAQIGREGMDDVYRADKCTVDIGGLIIGWSSSEKKDELMNKGLATDENAPPGRRRTNSESLRLHSLAAEALVTMPIRAAELTRANLGHYGDINLLDPDTSQRQVDSTLAAYSKMMSPLKNSSDGLTSLNQSNSTLVALPEGRQELSDGQVKTGISMSLLTVIEKLRERTDQNASDDDILKELQDNAQCQPNSDTSLSGNNVVEYIPNAERPYRCRLCHYTSGNKGYIKQHLRVHRQRQPYQCPICEHIADNSKDLESHMIHHCKTRIYQCKQCEESFHYKSQLRNHEREQHSLPDTLSIATSNEPRISSDTADGKCVQEGNKSSVQKQYRCDVCDYTSTTYVGVRNHRRIHNSDKPYRCSLCGYVCSHPPSLKSHMWKHASDQNYNYEQVNKAINDAISQSGRVLGKSPGKTQLKSSEESADPVTGSSENAVSSSELMSQTPSEVLGTNENEKLSPTSNTSYSLEKISSLAPPSMEYCVLLFCCCICGFESTSKENLLDHMKEHEGEIVNIILNKDHNTALNTN

SEQ ID NO: 662 - protein, 245 aa, Homo sapiens
MDGTRTSLDIEEYSDTEVQKNQVLTLEEWQDKWVNGKTAFHQEQGHQLLKKHLDTFLKGKSGLRVFFPLCGKAVEMKWFADRGHSVVGVEISELGIQEFFTEQNLSYSEEPITEIPGTKVFKSSSGNISLYCCSIFDLPRTNIGKFDMIWDRGALVAINPGDRKCYADTMFSLLGKKFQYLLCVLSYDPTKHPGPPFYVPHAEIERLFGKICNIRCLEKVDAFEERHKSWGIDCLFEKLYLLTEK

SEQ ID NO: 663 - protein, 168 aa, Homo sapiens
MGPRARPALLLLMLLQTAVLQGRLLLPPLVKVTHHVTSSVTTLRCRALNYYPQNITMKWLKDKQPMDAKEFEPKDVLPNGDGTYQGWITLAVPPGEEQRYTCQVEHPGLDQPLIVIWEPSPSGTLVIGVISGIAVFVVILFIGILFIILRKRQGSRGAMGHYVLAERE

SEQ ID NO: 664 - protein, 373 aa, Homo sapiens
MGSQVSVESGALHVVIVGGGFGGIAAASQLQALNVPFMLVDMKDSFHHNVAALRASVETGFAKKTFISYSVTFKDNFRQGLVVGIDLKNQMVLLQGGEALPFSHLILATGSTGPFPGKFNEVSSQQAAIQAYEDMVRQVQRSRFIVVVGGGSAGVEMAAEIKTEYPEKEVTLIHSQVALADKELLPSVRQEVKEILLRKGVQLLLSERVSNLEELPLNEYREYIKVQTDKGTEVATNLVILCTGIKINSSAYRKAFESRLASSGALRVNEHLQVEGHSNVYAIGDCADVRTPKMAYLAGLHANIAVANIVNSVKQRPLQAYKPGALTFLLSMGRNDGVGQISGFYVGRLMVRLTKSRDLFVSTSWKTMRQSPP

SEQ ID NO: 665 - protein, 403 aa, Homo sapiens
MFSVFEEITRIVVKEMDAGGDMIAVRSLVDADRFRCFHLVGEKRTFFGCRHYTTGLTLMDILDTDGDKWLDELDSGLQGQKAEFQILDNVDSTGELIVRLPKEITISGSFQGFHHQKIKISENRISQQYLATLENRKLKRELPFSFRSINTRENLYLVTETLETVKEETLKSDRQYKFWSQISQGHLSYKHKGQREVTIPPNRVLSYRVKQLVFPNKETMKKDGASSCLGKSLGSEDSRNMKEKLEDMESVLKDLTEEKRKDVLNSLAKCLGKEDIRQDLEQRVSEVLISGELHMEDPDKPLLSSLFNAAGVLVEARAKAILDFLDALLELSEEQQFVAEALEKGTLPLLKDQVKSVMEQNWDELASSPPDMDYDPEARILCALYVVVSILLELAEGPTSVSS

SEQ ID NO: 666 - protein, 1023 aa, Homo sapiens
MAGNDCGALLDEELSSFFLNYLADTQGGGSGEEQLYADFPELDLSQLDASDFDSATCFGELQWCPENSETEPNQYSPDDSELFQIDSENEALLAELTKTLDDIPEDDVGLAAFPALDGGDALSCTSASPAPSSAPPSPAPEKPSAPAPEVDELSLLQKLLLATSYPTSSSDTQKEGTAWRQAGLRSKSQRPCVKADSTQDKKAPMMQSQSRSCTELHKHLTSAQCCLQDRGLQPPCLQSPRLPAKEDKEPGEDCPSPQPAPASPRDSLALGRADPGAPVSQEDMQAMVQLIRYMHTYCLPQRKLPPQTPEPLPKACSNPSQQVRSRPWSRHHSKASWAEFSILRELLAQDVLCDVSKPYRLATPVYASLTPRSRPRPPKDSQASPGRPSSVEEVRIAASPKSTGPRPSLRPLRLEVKREVRRPARLQQQEEEDEEEEEEEEEEEKEEEEEWGRKRPGRGLPWTKLGRKLESSVCPVRRSRRLNPELGPWLTFADEPLVPSEPQGALPSLCLAPKAYDVERELGSPTDEDSGQDQQLLRGPQIPALESPCESGCGDMDEDPSCPQLPPRDSPRCLMLALSQSDPTFGKKSFEQTLTVELCGTAGLTPPTTPPYKPTEEDPFKPDIKHSLGKEIALSLPSPEGLSLKATPGAAHKLPKKHPERSELLSHLRHATAQPASQAGQKRPFSCSFGDHDYCQVLRPEGVLQRKVLRSWEPSGVHLEDWPQQGAPWAEAQAPGREEDRSCDAGAPPKDSTLLRDHEIRASLTKHFGLLETALEEEDLASCKSPEYDTVFEDSSSSSGESSFLPEEEEEEGEEEEEDDEEEDSGVSPTCSDHCPYQSPPSKANRQLCSRSRSSSGSSPCHSWSPATRRNFRCESRGPCSDRTPSIRHARKRREKAIGEGRVVYIQNLSSDMSSRELKRRFEVFGEIEECEVLTRNRRGEKYGFITYRCSEHAALSLTKGAALRKRNEPSFQLSYGGLRHFCWPRYTDYDSNSEEALPASGKSKYEAMDFDSLLKEAQQSLH

SEQ ID NO: 667 - protein, 1523 aa, Homo sapiens
MTSVWKRLQRVGKRAAKFQFVACYHELVLECTKKWQPDKLVVVWTRRNRRICSKAHSWQPGIQNPYRGTVVWMVPENVDISVTLYRDPHVDQYEAKEWTFIIENESKGQRKVLATAEVDLARHAGPVPVQVPVRLRLKPKSVKVVQAELSLTLSGVLLREGRATDDDMQSLASLMSVKPSDVGNLDDFAESDEDEAHGPGAPEARARVPQPDPSRELKTLCEEEEEGQGRPQQAVASPSNAEDTSPAPVSAPAPPARTSRGQGSERANEAGGQVGPEAPRPPETSPEMRSSRQPAQDTAPTPAPRLRKGSDALRPPVPQGEDEVPKASGAPPAGLGSARETQAQACPQEGTEAHGARLGPSIEDKGSGDPFGRQRLKAEEMDTEDRPEASGVDTEPRSGGREANTKRSGVRAGEAEESSAVCQVDAEQRSKVRHVDTKGPEATGVMPEARCRGTPEAPPRGSQGRLGVRTRDEAPSGLSLPPAEPAGHSGQLGDLEGARAAAGQEREGAEVRGGAPGIEGTGLEQGPSVGAISTRPQVSSWQGALLSTAQGAISRGLGGWEAEAGGSGDLETETEVVGLEVLGTQEKEVEGSGFPETRTLEIEILGALEKEAARSRVLESEVAGTAQCEGLETQETEVGVIETPGTETEVLGTQKTEAGGSGVLQTRTTIAETEVLVTQEISGDLGPLKIEDTIQSEMLGTQETEVEASRVPESEAEGTEAKILGTQEITARDSGVREIEAEIAESDILVAQEIEVGLLGVLGIETGAAEGAILGTQEIASRDSGVPGLEADTTGIQVKEVGGSEVPEIATGTAETEILGTQEIASRSSGVPGLESEVAGAQETEVGGSGISGPEAGMAEARVLMTRKTEIIVPEAEKEEAQTSGVQEAETRVGSALKYEALRAPVTQPRVLGSQEAKAEISGVQGSETQVLRVQEAEAGVWGMSEGKSGAWGAQEAEMKVLESPENKSGTFKAQEAEAGVLGNEKGKEAEGSLTEASLPEAQVASGAGAGAPRASSPEKAEEDRRLPGSQAPPALVSSSQSLLEWCQEVTTGYRGVRITNFTTSWRNGLAFCAILHRFYPDKIDYASLDPLNIKQNNKQAFDGFAALGVSRLLEPADMVLLSVPDKLIVMTYLCQIRAFCTGQELQLVQLEGGGGAGTYRVGSAQPSPPDDLDAGGLAQRLRGHGAEGPQEPKEAADRADGAAPGVASRNAVAGRASKDGGAEAPRESRPAEVPAEGLVNGAGAPGGGGVRLRRPSVNGEPGSVPPPRAHGSFSHVRDADLLKKRRSRLRNSSSFSMDDPDAGAMGAAAAEGQAPDPSPAPGPPTAADSQQPPGGSSPSEEPPPSPGEEAGLQRFQDTSQYVCAELQALEQEQRQIDGRAAEVEMQLRSLMESGANKLQEEVLIQEWFTLVNKKNALIRRQDQLQLLMEEQDLERRFELLSRELRAMLAIEDWQKTSAQQHREQLLLEELVSLVNQRDELVRDLDHKERIALEEDERLERGLEQRRRKLSRQLSRRERCVLS

SEQ ID NO: 668 - protein, 521 aa, Homo sapiens
MEASVLSPTSWEKRRAWLRQSRNWQTQVLEEEAAAALQDVPDPEPSSLDDVFQEGNPINKIEDWLQDCGYSEEGFSEEAGQFIYNGFCSHGTSFEDDLTLGAEATLLAANGKLFSRSFLETARPCQLLDLGCSLASSSMTGGTNKTSSSISEILDKVQEDAEDVLFSLGFGQEDHKDTSRIPARFFTTPSQAKGIDFQLFLKSQVRRIEMEDPCLMLASRFKQVQTLAVTADAFFCLYSYVSKTPVQKFTPSHMFWNCNHPTDVPSIRILSREPEPQSPRDRLRKAISKMCLYTCPRDRPPPPHNTPKRNSLDQVVLEVMDKVKEEKQFLQQDSDLGQFSQEDPVPPAEGKKLPTSPYPCVFCCEEETQQRMSTVLAPSQTLDSNPKVPCCTHSLPIEDPQWSTDPAQIRRELCSLPATNTETHPAKDETFWKRKSRARKSLFQKNLMGRKVKSLDLSITQQKWKQSVDRPELRRSLSQQPQDTFDLEEVQSNSEEEQSQSRWPSRPRHPHHHQTFAGKDS

SEQ ID NO: 669 - protein, 621 aa, Homo sapiens
MCSGWSSSVIWRHTQFAVERCGFCGSSGPGAPLEPSTLGSKHLPWEAVSAGFADRNRNMDGAMWLSLCPDNEDLLWRKKHKLLQARGKGDLALQRRADAKLWKNYQLQRLAEELRRGYQEAQHLHVGGLDRLQSARLLGWGGGRARENEPDSQGPIQRRSARPPRAKEKHRAALSEERSCREELGQQHPRHSRPRKTAASPEKPQTTKATGRMNSHLAPPEKRKGRPEPSTKSGGGRCAIHPRRSKGADLERSNPLVAAVGEIGLVEEKEKGTARAGRRQLGKGAVCFVPALTSRSQGQSLEGKLRDLGQLWPADSSCRREAVSPASQCTLREKNKWQKELELAFEELFNINRKLKKHLCLYLALKPRMDQRPGEGHAFSEMQECGAGTPRGKKMADPEMLPAGEPRSPAEEEAQQAASKTDLKTFMGKAQNQKYQGTVKPTFRNGSQTLSPEAGIFINKEDSLLYSTESGQETPKLGTLAEGSLQLHLQDQADRVGSTASRQRQKAEMEQRRQKQLESLEQMEHPDMSLEIHYKAELEKERREQRRARLAHLKSSSTRAQERERGSELSTTSPSGTSLADDDRHSQMIRDQQQQILQQNRLHKQFLEEARKCLREFQNIC

SEQ ID NO: 670 - protein, 2570 aa, Homo sapiens
MAGPRGLLPLCLLAFCLAGFSFVRGQVLFKGCDVKTTFVTHVPCTSCAAIKKQTCPSGWLRELPDQITQDCRYEVQLGGSMVSMSGCRRKCRKQVVQKACCPGYWGSRCHECPGGAETPCNGHGTCLDGMDRNGTCVCQENFRGSACQECQDPNRFGPDCQSVCSCVHGVCNHGPRGDGSCLCFAGYTGPHCDQELPVCQELRCPQNTQCSAEAPSCRCLPGYTQQGSECRAPNPCWPSPCSLLAQCSVSPKGQAQCHCPENYHGDGMVCLPKDPCTDNLGGCPSNSTLCVYQKPGQAFCTCRPGLVSINSNASAGCFAFCSPFSCDRSATCQVTADGKTSCVCRESEVGDGRACYGHLLHEVQKATQTGRVFLQLRVAVAMMDQGCREILTTAGPFTVLVPSVSSFSSRTMNASLAQQLCRQHIIAGQHILEDTRTQQTRRWWTLAGQEITVTFNQFTKYSYKYKDQPQQTFNIYKANNIAANGVFHVVTGLRWQAPSGTPGDPKRTIGQILASTEAFSRFETILENCGLPSILDGPGPFTVFAPSNEAVDSLRDGRLIYLFTAGLSKLQELVRYHIYNHGQLTVEKLISKGRILTMANQVLAVNISEEGRILLGPEGVPLQRVDVMAANGVIHMLDGILLPPTILPILPKHCSEEQHKIVAGSCVDCQALNTSTCPPNSVKLDIFPKECVYIHDPTGLNVLKKGCASYCNQTIMEQGCCKGFFGPDCTQCPGGFSNPCYGKGNCSDGIQGNGACLCFPDYKGIACHICSNPNKHGEQCQEDCGCVHGLCDNRPGSGGVCQQGTCAPGFSGRFCNESMGDCGPTGLAQHCHLHARCVSQEGVARCRCLDGFEGDGFSCTPSNPCSHPDRGGCSENAECVPGSLGTHHCTCHKGWSGDGRVCVAIDECELDMRGGCHTDALCSYVGPGQSRCTCKLGFAGDGYQCSPIDPCRAGNGGCHGLATCRAVGGGQRVCTCPPGFGGDGFSCYGDIFRELEANAHFSIFYQWLKSAGITLPADRRVTALVPSEAAVRQLSPEDRAFWLQPRTLPNLVRAHFLQGALFEEELARLGGQEVATLNPTTRWEIRNISGRVWVQNASVDVADLLATNGVLHILSQVLLPPRGDVPGGQGLLQQLDLVPAFSLFRELLQHHGLVPQIEAATAYTIFVPTNRSLEAQGNSSHLDADTVRHHVVLGEALSMETLRKGGHRNSLLGPAHWIVFYNHSGQPEVNHVPLEGPMLEAPGRSLIGLSGVLTVGSSRCLHSHAEALREKCVNCTRRFRCTQGFQLQDTPRKSCVYRSGFSFSRGCSYTCAKKIQVPDCCPGFFGTLCEPCPGGLGGVCSGHGQCQDRFLGSGECHCHEGFHGTACEVCELGRYGPNCTGVCDCAHGLCQEGLQGDGSCVCNVGWQGLRCDQKITSPQCPRKCDPNANCVQDSAGASTCACAAGYSGNGIFCSEVDPCAHGHGGCSPHANCTKVAPGQRTCTCQDGYMGDGELCQEINSCLIHHGGCHIHAECIPTGPQQVSCSCREGYSGDGIRTCELLDPCSKNNGGCSPYATCKSTGDGQRTCTCDTAHTVGDGLTCRARVGLELLRDKHASFFSLRLLEYKELKGDGPFTIFVPHADLMSNLSQDELARIRAHRQLVFRYHVVGCRRLRSEDLLEQGYATALSGHPLRFSEREGSIYLNDFARVVSSDHEAVNGILHFIDRVLLPPEALHWEPDDAPIPRRNVTAAAQGFGYKIFSGLLKVAGLLPLLREASHRPFTMLWPTDAAFRALPPDRQAWLYHEDHRDKLAAILRGHMIRNVEALASDLPNLGPLRTMHGTPISFSCSRTRAGELMVGEDDARIVQRHLPFEGGLAYGIDQLLEPPGLGARCDHFETRPLRLNTCSICGLEPPCPEGSQEQGSPEACWRFYPKFWTSPPLHSLGLRSVWVHPSLWGRPQGLGRGCHRNCVTTTWKPSCCPGHYGSECQACPGGPSSPCSDRGVCMDGMSGSGQCLCRSGFAGTACELCAPGAFGPHCQACRCTVHGRCDEGLGGSGSCFCDEGWTGPRCEVQLELQPVCTPPCAPEAVCRAGNSCECSLGYEGDGRVCTVADLCQDGHGGCSEHANCSQVGTMVTCTCLPDYEGDGWSCRARNPCTDGHRGGCSEHANCLSTGLNTRRCECHAGYVGDGLQCLEESEPPVDRCLGQPPPCHSDAMCTDLHFQEKRAGVFHLQATSGPYGLNFSEAEAACEAQGAVLASFPQLSAAQQLGFHLCLMGWLANGSTAHPVVFPVADCGNGRVGIVSLGARKNLSERWDAYCFRVQDVACRCRNGFVGDGISTCNGKLLDVLAATANFSTFYGMLLGYANATQRGLDFLDFLDDELTYKTLFVPVNEGFVDNMTLSGPDLELHASNATLLSANASQGKLLPAHSGLSLIISDAGPDNSSWAPVAPGTVVVSRIIVWDIMAFNGIIHALASPLLAPPQPQAVLAPEAPPVAAGVGAVLAAGALLGLVAGALYLRARGKPMGFGFSAFQAEDDADDDFSPWQEGTNPTLVSVPNPVFGSDTFCEPFDDSLLEEDFPDTQRILTVK

SEQ ID NO: 671 - protein, 474 aa, Homo sapiens
MRLSKTLVDMDMADYSAALDPAYTTLEFENVQVLTMGNDTSPSEGTNLNAPNSLGVSALCAICGDRATGKHYGASSCDGCKGFFRRSVRKNHMYSCRFSRQCVVDKDKRNQCRYCRLKKCFRAGMKKEAVQNERDRISTRRSSYEDSSLPSINALLQAEVLSRQITSPVSGINGDIRAKKIASIADVCESMKEQLLVLVEWAKYIPAFCELPLDDQVALLRAHAGEHLLLGATKRSMVFKDVLLLGNDYIVPRHCPELAEMSRVSIRILDELVLPFQELQIDDNEYAYLKAIIFFDPDAKGLSDPGKIKRLRSQVQVSLEDYINDRQYDSRGRFGELLLLLPTLQSITWQMIEQIQFIKLFGMAKIDNLLQEMLLGGSPSDAPHAHHPLHPHLMQEHMGTNVIVANTMPTHLSNGQMCEWPRPRGQAATPETPQPSPPGGSGSEPYKLLPGAVATIVKPLSAIPQPTITKQEVI

SEQ ID NO: 672 - protein, 2382 aa, Homo sapiens
MSGGAAEKQSSTPGSLFLSPPAPAPKNGSSSDSSVGEKLGAAAADAVTGRTEEYRRRRHTMDKDSRGAAATTTTTEHRFFRRSVICDSNATALELPGLPLSLPQPSIPAAVPQSAPPEPHREETVTATATSQVAQQPPAAAAPGEQAVAGPAPSTVPSSTSKDRPVSQPSLVGSKEEPPPARSGSGGGSAKEPQEERSQQQDDIEELETKAVGMSNDGRFLKFDIEIGRGSFKTVYKGLDTETTVEVAWCELQDRKLTKSERQRFKEEAEMLKGLQHPNIVRFYDSWESTVKGKKCIVLVTELMTSGTLKTYLKRFKVMKIKVLRSWCRQILKGLQFLHTRTPPIIHRDLKCDNIFITGPTGSVKIGDLGLATLKRASFAKSVIGTPEFMAPEMYEEKYDESVDVYAFGMCMLEMATSEYPYSECQNAAQIYRRVTSGVKPASFDKVAIPEVKEIIEGCIRQNKDERYSIKDLLNHAFFQEETGVRVELAEEDDGEKIAIKLWLRIEDIKKLKGKYKDNEAIEFSFDLERDVPEDVAQEMVESGYVCEGDHKTMAKAIKDRVSLIKRKREQRQLVREEQEKKKQEESSLKQQVEQSSASQTGIKQLPSASTGIPTASTTSASVSTQVEPEEPEADQHQQLQYQQPSISVLSDGTVDSGQGSSVFTESRVSSQQTVSYGSQHEQAHSTGTVPGHIPSTVQAQSQPHGVYPPSSVAQGQSQGQPSSSSLTGVSSSQPIQHPQQQQGIQQTAPPQQTVQYSLSQTSTSSEATTAQPVSQPQAPQVLPQVSAGKQLPVSQPVPTIQGEPQIPVATQPSVVPVHSGAHFLPVGQPLPTPLLPQYPVSQIPISTPHVSTAQTGFSSLPITMAAGITQPLLTLASSATTAAIPGVSTVVPSQLPTLLQPVTQLPSQVHPQLLQPAVQSMGIPANLGQAAEVPLSSGDVLYQGFPPRLPPQYPGDSNIAPSSNVASVCIHSTVLSPPMPTEVLATPGYFPTVVQPYVESNLLVPMGGVGGQVQVSQPGGSLAQAPTTSSQQAVLESTQGVSQVAPAEPVAVAQTQATQPTTLASSVDSAHSDVASGMSDGNENVPSSSGRHEGRTTKRHYRKSVRSRSRHEKTSRPKLRILNVSNKGDRVVECQLETHNRKMVTFKFDLDGDNPEEIATIMVNNDFILAIERESFVDQVREIIEKADEMLSEDVSVEPEGDQGLESLQGKDDYGFSGSQKLEGEFKQPIPASSMPQQIGIPTSSLTQVVHSAGRRFIVSPVPESRLRESKVFPSEITDTVAASTAQSPGMNLSHSASSLSLQQAFSELRRAQMTEGPNTAPPNFSHTGPTFPVVPPFLSSIAGVPTTAAATAPVPATSSPPNDISTSVIQSEVTVPTEEGIAGVATSTGVVTSGGLPIPPVSESPVLSSVVSSITIPAVVSISTTSPSLQVPTSTSEIVVSSTALYPSVTVSATSASAGGSTATPGPKPPAVVSQQAAGSTTVGATLTSVSTTTSFPSTASQLCIQLSSSTSTPTLAETVVVSAHSLDKTSHSSTTGLAFSLSAPSSSSSPGAGVSSYISQPGGLHPLVIPSVIASTPILPQAAGPTSTPLLPQVPSIPPLVQPVANVPAVQQTLIHSQPQPALLPNQPHTHCPEVDSDTQPKAPGIDDIKTLEEKLRSLFSEHSSSGAQHASVSLETSLVIESTVTPGIPTTAVAPSKLLTSTTSTCLPPTNLPLGTVALPVTPVVTPGQVSTPVSTTTSGVKPGTAPSKPPLTKAPVLPVGTELPAGTLPSEQLPPFPGPSLTQSQQPLEDLDAQLRRTLSPEMITVTSAVGPVSMAAPTAITEAGTQPQKGVSQVKEGPVLATSSGAGVFKMGRFQVSVAADGAQKEGKNKSEDAKSVHFESSTSESSVLSSSSPESTLVKPEPNGITIPGISSDVPESAHKTTASEAKSDTGQPTKVGRFQVTTTANKVGRFSVSKTEDKITDTKKEGPVASPPFMDLEQAVLPAVIPKKEKPELSEPSHLNGPSSDPEAAFLSRDVDDGSGSPHSPHQLSSKSLPSQNLSQSLSNSFNSSYMSSDNESDIEDEDLKLELRRLRDKHLKEIQDLQSRQKHEIESLYTKLGKVPPAVIIPPAAPLSGRRRRPTKSKGSKSSRSSSLGNKSPQLSGNLSGQSAASVLHPQQTLHPPGNIPESGQNQLLQPLKPSPSSDNLYSAFTSDGAISVPSLSAPGQGTSSTNTVGATVNSQAAQAQPPAMTSSRKGTFTDDLHKLVDNWARDAMNLSGRRGSKGHMNYEGPGMARKFSAPGQLCISMTSNLGGSAPISAASATSLGHFTKSMCPPQQYGFPATPFGAQWSGTGGPAPQPLGQFQPVGTASLQNFNISNLQKSISNPPGSNLRTT

SEQ ID NO: 673 - protein, 896 aa, Homo sapiens
MMAQKSQGSDNLQEGQEKSKREILKCTKSAWAPLDEWLPPDPEEESQSLTIPMLEDSKQESIQQWLDSGFFVSANENFQQVIDRTVSLYEQGMVQMTVKDYMRSLHQFSETPILSRGTSFNSCYSTASVPQSIPEWLEFWEIDPVEILLDLGFGADEPDICMQIPARFLGCGSAARGINIRVFLEAQKQRMDIENPNLYGRFRQLEILDHVTNAFSSLLSDVSILPNRAEEKAGGESVQRTSVQSFEEETGNPLDMTSGTVGARVDRANSCQSDSSGFLEEPLEPLPLQMPSLPNSQSPAENGGRKPRDQSHSLVSSQDCQLESDGPDSKSRASMSFSSQEANALEQRASVSVMEEEFLLEAMEGPPELYIPDMACAKTTTRGECPRKDSHLWQLLPMPHAEYEVTRPTATSKYDHPLGFMVTHVTEMQDSFVRPEGAGKVQSHHNESQRSPGNDHTQDKFLHVDSEAPREEESSGFCPHTNHSLLVPESSSQCIPKHSEITPYATDLAQTSEKLIPHLHKLPGDPAQVKSRSGTLGQILPGTEAEMENLPLNTGSSRSVMTQMSSSLVSAAQRAVALGTGPRGTSLECTVCDPVTATETRLGTKARQLNDASIQTSALSNKTLTHGPQPLTKSVSLDSGFSSICPMGTCHAIPAHCCICCHHHPHCHGERQSPGPEPSVCRHCLCSLTGHQEAQFMTTLKALQDTTVRELCSCTVHEMEAMKTICQSFREYLEEIEQHLMGQQALFSRDMSEEEREEAEQLQTLREALRQQVAELEFQLGDRAQQIREGILLQLEVLTAEPPEHYSNLHQYNWIEESNGQTSCSKIHPGMAPRTVFPPDDGQEAPCSGGTQLAAFTPPTLENSTRMSPSSSAWAKLGPTPLSNCPVGEKDADVFL

SEQ ID NO: 674 - protein, 744 aa, Homo sapiens
MQKEMKMIKDEDVHFDLAVKKTPSFPHCLQPVASRGKAPQRHPFPEALRGPFSQFRYEPPPGDLDGFPGVFEGAGSRKRKSMPTKMPYNHPAEEVTLALHSEENKNHGLPNLPLLFPQPPRPKYDSQMIDLCNVGFQFYRSLEHFGGKPVKQEPIKPSAVWPQPTPTPFLPTPYPYYPKVHPGLMFPFFVPSSSPFPFSRHTFLPKQPPEPLLPRKAEPQESEETKQKVERVDVNVQIDDSYYVDVGGSQKRWQCPTCEKSYTSKYNLVTHILGHSGIKPHACTHCGKLFKQLSHLHTHMLTHQGTRPHKCQVCHKAFTQTSHLKRHMMQHSEVKPHNCRVCGRGFAYPSELKAHEAKHASGRENICVECGLDFPTLAQLKRHLTTHRGPIQYNCSECDKTFQYPSQLQNHMMKHKDIRPYICSECGMEFVQPHHLKQHSLTHKGVKEHKCGICGREFTLLANMKRHVLIHTNIRAYQCHLCYKSFVQKQTLKAHMIVHSDVKPFKCKLCGKEFNRMHNLMGHMHLHSDSKPFKCLYCPSKFTLKGNLTRHMKVKHGVMERGLHSQGLGRGRIALAQTAGVLRSLEQEEPFDLSQKRRAKVPVFQSDGESAQGSHCHEEEEEDNCYEVEPYSPGLAPQSQQLCTPEDLSTKSEHAPEVLEEACKEEKEDASKGEWEKRSKGDLGAEGGQERDCAGRDECLSLRAFQSTRRGPSFSDYLYFKHRDESLKELLERKMEKQAVLLGI

SEQ ID NO: 675 - protein, 1844 aa, Homo sapiens
MVGVLAMAAAAAPPPVKDCEIEPCKKRKKDDDTSTCKTITKYLSPLGKTRDRVFAPPKPSNILDYFRKTSPTNEKTQLGKECKIKSPESVPVDSNKDCTTPLEMFSNVEFKKKRKRVNLSHQLNNIKTENEAPIEISSDDSKEDYSLNNDFVESSTSVLRYKKQVEVLAENIQDTKSQPNTMTSLQNSKKVNPKQGTTKNDFKKLRKRKCRDVVDLSESLPLAEELNLLKKDGKDTKQMENTTSHANSRDNVTEAAQLNDSIITVSYEEFLKSHKENKVEEIPDSTMSICVPSETVDEIVKSGYISESENSEISQQVRFKTVTVLAQVHPIPPKKTGKIPRIFLKQKQFEMENSLSDPENEQTVQKRKSNVVIQEEELELAVLEAGSSEAVKPKCTLEERQQFMKAFRQPASDALKNGVKKSSDKQKDLNEKCLYEVGRDDNSKKIMENSGIQMVSKNGNLQLHTDKGSFLKEKNKKLKKKNKKTLDTGAIPGKNREGNTQKKETTFFLKEKQYQNRMSLRQRKTEFFKSSTLFNNESLVYEDIANDDLLKVSSLCNNNKLSRKTSIPVKDIKLTQSKAESEASLLNVSTPKSTRRSGRISSTPTTETIRGIDSDDVQDNSQLKASTQKAANLSEKHSLYTAELITVPFDSESPIRMKFTRISTPKKSKKKSNKRSEKSEATDGGFTSQIRKASNTSKNISKAKQLIEKAKALHISRSKVTEEIAIPLRRSSRHQTLPERKKLSETEDSVIIIDSSPTALKHPEKNQKKLQCLNDVLGKKLNTSTKNVPGKMKVAPLFLVRKAQKAADPVPSFDESSQDTSEKSQDCDVQCKAKRDFLMSGLPDLLKRQIAKKAAALDVYNAVSTSFQRVVHVQQKDDGCCLWHLKPPSCPLLTKFKELNTKVIDLSKCGIALGEFSTLNSKLKSGNSAAVFMRTRKEFTEEVRNLLLEEIRWSNPEFSLKKYFPLLLKKQIEHQVLSSECHSKQELEADVSHKETKRKLVEAENSKSKRKKPNEYSKNLEKTNRKSEELSKRNNSSGIKLDSSKDSGTEDMLWTEKYQPQTASELIGNELAIKKLHSWLKDWKRRAELEERQNLKGKRDEKHEDFSGGIDFKGSSDDEEESRLCNTVLITGPTGVGKTAAVYACAQELGFKIFEVNASSQRSGRQILSQLKEATQSHQVDKQGVNSQKPCFFNSYYIGKSPKKISSPKKVVTSPRKVPPPSPKSSGPKRALPPKTLANYFKVSPKPKNNEEIGMLLENNKGIKNSFEQKQITQTKSTNATNSNVKDVGAEEPSRKNATSLILFEEVDVIFDEDAGFLNAIKTFMATTKRPVILTTSDPTFSLMFDGCFEEIKFSTPSLLNVASYLQMICLTENFRTDVKDFVTLLTANTCDIRKSILYLQFWIRSGGGVLEERPLTLYRGNSRNVQLVCSEHGLDNKIYPKNTKKKRVDLPKCDSGCAETLFGLKNIFSPSEDLFSFLKHKITMKEEWHKFIQLLTEFQMRNVDFLYSNLEFILPLPVDTIPETKNFCGPSVTVDASAATKSMNCLARKHSEREQPLKKSQKKKQKKTLVILDDSDLFDTDLDFPDQSISLSSVSSSSNAEESKTGDEESKARDKGNNPETKKSIPCPPKTTAGKKCSALVSHCLNSLSEFMDNMSFLDALLTDVREQNKYGRNDFSWTNGKVTSGLCDEFSLESNDGWTSQSSGELKAAAEALSFTKCSSAISKALETLNSCKKLGRDPTNDLTFYVSQKRNNVYFSQSAANLDNAWKRISVIKSVFSSRSLLYVGNRQASIIEYLPTLRNICKTEKLKEQGKSKRRFLHYFEGIHLDIPKETVNTLAADFP

SEQ ID NO: 676 - protein, 557 aa, Homo sapiens
MPPPRLLFFLLFLTPMEVRPEEPLVVKVEEGDNAVLQCLKGTSDGPTQQLTWSRESPLKPFLKLSLGLPGLGIHMRPLAIWLFIFNVSQQMGGFYLCQPGPPSEKAWQPGWTVNVEGSGELFRWNVSDLGGLGCGLKNRSSEGPSSPSGKLMSPKLYVWAKDRPEIWEGEPPCLPPRDSLNQSLSQDLTMAPGSTLWLSCGVPPDSVSRGPLSWTHVHPKGPKSLLSLELKDDRPARDMWVMETGLLLPRATAQDAGKYYCHRGNLTMSFHLEITARPVLWHWLLRTGGWKVSAVTLAYLIFCLCSLVGILHLQRALVLRRKRKRMTDPTRRFFKVTPPPGSGPQNQYGNVLSLPTPTSGLGRAQRWAAGLGGTAPSYGNPSSDVQADGALGSRSPPGVGPEEEEGEGYEEPDSEEDSEFYENDSNLGQDQLSQDGSGYENPEDEPLGPEDEDSFSNAESYENEDEELTQPVARTMDFLSPHGSAWDPSREATSLAGSQSYEDMRGILYAAPQLRSIRGQPGPNHEEDADSYENMDNPDGPDPAWGGGGRMGTWSTR

SEQ ID NO: 677 - protein, 4128 aa, Homo sapiens [sequence omitted]

SEQ ID NO: 678 - protein, 1338 aa, Homo sapiens
MSPVLHFYVRPSGHEGAAPGHTRRKLQGKLPELQGVETELCYNVNWTAEALPSAEETKKLMWLFGCPLLLDDVARESWLLPGSNDLLLEVGPRLNFSTPTSTNIVSVCRATGLGPVDRVETTRRYRLSFAHPPSAEVEAIALATLHDRMTEQHFPHPIQSFSPESMPEPLNGPINILGEGRLALEKANQELGLALDSWDLDFYTKRFQELQRNPSTVEAFDLAQSNSEHSRHWFFKGQLHVDGQKLVHSLFESIMSTQESSNPNNVLKFCDNSSAIQGKEVRFLRPEDPTRPSRFQQQQGLRHVVFTAETHNFPTGVCPFSGATTGTGGRIRDVQCTGRGAHVVAGTAGYCFGNLHIPGYNLPWEDPSFQYPGNFARPLEVAIEASNGASDYGNKFGEPVLAGFARSLGLQLPDGQRREWIKPIMFSGGIGSMEADHISKEAPEPGMEVVKVGGPVYRIGVGGGAASSVQVQGDNTSDLDFGAVQRGDPEMEQKMNRVIRACVEAPKGNPICSLHDQGAGGNGNVLKELSDPAGAIIYTSRFQLGDPTLNALEIWGAEYQESNALLLRSPNRDFLTHVSARERCPACFVGTITGDRRIVLVDDRECPVRRNGQGDAPPTPLPTPVDLELEWVLGKMPRKEFFLQRKPPMLQPLALPPGLSVHQALERVLRLPAVASKRYLTNKVDRSVGGLVAQQQCVGPLQTPLADVAVVALSHEELIGAATALGEQPVKSLLDPKVAARLAVAEALTNLVFALVTDLRDVKCSGNWMWAAKLPGEGAALADACEAMVAVMAALGVAVDGGKDSLSMAARVGTETVRAPGSLVISAYAVCPDITATVTPDLKHPEGRGHLLYVALSPGQHRLGGTALAQCFSQLGEHPPDLDLPENLVRAFSITQGLLKDRLLCSGHDVSDGGLVTCLLEMAFAGNCGLQVDVPVPRVDVLSVLFAEEPGLVLEVQEPDLAQVLKRYRDAGLHCLELGHTGEAGPHAMVRVSVNGAVVLEEPVGELRALWEETSFQLDRLQAEPRCVAEEERGLRERMGPSYCLPPTFPKASVPREPGGPSPRVAILREEGSNGDREMADAFHLAGFEVWDVTMQDLCSGAIGLDTFRGVAFVGGFSYADVLGSAKGWAAAVTFHPRAGAELRRFRKRPDTFSLGVCNGCQLLALLGWVGGDPNEDAAEMGPDSQPARPGLLLRHNLSGRYESRWASVRVGPGPALMLRGMEGAVLPVWSAHGEGYVAFSSPELQAQIEARGLAPLHWADDDGNPTEQYPLNPNGSPGGVAGICSCDGRHLAVMPHPERAVRPWQWAWRPPPFDTLTTSPWLQLFINARNWTLEGSC

SEQ ID NO: 679 - protein, 647 aa, Homo sapiens
MACSLQKLFAVEEEFEDEDFLSAVEDAENRFTGSLPVNAGRLRPVSSRPQETVQAQSSRLLLLHPTAPSEALGLPDLDLCLPASSTPSADSRPSCIGAAPLRPVSTSSSWIGNQRRVTVTEVLRETARPQSSALHPLLTFESQQQQVGGFEGPEQDEFDKVLASMELEEPGMELECGVSSEAIPILPAQQREGSVLAKKARVVDLSGSCQKGPVPAIHKAGIMSAQDESLDPVIQCRTPRPPLRPGAVGHLPVPTALTVPTQQLHWEVCPQRSPVQALQPLQAARGTIQSSPQNRFPCQPFQSPSSWLSGKAHLPRPRTPNSSCSTPSRTSSGLFPRIPLQPQAPVSSIGSPVGTPKGPQGALQTPIVTNHLVQLVTAASRTPQQPTHPSTRAKTRRFPGPAGILPHQQSGRSLEDIMVSAPQTPTHGALAKFQTEIVASSQASVEEDFGRGPWLTMKSTLGLDERDPSCFLCTYSIVMVLRKQAALKQLPRNKVPNMAVMIKSLTRSTMDASVVFKDPTGEMQGTVHRLLLETCQNELKPGSVLLLKQIGVFSPSLRNHYLNVTPNNLVHIYSPDSGDGSFLKPSQPFPKDSGSFQHDVAAKPEEGFRTAQNLEAEASPEEELPEADDLDGLLSELPEDFFCGTSS

SEQ ID NO: 680 - protein, 757 aa, Homo sapiens
MAGLTAAAPRPGVLLLLLSILHPSRPGGVPGAIPGGVPGGVFYPGAGLGALGGGALGPGGKPLKPVPGGLAGAGLGAGLGAFPAVTFPGALVPGGVADAAAAYKAAKAGAGLGGVPGVGGLGVSAGAVVPQPGAGVKPGKVPGVGLPGVYPGGVLPGARFPGVGVLPGVPTGAGVKPKAPGVGGAFAGIPGVGPFGGPQPGVPLGYPIKAPKLPGGYGLPYTTGKLPYGYGPGGVAGAAGKAGYPTGTGVGPQAAAAAAAKAAAKFGAGAAGVLPGVGGAGVPGVPGAIPGIGGIAGVGTPAAAAAAAAAAKAAKYGAAAGLVPGGPGFGPGVVGVPGAGVPGVGVPGAGIPVVPGAGIPGAAVPGVVSPEAAAKAAAKAAKYGARPGVGVGGIPTYGVGAGGFPGFGVGVGGIPGVAGVPGVGGVPGVGGVPGVGISPEAQAAAAAKAAKYGVGTPAAAAAKAAAKAAQFGLVPGVGVAPGVGVAPGVGVAPGVGLAPGVGVAPGVGVAPGVGVAPGIGPGGVAAAAKSAAKVAAKAQLRAAAGLGAGIPGLGVGVGVPGLGVGAGVPGLGVGAGVPGFGAGADEGVRRSLSPELREGDPSSSQHLPSTPSSPRVPGALAAAKAAKYGAAVPGVLGGLGALGGVGIPGGVVGAGPAAAAAAAKAAAKAAQFGLVGAAGLGGLGVGGLGVPGVGGLGGIPPAAAAKAAKYGAAGLGGVLGGAGQFPLGGVAARPGFGLSPIFPGGACLGKACGRKRK

SEQ ID NO: 681 - protein, 470 aa, Homo sapiens
MSAQVLGFLRSWTPLPLAAPRGPAAAGNDAGAPAATAPGGEGEPHSRPCDARLGSTDKELKAGAAATGSAPTAPGTPWQREPRVEVMDPAGGPRGVLPRPCRVLVLLNPRGGKGKALQLFRSHVQPLLAEAEISFTLMLTERRNHARELVRSEELGRWDALVVMSGDGLMHEVVNGLMERPDWETAIQKPLCSLPAGSGNALAASLNHYAGYEQVTNEDLLTNCTLLLCRRLLSPMNLLSLHTASGLRLFSVLSLAWGFIADVDLESEKYRRLGEMRFTLGTFLRLAALRTYRGRLAYLPVGRVGSKTPASPVVVQQGPVDAHLVPLEEPVPSHWTVVPDEDFVLVLALLHSHLGSEMFAAPMGRCAAGVMHLFYVRAGVSRAMLLRLFLAMEKGRHMEYECPYLVYVPVVAFRLEPKDGKGVFAVDGELMVSEAVQGQVHPNYFWMVSGCVEPPPSWKPQQMPPPEEPL

SEQ ID NO: 682 - protein, 1026 aa, Homo sapiens
MAEFTSYKETASSRHLRFKLQSLSRRLDELEEATKNLQKAEDELLDLQDKVIQAEGSNSSMLAEIEVLRQRVLRIEGKDEEIKRAEDLCRLMKEKLEEEENLTRELKSEIERLQKRMAELEKLEEAFSRSKNDCTQLCLSLNEERNLTKKISSELEMLRVKVKELESSEDRLDKTEQSLASELEKLKSLTLSFVSERKYLNEKEKENEKLIKELTQKLEQNKKMNRDYTRNASNLERNDLRIEDGISSTLPSKESRRKGGLDYLKQVENETRNKSENEKNRNQEDNKVKDLNQEIEKLKTQIKHFESLEEELKKMKSKNNDLQDNYLSEQNKNKLLASQLEEIKLQIKKQKELENGEVEGEDAFLSSKGRHERTKFRGHGSEASVSKHTARELSPQHKRERLRNREFALNNENYSLSNRQVSSPSFTNRRAAKASHMGVSTDSGTQETKKTEDRFVPGSSQSEGKKSREQPSVLSRYPPAAQEHSKAWKGTSKPGTESGLKGKVEKTTRTFSDTTHGSVPSDPLGRADKASDTSSETVFGKRGHVLGNGSQVTQAANSGCSKAIGALASSRRSSSEGLSKGKKAANGLEADNSCPNSKAPVLSKYPYSCRSQENILQGFSTSHKEGVNQPAAVVMEDSSPHEALRCRVIKSSGREKPDSDDDLDIASLVTAKLVNTTITPEPEPKPQPNSREKAKTRGAPRTSLFENDKDAGMENESVKSVRASTNTMELPDTNGAGVKSQRPFSPREALRSRAIIKPVIVDKDVKKIMGGSGTETTLEKQKPVSKPGPNKVTSSITIYPSDSSSPRAAPGEALRERHTSTSNIQVGLAELTSVSNHVSSPFELSIHKHDITLQLAEAERMADGPLKDRPETVVSRSSIIIKPSDPVERNSHAPPAETIRWKSHSAPSEVGFSDARHVTVRNAWKSRRDLKSLEDPPTRIGKNVESTNSNAYTQRSSTDFSELEQPRSCLFEQGTRRVGPSSGDAPEPSSRRTQSSLTVSEVLTRRNRVGDTITVAAWNHSASMSS

SEQ ID NO: 683 - protein, 256 aa, Homo sapiens
MGPRARPALLLLMLLQTAVLQGRLLRSHSLHYLFMGASEQDLGLSLFEALGYVDDQLFVFYDHESRRVEPRTPWVSSRISSQMWLQLSQSLKGWDHMFTVDFWTIMENHNHSKVPPLVKVTHHVTSSVTTLRCRALNYYPQNITMKWLKDKQPMDAKEFEPKDVLPNGDGTYQGWITLAVPPGEEQRYTCQVEHPGLDQPLIVIWEPSPSGTLVIGVISGIAVFVVILFIGILFIILRKRQGSRGAMGHYVLAERE

SEQ ID NO: 684 - protein, 253 aa, Homo sapiens
MNFSGGGRQEAAGSRGRRAPRPREQDRDVQLSKALSYALRHGALKLGLPMGADGFVPLGTLLQLPQFRGFSAEDVQRVVDTNRKQRFALQLGDPSTGLLIRANQGHSLQVPKLELMPLETPQALPPMLVHGTFWKHWPSILLKGLSCQGRTHIHLAPGLPGDPGIISGMRSHCEIAVFIDGPLALADGIPFFRSANGVILTPGNTDGFLLPKYFKEALQLRPTRKPLSLAGDEETECQSSPKHSSRERRRIQQ

SEQ ID NO: 685 - protein, 261 aa, Homo sapiens
MWVPVVFLTLSVTWIGAAPLILSRIVGGWECEKHSQPWQVLVASRGRAVCGGVLVHPQWVLTAAHCIRNKSVILLGRHSLFHPEDTGQVFQVSHSFPHPLYDMSLLKNRFLRPGDDSSHDLMLLRLSEPAELTDAVKVMDLPTQEPALGTTCYASGWGSIEPEEFLTPKKLQCVDLHVISNDVCAQVHPQKVTKFMLCAGRWTGGKSTCSGDSGGPLVCNGVLQGITSWGSEPCALPERPSLYTKVVHYRKWIKDTIVANP

SEQ ID NO: 686 - protein, 255 aa, Homo sapiens
MASPGAGRAPPELPERNCGYREVEYWDQRYQGAADSAPYDWFGDFSSFRALLEPELRPEDRILVLGCGNSALSYELFLGGFPNVTSVDYSSVVVAAMQARHAHVPQLRWETMDVRKLDFPSASFDVVLEKGTLDALLAGERDPWTVSSEGVHTVDQVLSEVSRVLVPGGRFISMTSAAPHFRTRHYAQAYYGWSLRHATYGSGFHFHLYLMHKGGKLSVAQLALGAQILSPPRPPTSPCFLQDSDHEDFLSAIQL

SEQ ID NO: 687 - protein, 339 aa, Homo sapiens
MVAMAEAEAGVAVEVRGLPPAVPDELLTLYFENRRRSGGGPVLSWQRLGCGGVLTFREPADVRVLEEQAQNLGLEGTLVSLARVPQARAVRVVGDGASVDLLLLELYLENERRSGGGPLEDLQRLPGPLGTVASFQQWQVAERVLQQEHRLQGSELSLVPHYDILEPEELAENTSGGDHPSTQGPRATKHALLRTGGLVTALQGAGTVTMGSGEEPGQSGASLRTGPMVQGRGIMTTGSGQEPGQSGTSLRTGPMGSLGQAEQVSSMPMGSLEHEGLVSLRPVGLQEQEGPMSLGPVGSAGPVETSKGLLGQEGLVEIAMDSPEQEGLVGPMEITMGSL

SEQ ID NO: 688 - protein, 234 aa, Homo sapiens
MPASSPFLLAPKGPPGNMGGPVREPALSVALWLSWGAALGAVACAMALLTQQTELQSLRREVSRLQGTGGPSQNGEGYPWQSLPEQSSDALEAWENGERSRKRRAVLTQKQKNDSDVTEVMWQPALRRGRGLQAQGYGVRIQDAGVYLLYSQVLFQDVTFTMGQVVSREGQGRQETLFRCIRSMPSHPDRAYNSCYSAGVFHLHQGDILSVIIPRARAKLNLSPHGTFLGFVKL

SEQ ID NO: 689 - protein, 536 aa, Homo sapiens
MEFSSPSREECPKPLSRVSIMAGSLTGLLLLQAVSWASGARPCIPKSFGYSSVVCVCNATYCDSFDPPTFPALGTFSRYESTRSGRRMELSMGPIQANHTGTGLLLTLQPEQKFQKVKGFGGAMTDAAALNILALSPPAQNLLLKSYFSEEGIGYNIIRVPMASCDFSIRTYTYADTPDDFQLHNFSLPEEDTKLKIPLIHRALQLAQRPVSLLASPWTSPTWLKTNGAVNGKGSLKGQPGDIYHQTWARYFVKFLDAYAEHKLQFWAVTAENEPSAGLLSGYPFQCLGFTPEHQRDFIARDLGPTLANSTHHNVRLLMLDDQRLLLPHWAKVVLTDPEAAKYVHGIAVHWYLDFLAPAKATLGETHRLFPNTMLFASEACVGSKFWEQSVRLGSWDRGMQYSHSIITNLLYHVVGWTDWNLALNPEGGPNWVRNFVDSPIIVDITKDTFYKQPMFYHLGHFSKFIPEGSQRVGLVASQKNDLDAVALMHPDGSAVVVVLNRSSKDVPLTIKDPAVGFLETISPGYSIHTYLWRRQ

SEQ ID NO: 690 - protein, 866 aa, Homo sapiens
MAGRVPSLLVLLVFPSSCLAFRSPLSVFKRFKETTRPFSNECLGTTRPVVPIDSSDFALDIRMPGVTPKQSDTYFCMSMRIPVDEEAFVIDFKPRASMDTVHHMLLFGCNMPSSTGSYWFCDEGTCTDKANILYAWARNAPPTRLPKGVGFRVGGETGSKYFVLQVHYGDISAFRDNNKDCSGVSLHLTRLPQPLIAGMYLMMSVDTVIPAGEKVVNSDISCHYKNYPMHVFAYRVHTHHLGKVVSGYRVRNGQWTLIGRQSPQLPQAFYPVGHPVDVSFGDLLAARCVFTGEGRTEATHIGGTSSDEMCNLYIMYYMEAKHAVSFMTCTQNVAPDMFRTIPPEANIPIPVKSDMVMMHEHHKETEYKDKIPLLQQPKREEEEVLDQDFHMEEALDWPGVYLLPGQVSGVALDPKNNLVIFHRGDHVWDGNSFDSKFVYQQIGLGPIEEDTILVIDPNNAAVLQSSGKNLFYLPHGLSIDKDGNYWVTDVALHQVFKLDPNNKEGPVLILGRSMQPGSDQNHFCQPTDVAVDPGTGAIYVSDGYCNSRIVQFSPSGKFITQWGEESSGSSPLPGQFTVPHSLALVPLLGQLCVADRENGRIQCFKTDTKEFVREIKHSSFGRNVFAISYIPGLLFAVNGKPHFGDQEPVQGFVMNFSNGEIIDIFKPVRKHFDMPHDIVASEDGTVYIGDAHTNTVWKFTLTEKLEHRSVKKAGIEVQEIKEAEAVVETKMENKPTSSELQKMQEKQKLIKEPGSGVPVVLITTLLVIPVVVLLAIAIFIRWKKSRAFGDSEHKLETSSGRVLGRFRGKGSGGLNLGNFFASRKGYSRKGFDRLSTEGSDQEKEDDGSESEEEYSAPLPALAPSSS

SEQ ID NO: 691 - protein, 1251 aa, Homo sapiens
MKHLYGLFHYNPMMLGLESLPDPTDTWEIIETIGKGTYGKVYKVTNKRDGSLAAVKILDPVSDMDEEIEAEYNILQFLPNHPNVVKFYGMFYKADHCVGGQLWLVLELCNGGSVTELVKGLLRCGQRLDEAMISYILYGALLGLQHLHNNRIIHRDVKGNNILLTTEGGVKLVDFGVSAQLTSTRLRRNTSVGTPFWMAPEVIACEQQYDSSYDARCDVWSLGITAIELGDGDPPLFDMHPVKTLFKIPRNPPPTLLHPEKWCEEFNHFISQCLIKDFERRPSVTHLLDHPFIKGVHGKVLFLQKQLAKVLQDQKHQNPVAKTRHERMHTRRPYHVEDAEKYCLEDDLVNLEVLDEDTIIHQLQKRYADLLIYTYVGDILIALNPFQNLSIYSPQFSRLYHGVKRASNPPHIFASADAAYQCMVTLSKDQCIVISGESGSGKTESAHLIVQHLTFLGKANNQTLREKILQVNSLVEAFGNSCTAINDNSSRFGKYLEMMFTPTGVVMGARISEYLLEKSRVIKQAAREKNFHIFYYIYAGLHHQKKLSDFRLPEEKPPRYIADETGRVMHDITSKESYRRQFEAIQHCFRIIGFTDKEVHSVYRILAGILNIGNIEFAAISSQHQTDKSEVPNAEALQNAASVLCISPEELQEALTSHCVVTRGETIIRANTVDRAADVRDAMSKALYGRLFSWIVNRINTLLQPDENICSAGGGMNVGILDIFGFENFQRNSFEQLCINIANEQIQYYFNQHVFALEQMEYQNEGIDAVPVEYEDNRPLLDMFLQKPLGLLALLDEESRFPQATDQTLVDKFEDNLRCKYFWRPKGVELCFGIQHYAGKVLYDASGVLEKNRDTLPADVVVVLRTSENKLLQQLFSIPLTKTGNLAQTRARITVASSSLPPHFSAGKAKVDTLEVIRHPEETTNMKRQTVASYFRYSLMDLLSKMVVGQPHFVRCIKPNDDREALQFSRERVLAQLRSTGILETVSIRRQGYSHRILFEEFVKRYYYLAFTAHQTPLASKESCVAILEKSRLDHWVLGKTKVFLKYYHVEQLNLLLREVIGRVVVLQAYTKGWLGARRYKRVREKREKGAIAIQSGDTSNQSSGPHSPVAAGTRGSAEVQDCSEPGDHKVLRGSVHRRSHSQAESNNGRTQTSSNSPAVTEKNGHSQAQSSPKGCDIFAGHANKHSVSGTDLLSSRICHPAPDQQGLSLWGAPQKPAFPHYGCNFYGFRKWSCTEASNTSPTMSAAQNAE

SEQ ID NO: 692 - protein, 350 aa, Homo sapiens
MQRLGATLLCLLLAAAVPTAPAPAPTATSAPVKPGPALSYPQEEATLNEMFREVEELMEDTQHKLRSAVEEMEAEEAAAKASSEVNLANLPPSYHNETNTDTKVGNNTIHVHREIHKITNNQTGQMVFSETVITSVGDEEGRRSHECIIDEDCGPSMYCQFASFQYTCQPCRGQRMLCTRDSECCGDQLCVWGHCTKMATRGSNGTICDNQRDCQPGLCCAFQRGLLFPVCTPLPVEGELCHDPASRLLDLITWELEPDGALDRCPCASGLLCQPHSHSLVYVCKPTFVGSRDQDGEILLPREVPDEYEVGSFMEEVRQELEDLERSLTEEMALREPAAAAAALLGGEEI

SEQ ID NO: 693 - protein, 148 aa, Homo sapiens
MAESLRSPRRSLYKLVGSPPWKEAFRQRCLERMRNSRDRLLNRYRQAGSSGPGNSQNSFLVQEVMEEEWNALQSVENCPEDLAQLEELIDMAVLEEIQQELINQEQSIISEYEKSLQFDEKCLSIMLAEWEANPLICPVCTKPVILGL

SEQ ID NO: 694 - protein, 452 aa, Homo sapiens
MVSVNAPLGAPVESSYDTSPSEGTNLNAPNSLGVSALCAICGDRATGKHYGASSCDGCKGFFRRSVRKNHMYSCRFSRQCVVDKDKRNQCRYCRLKKCFRAGMKKEAVQNERDRISTRRSSYEDSSLPSINALLQAEVLSRQITSPVSGINGDIRAKKIASIADVCESMKEQLLVLVEWAKYIPAFCELPLDDQVALLRAHAGEHLLLGATKRSMVFKDVLLLGNDYIVPRHCPELAEMSRVSIRILDELVLPFQELQIDDNEYAYLKAIIFFDPDAKGLSDPGKIKRLRSQVQVSLEDYINDRQYDSRGRFGELLLLLPTLQSITWQMIEQIQFIKLFGMAKIDNLLQEMLLGGSPSDAPHAHHPLHPHLMQEHMGTNVIVANTMPTHLSNGQMCEWPRPRGQAATPETPQPSPPGGSGSEPYKLLPGAVATIVKPLSAIPQPTITKQEVI

SEQ ID NO: 695 - protein, 521 aa, Homo sapiens
MLPRRPLAWPAWLLRGAPGAAGSWGRPVGPLARRGCCSAPGTPEVPLTRERYPVRRLPFSTVSKQDLAAFERIVPGGVVTDPEALQAPNVDWLRTLRGCSKVLLRPRTSEEVSHILRHCHERNLAVNPQGGNTGMVGGSVPVFDEIILSTARMNRVLSFHSVSGILVCQAGCVLEELSRYVEERDFIMPLDLGAKGSCHIGGNVATNAGGLRFLRYGSLHGTVLGLEVVLADGTVLDCLTSLRKDNTGYDLKQLFIGSEGTLGIITTVSILCPPKPRAVNVAFLGCPGFAEVLQTFSTCKGMLGEILSAFEFMDAVCMQLVGRHLHLASPVQESPFYVLIETSGSNAGHDAEKLGHFLEHALGSGLVTDGTMATDQRKVKMLWALRERITEALSRDGYVYKYDLSLPVERLYDIVTDLRARLGPHAKHVVGYGHLGDGNLHLNVTAEAFSPSLLAALEPHVYEWTAGQQGSVSAEHGVGFRKRDVLGYSKPPGALQLMQQLKALLDPKGILNPYKTLPSQA

SEQ ID NO: 696 - protein, 507 aa, Homo sapiens
MRRLPRALLLQLRLALLVAAGAPEVLVSAPRSLVWGPGLQAAVVLPVRYFYLQAVNSEGQNLTRSPAGETPFKVVVKSLSPKELVRIHVPKPLDRNDGTFLMRYRMYETVDEGLKIEVLYGDEHVAQSPYILKGPVYHEYCECPEDPQAWQKTLSCPTKEPQIAKDFASFPSINLQQMLKEVPKRFGDERGAIVHYTILNNHVYRRSLGKYTDFKMFSDEILLSLTRKVLLPDLEFYVNLGDWPLEHRKVNGTPSPIPIISWCGSLDSRDVVLPTYDITHSMLEAMRGVTNDLLSIQGNTGPSWINKTERAFFRGRDSREERLQLVQLSKENPQLLDAGITGYFFFQEKEKELGKAKLMGFFDFFKYKYQVNVDGTVAAYRYPYLMLGDSLVLKQDSPYYEHFYMALEPWKHYVPIKRNLSDLLEKVKWAKENDEEAKKIAKEGQLMARDLLQPHRLYCYYYQVLQKYAERQSSKPEVRDGMELVPQPEDSTAICQCHRKKPSREEL

SEQ ID NO: 697 - protein, 781 aa, Homo sapiens
MEPAPARSPRPQQDPARPQEPTMPPPETPSEGRQPSPSPSPTERAPASEEEFQFLRCQQCQAEAKCPKLLPCLHTLCSGCLEASGMQCPICQAPWPLGADTPALDNVFFESLQRRLSVYRQIVDAQAVCTRCKESADFWCFECEQLLCAKCFEAHQWFLKHEARPLAELRNQSVREFLDGTRKTNNIFCSNPNHRTPTLTSIYCRGCSKPLCCSCALLDSSHSELKCDISAEIQQRQEELDAMTQALQEQDSAFGAVHAQMHAAVGQLGRARAETEELIRERVRQVVAHVRAQERELLEAVDARYQRDYEEMASRLGRLDAVLQRIRTGSALVQRMKCYASDQEVLDMHGFLRQALCRLRQEEPQSLQAAVRTDGFDEFKVRLQDLSSCITQGKDAAVSKKASPEAASTPRDPIDVDLDVSNTTTAQKRKCSQTQCPRKVIKMESEEGKEARLARSSPEQPRPSTSKAVSPPHLDGPPSPRSPVIGSEVFLPNSNHVASGAGEAEERVVVISSSEDSDAENSCMEPMETAEPQSSPAHSSPAHSSPAHSSPVQSLLRAQGASSLPCGTYHPPAWPPHQPAEQAATPDAEPHSEPPDHQERPAVHRGIRYLLYRAQRAIRLRHALRLHPQLHRAPIRTWSPHVVQASTPAITGPLNHPANAQEHPAQLQRGISPPHRIRGAVRSRSRSLRGSSHLSQWLNNFFALPFSSMASQLDMSSVVGAGESRAQTLGAGVPPGDSVRGSMEASQVQVPLEASPITFPPPCAPERPPISPVPGARQAGL

SEQ ID NO: 698 - protein, 395 aa, Homo sapiens
MALPGYPLGNVDDSRSKDSPAGEPQGQVPLTADVLAVSSSVASTDWQDIDQASFKTATPRAISTSGDKDKSAVVPEHGQKTPRKITPLLPSQNPSPLQVSMSLQNPAWDRQVQDARTSQSLVVFPSHLLGKDKMSQMASVPEREPESAPSAPSAELQSTQHMEAQPVESDADHVTAGANGQHGPQAASTTKSAEEKAEHPKAPHPEAEALPSDESPVAMGANVVDSLGDLQTWFFPPPPAGSVSPSPGPHEVALGRRPLDSSLYTASEENSYMRSMTSLLDRGEGSISSLADILVWSETTMGMAIATGFLDSGHSTVADLLHSSGPSLRSVPSLVGSVSSAFSSGLVSGTSSALRTITRVLETVEQRTVEGIRSAMRYLTSHLTPRQAQADPNYD

SEQ ID NO: 699 - protein, 643 aa, Homo sapiens
MAGLTAAAPRPGVLLLLLSILHPSRPGGVPGAIPGGVPGGVFYPGAGLGALGGGALGPGGKPLKPGLGAFPAVTFPGALVPGGVADAAAAYKAAKAGAGLGGVPGVGGLGVSAGAVVPQPGAGVKPGKVPGVGLPGVYPGGVLPGARFPGVGVLPGVPTGAGVKPKAPGVGPFGGPQPGVPLGYPIKAPKLPGYGPGGVAGAAGKAGYPTGTGVGPQAAAAAAAKAAAKFGAGAAGVLPGVGGAGVPGVPGAIPGIGGIAGVGTPAAAAAAAAAAKAAKYGAAAGLVPGGPGFGPGVVGVPGAGVPGVGVPGAGIPVVPGAGIPGAAVPGVVSPEAAAKAAAKAAKYGARPGVGVGGIPTYGVGAGGFPGFGVGVGAEAQAAAAAKAAKYGLVPGVGVAPGVGVAPGVGVAPGVGLAPGVGVAPGVGVAPGVGVAPGIGPGGVAAAAKSAAKVAAKAQLRAAAGLGAGIPGLGVGVGVPGLGVGAGVPGLGVGAGVPGFGAVPGALAAAKAAKYGAAVPGVLGGLGALGGVGIPGGVVGAGPAAAAAAAKAAAKAAQFGLVGAAGLGGLGVGGLGVPGVGGLGGIPPAAAAKAAKYGAAGLGGVLGGAGQFPLGGVAARPGFGLSPIFPGGACLGKACGRKRK

SEQ ID NO: 700 - protein, 2569 aa, Homo sapiens
MRKHRHLPLVAVFCLFLSGFPTTHAQQQQAVIEVNKRDIVFLVDGSSALGLANFNAIRDFIAKVIQRLEIGQDLIQVAVAQYADTVRPEFYFNTHPTKREVITAVRKMKPLDGSALYTGSALDFVRNNLFTSSAGYRAAEGIPKLLVLITGGKSLDEISQPAQELKRSSIMAFAIGNKGADQAELEEIAFDSSLVFIPAEFRAAPLQGMLPGLLAPLRTLSGTPEESKRDILFLFDGSANLVGQFPVVRDFLYKIIDELNVKPEGTRIAVAQYSDDVKVESRFDEHQSKPEILNLVKRMKIKTGKALNLGYALDYAQRYIFVKSAGSRIEDGVLQFLVLLVAGRSSDRVDGPASNLKQSGVVPFIFQAKNADPAELEQIVLSPAFILAAESLPKIGDLHPQIVNLLKSVHNGAPAPVSGEKDVVFLLDGSEGVRSGFPLLKEFVQRVVESLDVGQDRVRVAVVQYSDRTRPEFYLNSYMNKQDVVNAVRQLTLLGGPTPNTGAALEFVLRNILVSSAGSRITEGVPQLLIVLTADRSGDDVRNPSVVVKRGGAVPIGIGIGNADITEMQTISFIPDFAVAIPTFRQLGTVQQVISERVTQLTREELSRLQPVLQPLPSPGVGGKRDVVFLIDGSQSAGPEFQYVRTLIERLVDYLDVGFDTTRVAVIQFSDDPKVEFLLNAHSSKDEVQNAVQRLRPKGGRQINVGNALEYVSRNIFKRPLGSRIEEGVPQFLVLISSGKSDDEVDDPAVELKQFGVAPFTIARNADQEELVKISLSPEYVFSVSTFRELPSLEQKLLTPITTLTSEQIQKLLASTRYPPPAVESDAADIVFLIDSSEGVRPDGFAHIRDFVSRIVRRLNIGPSKVRVGVVQFSNDVFPEFYLKTYRSQAPVLDAIRRLRLRGGSPLNTGKALEFVARNLFVKSAGSRIEDGVPQHLVLVLGGKSQDDVSRFAQVIRSSGIVSLGVGDRNIDRTELQTITNDPRLVFTVREFRELPNIEERIMNSFGPSAATPAPPGVDTPPPSRPEKKKADIVFLLDGSINFRRDSFQEVLRFVSEIVDTVYEDGDSIQVGLVQYNSDPTDEFFLKDFSTKRQIIDAINKVVYKGGRHANTKVGLEHLRVNHFVPEAGSRLDQRVPQIAFVITGGKSVEDAQDVSLALTQRGVKVFAVGVRNIDSEEVGKIASNSATAFRVGNVQELSELSEQVLETLHDAMHETLCPGVTDAAKACNLDVILGFDGSRDQNVFVAQKGFESKVDAILNRISQMHRVSCSGGRSPTVRVSVVANTPSGPVEAFDFDEYQPEMLEKFRNMRSQHPYVLTEDTLKVYLNKFRQSSPDSVKVVIHFTDGADGDLADLHRASENLRQEGVRALILVGLERVVNLERLMHLEFGRGFMYDRPLRLNLLDLDYELAEQLDNIAEKACCGVPCKCSGQRGDRGPIGSIGPKGIPGEDGYRGYPGDEGGPGERGPPGVNGTQGFQGCPGQRGVKGSRGFPGEKGEVGEIGLDGLDGEDGDKGLPGSSGEKGNPGRRGDKGPRGEKGERGDVGIRGDPGNPGQDSQERGPKGETGDLGPMGVPGRDGVPGGPGETGKNGGFGRRGPPGAKGNKGGPGQPGFEGEQGTRGAQGPAGPAGPPGLIGEQGISGPRGSGGAAGAPGERGRTGPLGRKGEPGEPGPKGGIGNRGPRGETGDDGRDGVGSEGRRGKKGERGFPGYPGPKGNPGEPGLNGTTGPKGIRGRRGNSGPPGIVGQKGDPGYPGPAGPKGNRGDSIDQCALIQSIKDKCPFHGPLECPVFPTELAFALDTSEGVNQDTFGRMRDVVLSIVNDLTIAESNCPRGARVAVVTYNNEVTTEIRFADSKRKSVLLDKIKNLQVALTSKQQSLETAMSFVARNTFKRVRNGFLMRKVAVFFSNTPTRASPQLREAVLKLSDAGITPLFLTRQEDRQLINALQINNTAVGHALVLPAGRDLTDFLENVLTCHVCLDICNIDPSCGFGSWRPSFRDRRAAGSDVDIDMAFILDSAETTTLFQFNEMKKYIAYLVRQLDMSPDPKASQHFARVAVVQHAPSESVDNASMPPVKVEFSLTDYGSKEKLVDFLSRGMTQLQGTRALGSAIEYTIENVFESAPNPRDLKIVVLMLTGEVPEQQLEEAQRVILQAKCKGYFFVVLGIGRKVNIKEVYTFASEPNDVFFKLVDKSTELNEEPLMRFGRLLPSFVSSENAFYLSPDIRKQCDWFQGDQPTKNLVKFGHKQVNVPNNVTSSPTSNPVTTTKPVTTTKPVTTTTKPVTTTTKPVTIINQPSVKPAAAKPAPAKPVAAKPVATKMATVRPPVAVKPATAAKPVAAKPAAVRPPAAAAAKPVATKPEVPRPQAAKPAATKPATTKPMVKMSREVQVFEITENSAKLHWERAEPPGPYFYDLTVTSAHDQSLVLKQNLTVTDRVIGGLLAGQTYHVAVVCYLRSQVRATYHGSFSTKKSQPPPPQPARSASSSTINLMVSTEPLALTETDICKLPKDEGTCRDFILKWYYDPNTKSCARFWYGGCGGNENKFGSQKECEKVCAPVLAKPGVISVMGT

SEQ ID NO: 701 - protein, 585 aa, Homo sapiens
MGSLKEELLKAIWHAFTALDQDHSGKVSKSQLKVLSHNLCTVLKVPHDPVALEEHFRDDDEGPVSNQGYMPYLNRFILEKVQDNFDKIEFNRMCWTLCVKKNLTKNPLLITEEDAFKIWVIFNFLSEDKYPLIIVSEEIEYLLKKLTEAMGGGWQQEQFEHYKINFDDSKNGLSAWELIELIGNGQFSKGMDRQTVSMAINEVFNELILDVLKQGYMMKKGHRRKNWTERWFVLKPNIISYYVSEDLKDKKGDILLDENCCVESLPDKDGKKCLFLVKCFDKTFEISASDKKKKQEWIQAIHSTIHLLKLGSPPPHKEARQRRKELRKKQLAEQEELERQMKELQAANESKQQELEAVRKKLEEAASRAAEEEKKRLQTQVELQARFSTELEREKLIRQQMEEQVAQKSSELEQYLQRVRELEDMYLKLQEALEDERQARQDEETVRKLQARLLEEESSKRAELEKWHLEQQQAIQTTEAEKQELENQRVLKEQALQEAMEQLEQLELERKQALEQYEEVKKKLEMATNKTKSWKDKVAHHEGLIRLIEPGSKNPHLITNWGPAAFTEAELEEREKNWKEKKTTE

SEQ ID NO: 702 - protein, 466 aa, Homo sapiens
MEPWPCSPGGGGGTRARHVIINVGGCRVRLAWAALARCPLARLERLRACRGHDDLLRVCDDYDVSRDEFFFDRSPCAFRAIVALLRAGKLRLLRGPCALAFRDELAYWGIDEARLERCCLRRLRRREEEAAEARAGPTERGAQGSPARALGPRGRLQRGRRRLRDVVDNPHSGLAGKLFACVSVSFVAVTAVGLCLSTMPDIRAEEERGECSPKCRSLFVLETVCVAWFSFEFLLRSLQAESKCAFLRAPLNIIDILALLPFYVSLLLGLAAGPGGTKLLERAGLVLRLLRALRVLYVMRLARHSLGLRSLGLTMRRCAREFGLLLLFLCVAMALFAPLVHLAERELGARRDFSSVPASYWWAVISMTTVGYGDMVPRSLPGQVVALSSILSGILLMAFPVTSIFHTFSRSYSELKEQQQRAASPEPALQEDSTHSATATEDSSQGPDSAGLADDSADALWVRAGR

SEQ ID NO: 703 - protein, 851 aa, Homo sapiens
MAQWEMLQNLDSPFQDQLHQLYSHSLLPVDIRQYLAVWIEDQNWQEAALGSDDSKATMLFFHFLDQLNYECGRCSQDPESLLLQHNLRKFCRDIQPFSQDPTQLAEMIFNLLLEEKRILIQAQRAQLEQGEPVLETPVESQQHEIESRILDLRAMMEKLVKSISQLKDQQDVFCFRYKIQAKGKTPSLDPHQTKEQKILQETLNELDKRRKEVLDASKALLGRLTTLIELLLPKLEEWKAQQQKACIRAPIDHGLEQLETWFTAGAKLLFHLRQLLKELKGLSCLVSYQDDPLTKGVDLRNAQVTELLQRLLHRAFVVETQPCMPQTPHRPLILKTGSKFTVRTRLLVRLQEGNESLTVEVSIDRNPPQLQGFRKFNILTSNQKTLTPEKGQSQGLIWDFGYLTLVEQRSGGSGKGSNKGPLGVTEELHIISFTVKYTYQGLKQELKTDTLPVVIISNMNQLSIAWASVLWFNLLSPNLQNQQFFSNPPKAPWSLLGPALSWQFSSYVGRGLNSDQLSMLRNKLFGQNCRTEDPLLSWADFTKRESPPGKLPFWTWLDKILELVHDHLKDLWNDGRIMGFVSRSQERRLLKKTMSGTFLLRFSESSEGGITCSWVEHQDDDKVLIYSVQPYTKEVLQSLPLTEIIRHYQLLTEENIPENPLRFLYPRIPRDEAFGCYYQEKVNLQERRKYLKHRLIVVSNRQVDELQQPLELKPEPELESLELELGLVPEPELSLDLEPLLKAGLDLGPELESVLESTLEPVIEPTLCMVSQTVPEPDQGPVSQPVPEPDLPCDLRHLNTEPMEIFRNCVKIEEIMPNGDPLLAGQNTVDEVYVSRPSHFYTDGPLMPSDF

SEQ ID NO: 704 - protein, 789 aa, Homo sapiens
MGTKMADLDSPPKLSGVQQPSEGVGGGRCSEISAELIRSLTELQELEAVYERLCGEEKVVERELDALLEQQNTIESKMVTLHRMGPNLQLIEGDAKQLAGMITFTCNLAENVSSKVRQLDLAKNRLYQAIQRADDILDLKFCMDGVQTALRSEDYEQAAAHTHRYLCLDKSVIELSRQGKEGSMIDANLKLLQEAEQRLKAIVAEKFAIATKEGDLPQVERFFKIFPLLGLHEEGLRKFSEYLCKQVASKAEENLLMVLGTDMSDRRAAVIFADTLTLLFEGIARIVETHQPIVETYYGPGRLYTLIKYLQVECDRQVEKVVDKFIKQRDYHQQFRHVQNNLMRNSTTEKIEPRELDPILTEVTLMNARSELYLRFLKKRISSDFEVGDSMASEEVKQEHQKCLDKLLNNCLLSCTMQELIGLYVTMEEYFMRETVNKAVALDTYEKGQLTSSMVDDVFYIVKKCIGRALSSSSIDCLCAMINLATTELESDFRDVLCNKLRMGFPATTFQDIQRGVTSAVNIMHSSLQQGKFDTKGIESTDEAKMSFLVTLNNVEVCSENISTLKKTLESDCTKLFSQGIGGEQAQAKFDSCLSDLAAVSNKFRDLLQEGLTELNSTAIKPQVQPWINSFFSVSHNIEEEEFNDYEANDPWVQQFILNLEQQMAEFKASLSPVIYDSLTGLMTSLVAVELEKVVLKSTFNRLGGLQFDKELRSLIAYLTTVTTWTIRDKFARLSQMATILNLERVTEILDYWGPNSGPLTWRLTPAEVRQVLALRIDFRSEDIKRLRL

SEQ ID NO: 705 - protein, 2971 aa, Homo sapiens
MRKHRHLPLVAVFCLFLSGFPTTHAQQQQAAQDSADIIFLIDGSNNTGSVNFAVILDFLVNLLEKLPIGTQQIRVGVVQFSDEPRTMFSLDTYSTKAQVLGAVKALGFAGGELANIGLALDFVVENHFTRAGGSRVEEGVPQVLVLISAGPSSDEIRYGVVALKQASVFSFGLGAQAASRAELQHIATDDNLVFTVPEFRSFGDLQEKLLPYIVGVAQRHIVLKPPTIVTQVIEVNKRDIVFLVDGSSALGLANFNAIRDFIAKVIQRLEIGQDLIQVAVAQYADTVRPEFYFNTHPTKREVITAVRKMKPLDGSALYTGSALDFVRNNLFTSSAGYRAAEGIPKLLVLITGGKSLDEISQPAQELKRSSIMAFAIGNKGADQAELEEIAFDSSLVFIPAEFRAAPLQGMLPGLLAPLRTLSGTPEVHSNKRDIIFLLDGSANVGKTNFPYVRDFVMNLVNSLDIGNDNIRVGLVQFSDTPVTEFSLNTYQTKSDILGHLRQLQLQGGSGLNTGSALSYVYANHFTEAGGSRIREHVPQLLLLLTAGQSEDSYLQAANALTRAGILTFCVGASQANKAELEQIAFNPSLVYLMDDFSSLPALPQQLIQPLTTYVSGGVEEVPLAQPESKRDILFLFDGSANLVGQFPVVRDFLYKIIDELNVKPEGTRIAVAQYSDDVKVESRFDEHQSKPEILNLVKRMKIKTGKALNLGYALDYAQRYIFVKSAGSRIEDGVLQFLVLLVAGRSSDRVDGPASNLKQSGVVPFIFQAKNADPAELEQIVLSPAFILAAESLPKIGDLHPQIVNLLKSVHNGAPAPVSGEKDVVFLLDGSEGVRSGFPLLKEFVQRVVESLDVGQDRVRVAVVQYSDRTRPEFYLNSYMNKQDVVNAVRQLTLLGGPTPNTGAALEFVLRNILVSSAGSRITEGVPQLLIVLTADRSGDDVRNPSVVVKRGGAVPIGIGIGNADITEMQTISFIPDFAVAIPTFRQLGTVQQVISERVTQLTREELSRLQPVLQPLPSPGVGGKRDVVFLIDGSQSAGPEFQYVRTLIERLVDYLDVGFDTTRVAVIQFSDDPKVEFLLNAHSSKDEVQNAVQRLRPKGGRQINVGNALEYVSRNIFKRPLGSRIEEGVPQFLVLISSGKSDDEVDDPAVELKQFGVAPFTIARNADQEELVKISLSPEYVFSVSTFRELPSLEQKLLTPITTLTSEQIQKLLASTRYPPPAVESDAADIVFLIDSSEGVRPDGFAHIRDFVSRIVRRLNIGPSKVRVGVVQFSNDVFPEFYLKTYRSQAPVLDAIRRLRLRGGSPLNTGKALEFVARNLFVKSAGSRIEDGVPQHLVLVLGGKSQDDVSRFAQVIRSSGIVSLGVGDRNIDRTELQTITNDPRLVFTVREFRELPNIEERIMNSFGPSAATPAPPGVDTPPPSRPEKKKADIVFLLDGSINFRRDSFQEVLRFVSEIVDTVYEDGDSIQVGLVQYNSDPTDEFFLKDFSTKRQIIDAINKVVYKGGRHANTKVGLEHLRVNHFVPEAGSRLDQRVPQIAFVITGGKSVEDAQDVSLALTQRGVKVFAVGVRNIDSEEVGKIASNSATAFRVGNVQELSELSEQVLETLHDAMHETLCPGVTDAAKACNLDVILGFDGSRDQNVFVAQKGFESKVDAILNRISQMHRVSCSGGRSPTVRVSVVANTPSGPVEAFDFDEYQPEMLEKFRNMRSQHPYVLTEDTLKVYLNKFRQSSPDSVKVVIHFTDGADGDLADLHRASENLRQEGVRALILVGLERVVNLERLMHLEFGRGFMYDRPLRLNLLDLDYELAEQLDNIAEKACCGVPCKCSGQRGDRGPIGSIGPKGIPGEDGYRGYPGDEGGPGERGPPGVNGTQGFQGCPGQRGVKGSRGFPGEKGEVGEIGLDGLDGEDGDKGLPGSSGEKGNPGRRGDKGPRGEKGERGDVGIRGDPGNPGQDSQERGPKGETGDLGPMGVPGRDGVPGGPGETGKNGGFGRRGPPGAKGNKGGPGQPGFEGEQGTRGAQGPAGPAGPPGLIGEQGISGPRGSGGAAGAPGERGRTGPLGRKGEPGEPGPKGGIGNRGPRGETGDDGRDGVGSEGRRGKKGERGFPGYPGPKGNPGEPGLNGTTGPKGIRGRRGNSGPPGIVGQKGDPGYPGPAGPKGNRGDSIDQCALIQSIKDKCPCCYGPLECPVFPTELAFALDTSEGVNQDTFGRMRDVVLSIVNDLTIAESNCPRGARVAVVTYNNEVTTEIRFADSKRKSVLLDKIKNLQVALTSKQQSLETAMSFVARNTFKRVRNGFLMRKVAVFFSNTPTRASPQLREAVLKLSDAGITPLFLTRQEDRQLINALQINNTAVGHALVLPAGRDLTDFLENVLTCHVCLDICNIDPSCGFGSWRPSFRDRRAAGSDVDIDMAFILDSAETTTLFQFNEMKKYIAYLVRQLDMSPDPKASQHFARVAVVQHAPSESVDNASMPPVKVEFSLTDYGSKEKLVDFLSRGMTQLQGTRALGSAIEYTIENVFESAPNPRDLKIVVLMLTGEVPEQQLEEAQRVILQAKCKGYFFVVLGIGRKVNIKEVYTFASEPNDVFFKLVDKSTELNEEPLMRFGRLLPSFVSSENAFYLSPDIRKQCDWFQGDQPTKNLVKFGHKQVNVPNNVTSSPTSNPVTTTKPVTTTKPVTTTTKPVTTTTKPVTIINQPSVKPAAAKPAPAKPVAAKPVATKMATVRPPVAVKPATAAKPVAAKPAAVRPPAAAAAKPVATKPEVPRPQAAKPAATKPATTKPMVKMSREVQVFEITENSAKLHWERAEPPGPYFYDLTVTSAHDQSLVLKQNLTVTDRVIGGLLAGQTYHVAVVCYLRSQVRATYHGSFSTKKSQPPPPQPARSASSSTINLMVSTEPLALTETDICKLPKDEGTCRDFILKWYYDPNTKSCARFWYGGCGGNENKFGSQKECEKVCAPVLAKPGVISVMGT

SEQ ID NO: 706 - protein, 1453 aa, Homo sapiens
MMLPQNSWHIDFGRCCCHQNLFSAVVTCILLLNSCFLISSFNGTDLELRLVNGDGPCSGTVEVKFQGQWGTVCDDGWNTTASTVVCKQLGCPFSFAMFRFGQAVTRHGKIWLDDVSCYGNESALWECQHREWGSHNCYHGEDVGVNCYGEANLGLRLVDGNNSCSGRVEVKFQERWGTICDDGWNLNTAAVVCRQLGCPSSFISSGVVNSPAVLRPIWLDDILCQGNELALWNCRHRGWGNHDCSHNEDVTLTCYDSSDLELRLVGGTNRCMGRVELKIQGRWGTVCHHKWNNAAADVVCKQLGCGTALHFAGLPHLQSGSDVVWLDGVSCSGNESFLWDCRHSGTVNFDCLHQNDVSVICSDGADLELRLADGSNNCSGRVEVRIHEQWWTICDQNWKNEQALVVCKQLGCPFSVFGSRRAKPSNEARDIWINSISCTGNESALWDCTYDGKAKRTCFRRSDAGVICSDKADLDLRLVGAHSPCYGRLEVKYQGEWGTVCHDRWSTRNAAVVCKQLGCGKPLHVFGMTYFKEASGPIWLDDVSCIGNESNIWDCEHSGWGKHNCVHREDVIVTCSGDATWGLRLVGGSNRCSGRLEVYFQGRWGTVCDDGWNSKAAAVVCSQLDCPSSIIGMGLGNASTGYGKIWLDDVSCDGDESDLWSCRNSGWGNNDCSHSEDVGVICSDASDMELRLVGGSSRCAGKVEVNVQGAVGILCANGWGMNIAEVVCRQLECGSAIRVSREPHFTERTLHILMSNSGCTGGEASLWDCIRWEWKQTACHLNMEASLICSAHRQPRLVGADMPCSGRVEVKHADTWRSVCDSDFSLHAANVLCRELNCGDAISLSVGDHFGKGNGLTWAEKFQCEGSETHLALCPIVQHPEDTCIHSREVGVVCSRYTDVRLVNGKSQCDGQVEINVLGHWGSLCDTHWDPEDARVLCRQLSCGTALSTTGGKYIGERSVRVWGHRFHCLGNESLLDNCQMTVLGAPPCIHGNTVSVICTGSLTQPLFPCLANVSDPYLSAVPEGSALICLEDKRLRLVDGDSRCAGRVEIYHDGFWGTICDDGWDLSDAHVVCQKLGCGVAFNATVSAHFGEGSGPIWLDDLNCTGMESHLWQCPSRGWGQHDCRHKEDAGVICSEFTALRLYSETETESCAGRLEVFYNGTWGSVGRRNITTAIAGIVCRQLGCGENGVVSLAPLSKTGSGFMWVDDIQCPKTHISIWQCLSAPWERRISSPAEETWITCEDRIRVRGGDTECSGRVEIWHAGSWGTVCDDSWDLAEAEVVCQQLGCGSALAALRDASFGQGTGTIWLDDMRCKGNESFLWDCHAKPWGQSDCGHKEDAGVRCSGQSLKSLNASSGHLALILSSIFGLLLLVLFILFLTWCRVQKQKHLPLRVSTRRRGSLEENLFHEMETCLKREDPHGTRTSDDTPNHGCEDASDTSLLGVLPASEATK

SEQ ID NO: 707 - protein, 750 aa, Homo sapiens
MEDLFETFQDEMGFSNMEDDGPEEEERVAEPQANFNTPQALRFEELLANLLNEQHQIAKELFEQLKMKKPSAKQQKEVEKVKPQCKEVHQTLILDPAQRKRLQQQMQQHVQLLTQIHLLATCNPNLNPEASSTRICLKELGTFAQSSIALHHQYNPKFQTLFQPCNLMGAMQLIEDFSTHVSIDCSPHKTVKKTANEFPCLPKQVAWILATSKVFMYPELLPVCSLKAKNPQDKILFTKAEDNLLALGLKHFEGTEFLNPLISKYLLTCKTARQLTVRIKNLNMNRAPDNIIKFYKKTKQLPVLGKCCEEIQPHQWKPPIEREEHRLPFWLKASLPSIQEELRHMADGAREVGNMTGTTEINSDQGLEKDNSELGSETRYPLLLPKGVVLKLKPVADRFPKKAWRQKRSSVLKPLLIQPSPSLQPSFNPGKTPAQSTHSEAPPSKMVLRIPHPIQPATVLQTVPGVPPLGVSGGESFESPAALPAMPPEARTSFPLSESQTLLSSAPVPKVMMPSPASSMFRKPYVRRRPSKRRGARAFRCIKPAPVIHPASVIFTVPATTVKIVSLGGGCNMIQPVNAAVAQSPQTIPIATLLVNPTSFPCPLNQPLVASSVSPLIVSGNSVNLPIPSTPEDKAHMNVDIACAVADGENAFQGLEPKLEPQELSPLSATVFPKVEHSPGPPPVDKQCQEGLSENSAYRWTVVKTEEGRQALEPLPQGIQESLNNSSPGDLEEVVKMEPEDATEEISGFL

SEQ ID NO: 708 - protein, 1063 aa, Homo sapiens
MPHLPLASFRPPFWGLRHSRGLPRFHSVSTQSEPHGSPISRRNREAKQKRLREKQATLEAEIAGESKSPAESIKAWRPKELVLYEIPTKPGEKKDVSGPLPPAYSPRYVEAAWYPWWVREGFFKPEYQARLPQATGETFSMCIPPPNVTGSLHIGHALTVAIQDALVRWHRMRGDQVLWVPGSDHAGIATQAVVEKQLWKERGVRRHELSREAFLREVWQWKEAKGGEICEQLRALGASLDWDRECFTMDVGSSVAVTEAFVRLYKAGLLYRNHQLVNWSCALRSAISDIEVENRPLPGHTQLRLPGCPTPVSFGLLFSVAFPVDGEPDAEVVVGTTRPETLPGDVAVAVHPDDSRYTHLHGRQLRHPLMGQPLPLITDYAVQPHVGTGAVKVTPAHSPADAEMGARHGLSPLNVIAEDGTMTSLCGDWLQGLHRFVAREKIMSVLSEWGLFRGLQNHPMVLPICSRSGDVIEYLLKNQWFVRCQEMGARAAKAVESGALELSPSFHQKNWQHWFSHIGDWCVSRQLWWGHQIPAYLVVEDHAQGEEDCWVVGRSEAEAREVAAELTGRPGAELTLERDPDVLDTWFSSALFPFSALGWPQETPDLARFYPLSLLETGSDLLLFWVGRMVMLGTQLTGQLPFSKVLLHPMVRDRQGRKMSKSLGNVLDPRDIISGVEMQVLQEKLRSGNLDPAELAIVAAAQKKDFPHGIPECGTDALRFTLCSHGVQAGDLHLSVSEVQSCRHFCNKIWNALRFILNALGEKFVPQPAEELSPSSPMDAWILSRLALAAQECERGFLTRELSLVTHALHHFWLHNLCDVYLEAVKPVLWHSPRPLGPPQVLFSCADLGLRLLAPLMPFLAEELWQRLPPRPGCPPAPSISVAPYPSACSLEHWRQPELERRFSRVQEVVQVLRALRATYQLTKARPRVLLQSSEPGDQGLFEAFLEPLGTLGYCGAVGLLPPGAAAPSGWAQAPLSDTAQVYMELQGLVDPQIQLPLLAARRYKLQKQLDSLTARTPSEGEAGTQRQQKLSSLQLELSKLDKAASHLRQLMDEPPAPGSPEL

SEQ ID NO: 709 - protein, 812 aa, Homo sapiens
MTGLEDQEFDFEFLFEFNQRDEGAAAAAPEHYGYASSNVSPALPLPTAHSTLPAPCHNLQTSTPGIIPPADHPSGYGAALDGGPAGYFLSSGHTRPDGAPALESPRIEITSCLGLYHNNNQFFHDVEVEDVLPSSKRSPSTATLSLPSLEAYRDPSCLSPASSLSSRSCNSEASSYESNYSYPYASPQTSPWQSPCVSPKTTDPEEGFPRGLGACTLLGSPRHSPSTSPRASVTEESWLGARSSRPASPCNKRKYSLNGRQPPYSPHHSPTPSPHGSPRVSVTDDSWLGNTTQYTSSAIVAAINALTTDSSLDLGDGVPVKSRKTTLEQPPSVALKVEPVGEDLGSPPPPADFAPEDYSSFQHIRKGGFCDQYLAVPQHPYQWAKPKPLSPTSYMSPTLPALDWQLPSHSGPYELRIEVQPKSHHRAHYETEGSRGAVKASAGGHPIVQLHGYLENEPLMLQLFIGTADDRLLRPHAFYQVHRITGKTVSTTSHEAILSNTKVLEIPLLPENSMRAVIDCAGILKLRNSDIELRKGETDIGRKNTRVRLVFRVHVPQPSGRTLSLQVASNPIECSQRSAQELPLVEKQSTDSYPVVGGKKMVLSGHNFLQDSKVIFVEKAPDGHHVWEMEAKTDRDLCKPNSLVVEIPPFRNQRITSPVHVSFYVCNGKRKRSQYQRFTYLPANVPIIKTEPTDDYEPAPTCGPVSQGLSPLPRPYYSQQLAMPPDPSSCLVAGFPPCPQRSTLMPAAPGVSPKLHDLSPAAYTKGVASPGHCHLGLPQPAGEAPAVQDVPRPVATHPGSPGQPPPALLPQQ

SEQ ID NO: 710 - protein, 2601 aa, Homo sapiens
MKRKVVNTHKLRLSPNEEAFILKEDYERRRKLRLLQVREQERDIALQIREDIKQRRNQQFTRLAEELRAEWEESQTQKIQNLEKLYLASLRSMGEGHRQAKENEPDLDALAQRAAERKRKADLRHKEALKVQKNQKEILLKQKTWHIKARKEALLVEKERSAKITSLPPPPPTLFENIEVKRISAVKTNSSTYHHLHTFVNRETDTKRPDARLAAEEEAKRLEELQKQAAQERMERFEKAHVRGFQAMKKIHLAQNQEKLMKELKQLQQEDLARRRQTVAQMPPQLVELPYKRSEMKEDWQRELEFAFEDMYNADRKVKGNLILHLEPEPLPTVTNQIQDEELDLSMEQENLGAAEDLPVTEAEICSSETDVPLVMKTQQIPSKVLFKKLLNKIRSQKSLWTIKSMSEDESEMITTVSEIESKAPTVESGTIASKERTLSSGQEQVVESDTLTIESGPLASEDKPLSCGTNSGKEQEINETLPITTVAQSSVLLHPQEAAARIRMSARQKQIMEIEEQKQKQLELLEQIEQQKLRLETDCFRAQLEEEKRKKTQPTGVGIAPASCPVISDEDSHRQMIRNYQHQLLQQNRLHRQSVETARKQLLEYQTMLKGRCPSVSAPSLITDSVISVPSWKSERPTAISEHWDQGQRLKLSPNKYQPIQPIQTSKLEQDHFQVARQNHFPQRQVETTETLRASDILTNQALESQEHLRQFSQTETQQRDYKLVPKDSETLSRALSHDRQLISQDARKISETFGATTFQSLESQQLFSENSENISYHLTEPSSFVPLVPQHSFSSLPVKVESGKIQEPFSAMSKSTVSTSHSIISQMHDRPLLPSENITAQQGNMKALQEQLDLQKKVLQATQEAQEQLLLCKQKEVEQQTGLSVFLPLVTPDSSALLPSAKADLGRIQESSPTKNNIAVSSDHHVISQLQDKRLSLSQPILSQQNNFKFLQEQLNIQKDSLQARREAQEVLYVHKQSELDRRVCSEQAEPSFPFQVAQHTFTSLPSADTKSGKIQEQHSSKSEKGLVSCQSDIPISQDGSLSFLQQFLPLHDSLKLLQEQLTKQRDTLQARHEAQVELLLHRQRDLGDSKSGLVSSSSSPVVVQHSVASQASAKAEPRRIQELYLSEKENVGPSCHLIIPTFQDKSLSFPQHSLAQQENLTILQEQSQIQRVILGAKEGTQEFVHTESELEKRISSEQTGTSSSLSQVDESERFQECISIKSDSTIPLSHPKIPRCQERLLRVSQHMLPLQDNLEEHQAWLDTEKEAFHFSQKTQENTSSEQTGSSSFIPQLVQLSFTSLASAESGTILEPLFTESESKIFSSHLQIPQLQDRLLRISQLIQPQQDNLKALQEQLATQREAIILARQEAREELLLHQSEWEGRISPEQVDTSSLPLVPQHSFASLPLNESERNQEPCSINSDNIVSSGHSEIPTLPDGLLGLSHLVLPQQDNLIALEEHLHAQTDFLPSIEKTQKELVLSKPCKFEEKVSSEHFIQSHHGDLQALQQQLDTQKKAIRSIQEVQEELLLQRLSELEKRVSSEQVCSSSFVSQVPVADSERTQKSFPTKSNDTLPSSHREIPRLQDRLLSLSKPILPQQDNMTAQLDAQREVMYSYEKPQEELSLNKQRKLNKSESAEHTIPSLFLPKETEHSFIPLPFAEAKPKSTCELYSSQNEHAAPPSNPVIPGFQDRLLSFSQSVLTQQDNLGLQKQLDLQREVLHYSQKAQEKLLVQRQTALQQQIQKHEETLKDFFKDSQISKPTVENDLKTQKMGQLRDWFPNTQDLAGNDQENIRHADRNNSDDNHLASEDTSAKQSGEHLEKDLGRRSSKPPVAKVKCGLDLNQHELSAIQEVESPAIGRTSILGKPGIYEDRDPLRVSISREQSFFGSPLAHDPFSCLQLVGQENVCGDDYDEAVKLKESVVENHAVLSYAVEEEHAYLGPTVKPDDKAKTLSYEPLSSATVSTGSLLSYENTDLSLTDPESFSEHMDDSKQESTTSKEEETNIISSIVPSTQDIYQRQNSSDVHKSLLPAVDETTCGHTHFQQMIDKYINEANLIPEKTDLQELEHIFPNLHHQLFKPLEPHPDFDLSSSSSGISPDNRDFYQRSDSSSESHCATGLSKSTVYFTALRRTSMHSSLNTSPNQQPDTNLAHVGAHSFATENIIGGSEQCFEQLQPEYSSQEESQHADLPSIFSIEARDSSQGMKNQNYPSEEHTEILQNKKKIVHFQLSIGNLSSVYSSSDEANVFDQLNVQHSTPCGSNSSECSTKHQLESRKESMGFEELSKRGVVTMLQSQGLIEDNKNETCRVLDINPQVEETDSRLCVRTVEMGTSIQAPYSLTTQNEKYFENSAETDIPKITKKLSQLGESELFASSGSFSLQSSIPVWETETGHGIMEEPELTLISTTDTSIAEMDFANLTLEEKSENEAKCFFQVSEFLPLVSATEASDYPAVSELSIEKPRTASTETPRRLTPVPGSLQEAFIKRKKSFMERSHQRQKEIRNKIHVSENSQIKTVKEKPSISSSVSRLKGVNKVRASFPEDRKTTQALRHQRGLRLYNQLAEVKQQKEEKTKQEAYAQNRARAKEFHKKTLEKLRAKNTC

SEQ ID NO: 711 - protein, 265 aa, Homo sapiens
MEALPPVRSSLLGILLQVTRLSVLLVQNRDHLYNFLLLKINLFNHWVSGLAQEARGSCNWQAHLPLGAAACPLGQALWAGLALIQVPVWLVLQGPRLMWAGMWGSTKGLGLALLSAWEQLGLSVAIWTDLFLSCLHGLMLVALLLVVVTWRVCQKSHCFRLGRQLSKALQVNCVVRKLLVQLRRLYWWVETMTALTSWHLAYLITWTTCLASHLLQAAFEHTTQLAEAQEVEPQEVSGSSLLPSLSASSDSESGTVLPEQETPRE

SEQ ID NO: 712 - protein, 291 aa, Homo sapiens
MSMPLHQISAIPSQDAISARVYRSKTKEKEREEQNEKTLGHFMSHSSNISKAGSPPSASAPAPVSSFSRTSITPSSQDICRICHCEGDDESPLITPCHCTGSLHFVHQACLQQWIKSSDTRCCELCKYEFIMETKLKPLRKWEKLQMTSSERRKIMCSVTFHVIAITCVVWSLYVLIDRTAEEIKQGQATGILEWPFWTKLVVVAIGFTGGLLFMYVQCKVYVQLWKRLKAYNRVIYVQNCPETSKKNIFEKSPLTEPNFENKHGYGICHSDTNSSCCTEPEDTGAEIIHV

SEQ ID NO: 713 - protein, 435 aa, Homo sapiens
MLLGGPPRSPRSGTSPKGPWSSTGHVQFGKSPQTWPRRTRPRSPEPAAPSGVRGSTWTRRRDSPRRAGPTALSRYVGHLWMGRRPPSPEARGPVPRSSAASRARRSLASPGISPGPLTATIGGAVAGGGPRQGRAEAHKEVFPGQRVGKMAAPMELFCWSGGWGLPSVDLDSLAVLTYARFTGAPLKVHKISNPWQSPSGTLPALRTSHGEVISVPHKIITHLRKEVHTFWIDTKNYVEVTRKWYAEAMPFPLNFFLPGRMQRQYMERLQLLTGEHRPEDEEELEKELYREARECLTLLSQRLGSQKFFFGDAPASLDAFVFSYLALLLQAKLPSGKLQVHLRGLHNLCAYCTHILSLYFPWDGAEVPPQRQTPAGPETEEEPYRRRNQILSVLAGLAAMVGYALLSGIVSIQRATPARAPGTRTLGMAEEDEEE

SEQ ID NO: 714 - protein, 172 aa, Homo sapiens
MSSSGGAPGASASSAPPAQEEGMTWWYRWLCRLSGVLGAVSCAISGLFNCITIHPLNIAAGVWMIMNAFILLLCEAPFCCQFIEFANTVAEKVDRLRSWQKAVFYCGMAVVPIVISLTLTTLLGNAIAFATGVLYGLSALGKKGDAISYARIQQQRQQADEEKLAETLEGEL

SEQ ID NO: 715 - protein, 1925 aa, Homo sapiens
MAPRAAGGAPLSARAAAASPPPFQTPPRCPVPLLLLLLLGAARAGALEIQRRFPSPTPTNNFALDGAAGTVYLAAVNRLYQLSGANLSLEAEAAVGPVPDSPLCHAPQLPQASCEHPRRLTDNYNKILQLDPGQGLVVVCGSIYQGFCQLRRRGNISAVAVRFPPAAPPAEPVTVFPSMLNVAANHPNASTVGLVLPPAAGAGGSRLLVGATYTGYGSSFFPRNRSLEDHRFENTPEIAIRSLDTRGDLAKLFTFDLNPSDDNILKIKQGAKEQHKLGFVSAFLHPSDPPPGAQSYAYLALNSEARAGDKESQARSLLARICLPHGAGGDAKKLTESYIQLGLQCAGGAGRGDLYSRLVSVFPARERLFAVFERPQGSPAARAAPAALCAFRFADVRAAIRAARTACFVEPAPDVVAVLDSVVQGTGPACERKLNIQLQPEQLDCGAAHLQHPLSILQPLKATPVFRAPGLTSVAVASVNNYTAVFLGTVNGRLLKINLNESMQVVSRRVVTVAYGEPVHHVMQFDPADSGYLYLMTSHQMARVKVAACNVHSTCGDCVGAADAYCGWCALETRCTLQQDCTNSSQQHFWTSASEGPSRCPAMTVLPSEIDVRQEYPGMILQISGSLPSLSGMEMACDYGNNIRTVARVPGPAFGHQIAYCNLLPRDQFPPFPPNQDHVTVEMSVRVNGRNIVKANFTIYDCSRTAQVYPHTACTSCLSAQWPCFWCSQQHSCVSNQSRCEASPNPTSPQDCPRTLLSPLAPVPTGGSQNILVPLANTAFFQGAALECSFGLEEIFEAVWVNESVVRCDQVVLHTTRKSQVFPLSLQLKGRPARFLDSPEPMTVMVYNCAMGSPDCSQCLGREDLGHLCMWSDGCRLRGPLQPMAGTCPAPEIHAIEPLSGPLDGGTLLTIRGRNLGRRLSDVAHGVWIGGVACEPLPDRYTVSEEIVCVTGPAPGPLSGVVTVNASKEGKSRDRFSYVLPLVHSLEPTMGPKAGGTRITIHGNDLHVGSELQVLVNDTDPCTELMRTDTSIACTMPEGALPAPVPVCVRFERRGCVHGNLTFWYMQNPVITAISPRRSPVSGGRTITVAGERFHMVQNVSMAVHHIGREPTLCKVLNSTLITCPSPGALSNASAPVDFFINGRAYADEVAVAEELLDPEEAQRGSRFRLDYLPNPQFSTAKREKWIKHHPGEPLTLVIHKEQDSLGLQSHEYRVKIGQVSCDIQIVSDRIIHCSVNESLGAAVGQLPITIQVGNFNQTIATLQLGGSETAIIVSIVICSVLLLLSVVALFVFCTKSRRAERYWQKTLLQMEEMESQIREEIRKGFAELQTDMTDLTKELNRSQGIPFLEYKHFVTRTFFPKCSSLYEERYVLPSQTLNSQGSSQAQETHPLLGEWKIPESCRPNMEEGISLFSSLLNNKHFLIVFVHALEQQKDFAVRDRCSLASLLTIALHGKLEYYTSIMKELLVDLIDASAAKNPKLMLRRTESVVEKMLTNWMSICMYSCLRETVGEPFFLLLCAIKQQINKGSIDAITGKARYTLSEEWLLRENIEAKPRNLNVSFQGCGMDSLSVRAMDTDTLTQVKEKILEAFCKNVPYSQWPRAEDVDLEWFASSTQSYILRDLDDTSVVEDGRKKLNTLAHYKIPEGASLAMSLIDKKDNTLGRVKDLDTEKYFHLVLPTDELAEPKKSHRQSHRKKVLPEIYLTRLLSTKGTLQKFLDDLFKAILSIREDKPPLAVKYFFDFLEEQAEKRGISDPDTLHIWKTNSLPLRFWVNILKNPQFVFDIDKTDHIDACLSVIAQAFIDACSISDLQLGKDSPTNKLLYAKEIPEYRKIVQRYYKQIQDMTPLSEQEMNAHLAEESRKYQNEFNTNVAMAEIYKYAKRYRPQIMAALEANPTARRTQLQHKFEQVVALMEDNIYECYSEA

SEQ ID NO: 716 - protein, 2062 aa, Homo sapiens
MDGCLDTETPTVSIQENVDVASLKPISDSGINFTDAIWSPTCERRTCECHESIEKNKDKTDLPQSVVYQNEEGRWVTDLAYYTSFNSKQNLNVSLSDEMNEDFRSGSEAFDLIAQDEEEFNKEHQFIQPSFGYFIRSPEKREPIALIRKSDVSRGNLEKEMAHLNHDLYSGDLNEQSQAQLSEGSITLQVEAVESTSQVDENDVTLTADKGKTEDTFFMSNKPQRYKDKLPDSGDSMLRISTIASAIAEASVNTDPSQLAAMIKALSNKTRDKTFQEDEKQKDYSHVRHFLPNDLEKSNGSNALDMEKYLKKTEVSRYESALENFSRASMSDTWDLSLPKEQTTQDIHPVDLSATSVSVRAPEENTAAIVYVENGESENQESFRTINSSNSVTNRENNSAVVDVKTCSIDNKLQDVGNDEKATSISTPSDSYSSVRNPRITSLCLLKDCEEIRDNRENQRQNECVSEISNSEKHVTFENHRIVSPKNSDLKNTSPEHGGRGSEDEQESFRPSTSPLSHSSPSEISGTSSSGCALESFGSAAQQQQPPCEQELSPLVCSPAGVSRLTYVSEPESSYPTTATDDALEDRKSDITSELSTTIIQGSPAALEERAMEKLREKVPFQNRGKGTLSSIIQNNSDTRKATETTSLSSKPEYVKPDFRWSKDPSSKSGNLLETSEVGWTSNPEELDPIRLALLGKSGLSCQVGSATSHPVSCQEPIDEDQRISPKDKSTAGREFSGQVSHQTTSENQCTPIPSSTVHSSVADMQNMPAAVHALLTQPSLSAAPFAQRYLGTLPSTGSTTLPQCHAGNATVCGFSGGLPYPAVAGEPVQNSVAVGICLGSNIGSGWMGTSSLCNPYSNTLNQNLLSTTKPFPVPSVGTNCGIEPWDSGVTSGLGSVRVPEELKLPHACCVGIASQTLLSVLNPTDRWLQVSIGVLSISVNGEKVDLSTYRCLVFKNKAIIRPHATEEIKVLFIPSSPGVFRCTFSVASWPCSTDAETIVQAEALASTVTLTAIAESPVIEVETEKKDVLDFGDLTYGGWKALPLKLINRTHATVPIRLIINANAVAWRCFTFSKESVRAPVEVAPCADVVTRLAGPSVVNHMMPASYDGQDPEFLMIWVLFHSPKKQISSSDILDSAEEFSAKVDIEVDSPNPTPVLRSVSLRARAGIARIHAPRDLQTMHFLAKVASSRKQHLPLKNAGNIEVYLDIKVPEQGSHFSVDPKNLLLKPGEEHEVIVSFTPKDPEACEERILKIFVQPFGPQYEVVLKGEVISSGSKPLSPGPCLDIPSILSNKQFLAWGGVPLGRTQLQKLALRNNSASTTQHLRLLIRGQDQDCFQLQNTFGSEQRLTSNCEIRIHPKEDIFISVLFAPTRLSCMLARLEIKQLGNRSQPGIKFTIPLSGYGGTSNLILEGVKKLSDSYMVTVNGLVPGKESKIVFSVRNTGSRAAFVKAVGFKDSQKKVLLDPKVLRIFPDKFVLKERTQENVTLIYNPSDRGINNKTATELSTVYLFGGDEISRQQYRRALLHKPEMIKQILPEHSVLQNINFVEAFQDELLVTEVYDLPQRPNDVQLFYGSMCKIILSVIGEFRDCISSREFLQPSSKASLESTSDLGASGKHGGNVSLDVLPVKGPQGSPLLSRAARPPLDQLASEEPWTVLPEHLILVAPSPCDMAKTGRFQIVNNSVRLLRFELCWPAHCLTVTPQHGCVAPESKLQILVSPNSSLSTKQSMFPWSGLIYIHCDDGQKKIVKVQIREDLTQVELLTRLTSKPFGILSPVSEPSVSHLVKPMTKPPSTKVEIRNKSITFPTTEPGETSESCLELENHGTTDVKWHLSSLAPPYVKGVDESGDVFRATYAAFRCSPISGLLESHGIQKVSITFLPRGRGDYAQFWDVECHPLKEPHMKHTLRFQLSGQSIEAENEPENACLSTDSLIKIDHLVKPRRQAVSEASARIPEQLDVTARGVYAPEDVYRFRPTSVGESRTLKVNLRNNSFITHSLKFLSPREPFYVKHSKYSLRAQHYINMPVQFKPKSAGKFEALLVIQTDEGKSIAIRLIGEALGKN

SEQ ID NO: 717 - protein, 1136 aa, Homo sapiens
MKVTVCFGRTGIVVPCKEGQLRVGELTQQALQRYLKTREKGPGYWVKIHHLEYTDGGILDPDDVLADVVEDKDKLIAVFEEQEPLHKIESPSGNPADRQSPDAFETEVAAQLAAFKPIGGEIEVTPSALKLGTPLLVRRSSDPVPGPPADTQPSASHPGGQSLKLVVPDSTQNLEDREVLNGVQTELLTSPRTKDTLSDMTRTVEISGEGGPLGIHVVPFFSSLSGRILGLFIRGIEDNSRSKREGLFHENECIVKINNVDLVDKTFAQAQDVFRQAMKSPSVLLHVLPPQNREQYEKSVIGSLNIFGNNDGVLKTKVPPPVHGKSGLKTANLTGTDSPETDASASLQQNKSPRVPRLGGKPSSPSLSPLMGFGSNKNAKKIKIDLKKGPEGLGFTVVTRDSSIHGPGPIFVKNILPKGAAIKDGRLQSGDRILEVNGRDVTGRTQEELVAMLRSTKQGETASLVIARQEGHFLPRELKGEPDCCALSLETSEQLTFEIPLNDSGSAGLGVSLKGNKSRETGTDLGIFIKSIIHGGAAFKDGRLRMNDQLIAVNGESLLGKSNHEAMETLRRSMSMEGNIRGMIQLVILRRPERPMEDPAECGAFSKPCFENCQNAVTTSRRNDNSILHPLGTCSPQDKQKGLLLPNDGWAESEVPPSPTPHSALGLGLEDYSHSSGVDSAVYFPDQHINFRSVTPARQPESINLKASKSMDLVPDESKVHSLAGQKSDGLSDKSSHSGQGALNCESAPQGNSELEDMENKARKVKKTKEKEKKKEKGKLKVKEKKRKEENEDPERKIKKKGFGAMLRFGKKKEDKGGKAEQKGTLKHGGLREEELEKMKEERERIGAKHQELREKQARGLLDYATGAIGSVYDMDDDEMDPNYARVNHFREPCTSANVFRSPSPPRAGPFGYPRDGHPLSPERDHLEGLYAKVNKPYHPLVPADSGRPTGGSTDRIQKLRKEYYQARREGFPLYEDDEGRARPSEYDLLWVPGRGPDGNAHNLRFEGMERQYASLPRGGPADPVDYLPAAPRGLYKERELPYYPGAHPMHPPKGSYPRPTELRVADLRYPQHYPPPPAPQHKGPFRQDVPPSPPQHQRMPAYQETGRPGPRGGSPDQYPYRTQDSRQKNPMTAAV

SEQ ID NO: 718 - protein, 255 aa, Homo sapiens
MKLTRKMVLTRAKASELHSVRKLNCWGSRLTDISICQEMPSLEVITLSVNSISTLEPVSRCQRLSELYLRRNRIPSLAELFYLKGLPRLRVLWLAENPCCGTSPHRYRMTVLRTLPRLQKLDNQAVTEEELSRALSEGEEITAAPEREGTGHGGPKLCCTLSSLSSAAETGRDPLDSEEEATGAQDERGLKPPSRGQFPSLSARDASSSHRGRNVLTAILLLLRELDAEGLEAVQQTVGSRLQALRGEEVQEHAE

SEQ ID NO: 719 - protein, 558 aa, Homo sapiens
MSAGSERGAAATPGGLPAPCASKVELRLSCRHLLDRDPLTKSDPSVALLQQAQGQWVQVGRTEVVRSSLHPVFSKVFTVDYYFEEVQRLRFEVYDTHGPSGFSCQEDDFLGGMECTLGQIVAQKKVTRPLLLKFGRNAGKSTITVIAEDISGNNGYVELSFRARKLDDKDLFSKSDPFLELYRVNDDQGLQLVYRTEVVKNNLNPVWEAFKVSLSSLCSCEETRPLKCLVWDYDSRGKHDFIGEFSTTFEEMQKAFEEGQAQWDCVNPKYKQKRRSYKNSGVVVLADLKFHRVYSFLDYIMGGCQIHFTVAIDFTASNGDPRNSCSLHYINPYQPNEYLKALVSVGEICQDYDSDKRFSALGFGARIPPKYEVSHDFAINFNPEDDECEGIQGVVEAYQNCLPRVQLYGPTNVAPIISKVARVAAAEESTGKASQYYILLILTDGVVTDMADTREAIVRASRLPMSIIIVGVGNADFTDMQVLDGDDGVLRSPRGEPALRDIVQFVPFRELKNASPAALAKCVLAEVPKQVVEYYSHRGLPPRSLGVPAGEASPGCTP

SEQ ID NO: 720 - protein, 430 aa, Homo sapiens
MAEAVLIDLFGLKLNSQKNCHQTLLKTLNAVQYHHAAKAKFLCIMCCSNISYERDGEQDNCEIETSNGLSALLEEFEIVSCPSMAATLYTIKQKIDEKNLSSIKVIVPRHRKTLMKAFIDQLFTDVYNFEFEDLQVTFRGGLFKQSIEINVITAQELRGIQNEIETFLRSLPALRGKLTIITSSLIPDIFIHGFTTRTGGISYIPTLSSFNLFSSSKRRDPKVVVQENLRRLANAAGFNVEKFYRIKTHHSNDIWIMGRKEPDSYDGITTNQRGVTIAALGADCIPIVFADPVKKACGVAHAGWKGTLLGVAMATVNAMIAEYGCSLEDIVVVLGPSVGPCCFTLPRESAEAFHNLHPACVQLFDSPNPCIDIRKATRILLEQGGILPQNIQDQNQDLNLCTSCHPDKFFSHVRDGLNFGTQIGFISIKE

SEQ ID NO: 721 - protein, 414 aa, Homo sapiens
MRFKSHTVELRRPCSDMEGAALLRVSVLCIWMSALFLGVGVRAEEAGARVQQNVPSGTDTGDPQSKPLGDWAAGTMDPESSIFIEDAIKYFKEKVSTQNLLLLLTDNEAWNGFVAAAELPRNEADELRKALDNLARQMIMKDKNWHDKGQQYRNWFLKEFPRLKSELEDNIRRLRALADGVQKVHKGTTIANVVSGSLSISSGILTLVGMGLAPFTEGGSLVLLEPGMELGITAALTGITSSTMDYGKKWWTQAQAHDLVIKSLDKLKEVREFLGENISNFLSLAGNTYQLTRGIGKDIRALRRARANLQSVPHASASRPRVTEPISAESGEQVERVNEPSILEMSRGVKLTDVAPVSFFLVLDVVYLVYESKHLHEGAKSETAEELKKVAQELEEKLNILNNNYKILQADQEL

SEQ ID NO: 722 - protein, 827 aa, Homo sapiens
ERETLRKATRATQRTGSFPQAWHSTAAGVAWVAPLSPQHQRAWLCRCFGAWQQFVQRGSRYRDHLADRRTGTLRKCLEQWVRMKQLRESDGAKVTQLSLCRQKAGREAVYTAGPGACGLGAVGQAQGQQEQGRGSLQDACWTLALCWALLLWKMRLFQRQWANSFFQGLQQRMLQRSLRWWHLRALGPDATSSCTKTPSALEPLSSSTLQDSLEKVPRAPTLPDTLQGSLLWAAGQRQQGQCLLLWQARAQQFQGTARWYQHTRQRRIFLSWSRWATAQWAWRELASHRAWDRTCRAVLGLWRQRLLQSRLVEWWAQERGWRLARDALCHWHSCWQGQQFLHEKCQTWVQVHLQGLQKVVFRSWQQAAAHQRCTVTRPEQLLLQSYFQAWCEVVRDTGVLRAQHQAFQDGLRRRALGAVFATWREAQEVAAGAQEQRVAQASLARWRSCGQQGQEDGQQKKARAPQAFPAWPVAPGMHHEAQQQAGESAGAQAAQCWTWCWALWVHESCRGQVSRAHASWKPRAWVLEASVQSAVRGGVQRAILTQLRPAELRRFLRTVQLRVRLGLPGAGKTRSCWTQATELVPPAPSLQCSLGGRRKPRGTAWAQRCREHSLCPAFQLWPQWPGQSSWVPGLPLWTRDQGPRAHSSPEPRACKAQSKAHKRRLRILEKQAQAHGSALLLALKGHDALGHQEEVPAAPVPRGTASRAAGFPAGQVPGSGMAALGGCPRGRAAGADPAQGVAPEMGLADVVAADPATASGSAVTAAGRWAFKKWHQRLAARSPRRGAASSPRPWSKPGPKGPESGQEAARAPRGWGLGAEHGAQLQL

SEQ ID NO: 723 - protein, 3674 aa, Homo sapiens
MAGQPHSPRELLGAAGHRSRRPSTELRVPPSPSLTMDSQYETGHIRKLQARHMQMQEKTFTKWINNVFQCGQAGIKIRNLYTELADGIHLLRLLELISGEALPPPSRGRLRVHFLENSSRALAFLRAKVPVPLIGPENIVDGDQTLILGLIWVIILRFQISHISLDKEEFGASAALLSTKEALLVWCQRKTASYTNVNITDFSRSWSDGLGFNALIHAHRPDLLDYGSLRPDRPLHNLAFAFLVAEQELGIAQLLDPEDVAAAQPDERSIMTYVSLYYHYCSRLHQGQTVQRRLTKILLQLQETELLQTQYEQLVADLLRWIAEKQMQLEARDFPDSLPAMRQLLAAFTIFRTQEKPPRLQQRGAAEALLFRLQTALQAQNRRPFLPHEGLGLAELSQCWAGLEWAEAARSQALQQRLLQLQRLETLARRFQHKAALRESFLKDAEQVLDQARAPPASLATVEAAVQRLGMLEAGILPQEGRFQALAEIADILRQEQYHSWADVARRQEEVTVRWQRLLQHLQGQRKQVADMQAVLSLLQEVEAASHQLEELQEPARSTACGQQLAEVVELLQRHDLLEAQVSAHGAHVSHLAQQTAELDSSLGTSVEVLQAKARTLAQLQQSLVALVRARRALLEQTLQRAEFLRNCEEEEAWLKECGQRVGNAALGRDLSQIAGALQKHKALEAEVHRHQAVCVDLVRRGRDLSARRPPTQPDPGERAEAVQGGWQLLQTRVVGRGARLQTALLVLQYFADAAEAASWLRERRSSLERASCGQDQAAAETLLRRHVRLERVLRAFAAELRRLEEQGRAASARASLFTVNSALSPPGESLRNPGPWSEASCHPGPGDAWKMALPAEPDPDFDPNTILQTQDHLSQDYESLRALAQLRRARLEEAMALFGFCSSCGELQLWLEKQTVLLQRVQPQADTLEVMQLKYENFLTALAVGKGLWAEVSSSAEQLRQRYPGNSTQIQRQQEELSQRWGQLEALKREKAVQLAHSVEVCSFLQECGPTQVQLRDVLLQLEALQPGSSEDTCHALQLAQKKTLVLERRVHFLQSVVVKVEEPGYAESQPLQGQVETLQGLLKQVQEQVAQRARRQAETQARQSFLQESQQLLLWAESVQAQLRSKEVSVDVASAQRLLREHQDLLEEIHLWQERLQQLDAQSQPMAALDCPDSQEVPNTLRVLGQQGQELKVLWEQRQQWLQEGLELQKFGREVDGFTATCANHQAWLHLDNLGEDVREALSLLQQHREFGRLLSTLGPRAEALRAHGEKLVQSQHPAAHTVREQLQSIQAQWTRLQGRSEQRRRQLLASLQLQEWKQDVAELMQWMEEKGLMAAHEPSGARRNILQTLKRHEAAESELLATRRHVEALQQVGRELLSRRPCGQEDIQTRLQGLRSKWEALNRKMTERGDELQQAGQQEQLLRQLQDAKEQLEQLEGALQSSETGQDLRSSQRLQKRHQQLESESRTLAAKMAALASMAHGMAASPAILEETQKHLRRLELLQGHLAIRGLQLQASVELHQFCHLSNMELSWVAEHMPHGSPTSYTECLNGAQSLHRKHKELQVEVKAHQGQVQRVLSSGRSLAASGHPQAQHIVEQCQELEGHWAELERACEARAQCLQQAVTFQQYFLDVSELEGWVEEKRPLVSSRDYGRDEAATLRLINKHQALQEELAIYWSSMEELDQTAQTLTGPEVPEQQRVVQERLREQLRALQELAATRDRELEGTLRLHEFLREAEDLQGWLASQKQAAKGGESLGEDPEHALHLCTKFAKFQHQVEMGSQRVAACRLLAESLLERGHSAGPMVRQRQQDLQTAWSELWELTQARGHALRDTETTLRVHRDLLEVLTQVQEKATSLPNNVARDLCGLEAQLRSHQGLERELVGTERQLQELLETAGRVQKLCPGPQAHAVQQRQQAVTQAWAVLQRRMEQRRAQLERARLLARFRTAVRDYASWAARVRQDLQVEESSQEPSSGPLKLSAHQWLRAELEAREKLWQQATQLGQQALLAAGTPTKEVQEELRALQDQRDQVYQTWARKQERLQAEQQEQLFLRECGRLEEILAAQEVSLKTSALGSSVEEVEQLIRKHEVFLKVLTAQDKKEAALRERLKTLRRPRVRDRLPILLQRRMRVKELAESRGHALHASLLMASFTQAATQAEDWIQAWAQQLKEPVPPGDLRDKLKPLLKHQAFEAEVQAHEEVMTSVAKKGEALLAQSHPRAGEVSQRLQGLRKHWEDLRQAMALRGQELEDRRNFLEFLQRVDLAEAWIQEKEVKMNVGDLGQDLEHCLQLRRRLREFRGNSAGDTVGDACIRSISDLSLQLKNRDPEEVKIICQRRSQLNNRWASFHGNLLRYQQQLEGALEIHVLSRELDNVTKRIQEKEALIQALDCGKDLESVQRLLRKHEELEREVHPIQAQVESLEREVGRLCQRSPEAAHGLRHRQQEVAESWWQLRSRAQKRREALDALHQAQKLQAMLQELLVSAQRLRAQMDTSPAPRSPVEARRMLEEHQECKAELDSWTDSISLARSTGQQLLTAGHPFSSDIRQVLAGLEQELSSLEGAWQEHQLQLQQALELQLFLSSVEKMERWLCSKEDSLASEGLWDPLAPMEPLLWKHKMLEWDLEVQAGKISALEATARGLHQGGHPEAQSALGRCQAMLLRKEALFRQAGTRRHRLEELRQLQAFLQDSQEVAAWLREKNLVALEEGLLDTAMLPAQLQKQQNFQAELDASMHQQQELQREGQRLLQGGHPASEAIQERLEELGALWGELQDNSQKKVAKLQKACEALRLRRSMEELENWLEPIEVELRAPTVGQALPGVGELLGTQRELEAAVDKKARQAEALLGQAQAFVREGHCLAQDVEEQARRLLQRFKSLREPLQERRTALEARSLLLKFFRDADEEMAWVQEKLPLAAAQDYGQSLSAVRHLQEQHQNLESEMSSHEALTRVVLGTGYKLVQAGHFAAHEVAARVQQLEKAMAHLRAEAARRRLLLQQAQEAQQFLTELLEAGSWLAERGHVLDSEDMGHSAEATQALLRRLEATKRDLEAFSPRIERLQQTAALLESRKNPESPKVLAQLQAVREAHAELLRRAEARGHGLQEQLQLHQLERETLLLDAWLTTKAATAESQDYGQDLEGVKVLEEKFDAFRKEVQSLGQAKVYALRKLAGTLERGAPRRYPHIQAQRSRIEAAWERLDQAIKARTENLAAAHEVHSFQQAAAELQGRMQEKTALMKGEDGGHSLSSVRTLQQQHRRLERELEAMEKEVARLQTEACRLGQLHPAAPGGLAKVQEAWATLQAKAQERGQWLAQAAQGHAFLGRCQELLAWAQERQELASSEELAEDVAGAEQLLGQHEELGQEIRECRLQAQDLRQEGQQLVDNSHFMSAEVTECLQELEGRLQELEEAWALRWQRCAESWGLQKLRQRLEQAEAWLACWEGLLLKPDYGHSVSDVELLLHRHQDLEKLLAAQEEKFAQMQKTEMEQELLLQPQELKPGRAGSSLTSFQWRPSGHQGLGAQLAETRDPQDAKGTPTMEGSLEFKQHLLPGGRQPSSSSWDSCRGNLQGSSLSLFLDERMAAEKVASIALLDLTGARCERLRGRHGRKHTFSLRLTSGAEILFAAPSEEQAESWWRALGSTAAQSLSPKLKAKPVSSLNECTTKDARPGCLLRSDP

SEQ ID NO: 724 - protein, 411 aa, Homo sapiens
MEQRGQNAPAASGARKRHGPGPREARGARPGPRVPKTLVLVVAAVLLLVSAESALITQQDLAPQQRAAPQQKRSSPSEGLCPPGHHISEDGRDCISCKYGQDYSTHWNDLLFCLRCTRCDSGEVELSPCTTTRNTVCQCEEGTFREEDSPEMCRKCRTGCPRGMVKVGDCTPWSDIECVHKESGIIIGVTVAAVVLIVAVFVCKSLLWKKVLPYLKGICSGGGGDPERVDRSSQRPGAEDNVLNEIVSILQPTQVPEQEMEVQEPAEPTGVNMLSPGESEHLLEPAEAERSQRRRLLVPANEGDPTETLRQCFDDFADLVPFDSWEPLMRKLGLMDNEIKVAKAEAAGHRDTLYTMLIKWVNKTGRDASVHTLLDALETLGERLAKQKIEDHLLSSGKFMYLEGNADSAMS

SEQ ID NO: 725 - protein, 784 aa, Homo sapiens
MAQLLNSILSVIDVFHKYAKGNGDCALLCKEELKQLLLAEFGDILQRPNDPETVETILNLLDQDRDGHIDFHEYLLLVFQLVQACYHKLDNKSHGGRTSQQERGQEGAQDCKFPGNTGRQHRQRHEEERQNSHHSQPERQDGDSHHGQPERQDRDSHHGQSEKQDRDSHHSQPERQDRDSHHNQSERQDKDFSFDQSERQSQDSSSGKKVSHKSTSGQAKWQGHIFALNRCEKPIQDSHYGQSERHTQQSETLGQASHFNQTNQQKSGSYCGQSERLGQELGCGQTDRQGQSSHYGQTDRQDQSYHYGQTDRQGQSSHYSQTDRQGQSSHYSQPDRQGQSSHYGQMDRKGQCYHYDQTNRQGQGSHYSQPNRQGQSSHYGQPDTQDQSSHYGQTDRQDQSSHYGQTERQGQSSHYSQMDRQGQGSHYGQTDRQGQSSHYGQPDRQGQNSHYGQTDRQGQSSHYGQTDRQGQSSHYSQPDKQGQSSHYGKIDRQDQSYHYGQPDGQGQSSHYGQTDRQGQSFHYGQPDRQGQSSHYSQMDRQGQSSHYGQTDRQGQSSHYGQTDRQGQSYHYGQTDRQGQSSHYIQSQTGEIQGQNKYFQGTEGTRKASYVEQSGRSGRLSQQTPGQEGYQNQGQGFQSRDSQQNGHQVWEPEEDSQHHQHKLLAQIQQERPLCHKGRDWQSCSSEQGHRQAQTRQSHGEGLSHWAEEEQGHQTWDRHSHESQEGPCGTQDRRTHKDEQNHQRRDRQTHEHEQSHQRRDRQTHEDKQNRQRRDRQTHEDEQNHQR

SEQ ID NO: 726 - protein, 1062 aa, Homo sapiens
MEVYASEKEQHGDLCRPGEHVTSRFKNEVERMGFDMNNAWRISNINEKYKLCGSYPQELIVPAWITDKELESVSSFRSWKRIPAVIYRHQSNGAVIARCGQPEVSWWGWRNADDEHLVQSVAKACASDSRSSGSKLSTRNTSRDFPNGGDLSDVEFDSSLSNASGAESLAIQPQKLLILDARSYAAAVANRAKGGGCECPEYYPNCEVVFMGMANIHSIRRSFQSLRLLCTQMPDPGNWLSALESTKWLHHLSVLLKSALLVVHAVDQDQRPVLVHCSDGWDRTPQIVALAKLLLDPYYRTIEGFQVLVEMEWLDFGHKFADRCGHGENSDDLNERCPVFLQWLDCVHQLQRQFPCSFEFNEAFLVKLVQHTYSCLFGTFLCNNAKERGEKHTQERTCSVWSLLRAGNKAFKNLLYSSQSEAVLYPVCHVRNLMLWSAVYLPCPSPTTPVDDSCAPYPAPGTSPDDPPLSRLPKTRSYDNLTTACDNTVPLASRRCSDPSLNEKWQEHRRSLELSSLAGPGEDPLSADSLGKPTRVPGGAELSVAAGVAEGQMENILQEATKEESGVEEPAHRAGIEIQEGKEDPLLEKESRRKTPEASAIGLHQDPELGDAALRSHLDMSWPLFSQGISEQQSGLSVLLSSLQVPPRGEDSLEVPVEQFRIEEIAEGREEAVLPIPVDAKVGYGTSQSCSLLPSQVPFETRGPNVDSSTDMLVEDKVKSVSGPQGHHRSCLVNSGKDRLPQTMEPSPSETSLVERPQVGSVVHRTSLGSTLSLTRSPCALPLAECKEGLVCNGAPETENRASEQPPGLSTLQMYPTPNGHCANGEAGRSKDSLSRQLSAMSCSSAHLHSRNLHHKWLHSHSGRPSATSSPDQPSRSHLDDDGMSVYTDTIQQRLRQIESGHQQEVETLKKQVQELKSRLESQYLTSSLHFNGDFGDEVTSIPDSESNLDQNCLSRCSTEIFSEASWEQVDKQDTEMTRWLPDHLAAHCYACDSAFWLASRKHHCRNCGNVFCSSCCNQKVPVPSQQLFEPSRVCKSCYSSLHPTSSSIDLELDKPIAATSN

SEQ ID NO: 727 - protein, 506 aa, Homo sapiens
MPTVDDILEQVGESGWFQKQAFLILCLLSAAFAPICVGIVFLGFTPDHHCQSPGVAELSQRCGWSPAEELNYTVPGLGPAGEAFLGQCRRYEVDWNQSALSCVDPLASLATNRSHLPLGPCQDGWVYDTPGSSIVTEFNLVCADSWKLDLFQSCLNAGFLFGSLGVGYFADRFGRKLCLLGTVLVNAVSGVLMAFSPNYMSMLLFRLLQGLVSKGNWMAGYTLITEFVGSGSRRTVAIMYQMAFTVGLVALTGLAYALPHWRWLQLAVSLPTFLFLLYYWCVPESPRWLLSQKRNTEAIKIMDHIAQKNGKLPPADLKMLSLEEDVTEKLSPSFADLFRTPRLRKRTFILMYLWFTDSVLYQGLILHMGATSGNLYLDFLYSALVEIPGAFIALITIDRVGRIYPMAMSNLLAGAACLVMIFISPDLHWLNIIIMCVGRMGITIAIQMICLVNAELYPTFVSGVGPACRGSDATSSRDQGGRFARDHEGRREPWEKSKAQRKHDLP

SEQ ID NO: 728 - protein, 439 aa, Homo sapiens
MSKTMAMNLLEDWCRGMEVDIHRSLLVTGIPEDCGQAEIEETLNGVLSPLGPYRVLNKIFVREENVKAALIEVGEGVNLSTIPREFPGRGGVWRVVCRDPTQDAEFLKNLNEFLDAEGRTWEDVVRLLQLNHPTLSQNQHQPPENWAEALGVLLGAVVQIIFCMDAEIRSREEARAQEAAEFEEMAAWALAAGRKVKKEPGLAAEVGSALKAETPNNWNATEDQHEPTKPLVRRAGAKSRSRRKKQKKNSRQEAVPWKKPKGINSNSTANLEDPEVGDAESMAISEPIKGSRKPCVNKEELALKKPMAKCAWKGPREPPQDARAEAESPGGASESDQDGGHESPPKKKAVAWVSAKNPAPMRKKKKVSLGPVSYVLVDSEDGRKKPVMPKKGPGSRREASDQKAPRGQQPAEATASTSRGPKAKPEGSPRRATNESRKV

SEQ ID NO: 729 - protein, 932 aa, Homo sapiens
MSEAGGRGCGSPVPQRARWRLVAATAAFCLVSATSVWTAGAEPMSREEKQKLGNQVLEMFDHAYGNYMEHAYPADELMPLTCRGRVRGQEPSRGDVDDALGKFSLTLIDSLDTLVVLNKTKEFEDAVRKVLRDVNLDNDVVVSVFETNIRVLGGLLGGHSLAIMLKEKGEYMQWYNDELLQMAKQLGYKLLPAFNTTSGLPYPRINLKFGIRKPEARTGTETDTCTACAGTLILEFAALSRFTGATIFEEYARKALDFLWEKRQRSSNLVGVTINIHTGDWVRKDSGVGAGIDSYYEYLLKAYVLLGDDSFLERFNTHYDAIMRYISQPPLLLDVHIHKPMLNARTWMDALLAFFPGLQVLKGDIRPAIETHEMLYQVIKKHNFLPEAFTTDFRVHWAQHPLRPEFAESTYFLYKATGDPYYLEVGKTLIENLNKYARVPCGFAAMKDVRTGSHEDRMDSFFLAEMFKYLYLLFADKEDIIFDIEDYIFTTEAHLLPLWLSTTNQSISKKNTTSEYTELDDSNFDWTCPNTQILFPNDPLYAQSIREPLKNVVDKSCPRGIIRVEESFRSGAKPPLRARDFMATNPEHLEILKKMGVSLIHLKDGRVQLVQHAIQAASSIDAEDGLRFMQEMIELSSQQQKEQQLPPRAVQIVSHPFFGRVVLTAGPAQFGLDLSKHKETRGFVASSKPSNGCSELTNPEAVMGKIALIQRGQCMFAEKARNIQNAGAIGGIVIDDNEGSSSDTAPLFQMAGDGKDTDDIKIPMLFLFSKEGSIILDAIREYEEVEVLLSDKAKDRDPEMENEEQPSSENDSQNQSGEQISSSSQEVDLVDQESSEENSLNSHPESLSLADMDNAASISPSEQTSNPTENHETTNLNGECTDLDNQLQEQSETEEDSNPNVSWGKKVQPIDSILADWNEDIEAFEMMEKDEL

SEQ ID NO: 730 - protein, 313 aa, Homo sapiens
MSQSRHRAEAPPLEREDSGTFSLGKMITAKPGKTPIQVLHEYGMKTKNIPVYECERSDVQIHVPTFTFRVTVGDITCTGEGTSKKLAKHRAAEAAINILKANASICFAVPDPLMPDPSKQPKNQLNPIGSLQELAIHHGWRLPEYTLSQEGGPAHKREYTTICRLESFMETGKGASKKQAKRNAAEKFLAKFSNISPENHISLTNVVGHSLGCTWHSLRNSPGEKINLLKRSLLSIPNTDYIQLLSEIAKEQGFNITYLDIDELSANGQYQCLAELSTSPITVCHGSGISCGNAQSDAAHNALQYLKIIAERK

SEQ ID NO: 731 - protein, 444 aa, Homo sapiens
MSSGLRAADFPRWKRHISEQLRRRDRLQRQAFEEIILQYNKLLEKSDLHSVLAQKLQAEKHDVPNRHEIRRRQARLQKELAEAAKEPLPVEQDDDIEVIVDETSDHTEETSPVRAISRAATRRSVSSFPVPQDNVDTHPGSGKEVRVPATALCVFDAHDGEVNAVQFSPGSRLLATGGMDRRVKLWEVFGEKCEFKGSLSGSNAGITSIEFDSAGSYLLAASNDFASRIWTVDDYRLRHTLTGHSGKVLSAKFLLDNARIVSGSHDRTLKLWDLRSKVCIKTVFAGSSCNDIVCTEQCVMSGHFDKKIRFWDIRSESIVREMELLGKITALDLNPERTELLSCSRDDLLKVIDLRTNAIKQTFSAPGFKCGSDWTRVVFSPDGSYVAAGSAEGSLYIWSVLTGKVEKVLSKQHSSSINAVAWSPSGSHVVSVDKGCKAVLWAQY

SEQ ID NO: 732 - protein, 808 aa, Homo sapiens
MLRFPTCFPSFRVVGEKQLPQEIIFLVWSPKRDLIALANTAGEVLLHRLASFHRVWSFPPNENTGKEVTCLAWRPDGKLLAFALADTKKIVLCDVEKPESLHSFSVEAPVSCMHWMEVTVESSVLTSFYNAEDESNLLLPKLPTLPKNYSNTSKIFSEENSDEIIKLLGDVRLNILVLGGSSGFIELYAYGMFKIARVTGIAGTCLALCLSSDLKSLSVVTEVSTNGASEVSYFQLETNLLYSFLPEVTRMARKFTHISALLQYINLSLTCMCEAWEEILMQMDSRLTKFVQEKNTTTSVQDEFMHLLLWGKASAELQTLLMNQLTVKGLKKLGQSIESSYSSIQKLVISHLQSGSESLLYHLSELKGMASWKQKYEPLGLDAAGIEEAITAVGSFILKANELLQVIDSSMKNFKAFFRWLYVAMLRMTEDHVLPELNKMTQKDITFVAEFLTEHFNEAPDLYNRKGKYFNVERVGQYLKDEDDDLVSPPNTEGNQWYDFLQNSSHLKESPLLFPYYPRKSLHFVKRRMENIIDQCLQKPADVIGKSMNQAICIPLYRDTRSEDSTRRLFKFPFLWNNKTSNLHYLLFTILEDSLYKMCILRRHTDISQSVSNGLIAIKFGSFTYATTEKVRRSIYSCLDAQFYDDETVTVVLKDTVGREGRDRLLVQLPLSLVYNSEDSAEYQFTGTYSTRLDEQCSAIPTRTMHFEKHWRLLESMKAQYVAGNGFRKVSCVLSSNLRHVRVFEMDIDDEWELDESSDEEEEASNKPVKIKEEVLSESEAENQQAGAAALAPEIVIKVEKLDPELDS

SEQ ID NO: 733 - protein, 485 aa, Homo sapiens
MASSSTVPLGFHYETKYVVLSYLGLLSQEKLQEQHLSSPQGVQLDIASQSLDQEILLKVKTEIEEELKSLDKEISEAFTSTGFDRHTSPVFSPANPESSMEDCLAHLGEKVSQELKEPLHKALQMLLSQPVTYQAFRECTLETTVHASGWNKILVPLVLLRQMLLELTRRGQEPLSALLQFGVTYLEDYSAEYIIQQGGWGTVFSLESEEEEYPGITAEDSNDIYILPSDNSGQVSPPESPTVTTSWQSESLPVSLSASQSWHTESLPVSLGPESWQQIAMDPEEVKSLDSNGAGEKSENNSSNSDIVHVEKEEVPEGMEEAAVASVVLPARELQEALPEAPAPLLPHITATSLLGTREPDTEVITVEKSSPATSLFVELDEEEVKAATTEPTEVEEVVPALEPTETLLSEKEINAREESLVEELSPASEKKPVPPSEGKSRLSPAGEMKPMPLSEGKSILLFGGAAAVAILAVAIGVALALRKK

SEQ ID NO: 734 - protein, 506 aa, Homo sapiens
MRDPLTDCPYNKVYKNLKEFSQNGENFCKQVTSVLQQRANLEISYAKGLQKLASKLSKALQNTRKSCVSSAWAWASEGMKSTADLHQKLGKAIELEAIKPTYQVLNVQEKKRKSLDNEVEKTANLVISNWNQQIKAKKKLMVSTKKHEALFQLVESSKQSMTEKEKRKLLNKLTKSTEKLEKEDENYYQKNMAGYSTRLKWENTLENCYQSILELEKERIQLLCNNLNQYSQHISLFGQTLTTCHTQIHCAISKIDIEKDIQAVMEETAILSTENKSEFLLTDYFEEDPNSAMDKERRKSLLKPKLLRLQRDIEKASKDKEGLERMLKTYSSTSSFSDAKSQKDTAALMDENNLKLDLLEANSYKLSSMLAELEQRPQPSHPCSNSIFRWREKEHTHSYVKISRPFLMKRLENIVSKASSGGQSNPGSSTPAPGAAQLSSRLCKALYSFQARQDDELNLEKGDIVIIHEKKEGGWWFGSLNGKKGHFPAAYVEELPSNAGNTATKA

SEQ ID NO: 735 - protein, 328 aa, Homo sapiens
MSMLAERRRKQKWAVDPQNTAWSNDDSKFGQRMLEKMGWSKGKGLGAQEQGATDHIKVQVKNNHLGLGATINNEDNWIAHQDDFNQLLAELNTCHGQETTDSSDKKEKKSFSLEEKSKISKNRVHYMKFTKGKDLSSRSKTDLDCIFGKRQSKKTPEGDASPSTPEENETTTTSAFTIQEYFAKRMAALKNKPQVPVPGSDISETQVERKRGKKRNKEATGKDVESYLQPKAKRHTEGKPERAEAQERVAKKKSAPAEEQLRGPCWDQSSKASAQDAGDHVQPPEGRDFTLKPKKRRGKKKLQKPVEIAEDATLEETLVKKKKKKDSK

SEQ ID NO: 736 - protein, 545 aa, Homo sapiens
MDCVIFEEVAVNFTPEEWALLDHAQRSLYRDVMLETCRNLASLDCYIYVRTSGSSSQRDVFGNGISNDEEIVKFTGSDSWSIFGENWRFDNTGDQHQIPQRHLRSQLGRLCESNEGHQCGETLSQTANLLVHKSYPTEAKPSECTKCGKAFENRQRSHTGQRPCKECGQACSCLSCQSPPMKTQTVEKPCNCQDSRTASVTYVKSLSSKKSYECQKCGKAFICPSSFRGHVNSHHGQKTHACKVCGKTFMYYSYLTRHVRTHTGEKPYECKECGKAFSCPSYFREHVRTHTGEKPYECKHCGKSFSCYSSFRDHVRTHTGEKPCQCKHCGKAFTCYSSLREHGRTHSGEKPYECKECGKAFRYPSSLRAHMRMHTGEKPYVCKQCGKAFGCPTYFRRHVKTHSGVKPYQCKECGKAYSFSSSLRIHVRTHTGEKPFECKHCGKAFSCHSSLREHVRTHSGEKPYECNQCGKAFSHAQYFQKHVRSHSGVKPYECTECGKAYSCSSSLRVHVRTHTGERPYECKQCGKTFRYLASLQAHVRTHAGA

SEQ ID NO: 737 - protein, 398 aa, Homo sapiens
MPRPGHPRPASGPPRLGPWERPTELCLETYDKPPQPPPSRRTRRPDPKDPGHHGPESITFISGSAEPALESPTCCLLWRPWVWEWCRAAFCFRRCRDCLQRCGACVRGCSPCLSTEDSTEGTAEANWAKEHNGVPPSPDRAPPSRRDGQRLKSTMGSSFSYPDVKLKGIPVYPYPRATSPAPDADSCCKEPLADPPPMRHSLPSTFASSPRGSEEYYSFHESDLDLPEMGSGSMSSREIDVLIFKKLTELFSVHQIDELAKCTSDTVFLEKTSKISDLISSITQDYHLDEQDAEGRLVRGIIRISTRKSRARPQTSEGRSTRAAAPTAAAPDSGHETMVGSGLSQDELTVQISQETTADAIARKLRPYGAPGYPASHDSSFQGTDTDSSGAPLLQVYC

SEQ ID NO: 738 - protein, 332 aa, Homo sapiens
MALLCYNRGCGQRFDPETNSDDACTYHPGVPVFHDALKGWSCCKRRTTDFSDFLSIVGCTKGRHNSEKPPEPVKPEVKTTEKKELCELKPKFQEHIIQAPKPVEAIKRPSPDEPMTNLELKISASLKQALDKLKLSSGNEENKKEEDNDEIKIGTSCKNGGCSKTYQGLESLEEVCVYHSGVPIFHEGMKYWSCCRRKTSDFNTFLAQEGCTKGKHMWTKKDAGKKVVPCRHDWHQTGGEVTISVYAKNSLPELSRVEANSTLLNVHIVFEGEKEFDQNVKLWGVIDVKRSYVTMTATKIEITMRKAEPMQWASLELPAAKKQEKQKDATTD

SEQ ID NO: 739 - protein, 593 aa, Homo sapiens
MIQSDKGADPPDKKDMKLSTATNPQNGLSQILRLVLQELSLFYGRDVNGVCLLYDLLHSPWLQALLKIYDCLQEFKEKKLVPATPHAQVLSYEVVELLRETPTSPEIQELRQMLQAPHFKALLSAHDTIAQKDFEPLLPPLPDNIPESEEAMRIVCLVKNQQPLGATIKRHEMTGDILVARIIHGGLAERSGLLYAGDKLVEVNGVSVEGLDPEQVIHILAMSRGTIMFKVVPVSDPPVNSQQMDPDIPCMDAGLPFQKGDILQIVDQNDALWWQARKISDPATCAGLVPSNHLLKRKQREFWWSQPYQPHTCLKSTLYKEEFVGYGQKFFIAGFRRSMRLCRRKSHLSPLHASVCCTGSCYSAVGAPYEEVVRYQRRPSDKYRLIVLMGPSGVGVNELRRQLIEFNPSHFQSAVPHTTRTKKSYEMNGREYHYVSKETFENLIYSHRMLEYGEYKGHLYGTSVDAVQTVLVEGKICVMDLEPQDIQGVRTHELKPYVIFIKPSNMRCMKQSRKNAKVITDYYVDMKFKDEDLQEMENLAQRMETQFGQFFDHVIVNDSLHDACAQLLSAIQKAQEEPQWVPATWISSDTESQ

SEQ ID NO: 740 - protein, 489 aa, Homo sapiens
MPLRDETLREVWASDSGHEEESLSPEAPRRPKQRPAPAQRLRKKRTEAPESPCPTGSKPRKPGEEEEEEEDEEDEEEEAEEKKEKILLPPKKPLREKSSADLKERRAKAQGPRGDLGSPDPPPKPLRVRNKEAPAGEGTKMRKTKKKGSGEADKDPSGSPASARKSPAAMFLVGEGSPDKKALKKKGTPKGARKEEEEEEEAATVIKKSNQKGKAKGKGKKKAKEERAPSPPVEVDEPREFVLRPAPQGRTVRCRLTRDKKGMDRGMYPSYFLHLDTEKKVFLLAGRKRKRSKTANYLISIDPTNLSRGGENFIGKLRSNLLGNRFTVFDNGQNPQRGYSTNVASLRQELAAVIYETNVLGFRGPRRMTVIIPGMSAENERVPIRPRNASDGLLVRWQNKTLESLIELHNKPPVWNDDSGSYTLNFQGRVTQASVKNFQIVHADDPDYIVLQFGRVAEDAFTLDYRYPLCALQAFAIALSSFDGKLACE

SEQ ID NO: 741 - protein, 642 aa, Homo sapiens
MLTRPSQVLLNSLSVDPDAECKYGLYFRDGRRKVDYILVYHHKRPSGNRTLVRRVQHSDTPSGARSVKQDHPLPGKGASLDAGSGEPPMDYHEDDKRFRREEYEGNLLEAGLELERDEDTKIHGVGFVKIHAPWNVLCREAEFLKLKMPTKKMYHINETRGLLKKINSVLQKITDPIQPKVAEHRPQTMKRLSYPFSREKQHLFDLSDKDSFFDSKTRSTIVYEILKRTTCTKAKYSMGITSLLANGVYAAAYPLHDGDYNGENVEFNDRKLLYEEWARYGVFYKYQPIDLVRKYFGEKIGLYFAWLGVYTQMLIPASIVGIIVFLYGCATMDENIPSMEMCDQRHNITMCPLCDKTCSYWKMSSACATARASHLFDNPATVFFSVFMALWAATFMEHWKRKQMRLNYRWDLTGFEEEEDHPRAEYEARVLEKSLKKESRNKETDKVKLTWRDRFPAYLTNLVSIIFMIAVTFAIVLGVIIYRISMAAALAMNSSPSVRSNIRVTVTATAVIINLVVIILLDEVYGCIARWLTKIEVPKTEKSFEERLIFKAFLLKFVNSYTPIFYVAFFKGRFVGRPGDYVYIFRSFRMEEVTEILFISGSPFCLAYDLSTPCTWEKQLQHICSAKSSRFLSFLLETFLFP

SEQ ID NO: 742 - protein, 378 aa, Homo sapiens
MLPPQPSAAHQGRGGRSGLLPKGPAMLCRLCWLVSYSLAVLLLGCLLFLRKAAKPAGDPTAHQPFWAPPTPRHSRCPPNHTVSSASLSLPSRHRLFLTYRHCRNFSILLEPSGCSKDTFLLLAIKSQPGHVERRAAIRSTWGRVGGWARGRQLKLVFLLGVAGSAPPAQLLAYESREFDDILQWDFTEDFFNLTLKELHLQRWVVAACPQAHFMLKGDDDVFVHVPNVLEFLDGWDPAQDLLVGDVIRQALPNRNTKVKYFIPPSMYRATHYPPYAGGGGYVMSRATVRRLQAIMEDAELFPIDDVFVGMCLRRLGLSPMHHAGFKTFGIRRPLDPLDPCLYRGLLLVHRLSPLEMWTMWALVTDEGLKCAAGPIPQR

SEQ ID NO: 743 - protein, 1137 aa, Homo sapiens
MTMTANKNSSITHGAGGTKAPRGTLSRSQSVSPPPVLSPPRSPIYPLSDSETSACRYPSHSSSRVLLKDRHPPAPSPQNPQDPSPDTSPPTCPFKTASFGYLDRSPSACKRDAQKESVQGAAQDVAGVAACLPLAQSTPFPGPAAGPRGVLLTRTGTRAHSLGIREKISAWEGRREASPRMSMCGEKREGSGSEWAASEGCPSLGCPSVVPSPCSSEKTFDFKGLRRMSRTFSECSYPETEEEGEALPVRDSFYRLEKRLGRSEPSAFLRGHGSRKESSAVLSRIQKIEQVLKEQPGRGLPQLPSSCYSVDRGKRKTGTLGSLEEPAGGASVSAGSRAVGVAGVAGEAGPPPEREGSGSTKPGTPGNSPSSQRLPSKSSLDPAVNPVPKPKRTFEYEADKNPKSKPSNGLPPSPTPAAPPPLPSTPAPPVTRRPKKDMRGHRKSQSRKSFEFEDASSLQSLYPSSPTENGTENQPKFGSKSTLEENAYEDIVGDLPKENPYEDVDLKSRRAGRKSQQLSENSLDSLHRMWSPQDRKYNSPPTQLSLKPNSQSLRSGNWSERKSHRLPRLPKRHSHDDMLLLAQLSLPSSPSSLNEDSLSTTSELLSSRRARRIPKLVQRINSIYNAKRGKKRLKKLSMSSIETASLRDENSESESDSDDRFKAHTQRLVHIQSMLKRAPSYRTLELELLEWQERELFEYFVVVSLKKKPSRNTYLPEVSYQFPKLDRPTKQMREAEERLKAIPQFCFPDAKDWLPVSEYSSETFSFMLTGEDGSRRFGYCRRLLPSGKGPRLPEVYCVISRLGCFGLFSKVLDEVERRRGISAALVYPFMRSLMESPFPAPGKTIKVKTFLPGAGNEVLELRRPMDSRLEHVDFECLFTCLSVRQLIRIFASLLLERRVIFVADKLSTLSSCSHAVVALLYPFSWQHTFIPVLPASMIDIVCCPTPFLVGLLSSSLPKLKELPVEEALMVNLGSDRFIRQMDDEDTLLPRKLQAALEQALERKNELISQDSDSDSDDECNTLNGLVSEVFIRFFVETVGHYSLFLTQSEKGERAFQREAFRKSVASKSIRRFLEVFMESQMFAGFIQDRELRKCRAKGLFEQRVEQYLEELPDTEQSGMNKFLRGLGNKMKFLHKKN

SEQ ID NO: 744 - protein, 823 aa, Homo sapiens
MGGRVFLVFLAFCVWLTLPGAETQDSRGCARWCPQDSSCVNATACRCNPGFSSFSEIITTPMETCDDINECATLSKVSCGKFSDCWNTEGSYDCVCSPGYEPVSGAKTFKNESENTCQDVDECQQNPRLCKSYGTCVNTLGSYTCQCLPGFKLKPEDPKLCTDVNECTSGQNPCHSSTHCLNNVGSYQCRCRPGWQPIPGSPNGPNNTVCEDVDECSSGQHQCDSSTVCFNTVGSYSCRCRPGWKPRHGIPNNQKDTVCEDMTFSTWTPPPGVHSQTLSRFFDKVQDLGRDYKPGLANNTIQSILQALDELLEAPGDLETLPRLQQHCVASHLLDGLEDVLRGLSKNLSNGLLNFSYPAGTELSLEVQKQVDRSVTLRQNQAVMQLDWNQAQKSGDPGPSVVGLVSIPGMGKLLAEAPLVLEPEKQMLLHETHQGLLQDGSPILLSDVISAFLSNNDTQNLSSPVTFTFSHRSVIPRQKVLCVFWEHGQNGCGHWATTGCSTIGTRDTSTICRCTHLSSFAVLMAHYDVQEEDPVLTVITYMGLSVSLLCLLLAALTFLLCKAIQNTSTSLHLQLSLCLFLAHLLFLVAIDQTGHKVLCSIIAGTLHYLYLATLTWMLLEALYLFLTARNLTVVNYSSINRFMKKLMFPVGYGVPAVTVAISAASRPHLYGTPSRCWLQPEKGFIWGFLGPVCAIFSVNLVLFLVTLWILKNRLSSLNSEVSTLRNTRMLAFKATAQLFILGCTWCLGILQVGPAARVMAYLFTIINSLQGVFIFLVYCLLSQQVREQYGKWSKGIRKLKTESEMHTLSSSAKADTSKPSTVN

SEQ ID NO: 745 - protein, 255 aa, Homo sapiens
MFHQVRRVMTILFLTMVISYFGCMKAAPMKEANIRGQGGLAYPGVRTHGTLESVNGPKAGSRGLTSLADTFEHVIEELLDEDQKVRPNEENNKDADLYTSRVMLSSQVPLEPPLLFLLEEYKNYLDAANMSMRVRRHSDPARRGELSVCDSISEWVTAADKKTAVDMSGGTVTVLEKVPVSKGQLKQYFYETKCNPMGYTKEGCRGIDKRHWNSQCRTTQSYVRALTMDSKKRIGWRFIRIDTSCVCTLTIKRGR

SEQ ID NO: 746 - protein, 785 aa, Homo sapiens
MLPAAPGKGLGSPDPAPCGPAPPGNTKDIIMIYEEDAEEWALYLTEVFLHVVKREAILLYRLENFSFRHLELLNLTSYKCKLLILSNSLLRDLTPKKCQFLEKILHSPKSVVTLLCGVKSSDQLYELLNISQSRWEISTEQEPEDYISVIQSIIFKDSEDYFEVNIPTDLRAKHSGEISERKEIEELSEASRNTIPLAVVLPTEIPCENPGEIFIILRDEVIGDTVEVEFTSSNKRIRTRPALWNKKVWCMKALEFPAGSVHVNVYCDGIVKATTKIKYYPTAKAKECLFRMADSGESLCQNSIEELDGVLTSIFKHEIPYYEFQSLQTEICSQNKYTHFKELPTLLHCAAKFGLKNLAIHLLQCSGATWASKMKNMEGSDPAHIAERHGHKELKKIFEDFSIQEIDINNEQENDYEEDIASFSTYIPSTQNPAFHHESRKTYGQSADGAEANEMEGEGKQNGSGMETKHSPLEVGSESSEDQYDDLYVFIPGADPENNSQEPLMSSRPPLPPPRPVANAFQLERPHFTLPGTMVEGQMERSQNWGHPGVRQETGDEPKGEKEKKEEEKEQEEEEDPYTFAEIDDSEYDMILANLSIKKKTGSRSFIINRPPAPTPRPTSIPPKEETTPYIAQVFQQKTARRQSDDDKFCGLPKKQDRARIESPAFSTLRGCLTDGQEELILLQEKVKNGKMSMDEALEKFKHWQMGKSGLEMIQQEKLRQLRDCIIGKRPEEENVYNKLTIVHHPGGKETAHNENKFYNVHFSNKLPARPQVEKEFGFCCKKDH

SEQ ID NO: 747 - protein, 3184 aa, Homo sapiens
MEAEDLSKAEDRNEDPGSKNEGQLAAVQPDVPHGGQSSSPTALWDMLERKFLEYQQLTHKSPIERQKSLLSLLPLFLKAWEHSVGIICFPSLQRLAEDVSDQLAQQLQKALVGKPAEQARLAAGQLLWWKGDVDQDGYLLLKSVYVLTGTDSETLGRVAESGLPALLLQCLYLFFVFPLDKDELLESDLQVQKMFVQMLLNICSDSQGLEGLLSGSELQSLLIATTCLREHSCCFWKEPTFCVLRAISKAQNLSIIQYLQATDCVRLSLQNLSRLTDTLPAPEVSEAVSLILGFVKDSYPVSSALFLEFENSEGYPLLLKVLLRYDGLTQSEVDPHLEELLGLVVWLTTCGRSELKVFDSITYPQLEGFKFHHEASGVTVKNLQAFQVLQNVFHKASDSVLCIQVLSVIRTMWAWNARNFFLLEWTLQPISQFVEIMPLKPAPVQEHFFQLLEALVFELHYVPHEILRKVQHLIKESPGPSCTLMALQSILSIAGGDPLFTDIFRDSGLLGLLLAQLRKQAKIMRKSGNKVSTPGVQDPERELTCVMLRIVVTLLKGSVRNAVVLKDHGMVPFIKIFLDDECYREASLSILEQLSAINAEEYMSIIVGALCSSTQGELQLKLDLLKSLLRILVTPKGRAAFRVSSGFNGLLSLLSDLEGSLQEPPLQAWGAVSPRQTLELVLYTLCAVSAALHWDPVNGYFFRRNGLFEKLAEDLCLLGCFGALEEEGNLLRSWVDTKARPFADLLGTAFSSSGSLPPRIQSCLQILGFLDSMASGTLHLRGDLKESLRTKQGPVVDVQKGETGSDPQRNFKQWPDLEERMDEGDAAIMHPGVVCIMVRLLPRLYHEDHPQLSEEIQCSLASHIQSLVKSEKNRQVMCEAGLLGTLMASCHRALVTSGSPLHSRLIRIFEKLASQAIEPDVLRQFLGLGIPSSLSATTKILDSSHTHRGNPGCSGSQTAQGLAEGPWPAAPDAGLHPGVTQAPQPLGESQDSTTALQTALSLISMTSPRNLQPQRAALAPSFVEFDMSVEGYGCLFIPTLSTVMGTSTEYSVSGGIGTGATRPFPPPGGLTFSCWFLISRHGAATEGHPLRFLTLVRHLARTEQPFVCFSVSLCPDDLSLVVSTEEKEFQPLDVMEPEDDSEPSAGCQLQVRCGQLLACGQWHHLAVVVTKEMKRHCTVSTCLDGQVIGSAKMLYIQALPGPFLSMDPSAFVDVYGYIATPRVWKQKSSLIWRLGPTYLFEEAISMETLEVINKLGPRYCGNFQAVHVQGEDLDSEATPFVAEERVSFGLHIASSSITSVADIRNAYNEVDSRLIAKEMNISSRDNAMPVFLLRNCAGHLSGSLRTIGAVAVGQLGVRVFHSSPAASSLDFIGGPAILLGLISLATDDHTMYAAVKVLHSVLTSNAMCDFLMQHICGYQIMAFLLRKKASLLNHRIFQLILSVAGTVELGFRSSAITNTGVFQHILCNFELWMNTADNLELSLFSHLLEILQSPREGPRNAEAAHQAQLIPKLIFLFNEPSLIPSKISTIIGILACQLRGHFSTQDLLRIGLFVVYTLKPSSVNERQICMDGALDPSLPAGSQTSGKTIWLRNQLLEMLLSVISSPQLHLSSESKEEMFLKLGPDWFLLLLQGHLHASTTVLALKLLLYFLASPSLRTRFRDGLCAGSWVERSTEGVDIVMDNLKSQSPLPEQSPCLLPGFRVLNDFLAHHVHIPEVYLIVSTFFLQTPLTELMDGPKDSLDAMLQWLLQRHHQEEVLQAGLCTEGALLLLEMLKATMSQPLAGSEDGAWAQTFPASVLQFLSLVHRTYPQDPAWRAPEFLQTLAIAAFPLGAQKGVGAESTRNTSSPEAAAEGDSTVEGLQAPTKAHPARRKLREFTQLLLRELLLGASSPKQWLPLEVLLEASPDHATSQQKRDFQSEVLLSAMELFHMTSGGDAAMFRDGKEPQPSAEAAAAPSLANISCFTQKLVEKLYSGMFSADPRHILLFILEHIMVVIETASSQRDTVLSTLYSSLNKVILYCLSKPQQSLSECLGLLSILGFLQEHWDVVFATYNSNISFLLCLMHCLLLLNERSYPEGFGLEPKPRMSTYHQVFLSPNEDVKEKREDLPSLSDVQHNIQKTVQTLWQQLVAQRQQTLEDAFKIDLSVKPGEREVKIEEVTPLWEETMLKAWQHYLASEKKSLASRSNVAHHSKVTLWSGSLSSAMKLMPGRQAKDPECKTEDFVSCIENYRRRGQELYASLYKDHVQRRKCGNIKAANAWARIQEQLFGELGLWSQGEETKPCSPWELDWREGPARMRKRIKRLSPLEALSSGRHKESQDKNDHISQTNAENQDELTLREAEGEPDEVGVDCTQLTFFPALHESLHSEDFLELCRERQVILQELLDKEKVTQKFSLVIVQGHLVSEGVLLFGHQHFYICENFTLSPTGDVYCTRHCLSNISDPFIFNLCSKDRSTDHYSCQCHSYADMRELRQARFLLQDIALEIFFHNGYSKFLVFYNNDRSKAFKSFCSFQPSLKGKATSEDTLSLRRYPGSDRIMLQKWQKRDISNFEYLMYLNTAAGRTCNDYMQYPVFPWVLADYTSETLNLANPKIFRDLSKPMGAQTKERKLKFIQRFKEVEKTEGDMTVQCHYYTHYSSAIIVASYLVRMPPFTQAFCALQGGSFDVADRMFHSVKSTWESASRENMSDVRELTPEFFYLPEFLTNCNGVEFGCMQDGTVLGDVQLPPWADGDPRKFISLHRKALESDFVSANLHHWIDLIFGYKQQGPAAVDAVNIFHPYFYGDRMDLSSITDPLIKSTILGFVSNFGQVPKQLFTKPHPARTAAGKPLPGKDVSTPVSLPGHPQPFFYSLQSLRPSQVTVKDMYLFSLGSESPKGAIGHIVSTEKTILAVERNKVLLPPLWNRTFSWGFDDFSCCLGSYGSDKVLMTFENLAAWGRCLCAVCPSPTTIVTSGTSTVVCVWELSMTKGRPRGLRLRQALYGHTQAVTCLAASVTFSLLVSGSQDCTCILWDLDHLTHVTRLPAHREGISAITISDVSGTIVSCAGAHLSLWNVNGQPLASITTAWGPEGAITCCCLMEGPAWDTSQIIITGSQDGMVRVWKTEDVKMSVPGRPAGEEPPAQPPSPRGHKWEKNLALSRELDVSIALTGKPSKTSPAVTALAVSRNHTKLLVGDERGRIFCWSADG

SEQ ID NO: 748 - protein, 211 aa, Homo sapiens
MWASLSLDHPSAKENQALRLIEMREENGNVPKTEQAGSLKPLRDTGKSNLKEKKANSKLKQIEKEYTQKLAKSSQIIAELQTTISSLKEENSQQQLAAERRLQDVRQKFEDEKKQLIRDNDQAIKVLQDELENRSNQVRCAEKKLQHKELESQEQITYIRQEYETKLKGLMPASLRQELEDTISSLKSQVNFLQKRASILQEELTTYQGRR

SEQ ID NO: 749 - protein, 1845 aa, Homo sapiens
MGDVKLVASSHISKTSLSVDPSRVDSMPLTEAPAFILPPRNLCIKEGATAKFEGRVRGYPEPQVTWHRNGQPITSGGRFLLDCGIRGTFSLVIHAVHEEDRGKYTCEATNGSGARQVTVELTVEGSFAKQLGQPVVSKTLGDRFSAPAVETRPSIWGECPPKFATKLGRVVVKEGQMGRFSCKITGRPQPQVTWLKGNVPLQPSARVSVSEKNGMQVLEIHGVNQDDVGVYTCLVVNGSGKASMSAELSIQGLDSANRSFVRETKATNSDVRKEVTNVISKESKLDSLEAAAKSKNCSSPQRGGSPPWAANSQPQPPRESKLESCKDSPRTAPQTPVLQKTSSSITLQAARVQPEPRAPGLGVLSPSGEERKRPAPPRPATFPTRQPGLGSQDVVSKAANRRIPMEGQRDSAFPKFESKPQSQEVKENQTVKFRCEGLAVMEVAPSFSSVLKDCAVIEGQDFVLQCSVRGTPVPRITWLLNGQPIQYARSTCEAGVAELHIQDALPEDHGTYTCLAENALGQVSCSAWVTVHEKKSSRKSEYLLPVAPSKPTAPIFLQGLSDLKVMDGSQVTMTVQVSGNPPPEVIWLHNGNEIQESEDFHFEQRGTQHSLCIQEVFPEDTGTYTCEAWNSAGEVRTQAVLTVQEPHDGTQPWFISKPRSVTASLGQSVLISCAIAGDPFPTVHWLRDGKALCKDTGHFEVLQNEDVFTLVLKKVQPWHAGQYEILLKNRVGECSCQVSLMLQNSSARALPRGREPASCEDLCGGGVGADGGGSDRYGSLRPGWPARGQGWLEEEDGEDVRGVLKRRVETRQHTEEAIRQQEVEQLDFRDLLGKKVSTKTLSEDDLKEIPAEQMDFRANLQRQVKPKTVSEEERKVHSPQQVDFRSVLAKKGTSKTPVPEKVPPPKPATPDFRSVLGGKKKLPAENGSSSAETLNAKAVESSKPLSNAQPSGPLKPVGNAKPAETLKPMGNAKPAETLKPMGNAKPDENLKSASKEELKKDVKNDVNCKRGHAGTTDNEKRSESQGTAPAFKQKLQDVHVAEGKKLLLQCQVSSDPPATIIWTLNGKTLKTTKFIILSQEGSLCSVSIEKALPEDRGLYKCVAKNDAGQAECSCQVTVDDAPASENTKAPEMKSRRPKSSLPPVLGTESDATVKKKPAPKTPPKAAMPPQIIQFPEDQKVRAGESVELFGKVTGTQPITCTWMKFRKQIQESEHMKVENSENGSKLTILAARQEHCGCYTLLVENKLGSRQAQVNLTVVDKPDPPAGTPCASDIRSSSLTLSWYGSSYDGGSAVQSYSIEIWDSANKTWKELATCRSTSFNVQDLLPDHEYKFRVRAINVYGTSEPSQESELTTVGEKPEEPKDEVEVSDDDEKEPEVDYRTVTINTEQKVSDFYDIEERLGSGKFGQVFRLVEKKTRKVWAGKFFKAYSAKEKENIRQEISIMNCLHHPKLVQCVDAFEEKANIVMVLEIVSGGELFERIIDEDFELTERECIKYMRQISEGVEYIHKQGIVHLDLKPENIMCVNKTGTRIKLIDFGLARRLENAGSLKVLFGTPEFVAPEVINYEPIGYATDMWSIGVICYILVSGLSPFMGDNDNETLANVTSATWDFDDEAFDEISDDAKDFISNLLKKDMKNRLDCTQCLQHPWLMKDTKNMEAKKLSKDRMKKYMARRKWQKTGNAVRAIGRLSSMAMISGLSGRKSSTGSPTSPLNAEKLESEEDVSQAFLEAVAEEKPHVKPYFSKTIRDLEVVEGSAARFDCKIEGYPDPEVVWFKDDQSIRESRHFQIDYDEDGNCSLIISDVCGDDDAKYTCKAVNSLGEATCTAELIVETMEEGEGEGEEEEE

SEQ ID NO: 750 - protein, 374 aa, Homo sapiens
MRAPMLQKQQAPRMDTPPPEERLEKQNEKLNNQEEETEFKELDGLREALANLRGLSEEERSEKAMLRSRIEEQSQLICILKRRSDEALERCQILELLNAELEEKMMQEAEKLKAQGEYSRKLEERFMTLAANHELMLRFKDEYKSENIKLREENEKLRLENSSLFSQALKDEEAKVLQLTVRCEALTGELETLKERCAQDACQAQAREKELLELQSQQACTHTKETEQLRSQLQTLKQQHQQAVEQIAKAEETHSSLSQELQARLQTVTREKEELLQLSIERGKVLQNKQAEICQLEEKLEIANEDRKHALERFEQEAVAVDSNLRVRELQRKVDGIQKAYDELRLQSEAFKKHSLDLLSKERELNGKLRHLSP

SEQ ID NO: 751 - protein, 981 aa, Homo sapiens
MDGFAGSLDDSISAASTSDVQDRLSALESRVQQQEDEITVLKAALADVLRRLAISEDHVASVKKSVSSKGQPSPRAVIPMSCITNGSGANRKPSHTSAVSIAGKETLSSAAKSGTEKKKEKPQGQREKKEESHSNDQSPQIRASPSPQPSSQPLQIHRQTPESKNATPTKSIKRPSPAEKSHNSWENSDDSRNKLSKIPSTPKLIPKVTKTADKHKDVIINQEGEYIKMFMRGRPITMFIPSDVDNYDDIRTELPPEKLKLEWAYGYRGKDCRANVYLLPTGKIVYFIASVVVLFNYEERTQRHYLGHTDCVKCLAIHPDKIRIATGQIAGVDKDGRPLQPHVRVWDSVTLSTLQIIGLGTFERGVGCLDFSKADSGVHLCIIDDSNEHMLTVWDWQKKAKGAEIKTTNEVVLAVEFHPTDANTIITCGKSHIFFWTWSGNSLTRKQGIFGKYEKPKFVQCLAFLGNGDVLTGDSGGVMLIWSKTTVEPTPGKGPKGVYQISKQIKAHDGSVFTLCQMRNGMLLTGGGKDRKIILWDHDLNPEREIEVPDQYGTIRAVAEGKADQFLVGTSRNFILRGTFNDGFQIEVQGHTDELWGLATHPFKDLLLTCAQDRQVCLWNSMEHRLEWTRLVDEPGHCADFHPSGTVVAIGTHSGRWFVLDAETRDLVSIHTDGNEQLSVMRYSIDGTFLAVGSHDNFIYLYVVSENGRKYSRYGRCTGHSSYITHLDWSPDNKYIMSNSGDYEILYWDIPNGCKLIRNRSDCKDIDWTTYTCVLGFQVFGVWPEGSDGTDINALVRSHNRKVIAVADDFCKVHLFQYPCSKAKAPSHKYSAHSSHVTNVSFTHNDSHLISTGGKDMSIIQWKLVEKLSLPQNETVADTTLTKAPVSSTESVIQSNTPTPPPSQPLNETAEEESRISSSPTLLENSLEQTVEPSEDHSEEESEEGSGDLGEPLYEEPCNEISKEQAKATLLEDQQDPSPSS

SEQ ID NO: 752 - protein, 235 aa, Homo sapiens
MSDPHSSPLLPEPLSSRYKLYEAEFTSPSWPSTSPDTHPALPLLEMPEEKDLRSSNEDSHIVKIEKLNERSKRKDDGVAHRDSAGQRCICLSKAVGYLTGDMKEYRIWLKDKHLALQFIDWVLRGTAQVMFINNPLSGLIIFIGLLIQNPWWTITGGLGTVVSTLTALALGQDRSAIASGLHGYNGMLVGLLMAVFSEKLDYYWWLLFPVTFTAMSWMETDFNWSKSGCWKHLLQ

SEQ ID NO: 753 - protein, 233 aa, Homo sapiens
MWGYLSLMPVFLAVWAISGVWIVFAIAVTNRTVDLSKGFPYISICGSFPPQSCIFSQVLNMGAALAAWICIVRYHQLRDWGVRRWPNQLILWTGLLCALGTSVVGNFQEKNQRPTHLAGAFLAFILGNVYFWLQLLLWRLKRLPQPGAAWIGPLRLGLCSVCTILIVAMIVLHACSLRSVSAACEWVVAMLLFALFGLLAVDFSALESCTLCVQPWPSLSPPPASPISLPVQL

SEQ ID NO: 754 - protein, 453 aa, Homo sapiens
MSIVTVQLGQCGNQIGFEVFDALLSDSHSSQGLCSMRENEAYQASCKERFFSEEENGVPIARAVLVDMEPKVINQMLSKAAQSGQWKYGQHACFCQKQGSGNNWAYGYSVHGPRHEESIMNIIRKEVEKCDSFSGFFIIMSMAGGTGSGLGAFVTQNLEDQYSNSLKMNQIIWPYGTGEVIVQNYNSILTLSHLYRSSDALLLHENDAIHKICAKLMNIKQISFSDINQVLAHQLGSVFQPTYSAESSFHYRRNPLGDLMEHLVPHPEFKMLSVRNIPHMSENSLAYTTFTWAGLLKHLRQMLISNAKMEEGIDRHVWPPLSGLPPLSKMSLNKDLHFNTSIANLVILRGKDVQSADVEGFKDPALYTSWLKPVNAFNVWKTQRAFSKYEKSAVLVSNSQFLVKPLDMIVGKAWNMFASKAYIHQYTKFGIEEEDFLDSFTSLEQVVASYCNL

SEQ ID NO: 755 - protein, 214 aa, Homo sapiens
MTEPGASPEDPWVKVEYAYSDNSLDPDDEDSDYHQEAYKESYKDRRRRAHTQAEQKRRDAIKRGYDDLQTIVPTCQQQDFSIGSQKLSKAIVLQKTIDYIQFLHKEKKKQEEEVSTLRKDVTALKIMKVNYEQIVKAHQDNPHEGEDQVSDQVKFNVFQGIMDSLFQSFNASISVASFQELSACVFSWIEEHCKPQTLREIVIGVLHQLKNQLY

SEQ ID NO: 756 - protein, 703 aa, Homo sapiens
MPEPRGSSQLRVNAAFAARYNRYREREELQRLKDRYGDRDSSSDSSSESDSSDERVEFDPQQERDFYKTLSLLKKKDPRIYQKDATFYNRTASSSDSEEDPEALEKQKKVRPMYLKDYERKVILEKAGKYVDEENSDGETSNHRLQETSSQSYVEEQKQLKESFRAFVEDSEDEDGAGEGGSSLLQKRAKTRQEKAQEEADYIEWLKGQKEIRNPDSLKELTHLKEYWNDPELDEGERFLRDYILNKRYEEEEEEEEDEEEMEEEEGVHGPPVQLAVDDSSDEGELFLKKQEDFEQKYNFRFEEPDSASVKTYPRSIASSVRRKDERRKEKREETRERKKREKAKKQEELKQLKNLKRKEILAKLEKLRKVTGNEMLGLEEGDLEDDFDPAQHDQLMQKCFGDEYYGAVEEEKPQFEEEEGLEDDWNWDTWDGPEQEGDWSQQELHCEDPNFNMDADYDPSQPRKKKREAPLTGKKKRKSPFAAAVGQEKPVFEPGDKTFEEYLDEYYRLDYEDIIDDLPCRFKYRTVVPCDFGLSTEEILAADDKELNRWCSLKKTCMYRSEQEELRDKRAYSQKAQNSWKKRQVFKSLCREEAETPAEATGKPQRDEAGPQRQLPALDGSLMGPESPPAQEEEAPVSPHKKPAPQKRRRAKKARLLGPTVMLGGCEFSRQRLQAFGLNPKRLHFRQLGRQRRKQQGPKNSS

SEQ ID NO: 757 - protein, 332 aa, Homo sapiens
MRLLVLLWGCLLLPGYEALEGPEEISGFEGDTVSLQCTYREELRDHRKYWCRKGGILFSRCSGTIYAEEEGQETMKGRVSIRDSRQELSLIVTLWNLTLQDAGEYWCGVEKRGPDESLLISLFVFPGPCCPPSPSPTFQPLATTRLQPKAKAQQTQPPGLTSPGLYPAATTAKQGKTGAEAPPLPGTSQYGHERTSQYTGTSPHPATSPPAGSSRPPMQLDSTSAEDTSPALSSGSSKPRVSIPMVRILAPVLVLLSLLSAAGLIAFCSHLLLWRKEAQQATETQRNEKFCLSRLTAEEKEAPSQAPEGDVISMPPLHTSEEELGFSKFVSA

SEQ ID NO: 758 - protein, 756 aa, Homo sapiens
MNGAPSPEDGASPSSPPLPPPPPPSWREFCESHARAAALDFARRFRLYLASHPQYAGPGAEAAFSRRFAELFLQHFEAEVARASGSLSPPILAPLSPGAEISPHDLSLESCRVGGPLAVLGPSRSSEDLAGPLPSSVSSSSTTSSKPKLKKRFSLRSVGRSVRGSVRGILQWRGTVDPPSSAGPLETSSGPPVLGGNSNSNSSGGAGTVGRGLVSDGTSPGERWTHRFERLRLSRGGGALKDGAGMVQREELLSFMGAEEAAPDPAGVGRGGGVAGPPSGGGGQPQWQKCRLLLRSEGEGGGGSRLEFFVPPKASRPRLSIPCSSITDVRTTTALEMPDRENTFVVKVEGPSEYIMETVDAQHVKAWVSDIQECLSPGPCPATSPRPMTLPLAPGTSFLTRENTDSLELSCLNHSESLPSQDLLLGPSESNDRLSQGAYGGLSDRPSASISPSSASIAASHFDSMELLPPELPPRIPIEEGPPTGTVHPLSAPYPPLDTPETATGSFLFQGEPEGGEGDQPLSGYPWFHGMLSRLKAAQLVLTGGTGSHGVFLVRQSETRRGEYVLTFNFQGKAKHLRLSLNEEGQCRVQHLWFQSIFDMLEHFRVHPIPLESGGSSDVVLVSYVPSSQRQQEPTTSHDPPQPPEPPSWTDPPQPGAEEASRAPEVAAAAAAAAKERQEKEKAGGGGVPEELVPVVELVPVVELEEAIAPGSEAQGAGSGGDAGVPPMVQLQQSPLGGDGEEGGHPRAINNQYSFV

SEQ ID NO: 759 - protein, 2040 aa, Homo sapiens
MEHKEVVLLLLLFLKSAAPEQSHVVQDCYHGDGQSYRGTYSTTVTGRTCQAWSSMTPHQHNRTTENYPNAGLIMNYCRNPDAVAAPYCYTRDPGVRWEYCNLTQCSDAEGTAVAPPTVTPVPSLEAPSEQAPTEQRPGVQECYHGNGQSYRGTYSTTVTGRTCQAWSSMTPHSHSRTPEYYPNAGLIMNYCRNPDAVAAPYCYTRDPGVRWEYCNLTQCSDAEGTAVAPPTVTPVPSLEAPSEQAPTEQRPGVQECYHGNGQSYRGTYSTTVTGRTCQAWSSMTPHSHSRTPEYYPNAGLIMNYCRNPDAVAAPYCYTRDPGVRWEYCNLTQCSDAEGTAVAPPTVTPVPSLEAPSEQAPTEQRPGVQECYHGNGQSYRGTYSTTVTGRTCQAWSSMTPHSHSRTPEYYPNAGLIMNYCRNPDAVAAPYCYTRDPGVRWEYCNLTQCSDAEGTAVAPPTVTPVPSLEAPSEQAPTEQRPGVQECYHGNGQSYRGTYSTTVTGRTCQAWSSMTPHSHSRTPEYYPNAGLIMNYCRNPDAVAAPYCYTRDPGVRWEYCNLTQCSDAEGTAVAPPTVTPVPSLEAPSEQAPTEQRPGVQECYHGNGQSYRGTYSTTVTGRTCQAWSSMTPHSHSRTPEYYPNAGLIMNYCRNPDAVAAPYCYTRDPGVRWEYCNLTQCSDAEGTAVAPPTVTPVPSLEAPSEQAPTEQRPGVQECYHGNGQSYRGTYSTTVTGRTCQAWSSMTPHSHSRTPEYYPNAGLIMNYCRNPDAVAAPYCYTRDPGVRWEYCNLTQCSDAEGTAVAPPTVTPVPSLEAPSEQAPTEQRPGVQECYHGNGQSYRGTYSTTVTGRTCQAWSSMTPHSHSRTPEYYPNAGLIMNYCRNPDPVAAPYCYTRDPSVRWEYCNLTQCSDAEGTAVAPPTITPIPSLEAPSEQAPTEQRPGVQECYHGNGQSYQGTYFITVTGRTCQAWSSMTPHSHSRTPAYYPNAGLIKNYCRNPDPVAAPWCYTTDPSVRWEYCNLTRCSDAEWTAFVPPNVILAPSLEAFFEQALTEETPGVQDCYYHYGQSYRGTYSTTVTGRTCQAWSSMTPHQHSRTPENYPNAGLTRNYCRNPDAEIRPWCYTMDPSVRWEYCNLTQCLVTESSVLATLTVVPDPSTEASSEEAPTEQSPGVQDCYHGDGQSYRGSFSTTVTGRTCQSWSSMTPHWHQRTTEYYPNGGLTRNYCRNPDAEISPWCYTMDPNVRWEYCNLTQCPVTESSVLATSTAVSEQAPTEQSPTVQDCYHGDGQSYRGSFSTTVTGRTCQSWSSMTPHWHQRTTEYYPNGGLTRNYCRNPDAEIRPWCYTMDPSVRWEYCNLTQCPVMESTLLTTPTVVPVPSTELPSEEAPTENSTGVQDCYRGDGQSYRGTLSTTITGRTCQSWSSMTPHWHRRIPLYYPNAGLTRNYCRNPDAEIRPWCYTMDPSVRWEYCNLTRCPVTESSVLTTPTVAPVPSTEAPSEQAPPEKSPVVQDCYHGDGRSYRGISSTTVTGRTCQSWSSMIPHWHQRTPENYPNAGLTENYCRNPDSGKQPWCYTTDPCVRWEYCNLTQCSETESGVLETPTVVPVPSMEAHSEAAPTEQTPVVRQCYHGNGQSYRGTFSTTVTGRTCQSWSSMTPHRHQRTPENYPNDGLTMNYCRNPDADTGPWCFTMDPSIRWEYCNLTRCSDTEGTVVAPPTVIQVPSLGPPSEQDCMFGNGKGYRGKKATTVTGTPCQEWAAQEPHRHSTFIPGTNKWAGLEKNYCRNPDGDINGPWCYTMNPRKLFDYCDIPLCASSSFDCGKPQVEPKKCPGSIVGGCVAHPHSWPWQVSLRTRFGKHFCGGTLISPEWVLTAAHCLKKSSRPSSYKVILGAHQEVNLESHVQEIEVSRLFLEPTQADIALLKLSRPAVITDKVMPACLPSPDYMVTARTECYITGWGETQGTFGTGLLKEAQLLVIENEVCNHYKYICAEHLARGTDSCQGDSGGPLVCFEKDKYILQGVTSWGLGCARPNKPGVYARVSRFVTWIEGMMRNN

SEQ ID NO: 760 - protein, 629 aa, Homo sapiens
MNQVTIQWDAVIALYILFSWCHGGITNINCSGHIWVEPATIFKMGMNISIYCQAAIKNCQPRKLHFYKNGIKERFQITRINKTTARLWYKNFLEPHASMYCTAECPKHFQETLICGKDISSGYPPDIPDEVTCVIYEYSGNMTCTWNAGKLTYIDTKYVVHVKSLETEEEQQYLTSSYINISTDSLQGGKKYLVWVQAANALGMEESKQLQIHLDDIVIPSAAVISRAETINATVPKTIIYWDSQTTIEKVSCEMRYKATTNQTWNVKEFDTNFTYVQQSEFYLEPNIKYVFQVRCQETGKRYWQPWSSLFFHKTPETVPQVTSKAFQHDTWNSGLTVASISTGHLTSDNRGDIGLLLGMIVFAVMLSILSLIGIFNRSFRTGIKRRILLLIPKWLYEDIPNMKNSNVVKMLQENSELMNNNSSEQVLYVDPMITEIKEIFIPEHKPTDYKKENTGPLETRDYPQNSLFDNTTVVYIPDLNTGYKPQISNFLPEGSHLSNNNEITSLTLKPPVDSLDSGNNPRLQKHPNFAFSVSSVNSLSNTIFLGELSLILNQGECSSPDIQNSVEEETTMLLENDSPSETIPEQTLLPDEFVSCLGIVNEELPSINTYFPQNILESHFNRISLLEK

SEQ ID NO: 761 - protein, 312 aa, Homo sapiens
MPSINDTHFYPPFFLLLGIPGLDTLHIWISFPFCIVYLIAIVGNMTILFVIKTEHSLHQPMFYFLAMLSMIDLGLSTSTIPKMLGIFWFNLQEISFGGCLLQMFFIHMFTGMETVLLVVMAYDRFVAICNPLQYTMILTNKTISILASVVVGRNLVLVTPFVFLILRLPFCGHNIVPHTYCEHRGLAGLACAPIKINIIYGLMVISYIIVDVILIASSYVLILRAVFRLPSQDVRLKAFNTCGSHVCVMLCFYTPAFFSFMTHRFGQNIPHYIHILLANLYVVVPPALNPVIYGVRTKQIREQIVKIFVQKE

SEQ ID NO: 762 - protein, 305 aa, Homo sapiens
MVATNNVTEIIFVGFSQNWSEQRVISVMFLLMYTAVVLGNGLIVVTILASKVLTSPMYFFLSYLSFVEICYCSVMAPKLIFDSFIKRKVISLKGCLTQMFSLHFFGGTEAFLLMVMAYDRYVAICKPLHYMAIMNQRMCGLLVRIAWGGGLLHSVGQTFLIFQLPFCGPNIMDHYFCDVHPVLELACADTFFISLLIITNGGSISVVSFFVLMASYLIILHFLRSHNLEGQHKALSTCASHVTVVDLFFIPCSLVYIRPCVTLPADKIVAVFYTVVTPLLNPVIYSFRNAEVKNAMRRFIGGKVI

SEQ ID NO: 763 - protein, 596 aa, Homo sapiens
MSNYSVSLVGPAPWGFRLQGGKDFNMPLTISSLKDGGKAAQANVRIGDVVLSIDGINAQGMTHLEAQNKIKGCTGSLNMTLQRASAAPKPEPVPVQKGEPKEVVKPVPITSPAVSKVTSTNNMAYNKAPRPFGSVSSPKVTSIPSPSSAFTPAHATTSSHASPSPVAAVTPPLFAASGLHANANLSADQSPSALSAGKTAVNVPRQPTVTSVCSETSQELAEGQRRGSQGDSKQQNGPPRKHIVERYTEFYHVPTHSDASKKRLIEDTEDWRPRTGTTQSRSFRILAQITGTEHLKESEADNTKKANNSQEPSPQLASSVASTRSMPESLDSPTSGRPGVTSLTAAAAFKPVGSTGVIKSPSWQRPNQGVPSTGRISNSATYSGSVAPANSALGQTQPSDQDTLVQRAEHIPAGKRTPMCAHCNQVIRGPFLVALGKSWHPEEFNCAHCKNTMAYIGFVEEKGALYCELCYEKFFAPECGRCQRKILGEVISALKQTWHVSCFVCVACGKPIRNNVFHLEDGEPYCETDYYALFGTICHGCEFPIEAGDMFLEALGYTWHDTCFVCSVCCESLEGQTFFSKKDKPLCKKHAHSVNF

SEQ ID NO: 764 - protein, 217 aa, Homo sapiens
MEVENEASCSPGSASGGSREYKVVMLGAGGVGKSAMTMQFISHQFPDYHDPTIEDAYKTQVRIDNEPAYLDILDTAGQAEFTAMREQYMRGGEGFIICYSVTDRQSFQEAAKFKELIFQVRHTYEIPLVLVGNKIDLEQFRQVSTEEGLSLAQEYNCGFFETSAALRFCIDDAFHGLVREIRKKESMPSLMEKKLKRKDSLWKKLKGSLKKKRENMT

SEQ ID NO: 765 - protein, 491 aa, Homo sapiens
MALLWGLLVLSWSCLQGPCSVFSPVSAMEPLGRQLTSGPNQEQVSPLTLLKLGNQEPGGQTALKSPPGVCSRDPTPEQTHRLARAMMAFTADLFSLVAQTSTCPNLILSPLSVALALSHLALGAQNHTLQRLQQVLHAGSGPCLPHLLSRLCQDLGPGAFRLAARMYLQKGFPIKEDFLEQSEQLFGAKPVSLTGKQEDDLANINQWVKEATEGKIQEFLSGLPEDTVLLLLNAIHFQGFWRNKFDPSLTQRDSFHLDEQFTVPVEMMQARTYPLRWFLLEQPEIQVAHFPFKNNMSFVVLVPTHFEWNVSQVLANLSWDTLHPPLVWERPTKVRLPKLYLKHQMDLVATLSQLGLQELFQAPDLRGISEQSLVVSGVQHQSTLELSEVGVEAAAATSIAMSRMSLSSFSVNRPFLFFIFEDTTGLPLFVGSVRNPNPSAPRELKEQQDSPGNKDFLQSLKGFPRGDKLFGPDLKLVPPMEEDYPQFGSPK

SEQ ID NO: 766 - protein, 618 aa, Homo sapiens
MRRDVRILLLGEAQVGKTSLILSLVGEEFPEEVPPRAEEITIPADVTPEKVPTHIVDYSEAEQTDEELREEIHKANVVCVVYDVSEEATIEKIRTKWIPLVNGGTTQGPRVPIILVGNKSDLRSGSSMEAVLPIMSQFPEIETCVECSAKNLRNISELFYYAQKAVLHPTAPLYDPEAKQLRPACAQALTRIFRLSDQDLDQALSDEELNAFQKSCFGHPLAPQALEDVKTVVCRNVAGGVREDRLTLDGFLFLNTLFIQRGRHETTWTILRRFGYSDALELTADYLSPLIHVPPGCSTELNHLGYQFVQRVFEKHDQDRDGALSPVELQSLFSVFPAAPWGPELPRTVRTEAGRLPLHGYLCQWTLVTYLDVRSCLGHLGYLGYPTLCEQDQAHAITVTREKRLDQEKGQTQRSVLLCKVVGARGVGKSAFLQAFLGRGLGHQDTREQPPGYAIDTVQVNGQEKYLILCEVGTDGLLATSLDATCDVACLMFDGSDPKSFAHCASVYKHHYMDGQTPCLFVSSKADLPEGVAVSGPSPAEFCRKHRLPAPVPFSCAGPAEPSTTIFTQLATMAAFPHLVHAELHPSSFWLRGLLGVVGAAVAAVLSFSLYRVLVKSQ

SEQ ID NO: 767 - protein, 610 aa, Homo sapiens
MQQEAAQRESEELQHVQWRPRAVSGWGVPQLLWYLVFLQPIITEVHLRRRNVQFLFIRFSAWQYAGTDKLWAGLVTTLCEGIRRHYGALPFSVYSVLGNKPATRQDCCQSEWHCRRRVCLGLLALLAALGLGVGLLYLSLGGHALGHGSPSGSLLKVFGGAATTLSGSGLLMAVYSVGKHLFVSQRKKIERLVSREKFGSQLGFMCEVKKEVELLTDFLCFLEIYQRRRLRVVLEVTGLDTCYPERVVGVLNAINTLLSDSHAPFIFILVVDPSILAACLESAGNMKGTADNGYLFLNRTVTLPFSVPIMGRRTKLQFLHDAVQSRDDLLYREMTRKPWLPGDAGGESAQLLAVQAQAGTERGQGRIDDEAARRIQEALFCLHDERDCLYEYVPDNVVSMRRIVNTVPITVRLLQQQQQQGDFGGPTPRQAVAWVVLANQWPCRLSWALQCLEDRQQTGGAPEGRARLWDVFRDNSRELHTMTKALQNVLDLDGDPELFERFLGADFPFTVAEAQSLLRCTVNLDHSIRRRMGLIRAVSALKPPSPPKSPTRDTPHAAHRANSASRAPPSGRASGQAGEGHHTGDLAHRGKLWPVACALFRPGQSSPGGP

SEQ ID NO: 768 - protein, 214 aa, Homo sapiens
MSNYSVSLVGPAPWGFRLQGGKDFNMPLTISSLKDGGKAAQANVRIGDVVLSIDGINAQGMTHLEAQNKIKGCTGSLNMTLQRASAAPKPEPVPVQKKTQVTNNPGTVKIPPKRPPRKHIVERYTEFYHVPTHSDASKKRLIEDTEDWRPRTGTTQSRSFRILAQITGTEHLKESEADNTKKAKEKIPLHVFSPKYTKLRDWHHEVSARALNVQ

SEQ ID NO: 769 - protein, 996 aa, Homo sapiens
MPYNYLLDAKSRRAHNIDLKGTVVIFDEAHNVEKMCEESASFDLTPHDLASGLDVIDQVLEEQTKAAQQGEPHPEFSADSPSPGLNMELEDIAKLKMILLRLEGAIDAVELPGDDSGVTKPGSYIFELFAEAQITFQTKGCILDSLDQIIQHLAGRAGVFTNTAGLQKLADIIQIVFSVDPSEGSPGSPAGLGALQSYKVHIHPDAGHRRTAQRSDAWSTTAARKRGKVLSYWCFSPGHSMHELVRQGVRSLILTSGTLAPVSSFALEMQIPFPVCLENPHIIDKHQIWVGVVPRGPDGAQLSSAFDRRFSEECLSSLGKALGNIARVVPYGLLIFFPSYPVMEKSLEFWRARDLARKMEALKPLFVEPRSKGSFSETISAYYARVAAPGSTGATFLAVCRGKASEGLDFSDTNGRGVIVTGLPYPPRMDPRVVLKMQFLDEMKGQGGAGGQFLSGQEWYRQQASRAVNQAIGRVIRHRQDYGAVFLCDHRFAFADARAQLPSWVRPHVRVYDNFGHVIRDVAQFFRVAERTMPAPAPRATAPSVRGEDAVSEAKSPGPFFSTRKAKSLDLHVPSLKQRSSGSPAAGDPESSLCVEYEQEPVPARQRPRGLLAALEHSEQRAGSPGEEQAHSCSTLSLLSEKRPAEEPRGGRKKIRLVSHPEEPVAGAQTDRAKLFMVAVKQELSQANFATFTQALQDYKGSDDFAALAACLGPLFAEDPKKHNLLQGFYQFVRPHHKQQFEEVCIQLTGRGCGYRPEHSIPRRQRAQPVLDPTGRTAPDPKLTVSTAAAQQLDPQEHLNQGRPHLSPRPPPTGDPGSQPQWGSGVPRAGKQGQHAVSAYLADARRALGSAGCSQLLAALTAYKQDDDLDKVLAVLAALTTAKPEDFPLLHRFSMFVRPHHKQRFSQTCTDLTGRPYPGMEPPGPQEERLAVPPVLTHRAPQPGPSRSEKTGKTQSKISSFLRQRPAGTVGAGGEDAGPSQSSGPPHGPAASEWGL

SEQ ID NO: 770 - protein, 365 aa, Homo sapiens
MEGQSVEELLAKAEQDEAEKLQRITVHKELELQFDLGNLLASDRNPPTGLRCAGPTPEAELQALARDNTQLLINQLWQLPTERVEEAIVARLPEPTTRLPREKPLPRPRPLTRWQQFARLKGIRPKKKTNLVWDEVSGQWRRRWGYQRARDDTKEWLIEVPGNADPLEDQFAKRIQAKKERVAKNELNRLRNLARAHKMQLPSAAGLHPTGHQSKEELGRAMQVAKVSTASVGRFQERLPKEKVPRGSGKKRKFQPLFGDFAAEKKNQLELLRVMNSKKPQLDVTRATNKQMREEDQEEAAKRRKMSQKGKRKGGRQGPGGKRKGGPPSQGGKRKGGLGGKMNSGPPGLGGKRKGGQRPGGKRRK

SEQ ID NO: 771 - protein, 1955 aa, Homo sapiens
MFRQFYLWTCLASGIILGSLFEICLGQYDDDCKLARGGPPATIVAIDEESRNGTILVDNMLIKGTAGGPDPTIELSLKDNVDYWVLMDPVKQMLFLNSTGRVLDRDPPMNIHSIVVQVQCINKKVGTIIYHEVRIVVRDRNDNSPTFKHESYYATVNELTPVGTTIFTGFSGDNGATDIDDGPNGQIEYVIQYNPDDPTSNDTFEIPLMLTGNIVLRKRLNYEDKTRYFVIIQANDRAQNLNERRTTTTTLTVDVLDGDDLGPMFLPCVLVPNTRDCRPLTYQAAIPELRTPEELNPIIVTPPIQAIDQDRNIQPPSDRPGILYSILVGTPEDYPRFFHMHPRTAELSLLEPVNRDFHQKFDLVIKAEQDNGHPLPAFAGLHIEILDENNQSPYFTMPSYQGYILESAPVGATISDSLNLTSPLRIVALDKDIEDTKDPELHLFLNDYTSVFTVTQTGITRYLTLLQPVDREEQQTYTFSITAFDGVQESEPVIVNIQVMDANDNTPTFPEISYDVYVYTDMRPGDSVIQLTAVDADEGSNGEITYEILVGAQGDFIINKTTGLITIAPGVEMIVGRTYALTVQAADNAPPAERRNSICTVYIEVLPPNNQSPPRFPQLMYSLEISEAMRVGAVLLNLQATDREGDSITYAIENGDPQRVFNLSETTGILTLGKALDRESTDRYILIITASDGRPDGTSTATVNIVVTDVNDNAPVFDPYLPRNLSVVEEEANAFVGQVKATDPDAGINGQVHYSLGNFNNLFRITSNGSIYTAVKLNREVRDYYELVVVATDGAVHPRHSTLTLAIKVLDIDDNSPVFTNSTYTVLVEENLPAGTTILQIEAKDVDLGANVSYRIRSPEVKHFFALHPFTGELSLLRSLDYEAFPDQEASITFLVEAFDIYGTMPPGIATVTVIVKDMNDYPPVFSKRIYKGMVAPDAVKGTPITTVYAEDADPPGLPASRVRYRVDDVQFPYPASIFEVEEDSGRVITRVNLNEEPTTIFKLVVVAFDDGEPVMSSSATVKILVLHPGEIPRFTQEEYRPPPVSELATKGTMVGVISAAAINQSIVYSIVSGNEEDTFGINNITGVIYVNGPLDYETRTSYVLRVQADSLEVVLANLRVPSKSNTAKVYIEIQDENNHPPVFQKKFYIGGVSEDARMFTSVLRVKATDKDTGNYSVMAYRLIIPPIKEGKEGFVVETYTGLIKTAMLFHNMRRSYFKFQVIATDDYGKGLSGKADVLVSVVNQLDMQVIVSNVPPTLVEKKIEDLTEILDRYVQEQIPGAKVVVESIGARRHGDAFSLEDYTKCDLTVYAIDPQTNRAIDRNELFKFLDGKLLDINKDFQPYYGEGGRILEIRTPEAVTSIKKRGESLGYTEGALLALAFIIILCCIPAILVVLVSYRQFKVRQAECTKTARIQAALPAAKPAVPAPAPVAAPPPPPPPPPGAHLYEELGDSSILFLLYHFQQSRGNNSVSEDRKHQQVVMPFSSNTIEAHKSAHVDGSLKSNKLKSARKFTFLSDEDDLSAHNPLYKENISQVSTNSDISQRTDFVDPFSPKIQAKSKSLRGPREKIQRLWSQSVSLPRRLMRKVPNRPEIIDLQQWQGTRQKAENENTGICTNKRGSSNPLLTTEEANLTEKEEIRQGETLMIEGTEQLKSLSSDSSFCFPRPHFSFSTLPTVSRTVELKSEPNVISSPAECSLELSPSRPCVLHSSLSRRETPICMLPIETERNIFENFAHPPNISPSACPLPPPPPISPPSPPPAPAPLAPPPDISPFSLFCPPPSPPSIPLPLPPPTFFPLSVSTSGPPTPPLLPPFPTPLPPPPPSIPCPPPPSASFLSTECVCITGVKCTTNLMPAEKIKSSMTQLSTTTVCKTDPQREPKGILRHVKNLAELEKSVANMYSQIEKNYLRTNVSELQTMCPSEVTNMEITSEQNKGSLNNIVEGTEKQSHSQSTSL

SEQ ID NO: 772 - protein, 309 aa, Homo sapiens
MNGTYNTCGSSDLTWPPAIKLGFYAYLGVLLVLGLLLNSLALWVFCCRMQQWTETRIYMTNLAVADLCLLCTLPFVLHSLRDTSDTPLCQLSQGIYLTNRYMSISLVTAIAVDRYVAVRHPLRARGLRSPRQAAAVCAVLWVLVIGSLVARWLLGIQEGGFCFRSTRHNFNSMAFPLLGFYLPLAVVVFCSLKVVTALAQRPPTDVGQAEATRKAARMVWANLLVFVVCFLPLHVGLTVRLAVGWNACALLETIRRALYITSKLSDANCCLDAICYYYMAKEFQEASALAVAPSAKAHKSQDSLCVTLA

SEQ ID NO: 773 - protein, 478 aa, Homo sapiens
MGRKKKKQLKPWCWYCNRDFDDEKILIQHQKAKHFKCHICHKKLYTGPGLAIHCMQVHKETIDAVPNAIPGRTDIELEIYGMEGIPEKDMDERRRLLEQKTQESQKKKQQDDSDEYDDDDSAASTSFQPQPVQPQQGYIPPMAQPGLPPVPGAPGMPPGIPPLMPGVPPLMPGMPPVMPGMPPGMMPMGGMMPPGPGIPPLMPGMPPGMPPPVPRPGIPPMTQAQAVSAPGILNRPPAPTATVPAPQPPVTKPLFPSAGQMGTPVTSSSTASSNSESLSASSKALFPSTAQAQAAVQGPVGTDFKPLNSTPATTTEPPKPTFPAYTQSTASTTSTTNSTAAKPAASITSKPATLTTTSATSKLIHPDEDISLEERRAQLPKYQRNLPRPGQAPIGNPPVGPIGGMMPPQPGIPQQQGMRPPMPPHGQYGGHHQGMPGYLPGAMPPYGQGPPMVPPYQGGPPRPPMGMRPPVMSQGGRY

SEQ ID NO: 774 - protein, 911 aa, Homo sapiens
MEVNCLTLKDLISPRQPRLDFAVEDGENAQKENIFVDRSRMAPKTPIKNEPIDLSKQKKFTPERNPITPVKFVDRQQAEPWTPTANLKMLISAASPDIRDREKKKGLFRPIENKDDAFTDSLQLDVVGDSAVDEFEKQRPSRKQKSLGLLCQKFLARYPSYPLSTEKTTISLDEVAVSLGVERRRIYDIVNVLESLHLVSRVAKNQYGWHGRHSLPKTLRNLQRLGEEQKYEEQMAYLQQKELDLIDYKFGERKKDGDPDSQEQQLLDFSEPDCPSSSANSRKDKSLRIMSQKFVMLFLVSKTKIVTLDVAAKILIEESQDAPDHSKFKTKVRRLYDIANVLTSLALIKKVHVTEERGRKPAFKWIGPVDFSSSDEELVDVSASVLPELKRETYGQIQVCAKQKLARHGSFNTVQASERIQRKVNSEPSSPYREEQGSGGYSLEIGSLAAVYRQKIEDNSQGKAFASKRVVPPSSSLDPVAPFPVLSVDPEYCVNPLAHPVFSVAQTDLQAFSMQNGLNGQVDVSLASAASAVESLKPALLAGQPLVYVPSASLFMLYGSLQEGPASGSGSERDDRSSEAPATVELSSAPSAQKRLCEERKPQEEDEPATKRQSREYEDGPLSLVMPKKPSDSTDLASPKTMGNRASIPLKDIHVNGQLPAAEEISGKATANSLVSSEWGNPSRNTDVEKPSKENESTKEPSLLQYLCVQSPAGLNGFNVLLSGSQTPPTVGPSSGQLPSFSVPCMVLPSPPLGPFPVLYSPAMPGPVSSTLGALPNTGPVNFSLPGLGSIAQLLVGPTAVVNPKSSTLPSADPQLQSQPSLNLSPVMSRSHSVVQQPESPVYVGHPVSVVKLHQSPVPVTPKSIQRTHRETFFKTPGSLGDPVLKRRERNQSRNTSSAQRRLEIPSGGAD

SEQ ID NO: 775 - protein, 668 aa, Homo sapiens
MWLFFGITGLLTAALSGHPSPAPPDQLNTSSAESELWEPGERLPVRLTNGSSSCSGTVEVRLEASWEPACGALWDSRAAEAVCRALGCGGAEAASQLAPPTPELPPPPAAGNTSVAANATLAGAPALLCSGAEWRLCEVVEHACRSDGRRARVTCAENRALRLVDGGGACAGRVEMLEHGEWGSVCDDTWDLEDAHVVCRQLGCGWAVQALPGLHFTPGRGPIHRDQVNCSGAEAYLWDCPGLPGQHYCGHKEDAGAVCSEHQSWRLTGGADRCEGQVEVHFRGVWNTVCDSEWYPSEAKVLCQSLGCGTAVERPKGLPHSLSGRMYYSCNGEELTLSNCSWRFNNSNLCSQSLAARVLCSASRSLHNLSTPEVPASVQTVTIESSVTVKIENKESRELMLLIPSIVLGILLLGSLIFIAFILLRIKGKYALPVMVNHQHLPTTIPAGSNSYQPVPITIPKEVFMLPIQVQAPPPEDSDSGSDSDYEHYDFSAQPPVALTTFYNSQRHRVTDEEVQQSRFQMPPLEEGLEELHASHIPTANPGHCITDPPSLGPQYHPRSNSESSTSSGEDYCNSPKSKLPPWNPQVFSSERSSFLEQPPNLELAGTQPAFSAGPPADDSSSTSSGEWYQNFQPPPQPPSEEQFGCPGSPSPQPDSTDNDDYDDISAA

SEQ ID NO: 776 - protein, 2446 aa, Homo sapiens
MLRGPGPGLLLLAVQCLGTAVPSTGASKSKRQAQQMVQPQSPVAVSQSKPGCYDNGKHYQINQQWERTYLGNALVCTCYGGSRGFNCESKPEAEETCFDKYTGNTYRVGDTYERPKDSMIWDCTCIGAGRGRISCTIANRCHEGGQSYKIGDTWRRPHETGGYMLECVCLGNGKGEWTCKPIAEKCFDHAAGTSYVVGETWEKPYQGWMMVDCTCLGEGSGRITCTSRNRCNDQDTRTSYRIGDTWSKKDNRGNLLQCICTGNGRGEWKCERHTSVQTTSSGSGPFTDVRAAVYQPQPHPQPPPYGHCVTDSGVVYSVGMQWLKTQGNKQMLCTCLGNGVSCQETAVTQTYGGNSNGEPCVLPFTYNGRTFYSCTTEGRQDGHLWCSTTSNYEQDQKYSFCTDHTVLVQTRGGNSNGALCHFPFLYNNHNYTDCTSEGRRDNMKWCGTTQNYDADQKFGFCPMAAHEEICTTNEGVMYRIGDQWDKQHDMGHMMRCTCVGNGRGEWTCIAYSQLRDQCIVDDITYNVNDTFHKRHEEGHMLNCTCFGQGRGRWKCDPVDQCQDSETGTFYQIGDSWEKYVHGVRYQCYCYGRGIGEWHCQPLQTYPSSSGPVEVFITETPSQPNSHPIQWNAPQPSHISKYILRWRPKNSVGRWKEATIPGHLNSYTIKGLKPGVVYEGQLISIQQYGHQEVTRFDFTTTSTSTPVTSNTVTGETTPFSPLVATSESVTEITASSFVVSWVSASDTVSGFRVEYELSEEGDEPQYLDLPSTATSVNIPDLLPGRKYIVNVYQISEDGEQSLILSTSQTTAPDAPPDTTVDQVDDTSIVVRWSRPQAPITGYRIVYSPSVEGSSTELNLPETANSVTLSDLQPGVQYNITIYAVEENQESTPVVIQQETTGTPRSDTVPSPRDLQFVEVTDVKVTIMWTPPESAVTGYRVDVIPVNLPGEHGQRLPISRNTFAEVTGLSPGVTYYFKVFAVSHGRESKPLTAQQTTKLDAPTNLQFVNETDSTVLVRWTPPRAQITGYRLTVGLTRRGQPRQYNVGPSVSKYPLRNLQPASEYTVSLVAIKGNQESPKATGVFTTLQPGSSIPPYNTEVTETTIVITWTPAPRIGFKLGVRPSQGGEAPREVTSDSGSIVVSGLTPGVEYVYTIQVLRDGQERDAPIVNKVVTPLSPPTNLHLEANPDTGVLTVSWERSTTPDITGYRITTTPTNGQQGNSLEEVVHADQSSCTFDNLSPGLEYNVSVYTVKDDKESVPISDTIIPEVPQLTDLSFVDITDSSIGLRWTPLNSSTIIGYRITVVAAGEGIPIFEDFVDSSVGYYTVTGLEPGIDYDISVITLINGGESAPTTLTQQTAVPPPTDLRFTNIGPDTMRVTWAPPPSIDLTNFLVRYSPVKNEEDVAELSISPSDNAVVLTNLLPGTEYVVSVSSVYEQHESTPLRGRQKTGLDSPTGIDFSDITANSFTVHWIAPRATITGYRIRHHPEHFSGRPREDRVPHSRNSITLTNLTPGTEYVVSIVALNGREESPLLIGQQSTVSDVPRDLEVVAATPTSLLISWDAPAVTVRYYRITYGETGGNSPVQEFTVPGSKSTATISGLKPGVDYTITVYAVTGRGDSPASSKPISINYRTEIDKPSQMQVTDVQDNSISVKWLPSSSPVTGYRVTTTPKNGPGPTKTKTAGPDQTEMTIEGLQPTVEYVVSVYAQNPSGESQPLVQTAVTNIDRPKGLAFTDVDVDSIKIAWESPQGQVSRYRVTYSSPEDGIHELFPAPDGEEDTAELQGLRPGSEYTVSVVALHDDMESQPLIGTQSTAIPAPTDLKFTQVTPTSLSAQWTPPNVQLTGYRVRVTPKEKTGPMKEINLAPDSSSVVVSGLMVATKYEVSVYALKDTLTSRPAQGVVTTLENVSPPRRARVTDATETTITISWRTKTETITGFQVDAVPANGQTPIQRTIKPDVRSYTITGLQPGTDYKIYLYTLNDNARSSPVVIDASTAIDAPSNLRFLATTPNSLLVSWQPPRARITGYIIKYEKPGSPPREVVPRPRPGVTEATITGLEPGTEYTIYVIALKNNQKSEPLIGRKKTDELPQLVTLPHPNLHGPEILDVPSTVQKTPFVTHPGYDTGNGIQLPGTSGQQPSVGQQMIFEEHGFRRTTPPTTATPIRHRPRPYPPNVGQEALSQTTISWAPFQDTSEYIISCHPVGTDEEPLQFRVPGTSTSATLTGLTRGATYNVIVEALKDQQRHKVREEVVTVGNSVNEGLNQPTDDSCFDPYTVSHYAVGDEWERMSESGFKLLCQCLGFGSGHFRCDSSRWCHDNGVNYKIGEKWDRQGENGQMMSCTCLGNGKGEFKCDPHEATCYDDGKTYHVGEQWQKEYLGAICSCTCFGGQRGWRCDNCRRPGGEPSPEGTTGQSYNQYSQRYHQRTNTNVNCPIECFMPLDVQADREDSRE

SEQ ID NO: 777 - protein, 4684 aa, Homo sapiens
MVAGMLMPRDQLRAIYEVLFREGVMVAKKDRRPRSLHPHVPGVTNLQVMRAMASLRARGLVRETFAWCHFYWYLTNEGIAHLRQYLHLPPEIVPASLQRVRRPVAMVMPARRTPHVQAVQGPLGSPPKRGPLPTEEQRVYRRKELEEVSPETPVVPATTQRTLARPGPEPAPATDERDRVQKKTFTKWVNKHLIKAQRHISDLYEDLRDGHNLISLLEVLSGDSLPREKGRMRFHKLQNVQIALDYLRHRQVKLVNIRNDDIADGNPKLTLGLIWTIILHFQISDIQVSGQSEDMTAKEKLLLWSQRMVEGYQGLRCDNFTSSWRDGRLFNAIIHRHKPLLIDMNKVYRQTNLENLDQAFSVAERDLGVTRLLDPEDVDVPQPDEKSIITYVSSLYDAMPRVPDVQDGVRANELQLRWQEYRELVLLLLQWMRHHTAAFEERRFPSSFEEIEILWSQFLKFKEMELPAKEADKNRSKGIYQSLEGAVQAGQLKVPPGYHPLDVEKEWGKLHVAILEREKQLRSEFERLECLQRIVTKLQMEAGLCEEQLNQADALLQSDVRLLAAGKVPQRAGEVERDLDKADSMIRLLFNDVQTLKDGRHPQGEQMYRRVYRLHERLVAIRTEYNLRLKAGVAAPATQVAQVTLQSVQRRPELEDSTLRYLQDLLAWVEENQHRVDGAEWGVDLPSVEAQLGSHRGLHQSIEEFRAKIERARSDEGQLSPATRGAYRDCLGRLDLQYAKLLNSSKARLRSLESLHSFVAAATKELMWLNEKEEEEVGFDWSDRNTNMTAKKESYSALMRELELKEKKIKELQNAGDRLLREDHPARPTVESFQAALQTQWSWMLQLCCCIEAHLKENAAYFQFFSDVREAEGQLQKLQEALRRKYSCDRSATVTRLEDLLQDAQDEKEQLNEYKGHLSGLAKRAKAVVQLKPRHPAHPMRGRLPLLAVCDYKQVEVTVHKGDECQLVGPAQPSHWKVLSSSGSEAAVPSVCFLVPPPNQEAQEAVTRLEAQHQALVTLWHQLHVDMKSLLAWQSLRRDVQLIRSWSLATFRTLKPEEQRQALHSLELHYQAFLRDSQDAGGFGPEDRLMAEREYGSCSHHYQQLLQSLEQGAQEESRCQRCISELKDIRLQLEACETRTVHRLRLPLDKEPARECAQRIAEQQKAQAEVEGLGKGVARLSAEAEKVLALPEPSPAAPTLRSELELTLGKLEQVRSLSAIYLEKLKTISLVIRGTQGAEEVLRAHEEQLKEAQAVPATLPELEATKASLKKLRAQAEAQQPTFDALRDELRGAQEVGERLQQRHGERDVEVERWRERVAQLLERWQAVLAQTDVRQRELEQLGRQLRYYRESADPLGAWLQDARRRQEQIQAMPLADSQAVREQLRQEQALLEEIERHGEKVEECQRFAKQYINAIKDYELQLVTYKAQLEPVASPAKKPKVQSGSESVIQEYVDLRTHYSELTTLTSQYIKFISETLRRMEEEERLAEQQRAEERERLAEVEAALEKQRQLAEAHAQAKAQAEREAKELQQRMQEEVVRREEAAVDAQQQKRSIQEELQQLRQSSEAEIQAKARQAEAAERSRLRIEEEIRVVRLQLEATERQRGGAEGELQALRARAEEAEAQKRQAQEEAERLRRQVQDESQRKRQAEVELASRVKAEAEAAREKQRALQALEELRLQAEEAERRLRQAEVERARQVQVALETAQRSAEAELQSKRASFAEKTAQLERSLQEEHVAVAQLREEAERRAQQQAEAERAREEAERELERWQLKANEALRLRLQAEEVAQQKSLAQAEAEKQKEEAEREARRRGKAEEQAVRQRELAEQELEKQRQLAEGTAQQRLAAEQELIRLRAETEQGEQQRQLLEEELARLQREAAAATQKRQELEAELAKVRAEMEVLLASKARAEEESRSTSEKSKQRLEAEAGRFRELAEEAARLRALAEEAKRQRQLAEEDAARQRAEAERVLAEKLAAIGEATRLKTEAEIALKEKEAENERLRRLAEDEAFQRRRLEEQAAQHKADIEERLAQLRKASDSELERQKGLVEDTLRQRRQVEEEILALKASFEKAAAGKAELELELGRIRSNAEDTLRSKEQAELEAARQRQLAAEEERRRREAEERVQKSLAAEEEAARQRKAALEEVERLKAKVEEARRLRERAEQESARQLQLAQEAAQKRLQAEEKAHAFAVQQKEQELQQTLQQEQSVLDQLRGEAEAARRAAEEAEEARVQAEREAAQSRRQVEEAERLKQSAEEQAQARAQAQAAAEKLRKEAEQEAARRAQAEQAALRQKQAADAEMEKHKKFAEQTLRQKAQVEQELTTLRLQLEETDHQKNLLDEELQRLKAEATEAARQRSQVEEELFSVRVQMEELSKLKARIEAENRALILRDKDNTQRFLQEEAEKMKQVAEEAARLSVAAQEAARLRQLAEEDLAQQRALAEKMLKEKMQAVQEATRLKAEAELLQQQKELAQEQARRLQEDKEQMAQQLAEETQGFQRTLEAERQRQLEMSAEAERLKLRVAEMSRAQARAEEDAQRFRKQAEEIGEKLHRTELATQEKVTLVQTLEIQRQQSDHDAERLREAIAELEREKEKLQQEAKLLQLKSEEMQTVQQEQLLQETQALQQSFLSEKDSLLQRERFIEQEKAKLEQLFQDEVAKAQQLREEQQRQQQQMEQERQRLVASMEEARRRQHEAEEGVRRKQEELQQLEQQRRQQEELLAEENQRLREQLQLLEEQHRAALAHSEEVTASQVAATKTLPNGRDALDGPAAEAEPEHSFDGLRRKVSAQRLQEAGILSAEELQRLAQGHTTVDELARREDVRHYLQGRSSIAGLLLKATNEKLSVYAALQRQLLSPGTALILLEAQAASGFLLDPVRNRRLTVNEAVKEGVVGPELHHKLLSAERAVTGYKDPYTGQQISLFQAMQKGLIVREHGIRLLEAQIATGGVIDPVHSHRVPVDVAYRRGYFDEEMNRVLADPSDDTKGFFDPNTHENLTYLQLLERCVEDPETGLCLLPLTDKAAKGGELVYTDSEARDVFEKATVSAPFGKFQGKTVTIWEIINSEYFTAEQRRDLLRQFRTGRITVEKIIKIIITVVEEQEQKGRLCFEGLRSLVPAAELLESRVIDRELYQQLQRGERSVRDVAEVDTVRRALRGANVIAGVWLEEAGQKLSIYNALKKDLLPSDMAVALLEAQAGTGHIIDPATSARLTVDEAVRAGLVGPEFHEKLLSAEKAVTGYRDPYTGQSVSLFQALKKGLIPREQGLRLLDAQLSTGGIVDPSKSHRVPLDVACARGCLDEETSRALSAPRADAKAYSDPSTGEPATYGELQQRCRPDQLTGLSLLPLSEKAARARQEELYSELQARETFEKTPVEVPVGGFKGRTVTVWELISSEYFTAEQRQELLRQFRTGKVTVEKVIKILITIVEEVETLRQERLSFSGLRAPVPASELLASGVLSRAQFEQLKDGKTTVKDLSELGSVRTLLQGSGCLAGIYLEDTKEKVSIYEAMRRGLLRATTAALLLEAQAATGFLVDPVRNQRLYVHEAVKAGVVGPELHEQLLSAEKAVTGYRDPYSGSTISLFQAMQKGLVLRQHGIRLLEAQIATGGIIDPVHSHRVPVDVAYQRGYFSEEMNRVLADPSDDTKGFFDPNTHENLTYRQLLERCVEDPETGLRLLPLKGAEKAEVVETTQVYTEEETRRAFEETQIDIPGGGSHGGSTMSLWEVMQSDLIPEEQRAQLMADFQAGRVTKERMIIIIIEIIEKTEIIRQQGLASYDYVRRRLTAEDLFEARIISLETYNLLREGTRSLREALEAESAWCYLYGTGSVAGVYLPGSRQTLSIYQALKKGLLSAEVARLLLEAQAATGFLLDPVKGERLTVDEAVRKGLVGPELHDRLLSAERAVTGYRDPYTEQTISLFQAMKKELIPTEEALRLLDAQLATGGIVDPRLGFHLPLEVAYQRGYLNKDTHDQLSEPSEVRSYVDPSTDERLSYTQLLRRCRRDDGTGQLLLPLSDARKLTFRGLRKQITMEELVRSQVMDEATALQLREGLTSIEEVTKNLQKFLEGTSCIAGVFVDATKERLSVYQAMKKGIIRPGTAFELLEAQAATGYVIDPIKGLKLTVEEAVRMGIVGPEFKDKLLSAERAVTGYKDPYSGKLISLFQAMKKGLILKDHGIRLLEAQIATGGIIDPEESHRLPVEVAYKRGLFDEEMNEILTDPSDDTKGFFDPNTEENLTYLQLMERCITDPQTGLCLLPLKEKKRERKTSSKSSVRKRRVVIVDPETGKEMSVYEAYRKGLIDHQTYLELSEQECEWEEITISSSDGVVKSMIIDRRSGRQYDIDDAIAKNLIDRSALDQYRAGTLSITEFADMLSGNAGGFRSRSSSVGSSSSYPISPAVSRTQLASWSDPTEETGPVAGILDTETLEKVSITEAMHRNLVDNITGQRLLEAQACTGGIIDPSTGERFPVTDAVNKGLVDKIMVDRINLAQKAFCGFEDPRTKTKMSAAQALKKGWLYYEAGQRFLEVQYLTGGLIEPDTPGRVPLDEALQRGTVDARTAQKLRDVGAYSKYLTCPKTKLKISYKDALDRSMVEEGTGLRLLEAAAQSTKGYYSPYSVSGSGSTAGSRTGSRTGSRAGSRRGSFDATGSGFSMTFSSSSYSSSGYGRRYASGSSASLGGPESAVA

SEQ ID NO: 778 - protein, 882 aa, Homo sapiens
MAADKGPAAGPRSRAAMAQWRKKKGLRKRRGAASQARGSDSEDGEFEIQAEDDARARKLGPGRPLPTFPTSECTSDVEPDTREMVRAQNKKKKKSGGFQSMGLSYPVFKGIMKKGYKVPTPIQRKTIPVILDGKDVVAMARTGSGKTACFLLPMFERLKTHSAQTGARALILSPTRELALQTLKFTKELGKFTGLKTALILGGDRMEDQFAALHENPDIIIATPGRLVHVAVEMSLKLQSVEYVVFDEADRLFEMGFAEQLQEIIARLPGGHQTVLFSATLPKLLVEFARAGLTEPVLIRLDVDTKLNEQLKTSFFLVREDTKAAVLLHLLHNVVRPQDQTVVFVATKHHAEYLTELLTTQRVSCAHIYSALDPTARKINLAKFTLGKCSTLIVTDLAARGLDIPLLDNVINYSFPAKGKLFLHRVGRVARAGRSGTAYSLVAPDEIPYLLDLHLFLGRSLTLARPLKEPSGVAGVDGMLGRVPQSVVDEEDSGLQSTLEASLELRGLARVADNAQQQYVRSRPAPSPESIKRAKEMDLVGLGLHPLFSSRFEEEELQRLRLVDSIKNYRSRATIFEINASSRDLCSQVMRAKRQKDRKAIARFQQGQQGRQEQQEGPVGPAPSRPALQEKQPEKEEEEEAGESVEDIFSEVVGRKRQRSGPNRGAKRRREEARQRDQEFYIPYRPKDFDSERGLSISGEGGAFEQQAAGAVLDLMGDEAQNLTRGRQQLKWDRKKKRFVGQSGQEDKKKIKTESGRYISSSYKRDLYQKWKQKQKIDDRDSDEEGASDRRGPERRGGKRDRGQAGASRPHAPGTPAGRVRPELKTKQQILKQRRRAQKLHFLQRGGLKQLSARNRRRVQELQQGAFGRGARSKKGKMRKRM

SEQ ID NO: 779 - protein, 340 aa, Homo sapiens
METVISSDSSPAVENEHPQETPESNNSVYTSFMKSHRCYDLIPTSSKLVVFDTSLQVKKAFFALVTNGVRAAPLWDSKKQSFVVLRALSCPLGMLTITDFINILHRYYKSALVQIYELEEHKIETWREVYLQDSFKPLVCISPNASLFDAVSSLIRNKIHRLPVIDPESGNTLYILTHKRILKFLKLFITEFPKPEFMSKSLEELQIGTYANIAMVRTTTPVYVALGIFVQHRVSALPVVDEKGRVVDIYSKFDVINLAAEKTYNNLDVSVTKALQHRSHYFEGVLKCYLHETLETIINRLVEAEVHRLVVVDENDVVKGIVSLSDILQALVLTGGEKKP

SEQ ID NO: 780 - protein, 317 aa, Homo sapiens
MPGEQQAEEEEEEEMQEEMVLLVKGEEDEGEEKYEVVKLKIPMDNKEVPGEAPAPSADPARPHACPDCGRAFARRSTLAKHARTHTGERPFGCTECGRRFSQKSALTKHGRTHTGERPYECPECDKRFSAASNLRQHRRRHTGEKPYACAHCGRRFAQSSNYAQHLRVHTGEKPYACPDCGRAFGGSSCLARHRRTHTGERPYACADCGTRFAQSSALAKHRRVHTGEKPHRCAVCGRRFGHRSNLAEHARTHTGERPYPCAECGRRFRLSSHFIRHRRAHMRRRLYICAGCGRDFKLPPGATAATATERCPECEGS

SEQ ID NO: 781 - protein, 744 aa, Homo sapiens
MGLGLLLPLLLLWTRGTQGSELDPKGQHVCVASSPSAELQCCAGWRQKDQECTIPICEGPDACQKDEVCVKPGLCRCKPGFFGAHCSSRCPGQYWGPDCRESCPCHPHGQCEPATGACQCQADRWGARCEFPCACGPHGRCDPATGVCHCEPGWWSSTCRRPCQCNTAAARCEQATGACVCKPGWWGRRCSFRCNCHGSPCEQDSGRCACRPGWWGPECQQQCECVRGRCSAASGECTCPPGFRGARCELPCPAGSHGVQCAHSCGRCKHNEPCSPDTGSCESCEPGWNGTQCQQPCLPGTFGESCEQQCPHCRHGEACEPDTGHCQPGSGSRDTALIAGSLVPLLLLFLGLACCACCCWAPRSDLKDRPARDGATVSRMKLQVWGTLTSLGSTLPCRSLSSHKLPWVTVSHHDPEVPFNHSFIEPPSAGWATDDSFSSDPESGEADEVPAYCVPPQEGMVPVAQAGSSEASLAAGAFPPPEDASTPFAIPRTSSLARAKRPSVSFAEGTKFAPQSRRSSGELSSPLRKPKRLSRGAQSGPEGREAEESTGPEEAEAPESFPAAASPGDSATGHRRPPLGGRTVAEHVEAIEGSVQESSGPVTTIYMLAGKPRGSEGPVRSVFRHFGSFQKGQAEAKVKRAIPKPPRQALNRKKGSPGLASGSVGQSPNSAPKAGLPGATGPMAVRPEEAVRGLGAGTESSRRAQEPVSGCGSPEQDPQKQAEEERQEEPEYENVVPISRPPEP

SEQ ID NO: 782 - protein, 630 aa, Homo sapiens
MGLPRGPEGQGLPEVETREDEEQNVKLTEILELLVAAGYFRARIKGLSPFDKVVGGMTWCITTCNFDVDVDLLFQENSTIGQKIALSEKIVSVLPRMKCPHQLEPHQIQGMDFIHIFPVVQWLVKRAIETKEEMGDYIRSYSVSQFQKTYSLPEDDDFIKRKEKAIKTVVDLSEVYKPRRKYKRHQGAEELLDEESRIHATLLEYGRYGFSRQSKMEKAEDKKTALPAGLSATEKADAHEEDELRAAEEQRIQSLMTKMTAMANEESRLTASSVGQIVGLCSAEIKQIVSEYAEKQSELSAEESPEKLGTSQLHRRKVISLNKQIAQKTKHLEELRASHTSLQARYNEAKKTLTELKTYSEKLDKEQAALEKIESKADPSILQNLRALVAMNENLKSQEQEFKAHCREEMTRLQQEIENLKAERAPRGDEKTLSSGEPPGTLTSAMTHDEDLDRRYNMEKEKLYKIRLLQARRNREIAILHRKIDEVPSRAELIQYQKRFIELYRQISAVHKETKQFFTLYNTLDDKKVYLEKEISLLNSIHENFSQAMASPAARDQFLRQMEQIVEGIKQSRMKMEKKKQENKMRRDQLNDQYLELLEKQRLYFKTVKEFKEEGRKNEMLLSKVKAKAS

SEQ ID NO: 783 - protein, 142 aa, Homo sapiens
MGAPTLPPAWQPFLKDHRISTFKNWPFLEGCACTPERMAEAGFIHCPTENEPDLAQCFFCFKELEGWEPDDDPIEEHKKHSSGCAFLSVKKQFEELTLGEFLKLDRERAKNKIAKETNNKKKEFEETAEKVRRAIEQLAAMD

SEQ ID NO: 784 - protein, 413 aa, Homo sapiens
MLEMLEYNHYQVQTHLENPTKYHIQQAQRQQVKQYLSTTLANKHANQVLSLPCPNQPGDHVMPPVPGSSAPNSPMAMLTLNSNCEKEGFYKFEEQNRAESECPGMNTHSRASCMQMDDVIDDIISLESSYNEEILGLMDPALQMANTLPVSGNLIDLYGNQGLPPPGLTISNSCPANLPNIKRELTESEARALAKERQKKDNHNLIERRRRFNINDRIKELGTLIPKSNDPDMRWNKGTILKASVDYIRKLQREQQRAKELENRQKKLEHANRHLLLRIQELEMQARAHGLSLIPSTGLCSPDLVNRIIKQEPVLENCSQDLLQHHADLTCTTTLDLTDGTITFNNNLGTGTEANQAYSVPTKMGSKLEDILMDDTLSPVGVTDPLLSSVSPGASKTSSRRSSMSMEETEHTC

SEQ ID NO: 785 - protein, 1091 aa, Homo sapiens
SLLGDDVFSTMAGLEEADAEVSGISEADPQALLQAMKDLDGMDADILGLKKSNSAPSKKAAKDPGKGELPNHPKPAGGAIPTKKSLPSPSSSGHQNRRFSSEDLEDPLRGLLSYDEGGITKQPPVTQSKTASDKSPSTVRDQGPSIPLTPGDTPIRKKEELLFDDGDDIMATLGFGDSPKAEKRQIGDQEGPRPARSTLDELLGRGMATKLLARPGTGEHREFKLDKKYQRPQDSEDMWGDEDFTFGAYQPTVVSSEGRQSRRQSVRFFADSGADPKGEPGSKQSPPMASSPIQPRKGGADWLGLKDEDLDLFPASPTREAHRESSVPVTPSVPPPASQHSTPAGLPPSRAKPPTEGAGSPAKASQASKLRASKEEKEDWLSHALSRKKSQGLAREQHAGTSEGLHLAGTAGHPPSGSQPLTSTQGLEHAAAGGSSGTTARERPCVRPGVSGSPVTQNHAASALPTGSPKRGTAPGDLSATEPATCFPSTQKPTEPSVPVQPLLPESLARSLLPSTEYQKQLLAAQVQLQCSPAELQAELLHSQARLAELEAQVRKLELERAQHELLLGSLQQQHQADLELIESAHRSRIKVLETSYQQREERLRRENEELSARYLSQCQEAEQARAELTAQHQRRLAAIAQEKDQEMERLRELQRASILDMRRDHEEQLQRLKLLKDREVDAATSATSHTRSLNSIIHQMEKFSSSLHELSSRVEASHLTTSQERELGIRQRDEQLRALQERLGQQQRDMEEERSRQQEVIGKMEARLNEQSRLLEQERWRVTAEQSKAESMQRALEEQRKVTAQQMAMERAELERAKSALLEEQKSVMLKCGEERRRLAAEWAEFSAQQKLSKERAEREAERALQVDTQREGTLISLAKEQAELKIRASELRAEEKQLAAERAALEQERQELRLEKERINATALRVKLRAEEVESMSKVASEKYEEGERALREAQQVQAEQQARLQAVQQQQERLRKQEQHMHQEHLSLAQQRLQLDRARQDLPSSLVGLFPRAQGPAASSQSALMPPAPTTRWCSQPPTGLDPSPLHLHARLALLRHMAEQDRDFLENEQFFLETLKKGSYNLTSHSA

SEQ ID NO: 786 - protein, 384 aa, Homo sapiens
MAGAEWKSLEECLEKHLPLPDLQEVKRVLYGKELRKLDLPREAFEAASREDFELQGYAFEAAEEQLRRPRIVHVGLVQNRIPLPANAPVAEQVSALHRRIKAIVEVAAMCGVNIICFQEAWTMPFAFCTREKLPWTEFAESAEDGPTTRFCQKLAKNHDMVVVSPILERDSEHGDVLWNTAVVISNSGAVLGKTRKNHIPRVGDFNESTYYMEGNLGHPVFQTQFGRIAVNICYGRHHPLNWLMYSINGAEIIFNPSATIGALSESLWPIEARNAAIANHCFTCAINRVGTEHFPNEFTSGDGKKAHQDFGYFYGSSYVAAPDSSRTPGLSRSRDGLLVAKLDLNLCQQVNDVWNFKMTGRYEMYARELAEAVKSNYSPTIVKE

SEQ ID NO: 787 - protein, 1063 aa, Homo sapiens
MECPSCQHVSKEETPKFCSQCGERLPPAAPIADSENNNSTMASASEGEMECGQELKEEGGPCLFPGSDSWQENPEEPCSKASWTVQESKKKKRKKKKKGNKSASSELASLPLSPASPCHLTLLSNPWPQDTALPHSQAQQSGPTGQPSQPPGTATTPLEGDGLSAPTEVGDSPLQAQALGEAGVATGSEAQSSPQFQDHTEGEDQDASIPSGGRGLSQEGTGPPTSAGEGHSRTEDAAQELLLPESKGGSSEPGTELQTTEQQAGASASMAVDAVAEPANAVKGAGKEMKEKTQRMKQPPATTPPFKTHCQEAETKTKDEMAAAEEKVGKNEQGEPEDLKKPEGKNRSAAAVKNEKEQKNQEADVQEVKASTLSPGGGVTVFFHAIISLHFPFNPDLHKVFIRGGEEFGESKWDSNICELHYTRDLGHDRVLVEGIVCISKKHLDKYIPYKYVIYNGESFEYEFIYKHQQKKGEYVNRCLFIKSSLLGSGDWHQYYDIVYMKPHGRLQKVMNHITDGPRKDLVKGKQIAAALMLDSTFSILQTWDTINLNSFFTQFEQFCFVLQQPMIYEGQAQLWTDLQYREKEVKRYLWQHLKKHVVPLPDGKSTDFLPVDCPVRSKLKTGLIVLFVVEKIELLLEGSLDWLCHLLTSDASSPDEFHRDLSHILGIPQSWRLYLVNLCQRCMDTRTYTWLGALPVLHCCMELAPRHKDAWRQPEDTWAALEGLSFSPFREQMLDTSSLLQFMREKQHLLSIDEPLFRSWFSLLPLSHLVMYMENFIEHLGRFPAHILDCLSGIYYRLPGLEQVLNTQDVQDVQNVQNILEMLLRLLDTYRDKIPEEALSPSYLTVCLKLHEAICSSTKLLKFYELPALSAEIVCRMIRLLSLVDSAGQRDETGNNSVQTVFQGTLAATKRWLREVFTKNMLTSSGASFTYVKEIEVWRRLVEIQFPAEHGWKESLLGDMEWRLTKEEPLSQITAYCNSCWDTKGLEDSVAKTFEKCIIEAVSSACQVNNLSSWETDSGSQLCSAMTQLRAMKHPLGLSSSANSEIGKWAPSSLAKGNGAEI

SEQ ID NO: 788 - protein, 572 aa, Homo sapiens
MAAPRPSPAISVSVSAPAFYAPQKKFGPVVAPKPKVNPFRPGDSEPPPAPGAQRAQMGRVGEIPPPPPEDFPLPPPPLAGDGDDAEGALGGAFPPPPPPIEESFPPAPLEEEIFPSPPPPPEEEGGPEAPIPPPPQPREKVSSIDLEIDSLSSLLDDMTKNDPFKARVSSGYVPPPVATPFSSKSSTKPAAGGTAPLPPWKSPSSSQPLPQVPAPAQSQTQFHVQPQPQPKPQVQLHVQSQTQPVSLANTQPRGPPASSPAPAPKFSPVTPKFTPVASKFSPGAPGGSGSQPNQKLGHPEALSAGTGSPQPPSFTYAQQREKPRVQEKQHPVPPPAQNQNQVRSPGAPGPLTLKEVEELEQLTQQLMQDMEHPQRQNVAVNELCGRCHQPLARAQPAVRALGQLFHIACFTCHQCAQQLQGQQFYSLEGAPYCEGCYTDTLEKCNTCGEPITDRMLRATGKAYHPHCFTCVVCARPLEGTSFIVDQANRPHCVPDYHKQYAPRCSVCSEPIMPEPGRDETVRVVALDKNFHMKCYKCEDCGKPLSIEADDNGCFPLDGHVLCRKCHTARAQT

SEQ ID NO: 789 - protein, 504 aa, Homo sapiens
MEALRVQMFMPCSFESLYLSSAEHPGASKPPISSSSMTSRILLRQQLMREQMQEQERREQQQKLQAAQFMQQRVPVSQTPAINVSVPTTLPSATQVPMEVLKVQTHLENPTKYHIQQAQRQQVKQYLSTTLANKHANQVLSLPCPNQPGDHVMPPVPGSSAPNSPMAMLTLNSNCEKEGFYKFEEQNRAESECPGMNTHSRASCMQMDDVIDDIISLESSYNEEILGLMDPALQMANTLPVSGNLIDLYGNQGLPPPGLTISNSCPANLPNIKRELTESEARALAKERQKKDNHNLIERRRRFNINDRIKELGTLIPKSNDPDMRWNKGTILKASVDYIRKLQREQQRAKELENRQKKLEHANRHLLLRIQELEMQARAHGLSLIPSTGLCSPDLVNRIIKQEPVLENCSQDLLQHHADLTCTTTLDLTDGTITFNNNLGTGTEANQAYSVPTKMGSKLEDILMDDTLSPVGVTDPLLSSVSPGASKTSSRRSSMSMEETEHTC

SEQ ID NO: 790 - protein, 2146 aa, Homo sapiens
MYPNWGRYGGSSHYPPPPVPPPPPVALPEASPGPGYSSSTTPAAPSSSGFMSFREQHLAQLQQLQQMHQKQMQCVLQPHHLPPPPLPPPPVMPGGGYGDWQPPPPPMPPPPGPALSYQKQQQYKHQMLHHQRDGPPGLVPMELESPPESPPVPPGSYMPPSQSYMPPPQPPPSYYPPTSSQPYLPPAQPSPSQSPPSQSYLAPTPSYSSSSSSSQSYLSHSQSYLPSSQASPSRPSQGHSKSQLLAPPPPSAPPGNKTTVQQEPLESGAKNKSTEQQQAAPEPDPSTMTPQEQQQYWYRQHLLSLQQRTKVHLPGHKKGPVVAKDTPEPVKEEVTVPATSQVPESPSSEEPPLPPPNEEVPPPLPPEEPQSEDPEEDARLKQLQAAAAHWQQHQQHRVGFQYQGIMQKHTQLQQILQQYQQIIQPPPHIQTMSVDMQLRHYEMQQQQFQHLYQEWEREFQLWEEQLHSYPHKDQLQEYEKQWKTWQGHMKATQSYLQEKVNSFQNMKNQYMGNMSMPPPFVPYSQMPPPLPTMPPPVLPPSLPPPVMPPALPATVPPPGMPPPVMPPSLPTSVPPPGMPPSLSSAGPPPVLPPPSLSSAGPPPVLPPPSLSSTAPPPVMPLPPLSSATPPPGIPPPGVPQGIPPQLTAAPVPPASSSQSSQVPEKPRPALLPTPVSFGSAPPTTYHPPLQSAGPSEQVNSKAPLSKSALPYSSFSSDQGLGESSAAPSQPITAVKDMPVRSGGLLPDPPRSSYLESPRGPRFDGPRRFEDLGSRCEGPRPKGPRFEGNRPDGPRPRYEGHPAEGTKSKWGMIPRGPASQFYITPSTSLSPRQSGPQWKGPKPAFGQQHQQQPKSQAEPLSGNKEPLADTSSNQQKNFKMQSAAFSIAADVKDVKAAQSNENLSDSQQEPPKSEVSEGPVEPSNWDQNVQSMETQIDKAQAVTQPVPLANKPVPAQSTFPSKTGGMEGGTAVATSSLTADNDFKPVGIGLPHSENNQDKGLPRPDNRDNRLEGNRGNSSSYRGPGQSRMEDTRDKGLVNRGRGQAISRGPGLVKQEDFRDKMMGRREDSREKMNRGEGSRDRGLVRPGSSREKVPGGLQGSQDRGAAGSRERGPPRRAGSQERGPLRRAGSRERIPPRRAGSRERGPPRGPGSRERGLGRSDFGRDRGPFRPEPGDGGEKMYPYHRDEPPRAPWNHGEERGHEEFPLDGRNAPMERERLDDWDRERYWRECERDYQDDTLELYNREDRFSAPPSRSHDGDRRGPWWDDWERDQDMDEDYNREMERDMDRDVDRISRPMDMYDRSLDNEWDRDYGRPLDEQESQFRERDIPSLPPLPPLPPLPPLDRYRDDRWREERNREHGYDRDFRDRGELRIREYPERGDTWREKRDYVPDRMDWERERLSDRWYPSDVDRHSPMAEHMPSSHHSSEMMGSDASLDSDQGLGGVMVLSQRQHEIILKAAQELKMLREQKEQLQKMKDFGSEPQMADHLPPQESRLQNTSSRPGMYPPPGSYRPPPPMGKPPGSIVRPSAPPARSSVPVTRPPVPIPPPPPPPPLPPPPPVIKPQTSAVEQERWDEDSFYGLWDTNDEQGLNSEFKSETAAIPSAPVLPPPPVHSSIPPPGPVPMGMPPMSKPPPVQQTVDYGHGRDISTNKVEQIPYGERITLRPDPLPERSTFETEHAGQRDRYDRERDREPYFDRQSNVIADHRDFKRDRETHRDRDRDRGVIDYDRDRFDRERRPRDDRAQSYRDKKDHSSSRRGGFDRPSYDRKSDRPVYEGPSMFGGERRTYPEERMPLPAPSLSHQPPPAPRVEKKPESKNVDDILKPPGRESRPERIVVIMRGLPGSGKTHVAKLIRDKEVEFGGPAPRVLSLDDYFITEVEKEEKDPDSGKKVKKKVMEYEYEAEMEETYRTSMFKTFKKTLDDGFFPFIILDAINDRVRHFDQFWSAAKTKGFEVYLAEMSADNQTCGKRNIHGRKLKEINKMADHWETAPRHMMRLDIRSLLQDAAIEEVEMEDFDANIEEQKEEKKDAEEEESELGYIPKSKWEMDTSEAKLDKLDGLRTGTKRKRDWEAIASRMEDYLQLPDDYDTRASEPGKKRVRWADLEEKKDADRKRAIGFVVGQTDWEKITDESGHLAEKALNRTKYI

SEQ ID NO: 791 - protein, 320 aa, Homo sapiens
MEMRNTTPDFILLGLFNHTRAHQVLFMMLLATVLTSLFSNALMILLIHWDHRLHRPMYFLLSQLSLMDMMLVSTTVPKMAADYLTGNKAISRAGCGVQIFFLPTLGGGECFLLAAMAYDRYAAVCHPLRYPTLMSWQLCLRMTMSSWLLGAADGLLQAVATLSFPYCGAHEIDHFFCEAPVLVRLACADTSVFENAMYICCVLMLLVPFSLILSSYGLILAAVLLMRSTEARKKAFATCSSHVAVVGLFYGAGIFTYMRPKSHRSTNHDKVVSAFYTMFTPLLNPLIYSVRNSEVKEALKRWLGTCVNLKHQQNEAHRSR

SEQ ID NO: 792 - protein, 491 aa, Homo sapiens
MELSVLLFLALLTGLLLLLVQRHPNTHDRLPPGPRPLPLLGNLLQMDRRGLLKSFLRFREKYGDVFTVHLGPRPVVMLCGVEAIREALVDKAEAFSGRGKIAMVDPFFRGYGVIFANGNRWKVLRRFSVTTMRDFGMGKRSVEERIQEEAQCLIEELRKSKGALMDPTFLFQSITANIICSIVFGKRFHYQDQEFLKMLNLFYQTFSLISSVFGQLFELFSGFLKYFPGAHRQVYKNLQEINAYIGHSVEKHRETLDPSAPKDLIDTYLLHMEKEKSNAHSEFSHQNLNLNTLSLFFAGTETTSTTLRYGFLLMLKYPHVAERVYREIEQVIGPHRPPELHDRAKMPYTEAVIYEIQRFSDLLPMGVPHIVTQHTSFRGYIIPKDTEVFLILSTALHDPHYFEKPDAFNPDHFLDANGALKKTEAFIPFSLGKRICLGEGIARAELFLFFTTILQNFSMASPVAPEDIDLTPQECGVGKIPPTYQIRFLPR

SEQ ID NO: 793 - protein, 1167 aa, Homo sapiens
MAGAQPGVHALQLEPPTVVETLRRGSKFIKWDEEKLMTVVSGPDPVNTVFLNFMAVQDDTAKVWSEELFKLAMNILAQNASRNTFLRKAYTKLKLQVNQDGRIPVKNILKMFSADKKRVETALESCGLKFNRSESIRPDEFSLEIFERFLNKLCLRPDIDKILLEIGAKGKPYLTLEQLMDFINQKQRDPRLNEVLYPPLRPSQARLLIEKYEPNQQFLERDQMSMEGFSRYLGGEENGILPLEALDLSTDMTQPLSAYFINSSHNTYLTAGQLAGTSSVEMYRQALLWGCRCVELDVWKGRPPEEEPFITHGFTMTTEVPLRDVLEAIAETAFKTSPYPVILSFENHVDSAKQQAKMAEYCRSIFGDALLIEPLDKYPLAPGVPLPSPQDLMGRILVKNKKRHRPSAGGPDSAGRKRPLEQSNSALSESSAATEPSSPQLGSPSSDSCPGLSNGEEVGLEKPSLEPQKSLGDEGLNRGPYVLGPADREDEEEDEEEEEQTDPKKPTTDEGTASSEVNATEEMSTLVNYIEPVKFKSFEAARKRNKCFEMSSFVETKAMEQLTKSPMEFVEYNKQQLSRIYPKGTRVDSSNYMPQLFWNVGCQLVALNFQTLDVAMQLNAGVFEYNGRSGYLLKPEFMRRPDKSFDPFTEVIVDGIVANALRVKVISGQFLSDRKVGIYVEVDMFGLPVDTRRKYRTRTSQGNSFNPVWDEEPFDFPKVVLPTLASLRIAAFEEGGKFVGHRILPVSAIRSGYHYVCLRNEANQPLCLPALLIYTEASDYIPDDHQDYAEALINPIKHVSLMDQRARQLAALIGESEAQAGQETCQDTQSQQLGSQPSSNPTPSPLDASPRRPPGPTTSPASTSLSSPGQRDDLIASILSEVAPTPLDELRGHKALVKLRSRQERDLRELRKKHQRKAVTLTRRLLDGLAQAQAEGRCRLRPGALGGAADVEDTKEGEDEAKRYQEFQNRQVQSLLELREAQVDAEAQRRLEHLRQALQRLREVVLDANTTQFKRLKEMNEREKKELQKILDRKRHNSISEAKMRDKHKKEAELTEINRRHITESVNSIRRLEEAQKQRHDRLVAGQQQVLQQLAEEEPKLLAQLAQECQEQRARLPQEIRRSLLGEMPEGLGDGPLVACASNGHAPGSSGHLSGADSESQEENTQL

SEQ ID NO: 794 - protein, 791 aa, Homo sapiens
MSNQQEKYEAQNIVNSTEESDDAFDTVTIPVPSEEPQESDQTEEHESGIEQFSESHAIHVEEQSDQSFSSLEPDNEQLMEEVISPRQVSYTPQHHEKQYAMQRPNDDSLAFLDKIKSVKESLQESVEDSLATVKVVLIPVGQEIVIPFKVDTILKYLKDHFSHLLGIPHSVLQIRYSGKILKNNETLVQHGVKPQEIVQVEIFSTNPDLYPVRRIDGLTDVSQIITVTVQTGLDQYQQVPVEIVKSDFHKPFLGGFRHKVTGVEYHNAGTQTVPKRIPERLSIFCRDTQTVFQKKNLQQTTNTTSTQMTNIGVYVSNMTDKLVTPGKYFSAAEYHAQRLKAVIVIQTYYRQWHAKIFVENLRRQKSLRLEWETQQELRKIREKEEWIKLDYHRRHNPKTNEDFEFLYNALEFWRQEELTRINQSFTGAERKAALCELLEKETQIIASIGRHRYIAYMANQEAAIQAFLDKCSAPKIWRTPNGKTIEMDTQFTIRARELQNIYKCIMLKNISQDERLDVLLTLKHTVKEHECKLTQEILELIDREVDLMMRGVKHHNLEGLRKRIATLFFHYIKTPLFNPEVAKYLKVPQDPLKFYKKIYFCHSCQLYLPSTEFSVSSTSRRIYRCRNCINLQNEAQKRESFLKYKCLLQQLYYTEADYEDDSKIAFLMQLQDIQYLTENIWASQSVLSACDNLSDLVMVRWNKSLEWSPWNCILLTKDEAAAHLKLTSIEEGYERSFIHKIKHKHILAKNYFSQVPVLASFILDDGEIDEIRWKYHSDTTPKIIESQRPPH

SEQ ID NO: 795 - protein, 287 aa, Homo sapiens
MAAPRQIPSHIVRLKPSCSTDSSFTRTPVPTVSLASRELPVSSWQVTEPSSKNLWEQICKEYEAEQPPFPEGYKVKQEPVITVAPVEEMLFHGFSAEHYFPVSHFTMISRTPCPQDKSETINPKTCSPKEYLETFIFPVLLPGMASLLHQAKKEKCFERKRTKFIACDFLTEWLYNQNPKRAGEPFTEFFSIPFVEERLKQHPRPPIPLSLLLTEEEAALYIQSFWRACVVRCDPEIQELRQWQKKLREAKHIHQQVKIFWAKQEQKVKCKMEDDAVPAAKMKIPSS

SEQ ID NO: 796 - protein, 175 aa, Homo sapiens
MAEASSANLGSGCEEKRHEGSSSESVPPGTTISRVKLLDTMVDTFLQKLVAAGSYQRFTDCYKCFYQLQPAMTQQIYDKFIAQLQTSIREEISDIKEEGNLEAVLNALDKIVEEGKVRKEPAWCEAQRCRVQQRCSLCVQAGGQRGSEETQALPVSMAGSPSPLPGSPGAQEGGV

SEQ ID NO: 797 - protein, 587 aa, Homo sapiens
MNDSLFVSLDRLLLEFVFQYEQDISTKEEMIQRINKCCEDIKENKVTICRIHETINATDEEIDHYCKHSEEIKDNCRNWKPTCDVFRKHEDYMQDQFTVYQGTVEKDKEMYHDYICQYKEVLKQYQLKYSETPFSREYYEKKREHEEIQSRVLACTEQLKMNETIFMKFRVPAPFPSLTKWTLNIVNLRCETQDILKHASNLTKSSSELKKEVDEMEIEINYLNQQISRHNETKALSETLEEKNKNTENRKELKERIFGKDEHVLTLNKTQSSQLFLPYESQKLVRPIKMHSSEPRVADIKEESSAKQSKLANIDFRQKENDTQIFNDSAVDNHSKCSHITTITSSQKFMQVRLLTPQKQSNSNQWSEKGDKDAEYGDKGTVRQVRESKCTSQAIYTEHFGKSVENDSDEVEERAENFPRTSEIPIFLGTPKAVKAPESLEKIKFPKTPPFEINRNRNAVPEVQTEKESPGLSFLMSYTSRSPGLNLFDSSVFDTEISSDQFNEHYSARNLNPLSSEQEIGNLLEKPEGEDGFTFSFPSDTSTHTFGAGKDDFSFPFSFGQGQNSIPSSSLKGFSSSSQNTTQFTFF

SEQ ID NO: 798 - protein, 344 aa, Homo sapiens
MELLTNNLKFITDPFVCRLRHLSPTPSEEHMKNKNNVTEFILLGLTQNPEGQKVLFVTFLLIYMVTIMGNLLIIVTIMASQSLGSPMYFFLASLSFIDTVYSTAFAPKMIVDLLSEKKTISFQGCMAQLFMDHLFAGAEVILLVVMAYDRYMAICKPLHELITMNRRVCVLMLLAAWIGGFLHSLVQFLFIYQLPFCGPNVIDNFLCDLYPLLKLACTNTYVTGLSMIANGGAICAVTFFTILLSYGVILHSLKTQSLEGKRKAFYTCASHVTVVILFFVPCIFLYARPNSTFPIDKSMTVVLTFITPMLNPLIYTLKNAEMKSAMRKLWSKKVSLAGKWLYHS

SEQ ID NO: 799 - protein, 328 aa, Homo sapiens
MGHQNHTFSSDFILLGLFSSSPTSVVFFLVLFVIFIMSVTENTLMILLIRSDSRLHTPMYFLLSHLSLMDILHVSNIVPKMVTNFLSGSRTISFAGCGFQVFLSLTLLGGECLLLAAMSCDRYVAICHPLRYPILMKEYASALMAGGSWLIGVFNSTVHTAYALQFPFCGSRAIDHFFCEVPAMLKLSCADTTRYERGVCVSAVIFLLIPFSLISASYGQIILTVLQMKSSEARKKSFSTCSFHMIVVTMYYGPFIFTYMRPKSYHTPGQDKFLAIFYTILTPTLNPFIYSFRNKDVLAVMKNMLKSNFLHKKMNRKIPECVFCLFLC

SEQ ID NO: 800 - protein, 3063 aa, Homo sapiens
MRSRLPPALAALGAALLLSSIEAEVDPPSDLNFKIIDENTVHMSWAKPVDPIVGYRITVDPTTDGPTKEFTLSASTTETLLSELVPETEYVVTITSYDEVEESVPVIGQLTIQTGSSTKPVEKKPGKTEIQKCSVSAWTDLVFLVDGSWSVGRNNFKYILDFIAALVSAFDIGEEKTRVGVVQYSSDTRTEFNLNQYYQRDELLAAIKKIPYKGGNTMTGDAIDYLVKNTFTESAGARVGFPKVAIIITDGKSQDEVEIPARELRNVGVEVFSLGIKAADAKELKQIASTPSLNHVFNVANFDAIVDIQNEIISQVCSGVDEQLGELVSGEEVVEPPSNLIAMEVSSKYVKLNWNPSPSPVTGYKVILTPMTAGSRQHALSVGPQTTTLSVRDLSADTEYQISVSAMKGMTSSEPISIMEKTQPMKVQVECSRGVDIKADIVFLVDGSYSIGIANFVKVRAFLEVLVKSFEISPNRVQISLVQYSRDPHTEFTLKKFTKVEDIIEAINTFPYRGGSTNTGKAMTYVREKIFVPSKGSRSNVPKVMILITDGKSSDAFRDPAIKLRNSDVEIFAVGVKDAVRSELEAIASPPAETHVFTVEDFDAFQRISFELTQSICLRIEQELAAIKKKAYVPPKDLSFSEVTSYGFKTNWSPAGENVFSYHITYKEAAGDDEVTVVEPASSTSVVLSSLKPETLYLVNVTAEYEDGFSIPLAGEETTEEVKGAPRNLKVTDETTDSFKITWTQAPGRVLRYRIIYRPVAGGESREVTTPPNQRRRTLENLIPDTKYEVSVIPEYFSGPGTPLTGNAATEEVRGNPRDLRVSDPTTSTMKLSWSGAPGKVKQYLVTYTPVAGGETQEVTVRGDTTNTVLQGLKEGTQYALSVTALYASGAGDALFGEGTTLEERGSPQDLVTKDITDTSIGAYWTSAPGMVRGYRVSWKSLYDDVDTGEKNLPEDAIHTMIENLQPETKYRISVFATYSSGEGEPLTGDATTELSQDSKTLKVDEETENTMRVTWKPAPGKVVNYRVVYRPHGRGKQMVAKVPPTVTSTVLKRLQPQTTYDITVLPIYKMGEGKLRQGSGTTASRFKSPRNLKTSDPTMSSFRVTWEPAPGEVKGYKVTFHPTGDDRRLGELVVGPYDNTVVLEELRAGTTYKVNVFGMFDGGESSPLVGQEMTTLSDTTVMPILSSGMECLTRAEADIVLLVDGSWSIGRANFRTVRSFISRIVEVFDIGPKRVQIALAQYSGDPRTEWQLNAHRDKKSLLQAVANLPYKGGNTLTGMALNFIRQQNFRTQAGMRPRARKIGVLITDGKSQDDVEAPSKKLKDEGVELFAIGIKNADEVELKMIATDPDDTHAYNVADFESLSRIVDDLTINLCNSVKGPGDLEAPSNLVISERTHRSFRVSWTPPSDSVDRYKVEYYPVSGGKRQEFYVSRMETSTVLKDLKPETEYVVNVYSVVEDEYSEPLKGTEKTLPVPVVSLNIYDVGPTTMHVQWQPVGGATGYILSYKPVKDTEPTRPKEVRLGPTVNDMQLTDLVPNTEYAVTVQAVLHDLTSEPVTVREVTLPLPRPQDLKLRDVTHSTMNVFWEPVPGKVRKYIVRYKTPEEDVKEVEVDRSETSTSLKDLFSQTLYTVSVSAVHDEGESPPVTAQETTRPVPAPTNLKITEVTSEGFRGTWDHGASDVSLYRITWAPFGSSDKMETILNGDENTLVFENLNPNTIYEVSITAIYPDESESDDLIGSERTLPILTTQAPKSGPRNLQVYNATSNSLTVKWDPASGRVQKYRITYQPSTGEGNEQTTTIGGRQNSVVLQKLKPDTPYTITVSSLYPDGEGGRMTGRGKTKPLNTVRNLRVYDPSTSTLNVRWDHAEGNPRQYKLFYAPAAGGPEELVPIPGNTNYAILRNLQPDTSYTVTVVPVYTEGDGGRTSDTGRTLMRGLARNVQVYNPTPNSLDVRWDPAPGPVLQYRVVYSPVDGTRPSESIVVPGNTRMVHLERLIPDTLYSVNLVALYSDGEGNPSPAQGRTLPRSGPRNLRVFGETTNSLSVAWDHADGPVQQYRIIYSPTVGDPIDEYTTVPGRRNNVILQPLQPDTPYKITVIAVYEDGDGGHLTGNGRTVGLLPPQNIHISDEWYTRFRVSWDPSPSPVLGYKIVYKPVGSNEPMEAFVGEMTSYTLHNLNPSTTYDVNVYAQYDSGLSVPLTDQGTTLYLNVTDLKTYQIGWDTFCVKWSPHRAATSYRLKLSPADGTRGQEITVRGSETSHCFTGLSPDTDYGVTVFVQTPNLEGPGVSVKEHTTVKPTEAPTEPPTPPPPPTIPPARDVCKGAKADIVFLTDASWSIGDDNFNKVVKFIFNTVGGFDEISPAGIQVSFVQYSDEVKSEFKLNTYNDKALALGALQNIRYRGGNTRTGKALTFIKEKVLTWESGMRKNVPKVLVVVTDGRSQDEVKKAALVIQQSGFSVFVVGVADVDYNELANIASKPSERHVFIVDDFESFEKIEDNLITFVCETATSSCPLIYLDGYTSPGFKMLEAYNLTEKNFASVQGVSLESGSFPSYSAYRIQKNAFVNQPTADLHPNGLPPSYTIILLFRLLPETPSDPFAIWQITDRDYKPQVGVIADPSSKTLSFFNKDTRGEVQTVTFDTEEVKTLFYGSFHKVHIVVTSKSVKIYIDCYEIIEKDIKEAGNITTDGYEILGKLLKGERKSAAFQIQSFDIVCSPVWTSRDRCCDIPSRRDEGKCPAFPNSCTCTQDSVGPPGPPGPAGGPGAKGPRGERGISGAIGPPGPRGDIGPPGPQGPPGPQGPNGLSIPGEQGRQGMKGDAGEPGLPGRTGTPGLPGPPGPMGPPGDRGFTGKDGAMGPRGPPGPPGSPGSPGVTGPSGKPGKPGDHGRPGPSGLKGEKGDRGDIASQNMMRAVARQVCEQLISGQMNRFNQMLNQIPNDYQSSRNQPGPPGPPGPPGSAGARGEPGPGGRPGFPGTPGMQGPPGERGLPGEKGERGTGSSGPRGLPGPPGPQGESRTGPPGSTGSRGPPGPPGRPGNSGIRGPPGPPGYCDSSQCASIPYNGQGYPGSG

SEQ ID NO: 801 - protein, 1195 aa, Homo sapiens
MGEEGPPSLEYIQAKDLFPPKELVKEEENLQVPFTVLQGEGVEFLGRAADALIAISNYRLHIKFKDSVINVPLRMIDSVESRDMFQLHISCKDSKVVRCHFSTFKQCQEWLSRLSRATARPAKPEDLFAFAYHAWCLGLTEEDQHTHLCQPGEHIRCRQEAELARMGFDLQNVWRVSHINSNYKLCPSYPQKLLVPVWITDKELENVASFRSWKRIPVVVYRHLRNGAAIARCSQPEISWWGWRNADDEYLVTSIAKACALDPGTRATGGSLSTGNNDTSEACDADFDSSLTACSGVESTAAPQKLLILDARSYTAAVANRAKGGGCECEEYYPNCEVVFMGMANIHAIRNSFQYLRAVCSQMPDPSNWLSALESTKWLQHLSVMLKAAVLVANTVDREGRPVLVHCSDGWDRTPQIVALAKILLDPYYRTLEGFQVLVESDWLDFGHKFGDRCGHQENVEDQNEQCPVFLQWLDSVHQLLKQFPCLFEFNEAFLVKLVQHTYSCLYGTFLANNPCEREKRNIYKRTCSVWALLRAGNKNFHNFLYTPSSDMVLHPVCHVRALHLWTAVYLPASSPCTLGEENMDLYLSPVAQSQEFSGRSLDRLPKTRSMDDLLSACDTSSPLTRTSSDPNLNNHCQEVRVGLEPWHSNPEGSETSFVDSGVGGPQQTVGEVGLPPPLPSSQKDYLSNKPFKSHKSCSPSYKLLNTAVPREMKSNTSDPEIKVLEETKGPAPDPSAQDELGRTLDGIGEPPEHCPETEAVSALSKVISNKCDGVCNFPESSQNSPTGTPQQAQPDSMLGVPSKCVLDHSLSTVCNPPSAACQTPLDPSTDFLNQDPSGSVASISHQEQLSSVPDLTHGEEDIGKRGNNRNGQLLENPRFGKMPLELVRKPISQSQISEFSFLGSNWDSFQGMVTSFPSGEATPRRLLSYGCCSKRPNSKQMRATGPCFGGQWAQREGVKSPVCSSHSNGHCTGPGGKNQMWLSSHPKQVSSTKPVPLNCPSPVPPLYLDDDGLPFPTDVIQHRLRQIEAGYKQEVEQLRRQVRELQMRLDIRHCCAPPAEPPMDYEDDFTCLKESDGSDTEDFGSDHSEDCLSEASWEPVDKKETEVTRWVPDHMASHCYNCDCEFWLAKRRHHCRNCGNVFCAGCCHLKLPIPDQQLYDPVLVCNSCYEHIQVSRARELMSQQLKKPIATASS

SEQ ID NO: 802 - protein, 798 aa, Homo sapiens
MAASLPGPGSRLFRTYGAADGRRQRRPGREAAQWFPPQDRRRFFNSSGSSDASIGDPSQSDDPDDPDDPDFPGSPVRRRRRRPGGRVPKDRPSLTVTPKRWKLRARPSLTVTPRRLGLRARPPQKCSTPCGPLRLPPFPSRDSGRLSPDLSVCGQPRDGDELGISASLFSSLASPCPGSPTPRDSVISIGTSACLVAASAVPSGLHLPEVSLDRASLPCSQEEATGGAKDTRMVHQTRASLRSVLFGLMNSGTPEDSEFRADGKNMRESCCKRKLVVGNGPEGPGLSSTGKRRATGQDSCQERGLQEAVRREHQEASVPKGRIVPRGIDRLERTRSSRKSKHQEATETSLLHSHRFKKGQKLGKDSFPTQDLTPLQNVCFWTKTRASFSFHKKKIVTDVSEVCSIYTTATSLSGSLLSECSNRPVMNRTSGAPSSWHSSSMYLLSPLNTLSISNKKASDAEKVYGECSQKGPVPFSHCLPTEKLQRCEKIGEGVFGEVFQTIADHTPVAIKIIAIEGPDLVNGSHQKTFEEILPEIIISKELSLLSGEVCNRTEGFIGLNSVHCVQGSYPPLLLKAWDHYNSTKGSANDRPDFFKDDQLFIVLEFEFGGIDLEQMRTKLSSLATAKSILHQLTASLAVAEASLRFEHRDLHWGNVLLKKTSLKKLHYTLNGKSSTIPSCGLQVSIIDYTLSRLERDGIVVFCDVSMDEDLFTGDGDYQFDIYRLMKKENNNRWGEYHPYSNVLWLHYLTDKMLKQMTFKTKCNTPAMKQIKRKIQEFHRTMLNFSSATDLLCQHSLFK

SEQ ID NO: 803 - protein, 1342 aa, Homo sapiens
MEENEVESSSDAAPGPGRPEEPSESGLGVGTSEAVSADSSDAAAAPGQAEADDSGVGQSSDRGSRSQEEVSESSSSADPLPNSYLPDSSSVSHGPVAGVTGGPPALVHSSALPDPNMLVSDCTASSSDLGSAIDKIIESTIGPDLIQNCITVTSAEDGGAETTRYLILQGPDDGAPMTSPMSSSTLAHSLAAIEALADGPTSTSTCLEAQGGPSSPVQLPPASGAEEPDLQSLEAMMEVVVVQQFKCKMCQYRSSTKATLLRHMRERHFRPVAAAAAAAGKKGRLRKWSTSTKSQEEEGPEEEDDDDIVDAGAIDDLEEDSDYNPAEDEPRGRQLRLQRPTPSTPRPRRRPGRPRKLPRLEISDLPDGVEGEPLVSSQSGQSPPEPQDPEAPSSSGPGHLVAMGKVSRTPVEAGVSQSDAENAAPSCPDEHDTLPRRRGRPSRRFLGKKYRKYYYKSPKPLLRPFLCRICGSRFLSHEDLRFHVNSHEAGDPQLFKCLQCSYRSRRWSSLKEHMFNHVGSKPYKCDECSYTSVYRKDVIRHAAVHSRDRKKRPDPTPKLSSFPCPVCGRVYPMQKRLTQHMKTHSTEKPHMCDKCGKSFKKRYTFKMHLLTHIQAVANRRFKCEFCEFVCEDKKALLNHQLSHVSDKPFKCSFCPYRTFREDFLLSHVAVKHTGAKPFACEYCHFSTRHKKNLRLHVRCRHASSFEEWGRRHPEEPPSRRRPFFSLQQIEELKQQHSAAPGPPPSSPGPPEIPPEATTFQSSEAPSLLCSDTLGGATIIYQQGAEESTAMATQTALDLLLNMSAQRELGGTALQVAVVKSEDVEAGLASPGGQPSPEGATPQVVTLHVAEPGGGAAAESQLGPPDLPQITLAPGPFGGTGYSVITAPPMEEGTSAPGTPYSEEPAGEAAQAVVVSDTLKEAGTHYIMATDGTQLHHIELTADGSISFPSPDALASGAKWPLLQCGGLPRDGPEPPSPAKTHCVGDSQSSASSPPATSKALGLAVPPSPPSAATAASKKFSCKICAEAFPGRAEMESHKRAHAGPGAFKCPDCPFSARQWPEVRAHMAQHSSLRPHQCSQCSFASKNKKDLRRHMLTHTKEKPFACHLCGQRFNRNGHLKFHIQRLHSPDGRKSGTPTARAPTQTPTQTIILNSDDETLATLHTALQSSHGVLGPERLQQALSQEHIIVAQEQTVTNQEEAAYIQEITTADGQTVQHLVTSDNQVQYIISQDGVQHLLPQEYVVVPEGHHIQVQEGQITHIQYEQGAPFLQESQIQYVPVSPGQQLVTQAQLEAAAHSAVTAVADAAMAQAQGLFGTDETVPEHIQQLQHQGIEYDVITLADD

SEQ ID NO: 804 - protein, 308 aa, Homo sapiens
MCLLLSSAVFGVKYNLLAHTTLTLESAEDSFKTHNLSINGNEESSFWLPLYGNMCCRLVAQPACMAEDAFAGFLNQQQMVEGLISWRRLYCVLRGGKLYCFYSPEEIEAKVEPALVVPINKSLVLFEDSLEGIQLAISQSFKETRIRAMDKDAKKRIHNFSVINPVPGQAITQIFAVDNREDLQKWMEAFWQHFFDLSQWKHCCEELMKIEIMSPRKPPLFLTKEATSVYHDMSIDSPMKLESLTDIIQKKIEETNGQFLIGQHEESLPPPWATLFDGNHQMVIQKKNNSNQLHNLQKLPATSKFLFT

SEQ ID NO: 805 - protein, 392 aa, Homo sapiens
MATAAQGPLSLLWGWLWSERFWLPENVSWADLEGPADGYGYPRGRHILSVFPLAAGIFFVRLLFERFIAKPCALCIGIEDSGPYQAQPNAILEKVFISITKYPDKKRLEGLSKQLDWNVRKIQCWFRHRRNQDKPPTLTKFCESMWRFTFYLCIFCYGIRFLWSSPWFWDIRQCWHNYPFQPLSSGLYHYYIMELAFYWSLMFSQFTDIKRKDFLIMFVHHLVTIGLISFSYINNMVRVGTLIMCLHDVSDFLLEAAKLANYAKYQRLCDTLFVIFSAVFMVTRLGIYPFWILNTTLFESWEIIGPYASWWLLNGLLLTLQLLHVIWSYLIARIALKALIRGKVSKDDRSDVESSSEEEDVTTCTKSPCDSSSSNGANRVNGHMGGSYWAEE

SEQ ID NO: 806 - protein, 1025 aa, Homo sapiens
MVAMAEAEAGVAVEVRGLPPAVPDELLTLYFENRRRSGGGPVLSWQRLGCGGVLTFREPADAERVLAQADHELHGAQLSLRPAPPRAPARLLLQGLPPGTTPQRLEQHVQALLRASGLPVQPCCALASPRPDRALVQLPKPLSEADVRVLEEQAQNLGLEGTLVSLARVPQARAVRVVGDGASVDLLLLELYLENERRSGGGPLEDLQRLPGPLGTVASFQQWQVAERVLQQEHRLQGSELSLVPHYDILEPEELAENTSGGDHPSTQGPRATKHALLRTGGLVTALQGAGTVTMGSGEEPGQSGASLRTGPMVQGRGIMTTGSGQEPGQSGTSLRTGPMGSLGQAEQVSSMPMGSLEHEGLVSLRPVGLQEQEGPMSLGPVGSAGPVETSKGLLGQEGLVEIAMDSPEQEGLVGPMEITMGSLEKAGPVSPGCVKLAGQEGLVEMVLLMEPGAMRFLQLYHEDLLAGLGDVALLPLEGPDMTGFRLCGAQASCQAAEEFLRSLLGSISCHVLCLEHPGSARFLLGPEGQHLLQGLEAQFQCVFGTERLATATLDTGLEEVDPTEALPVLPGNAHTLWTPDSTGGDQEDVSLEEVRELLATLEGLDLDGEDWLPRELEEEGPQEQPEEEVTPGHEEEEPVAPSTVAPRWLEEEAALQLALHRSLEPQGQVAEQEEAAALRQALTLSLLEQPPLEAEEPPDGGTDGKAQLVVHSAFEQDVEELDRALRAALEVHVQEETVGPWRRTLPAELRARLERCHGVSVALRGDCTILRGFGAHPARAARHLVALLAGPWDQSLAFPLAASGPTLAGQTLKGPWNNLERLAENTGEFQEVVRAFYDTLDAARSSIRVVRVERVSHPLLQQQYELYRERLLQRCERRPVEQVLYHGTTAPAVPDICAHGFNRSFCGRNATVYGKGVYFARRASLSVQDRYSPPNADGHKAVFVARVLTGDYGQGRRGLRAPPLRGPGHVLLRYDSAVDCICQPSIFVIFHDTQALPTHLITCEHVPRASPDDPSGLPGRSPDT

SEQ ID NO: 807 - protein, 1117 aa, Homo sapiens
MKKASRSVGSVPKVSAISKTQTAEKIKPENSSSASTGGKLVKPGTAASLSKTKSSDDLLAGMAGGVTVTNGVKGKKSTCPSAAPSASAPAMTTVENKSKISTGTASSTKRSTSTGNKESSSTRERLRERTRLNQSKKLPSAGQGANDMALAKRSRSRTATECDVRMSKSKSDNQISDRAALEAKVKDLLTLAKTKDVEILHLRNELRDMRAQLGINEDHSEGDEKSEKETIMAHQPTDVESTLLQLQEQNTAIREELNQLKNENRMLKDRLNALGFSLEQRLDNSEKLFGYQSLSPEITPGNQSDGGGTLTSSVEGSAPGSVEDLLSQDENTLMDHQHSNSMDNLDSECSEVYQPLTSSDDALDAPSSSESEGIPSIERSRKGSSGNASEVSVACLTERIHQMEENQHSTSEELQATLQELADLQQITQELNSENERLGEEKVILMESLCQQSDKLEHFSRQIEYFRSLLDEHHISYVIDEDVKSGRYMELEQRYMDLAENARFEREQLLGVQQHLSNTLKMAEQDNKEAQEMIGALKERSHHMERIIESEQKGKAALAATLEEYKATVASDQIEMNRLKAQLENEKQKVAELYSIHNSGDKSDIQDLLESVRLDKEKAETLASSLQEDLAHTRNDANRLQDAIAKVEDEYRAFQEEAKKQIEDLNMTLEKLRSDLDEKETERSDMKETIFELEDEVEQHRAVKLHDNLIISDLENTVKKLQDQKHDMEREIKTLHRRLREESAEWRQFQADLQTAVVIANDIKSEAQEEIGDLKRRLHEAQEKNEKLTKELEEIKSRKQEEERGRVYNYMNAVERDLAALRQGMGLSRRSSTSSEPTPTVKTLIKSFDSASQVPNPAAAAIPRTPLSPSPMKTPPAAAVSPMQRHSISGPISTSKPLTALSDKRPNYGEIPVQEHLLRTSSASRPASLPRVPAMESAKTLSVSRRSSEEVKRDISAQEGASPASLMAMGTTSPQLSLSSSPTASVTPTTRSRIREERKDPLSALAREYGGSKRNALLKWCQKKTEGYQNIDITNFSSSWNDGLAFCALLHTYLPAHIPYQELNSQDKRRNFMLAFQAAESVGIKSTLDINEMVRTERPDWQNVMLYVTAIYKYFET

SEQ ID NO: 808 - protein, 2357 aa, Homo sapiens
MQPPPQTVPSGMAGPPPAGNPRSVFWASSPYRRRANNNAAVAPTTCPLQPVTDPFAFSRQALQSTPLGSSSKSSPPVLQGPAPAGFSQHPGLLVPHTHARDSSQGPCEPLPGPLTQPRAHASPFSGALTPSAPPGPEMNRSAEVGPSSEPEVQTLPYLPHYIPGVDPETSHGGHPHGNMPGLDRPLSRQNPHDGVVTPAASPSLPQPGLQMPGQWGPVQGGPQPSGQHRSPCPEGPVPSGVPCATSVPHFPTPSILHQGPGHEQHSPLVAPPAALPSDGRDEVSHLQSGSHLANNSDPESTFRQNPRIVNHWASPELRQNPGVKNEHRPASALVNPLARGDSPENRTHHPLGAGAGSGCAPLEADSGASGALAMFFQGGETENEENLSSEKAGLSGQADFDDFCSSPGLGRPPAPTHVGAGSLCQALLPGPSNEAAGDVWGDTASTGVPDASGSQYENVENLEFVQNQEVLPSEPLNLDPSSPSDQFRYGPLPGPAVPRHGAVCHTGAPDATLHTVHPDSVSSSYSSRSHGRLSGSARPQELVGTFIQQEVGKPEDEASGSFFKQIDSSPVGGETDETTVSQNYRGSVSQPSTPSPPKPTGIFQTSANSSFEPVKSHLVGVKPFEADRANVVGEVRETCVRQKQCRPAAALPDASPGNLEQPPDNMETLCAPQVCPLPLNSTTEAVHMLPHAGAPPLDTVYPAPEKRPSARTQGPVKCESPATTLWAQSELPDFGGNVLLAPAAPALYVCAKPQPPVVQPPEEAMSGQQSRNPSSAAPVQSRGGIGASENLENPPKMGEEEALQSQASSGYASLLSSPPTESLQNPPVLIAQPDHSYNLAQPINFSVSLSNSHEKNQSWREALVGDRPAVSSWALGGDSGENTSLSGIPTSSVLSLSLPSSVAQSNFPQGSGASEMVSNQPANLLVQPPSQPVPENLVPESQKDRKAGSALPGFANSPAGSTSVVLVPPAHGTLVPDGNKANHSSHQEDTYGALDFTLSRTLENPVNVYNPSHSDSLASQQSVASHPRQSGPGAPNLDRFYQQVTKDAQGQPGLERAQQELVPPQQQASPPQLPKAMFSELSNPESLPAQGQAQNSAQSPASLVLVDAGQQLPPRPPQSSSVSLVSSGSGQAAVPSEQPWPQPVPALAPGPPPQDLAAYYYYRPLYDAYQPQYSLPYPPEPGAASLYYQDVYSLYEPRYRPYDGAASAYAQNYRYPEPERPSSRASHSSERPPPRQGYPEGYYSSKSGWSSQSDYYASYYSSQYDYGDPGHWDRYHYSARVRDPRTYDRRYWCDAEYDAYRREHSAFGDRPEKRDNNWRYDPRFTGSFDDDPDPHRDPYGEEVDRRSVHSEHSARSLHSAHSLASRRSSLSSHSHQSQIYRSHNVAAGSYEAPLPPGSFHGDFAYGTYRSNFSSGPGFPEYGYPADTVWPAMEQVSSRPTSPEKFSVPHVCARFGPGGQLIKVIPNLPSEGQPALVEVHSMEALLQHTSEQEEMRAFPGPLAKDDTHKVDVINFAQNKAMKCLQNENLIDKESASLLWNFIVLLCRQNGTVVGTDIAELLLRDHRTVWLPGKSPNEANLIDFTNEAVEQVEEEESGEAQLSFLTGGPAAAASSLERETERFRELLLYGRKKDALESAMKNGLWGHALLLASKMDSRTHARVMTRFANSLPINDPLQTVYQLMSGRMPAASTCCGDEKWGDWRPHLAMVLSNLNNNMDVESRTMATMGDTLASRGLLDAAHFCYLMAQAGFGVYTKKTTKLVLIGSNHSLPFLKFATNEAIQRTEAYEYAQSLGAETCPLPSFQVFKFIYSCRLAEMGLATQAFHYCEAIAKSILTQPHLYSPVLISQLVQMASQLRLFDPQLKEKPEEESLAAPTWLVHLQQVERQIKEGAGVWHQDGALPQQCPGTPSSEMEQLDRPGLSQPGALGIANPLLAVPAPSPEHSSPSVRLLPSAPQTLPDGPLASPARVPMFPVPLPPGPLEPGPGCVTPGPALGFLEPSGPGLPPGVPPLQERRHLLQEARSPDPGIVPQEAPVGNSLSELSEENFDGKFANLTPSRTVPDSEAPPGWDRADSGPTQPPLSLSPAPETKRPGQAAKKETKEPKKGESWFFRWLPGKKKTEAYLPDDKNKSIVWDEKKNQWVNLNEPEEEKKAPPPPPTSMPKTVQAAPPALPGPPGAPVNMYSRRAAGTRARYVDVLNPSGTQRSEPALAPADFVAPLAPLPIPSNLFVPTPDAEEPQLPDGTGREGPAAARGLANPEPAPEPKVLSSAASLPGSELPSSRPEGSQGGELSRCSSMSSLSREVSQHFNQAPGDLPAAGGPPSGAMPFYNPAQLAQACATSGSSRLGRIGQRKHLVLN

SEQ ID NO: 809 - protein, 254 aa, Homo sapiens
MTEEVWMGTWRPHRPRGPIMALYSSPGPKYLIPPTTGFMKHTPTKLRAPAYSFRGAPMLLAENCSPGPRYNVNPKILRTGKDLGPAYSILGRYQTKTMLTPGPGDYFPEKSTKYVFDSAPSHSISARTKAFRVDSTPGPAAYMLPMVMGPNTVGKASQPSFSIKGRSKLGGFSDDLHKTPGPAAYRQTDVRVTKFKAPQYTMAARVEPPGDKTLKPGPGAHSPEKVTLTKPCAPVVTFGIKHSDYMTPLLVDVE

SEQ ID NO: 810 - protein, 785 aa, Homo sapiens
MPKGRQKVPHLDAPLGLPTCLWLELAGLFLLVPWVMGLAGTGGPDGQGTGGPSWAVHLESLEGDGEEETLEQQADALAQAAGLVNAGRIGELQGHYLFVQPAGHRPALEVEAIRQQVEAVLAGHEAVRWHSEQRLLRRAKRSVHFNDPKYPQQWHLNNRRSPGRDINVTGVWERNVTGRGVTVVVVDDGVEHTIQDIAPNYSPEGSYDLNSNDPDPMPHPDVENGNHHGTRCAGEIAAVPNNSFCAVGVAYGSRIAGIRVLDGPLTDSMEAVAFNKHYQINDIYSCSWGPDDDGKTVDGPHQLGKAALQHGVIAGRQGFGSIFVVASGNGGQHNDNCNYDGYANSIYTVTIGAVDEEGRMPFYAEECASMLAVTFSGGDKMLRSIVTTDWDLQKGTGCTEGHTGTSAAAPLAAGMIALMLQVRPCLTWRDVQHIIVFTATRYEDRRAEWVTNEAGFSHSHQHGFGLLNAWRLVNAAKIWTSVPYLASYVSPVLKENKAIPQSPRSLEVLWNVSRMDLEMSGLKTLEHVAVTVSITHPRRGSLELKLFCPSGMMSLIGAPRSMDSDPNGFNDWTFSTVRCWGERARGTYRLVIRDVGDESFQVGILRQWQLTLYGSVWSAVDIRDRQRLLESAMSGKYLHDDFALPCPPGLKIPEEDGYTITPNTLKTLVLVGCFTVFWTVYYMLEVYLSQRNVASNQVCRSGPCHWPHRSRKAKEEGTELESVPLCSSKDPDEVETESRGPPTTSDLLAPDLLEQGDWSLSQNKSALDCPHQHLDVPHGKEEQIC

SEQ ID NO: 811 - protein, 885 aa, Homo sapiens
MQEAIILLALLGAMSGGEALHLILLPATGNVAENSPPGTSVHKFSVKLSASLSPVIPGFPQIVNSNPLTEAFRVNWLSGTYFEVVTTGMEQLDFETGPNIFDLQIYVKDEVGVTDLQVLTVQVTDVNEPPQFQGNLAEGLHLYIVERANPGFIYQVEAFDPEDTSRNIPLSYFLISPPKSFRMSANGTLFSTTELDFEAGHRSFHLIVEVRDSGGLKASTELQVNIVNLNDEVPRFTSPTRVYTVLEELSPGTIVANITAEDPDDEGFPSHLLYSITTVSKYFMINQLTGTIQVAQRIDRDAGELRQNPTISLEVLVKDRPYGGQENRIQITFIVEDVNDNPATCQKFTFSIMVPERTAKGTLLLDLNKFCFDDDSEAPNNRFNFTMPSGVGSGSRFLQDPAGSGKIVLIGDLDYENPSNLAAGNKYTVIIQVQDVAPPYYKNNVYVYILTSPENEFPLIFDRPSYVFDVSERRPARTRVGQVRATDKDLPQSSLLYSISTGGASLQYPNVFWINPKTGELQLVTKVDCETTPIYILRIQATNNEDTSSVTVTVNILEENDEKPICTPNSYFLALPVDLKVGTNIQNFKLTCTDLDSSPRSFRYSIGPGNVNNHFTFSPNAGSNVTRLLLTSRFDYAGGFDKIWDYKLLVYVTDDNLMSDRKKAEALVETGTVTLSIKVIPHPTTIITTTPRPRVTYQVLRKNVYSPSAWYVPFVITLGSILLLGLLVYLVVLLAKAIHRHCPCKTGKNKEPLTKKGETKTAERDVVVETIQMNTIFDGEAIDPVTGETYEFNSKTGARKWKDPLTQMPKWKESSHQGAAPRRVTAGEGMGSLRSANWEEDELSGKAWAEDAGLGSRNEGGKLGNPKNRNPAFMNRAYPKPHPGK

SEQ ID NO: 812 - protein, 610 aa, Homo sapiens
MQYSHHCEHLLERLNKQREAGFLCDCTIVIGEFQFKAHRNVLASFSEYFGAIYRSTSENNVFLDQSQVKADGFQKLLEFIYTGTLNLDSWNVKEIHQAADYLKVEEVVTKCKIKMEDFAFIANPSSTEISSITGNIELNQQTCLLTLRDYNNREKSEVSTDLIQANPKQGALAKKSSQTKKKKKAFNSPKTGQNKTVQYPSDILENASVELFLDANKLPTPVVEQVAQINDNSELELTSVVENTFPAQDIVHTVTVKRKRGKSQPNCALKEHSMSNIASVKSPYEAENSGEELDQRYSKAKPMCNTCGKVFSEASSLRRHMRIHKGVKPYVCHLCGKAFTQCNQLKTHVRTHTGEKPYKCELCDKGFAQKCQLVFHSRMHHGEEKPYKCDVCNLQFATSSNLKIHARKHSGEKPYVCDRCGQRFAQASTLTYHVRRHTGEKPYVCDTCGKAFAVSSSLITHSRKHTGEKPYICGICGKSFISSGELNKHFRSHTGERPFICELCGNSYTDIKNLKKHKTKVHSGADKTLDSSAEDHTLSEQDSIQKSPLSETMDVKPSDMTLPLALPLGTEDHHMLLPVTDTQSPTSDTLLRSTVNGYSEPQLIFLQQLY

SEQ ID NO: 813 - protein, 1584 aa, Homo sapiens
MSKQVSLPEMIKDWTKEHVKKWVNEDLKINEQYGQILLSEEVTGLVLQELTEKDLVEMGLPWGPALLIKRSYNKLNSKSPESDNHDPGQLDNSKPSKTEHQKNPKHTKKEEENSMSSNIDYDPREIRDIKQEESILMKENVLDEVANAKHKKKGKLKPEQLTCMPYPFDQFHDSHRYIEHYTLQPETGALNLIDPIHEFKALTNTETATEVDIKMKFSNEVFRFASACMNSRTNGTIHFGVKDKPHGEIVGVKITSKAAFIDHFNVMIKKYFEESEINEAKKCIREPRFVEVLLQNNTPSDRFVIEVDTIPKHSICNDKYFYIQMQICKDKIWKQNQNLSLFVREGASSRDILANSKQRDVDFKAFLQNLKSLVASRKEAEEEYGMKAMKKESEGLKLVKLLIGNRDSLDNSYYDWYILVTNKCHPNQIKHLDFLKEIKWFAVLEFDPESMINGVVKAYKESRVANLHFPNQYEDKTTNMWEKISTLNLYQQPSWIFCNGRSDLKSETYKPLEPHLWQRERASEVRKLILFLTDENIMTRGKFLVVFLLLSSVESPGDPLIETFWAFYQALKGMENMLCISVNSHIYQRWKDLLQTRMKMEDELTNHSISTLNIELVNSTILKLKSVTRSSRRFLPARGSSSVILEKKKEDVLTALEILCENECTETDIEKDKSKFLEFKKSKEEHFYRGGKVSWWNFYFSSENYSSDFVKRDSYEKLKDLIHCWAESPKPIFAKIINLYHHPGCGGTTLAMHVLWDLKKNFRCAVLKNKTTDFAEIAEQVINLVTYRAKSHQDYIPVLLLVDDFEEQENVYFLQNAIHSVLAEKDLRYEKTLVIILNCMRSRNPDESAKLADSIALNYQLSSKEQRAFGAKLKEIEKQHKNCENFYSFMIMKSNFDETYIENVVRNILKGQDVDSKEAQLISFLALLSSYVTDSTISVSQCEIFLGIIYTSTPWEPESLEDKMGTYSTLLIKTEVAEYGRYTGVRIIHPLIALYCLKELERSYHLDKCQIALNILEENLFYDSGIGRDKFQHDVQTLLLTRQRKVYGDETDTLFSPLMEALQNKDIEKVLSAGSRRFPQNAFICQALARHFYIKEKDFNTALDWARQAKMKAPKNSYISDTLGQVYKSEIKWWLDGNKNCRSITVNDLTHLLEAAEKASRAFKESQRQTDSKNYETENWSPQKSQRRYDMYNTACFLGEIEVGLYTIQILQLTPFFHKENELSKKHMVQFLSGKWTIPPDPRNECYLALSKFTSHLKNLQSDLKRCFDFFIDYMVLLKMRYTQKEIAEIMLSKKVSRCFRKYTELFCHLDPCLLQSKESQLLQEENCRKKLEALRADRFAGLLEYLNPNYKDATTMESIVNEYAFLLQQNSKKPMTNEKQNSILANIILSCLKPNSKLIQPLTTLKKQLREVLQFVGLSHQYPGPYFLACLLFWPENQELDQDSKLIEKYVSSLNRSFRGQYKRMCRSKQASTLFYLGKRKGLNSIVHKAKIEQYFDKAQNTNSLWHSGDVWKKNEVKDLLRRLTGQAEGKLISVEYGTEEKIKIPVISVYSGPLRSGRNIERVSFYLGFSIEGPLAYDIEVI

SEQ ID NO: 814 - protein, 266 aa, Homo sapiens
MHNILKKYHQYIVECHGITLLPQFLGMYRLNVDGVEIYVIVTRNVFSHRLSVYRKYDLKMANLKATFTFPKPTGSTVAREASDKEKAKELPTLKDNDFINEGQKIYIDDNNKKVFLEKLKKDVEFLAQLKLMDYSLLVGIHDVERAEQEEVECEENDGEEEGESDGTHPVGTPPDSPGNTLNSSPPLAPGEFDPNIDVYGIKCHENSPRKEVYFMAIIDILTHYDAKKKAAHAAKTVKHGAGAEISTVNPEQYSKRFLDFIGHILT

SEQ ID NO: 815 - protein, 619 aa, Homo sapiens
MAGPGVPGAPAARWKRHIVRQLRLRDRTQKALFLELVPAYNHLLEKAELLDKFSKKLQPEPNSVTPTTHQGPWEESELDSDQVPSLVALRVKWQEEEEGLRLVCGEMAYQVVEKGAALGTLESELQQRQSRLAALEARVAQLREARAQQAQQVEEWRAQNAVQRAAYEALRAHVGLREAALRRLQEEARDLLERLVQRKARAAAERNLRNERRERAKQARVSQELKKAAKRTVSISEGPDTLGDGMRERRETLALAPEPEPLEKEACEKWKRPFRSASATSLTLSHCVDVVKGLLDFKKRRGHSIGGAPEQRYQIIPVCVAARLPTRAQDVLDAHLSEVNAVRFGPNSSLLATGGADRLIHLWNVVGSRLEANQTLEGAGGSITSVDFDPSGYQVLAATYNQAAQLWKVGEAQSKETLSGHKDKVTAAKFKLTRHQAVTGSRDRTVKEWDLGRAYCSRTINVLSYCNDVVCGDHIIISGHNDQKIRFWDSRGPHCTQVIPVQGRVTSLSLSHDQLHLLSCSRDNTLKVIDLRVSNIRQVFRADGFKCGSDWTKAVFSPDRSYALAGSCDGALYIWDVDTGKLESRLQGPHCAAVNAVAWCYSGSHMVSVDQGRKVVLWQ

SEQ ID NO: 816 - protein, 1006 aa, Homo sapiens
MSRRKQSNPRQIKRSLGDMEAREEVQLVGASHMEQKATAPEAPSPPSADVNSPPPLPPPTSPGGPKELEGQEPEPRPTEEEPGSPWSGPDELEPVVQDGQRRIRARLSLATGLSWGPFHGSVQTRASSPRQAEPSPALTLLLVDEACWLRTLPQALTEAEANTEIHRKDDALWCRVTKPVPAGGLLSVLLTAEPHSTPGHPVKKEPAEPTCPAPAHDLQLLPQQAGMASILATAVINKDVFPCKDCGIWYRSERNLQAHLLYYCASRQGTGSPAAAATDEKPKETYPNERVCPFPQCRKSCPSASSLEIHMRSHSGERPFVCLICLSAFTTKANCERHLKVHTDTLSGVCHSCGFISTTRDILYSHLVTNHMVCQPGSKGEIYSPGAGHPATKLPPDSLGSFQQQHTALQGPLASADLGLAPTPSPGLDRKALAEATNGEARAEPLAQNGGSSEPPAAPRSIKVEAVEEPEAAPILGPGEPGPQAPSRTPSPRSPAPARVKAELSSPTPGSSPVPGELGLAGALFLPQYVFGPDAAPPASEILAKMSELVHSRLQQGAGAGAGGAQTGLFPGAPKGATCFECEITFSNVNNYYVHKRLYCSGRRAPEDAPAARRPKAPPGPARAPPGQPAEPDAPRSSPGPGAREEGAGGAATPEDGAGGRGSEGSQSPGSSVDDAEDDPSRTLCEACNIRFSRHETYTVHKRYYCASRHDPPPRRPAAPPGPPGPAAPPAPSPAAPVRTRRRRKLYELHAAGAPPPPPPGHAPAPESPRPGSGSGSGPGLAPARSPGPAADGPIDLSKKPRRPLPGAPAPALADYHECTACRVSFHSLEAYLAHKKYSCPAAPPPGALGLPAAACPYCPPNGPVRGDLLEHFRLAHGLLLGAPLAGPGVEARTPADRGPSPAPAPAASPQPGSRGPRDGLGPEPQEPPPGPPPSPAAAPEAVPPPPAPPSYSDKGVQTPSKGTPAPLPNGNHRYCRLCNIKFSSLSTFIAHKKYYCSSHAAEHVK

SEQ ID NO: 817 - protein, 1913 aa, Homo sapiens
MRELEAKATKDVERNLSRDLVQEEEQLMEEKKKKKDDKKKKEAAQKKATEQKIKVPEQIKPSVSQPQPANSNNGTSTATSTNNNAKRATANNQQPQQQQQQQQPQQQQPQQQPQPQPQQQQPQQQPQALPRYPREVPPRFRHQEHKQLLKRGQHFPVIAANLGSAVKVLNSQSESSALTNQQPQNNGEVQNSKNQSDINHSTSGSHYENSQRGPVSSTSDSSTNCKNAVVSDLSEKEAWPSAPGSDPELASECMDADSASSSESERNITIMASGNTGGEKDGLRNSTGLGSQNKFVVGSSSNNVGHGSSTGPWGFSHGAIISTCQVSVDAPESKSESSNNRMNAWGTVSSSSNGGLNPSTLNSASNHGAWPVLENNGLALKGPVGSGSSGINIQCSTIGQMPNNQSINSKVSGGSTHGTWGSLQETCESEVSGTQKVSFSGQPQNITTEMTGPNNTTNFMTSSLPNSGSVQNNELPSSNTGAWRVSTMNHPQMQAPSGMNGTSLSHLSNGESKSGGSYGTTWGAYGSNYSGDKCSGPNGQANGDTVNATLMQPGVNGPMGTNFQVNTNKGGGVWESGAANSQSTSWGSGNGANSGGSRRGWGTPAQNTGTNLPSVEWNKLPSNQHSNDSANGNGKTFTNGWKSTEEEDQGSATSQTNEQSSVWAKTGGTVESDGSTESTGRLEEKGTGESQSRDRRKIDQHTLLQSIVNRTDLDPRVLSNSGWGQTPIKQNTAWDTETSPRGERKTDNGTEAWGSSATQTFNSGACIDKTSPNGNDTSSVSGWGDPKPALRWGDSKGSNCQGGWEDDSAATGMVKSNQWGNCKEEKAAWNDSQKNKQGWGDGQKSSQGWSVSASDNWGETSRNNHWGEANKKSSSGGSDSDRSVSGWNELGKTSSFTWGNNINPNNSSGWDESSKPTPSQGWGDPPKSNQSLGWGDSSKPVSSPDWNKQQDIVGSWGIPPATGKPPGTGWLGGPIPAPAKEEEPTGWEEPSPESIRRKMEIDDGTSAWGDPSKYNYKNVNMWNKNVPNGNSRSDQQAQVHQLLTPASAISNKEASSGSGWGEPWGEPSTPATTVDNGTSAWGKPIDSGPSWGEPIAAASSTSTWGSSSVGPQALSKSGPKSMQDGWCGDDMPLPGNRPTGWEEEEDVEIGMWNSNSSQELNSSLNWPPYTKKMSSKGLSGKKRRRERGMMKGGNKQEEAWINPFVKQFSNISFSRDSPEENVQSNKMDLSGGMLQDKRMEIDKHSLNIGDYNRTVGKGPGSRPQISKESSMERNPYFDKNGNPSMFGVGNTAAQPRGMQQPPAQPLSSSQPNLRAQVPPPLLSPQVPVSLLKYAPNNGGLNPLFGPQQVAMLNQLSQLNQLSQISQLQRLLAQQQRAQSQRSVPSGNRPQQDQQGRPLSVQQQMMQQSRQLDPNLLVKQQTPPSQQQPLHQPAMKSFLDNVMPHTTPELQKGPSPINAFSNFPIGLNSNLNVNMDMNSIKEPQSRLRKWTTVDSISVNTSLDQNSSKHGAISSGFRLEESPFVPYDFMNSSTSPASPPGSIGDGWPRAKSPNGSSSVNWPPEFRPGEPWKGYPNIDPETDPYVTPGSVINNLSINTVREVDHLRDRNSGSSSSLNTTLPSTSAWSSIRASNYNVPLSSTAQSTSARNSDSKLTWSPGSVTNTSLAHELWKVPLPPKNITAPSRPPPGLTGQKPPLSTWDNSPLRIGGGWGNSDARYTPGSSWGESSSGRITNWLVLKNLTPQIDGSTLRTLCMQHGPLITFHLNLPHGNALVRYSSKEEVVKAQKSLHMCVLGNTTILAEFASEEEISRFFAQSQSLTPSPGWQSLGSSQSRLGSLDCSHSFSSRTDLNHWNGAGLSGTNCGDLHGTSLWGTPHYSTSLWGPPSSSDPRGISSPSPINAFLSVDHLGGGGESM

SEQ ID NO: 818 - protein, 1400 aa, Homo sapiens
MMASFQRSNSHDKVRRIVAEEGRTARNLIAWSVPLESKDDDGKPKCQTGGKSKRTIQGTHKTTKQSTAVDCKITSSTTGDKHFDKSPTKTRHPRKIDLRARYWAFLFDNLRRAVDEIYVTCESDQSVVECKEVLMMLDNYVRDFKALIDWIQLQEKLEKTDAQSRPTSLAWEVKKMSPGRHVIPSPSTDRINVTSNARRSLNFGGSTGTVPAPRLAPTGVSWADKVKAHHTGSTASSEITPAQSCPPMTVQKASRKNERKDAEGWETVQRGRPIRSRSTAVMPKVSLATEATRSKDDSDKENVCLLPDESIQKGQFVGDGTSNTIESHPKDSLHSCDHPLAEKTQFTVSTLDDVKNSGSIRDNYVRTSEISAVHIDTECVSVMLQAGTPPLQVNEEKFPAEKARIENEMDPSDISNSMAEVLAKKEELADRLEKANEEAIASAIAEEEQLTREIEAEENNDINIETDNDSDFSASMGSGSVSFCGMSMDWNDVLADYEARESWRQNTSWGDIVEEEPARPPGHGIHMHEKLSSPSRKRTIAESKKKHEEKQMKAQQLREKLREEKTLKLQKLLEREKDVRKWKEELLDQRRRMMEEKLLHAEFKREVQLQAIVKKAQEEEAKVNEIAFINTLEAQNKRHDVLSKLKEYEQRLNELQEERQRRQEEKQARDEAVQERKRALEAERQARVEELLMKRKEQEARIEQQRQEKEKAREDAARERARDREERLAALTAAQQEAMEELQKKIQLKHDESIRRHMEQIEQRKEKAAELSSGRHANTDYAPKLTPYERKKQCSLCNVLISSEVYLFSHVKGRKHQQAVRENTSIQGRELSDEEVEHLSLKKYIIDIVVESTAPAEALKDGEERQKNKKKAKKIKARMNFRAKEYESLMETKNSGSDSPYKAKLQRLAKDLLKQVQVQDSGSWANNKVSALDRTLGEITRILEKENVADQIAFQAAGGLTALEHILQAVVPATNVNTVLRIPPKSLCNAINVYNLTCNNCSENCSDVLFSNKITFLMDLLIHQLTVYVPDENNTILGRNTNKQVFEGLTTGLLKVSAVVLGCLIANRPDGNCQPATPKIPTQEMKNKPSQGDPFNNRVQDLISYVVNMGLIDKLCACFLSVQGPVDENPKMAIFLQHAAGLLHAMCTLCFAVTGRSYSIFDNNRQDPTGLTAALQATDLAGVLHMLYCVLFHGTILDPSTASPKENYTQNTIQVAIQSLRFFNSFAALHLPAFQSIVGAEGLSLAFRHMASSLLGHCSQVSCESLLHEVIVCVGYFTVNHPDNQVIVQSGRHPTVLQKLCQLPFQYFSDPRLIKVLFPSLIAACYNNHQNKIILEQEMSCVLLATFIQDLAQTPGQAENQPYQPKGKCLGSQDYLELANRFPQQAWEEARQFFLKKEKK

SEQ ID NO: 819 - protein, 518 aa, Homo sapiens
MDRAPQRQHRASRELLAAKKTHTSQIEVIPCKICGDKSSGIHYGVITCEGCKGFFRRSQRCNAAYSCTRQQNCPIDRTSRNRCQHCRLQKCLALGMSRDAVKFGRMSKKQRDSLHAEVQKQLQQRQQQQQEPVVKTPPAGAQGADTLTYTLGLPDGQLPLGSSPDLPEASACPPGLLKASGSGPSYSNNLAKAGLNGASCHLEYSPERGKAEGRESFYSTGSQLTPDRCGLRFEEHRHPGLGELGQGPDSYGSPSFRSTPEAPYASLTEIEHLVQSVCKSYRETCQLRLEDLLRQRSNIFSREEVTGYQRKSMWEMWERCAHHLTEAIQYVVEFAKRLSGFMELCQNDQIVLLKAGAMEVVLVRMCRAYNADNRTVFFEGKYGGMELFRALGCSELISSIFDFSHSLSALHFSEDEIALYTALVLINAHRPGLQEKRKVEQLQYNLELAFHHHLCKTHRQSILAKLPPKGKLRSLCSQHVERLQIFQHLHPIVVQAAFPPLYKELFSTETESPVGLSK

SEQ ID NO: 820 - protein, 290 aa, Homo sapiens
MPLLTLYLLLFWLSGYSIVTQITGPTTVNGLERGSLTVQCVYRSGWETYLKWWCRGAIWRDCKILVKTSGSEQEVKRDRVSIKDNQKNRTFTVTMEDLMKTDADTYWCGIEKTGNDLGVTVQVTIDPAPVTQEETSSSPTLTGHHLDNRHKLLKLSVLLPLIFTILLLLLVAASLLAWRMMKYQQKAAGMSPEQVLQPLEGDLCYADLTLQLAGTSPQKATTKLSSAQVDQVEVEYVTMASLPKEDISYASLTLGAEDQEPTYCNMGHLSSHLPGRGPEEPTEYSTISRP

SEQ ID NO: 821 - protein, 2725 aa, Homo sapiens
MMNNSGYSDAGLGLGDETDEMPSTEKDLAEDAPWKKIQQNTFTRWCNEHLKCVGKRLTDLQRDLSDGLRLIALLEVLSQKRMYRKFHPRPNFRQMKLENVSVALEFLEREHIKLVSIDSKAIVDGNLKLILGLIWTLILHYSISMPMWEDEDDEDARKQTPKQRLLGWIQNKVPQLPITNFNRDWQDGKALGALVDNCAPGLCPDWEAWDPNQPVENAREAMQQADDWLGVPQVIAPEEIVDPNVDEHSVMTYLSQFPKAKLKPGAPVRSKQLNPKKAIAYGPGIEPQGNTVLQPAHFTVQTVDAGVGEVLVYIEDPEGHTEEAKVVPNNDKDRTYAVSYVPKVAGLHKVTVLFAGQNIERSPFEVNVGMALGDANKVSARGPGLEPVGNVANKPTYFDIYTAGAGTGDVAVVIVDPQGRRDTVEVALEDKGDSTFRCTYRPAMEGPHTVHVAFAGAPITRSPFPVHVSEACNPNACRASGRGLQPKGVRVKEVADFKVFTKGAGSGELKVTVKGPKGTEEPVKVREAGDGVFECEYYPVVPGKYVVTITWGGYAIPRSPFEVQVSPEAGVQKVRAWGPGLETGQVGKSADFVVEAIGTEVGTLGFSIEGPSQAKIECDDKGDGSCDVRYWPTEPGEYAVHVICDDEDIRDSPFIAHILPAPPDCFPDKVKAFGPGLEPTGCIVDKPAEFTIDARAAGKGDLKLYAQDADGCPIDIKVIPNGDGTFRCSYVPTKPIKHTIIISWGGVNVPKSPFRVNVGEGSHPERVKVYGPGVEKTGLKANEPTYFTVDCSEAGQGDVSIGIKCAPGVVGPAEADIDFDIIKNDNDTFTVKYTPPGAGRYTIMVLFANQEIPASPFHIKVDPSHDASKVKAEGPGLNRTGVEVGKPTHFTVLTKGAGKAKLDVQFAGTAKGEVVRDFEIIDNHDYSYTVKYTAVQQGNMAVTVTYGGDPVPKSPFVVNVAPPLDLSKIKVQGLNSKVAVGQEQAFSVNTRGAGGQGQLDVRMTSPSRRPIPCKLEPGGGAEAQAVRYMPPEEGPYKVDITYDGHPVPGSPFAVEGVLPPDPSKVCAYGPGLKGGLVGTPAPFSIDTKGAGTGGLGLTVEGPCEAKIECQDNGDGSCAVSYLPTEPGEYTINILFAEAHIPGSPFKATIRPVFDPSKVRASGPGLERGKVGEAATFTVDCSEAGEAELTIEILSDAGVKAEVLIHNNADGTYHITYSPAFPGTYTITIKYGGHPVPKFPTRVHVQPAVDTSGVKVSGPGVEPHGVLREVTTEFTVDARSLTATGGNHVTARVLNPSGAKTDTYVTDNGDGTYRVQYTAYEEGVHLVEVLYDEVAVPKSPFRVGVTEGCDPTRVRAFGPGLEGGLVNKANRFTVETRGAGTGGLGLAIEGPSEAKMSCKDNKDGSCTVEYIPFTPGDYDVNITFGGRPIPGSPFRVPVKDVVDPGKVKCSGPGLGAGVRARVPQTFTVDCSQAGRAPLQVAVLGPTGVAEPVEVRDNGDGTHTVHYTPATDGPYTVAVKYADQEVPRSPFKIKVLPAHDASKVRASGPGLNASGIPASLPVEFTIDARDAGEGLLTVQILDPEGKPKKANIRDNGDGTYTVSYLPDMSGRYTITIKYGGDEIPYSPFRIHALPTGDASKCLVTVSIGGHGLGACLGPRIQIGQETVITVDAKAAGEGKVTCTVSTPDGAELDVDVVENHDGTFDIYYTAPEPGKYVITIRFGGEHIPNSPFHVLACDPLPHEEEPSEVPQLRQPYAPPRPGARPTHWATEEPVVPVEPMESMLRPFNLVIPFAVQKGELTGEVRMPSGKTARPNITDNKDGTITVRYAPTEKGLHQMGIKYDGNHIPGSPLQFYVDAINSRHVSAYGPGLSHGMVNKPATFTIVTKDAGEGGLSLAVEGPSKAEITCKDNKDGTCTVSYLPTAPGDYSIIVRFDDKHIPGSPFTAKITGDDSMRTSQLNVGTSTDVSLKITESDLSQLTASIRAPSGNEEPCLLKRLPNRHIGISFTPKEVGEHVVSVRKSGKHVTNSPFKILVGPSEIGDASKVRVWGKGLSEGHTFQVAEFIVDTRNAGYGGLGLSIEGPSKVDINCEDMEDGTCKVTYCPTEPGTYIINIKFADKHVPGSPFTVKVTGEGRMKESITRRRQAPSIATIGSTCDLNLKIPGNWFQMVSAQERLTRTFTRSSHTYTRTERTEISKTRGGETKREVRVEESTQVGGDPFPAVFGDFLGRERLGSFGSITRQQEGEASSQDMTAQVTSPSGKVEAAEIVEGEDSAYSVRFVPQEMGPHTVAVKYRGQHVPGSPFQFTVGPLGEGGAHKVRAGGTGLERGVAGVPAEFSIWTREAGAGGLSIAVEGPSKAEIAFEDRKDGSCGVSYVVQEPGDYEVSIKFNDEHIPDSPFVVPVASLSDDARRLTVTSLQETGLKVNQPASFAVQLNGARGVIDARVHTPSGAVEECYVSELDSDKHTIRFIPHENGVHSIDVKFNGAHIPGSPFKIRVGEQSQAGDPGLVSAYGPGLEGGTTGVSSEFIVNTLNAGSGALSVTIDGPSKVQLDCRECPEGHVVTYTPMAPGNYLIAIKYGGPQHIVGSPFKAKVTGPRLSGGHSLHETSTVLVETVTKSSSSRGSSYSSIPKFSSDASKVVTRGPGLSQAFVGQKNSFTVDCSKAGTNMMMVGVHGPKTPCEEVYVKHMGNRVYNVTYTVKEKGDYILIVKWGDESVPGSPFKVKVP

SEQ ID NO: 822 - protein, 1158 aa, Homo sapiens
MTHGEELGSDVHQDSIVLTYLEGLLMHQAAGGSGTAVDKKSAGHNEEDQNFNISGSAFPTCQSNGPVLNTHTYQGSGMLHLKKARLLQSSEDWNAAKRKRLSDSIMNLNVKKEALLAGMVDSVPKGKQDSTLLASLLQSFSSRLQTVALSQQIRQSLKEQGYALSHDSLKVEKDLRCYGVASSHLKTLLKKSKVKDQKPDTNLPDVTKNLIRDRFAESPHHVGQSGTKVMSEPLSCAARLQAVASMVEKRASPATSPKPSVACSQLALLLSSEAHLQQYSREHALKTQNANQAASERLAAMARLQENGQKDVGSYQLPKGMSSHLNGQARTSSSKLMASKSSATVFQNPMGIIPSSPKNAGYKNSLERNNIKQAANNSLLLHLLKSQTIPKPMNGHSHSERGSIFEESSTPTTIDEYSDNNPSFTDDSSGDESSYSNCVPIDLSCKHRTEKSESDQPVSLDNFTQSLLNTWDPKVPDVDIKEDQDTSKNSKLNSHQKVTLLQLLLGHKNEENVEKNTSPQGVHNDVSKFNTQNYARTSVIESPSTNRTTPVSTPPLLTSSKAGSPINLSQHSLVIKWNSPPYVCSTQSEKLTNTASNHSMDLTKSKDPPGEKPAQNEGAQNSATFSASKLLQNLAQCGMQSSMSVEEQRPSKQLLTGNTDKPIGMIDRLNSPLLSNKTNAVEENKAFSSQPTGPEPGLSGSEIENLLERRTVLQLLLGNPNKGKSEKKEKTPLRDESTQEHSERALSEQILMVKIKSEPCDDLQIPNTNVHLSHDAKSAPFLGMAPAVQRSAPALPVSEDFKSEPVSPQDFSFSKNGLLSRLLRQNQDSYLADDSDRSHRNNEMALLESKNLCMVPKKRKLYTEPLENPFKKMKNNIVDAANNHSAPEVLYGSLLNQEELKFSRNDLEFKYPAGHGSASESEHRSWARESKSFNVLKQLLLSENCVRDLSPHRSNSVADSKKKGHKNNVTNSKPEFSISSLNGLMYSSTQPSSCMDNRTFSYPGVVKTPVSPTFPEHLGCAGSRPESGLLNGCSMPSEKGPIKWVITDAEKNEYEKDSPRLTKTNPILYYMLQKGGNSVTSRETQDKDIWREASSAESVSQVTAKEELLPTAETKASFFNLRSPYNSHMGNNASRPHSANGEVYGLLGSVLTIKKESE

SEQ ID NO: 823 - protein, 1153 aa, Homo sapiens
MACPWKFLFKTKFHQYAMNGEKDINNNVEKAPCATSSPVTQDDLQYHNLSKQQNESPQPLVETGKKSPESLVKLDATPLSSPRHVRIKNWGSGMTFQDTLHHKAKGILTCRSKSCLGSIMTPKSLTRGPRDKPTPPDELLPQAIEFVNQYYGSFKEAKIEEHLARVEAVTKEIETTGTYQLTGDELIFATKQAWRNAPRCIGRIQWSNLQVFDARSCSTAREMFEHICRHVRYSTNNGNIRSAITVFPQRSDGKHDFRVWNAQLIRYAGYQMPDGSIRGDPANVEFTQLCIDLGWKPKYGRFDVVPLVLQANGRDPELFEIPPDLVLEVAMEHPKYEWFRELELKWYALPAVANMLLEVGGLEFPGCPFNGWYMGTEIGVRDFCDVQRYNILEEVGRRMGLETHKLASLWKDQAVVEINIAVLHSFQKQNVTIMDHHSAAESFMKYMQNEYRSRGGCPADWIWLVPPMSGSITPVFHQEMLNYVLSPFYYYQVEAWKTHVWQDEKRRPKRREIPLKVLVKAVLFACMLMRKTMASRVRVTILFATETGKSEALAWDLGALFSCAFNPKVVCMDKYRLSCLEEERLLLVVTSTFGNGDCPGNGEKLKKSLFMLKELNNKFRYAVFGLGSSMYPRFCAFAHDIDQKLSHLGASQLTPMGEGDELSGQEDAFRSWAVQTFKAACETFDVRGKQHIQIPKLYTSNVTWDPHHYRLVQDSQPLDLSKALSSMHAKNVFTMRLKSRQNLQSPTSSRATILVELSCEDGQGLNYLPGEHLGVCPGNQPALVQGILERVVDGPTPHQTVRLEALDESGSYWVSDKRLPPCSLSQALTYFLDITTPPTQLLLQKLAQVATEEPERQRLEALCQPSEYSKWKFTNSPTFLEVLEEFPSLRVSAGFLLSQLPILKPRFYSISSSRDHTPTEIHLTVAVVTYHTRDGQGPLHHGVCSTWLNSLKPQDPVPCFVRNASGFHLPEDPSHPCILIGPGTGIAPFRSFWQQRLHDSQHKGVRGGRMTLVFGCRRPDEDHIYQEEMLEMAQKGVLHAVHTAYSRLPGKPKVYVQDILRQQLASEVLRVLHKEPGHLYVCGDVRMARDVAHTLKQLVAAKLKLNEEQVEDYFFQLKSQKRYHEDIFGAVFPYEAKKDRVAVQPSSLEMSAL

SEQ ID NO: 824 - protein, 1188 aa, Homo sapiens
MDLPRGLVVAWALSLWPGFTDTFNMDTRKPRVIPGSRTAFFGYTVQQHDISGNKWLVVGAPLETNGYQKTGDVYKCPVIHGNCTKLNLGRVTLSNVSERKDNMRLGLSLATNPKDNSFLACSPLWSHECGSSYYTTGMCSRVNSNFRFSKTVAPALQRCQTYMDIVIVLDGSNSIYPWVEVQHFLINILKKFYIGPGQIQVGVVQYGEDVVHEFHLNDYRSVKDVVEAASHIEQRGGTETRTAFGIEFARSEAFQKGGRKGAKKVMIVITDGESHDSPDLEKVIQQSERDNVTRYAVAVLGYYNRRGINPETFLNEIKYIASDPDDKHFFNVTDEAALKDIVDALGDRIFSLEGTNKNETSFGLEMSQTGFSSHVVEDGVLLGAVGAYDWNGAVLKETSAGKVIPLRESYLKEFPEELKNHGAYLGYTVTSVVSSRQGRVYVAGAPRFNHTGKVILFTMHNNRSLTIHQAMRGQQIGSYFGSEITSVDIDGDGVTDVLLVGAPMYFNEGRERGKVYVYELRQNLFVYNGTLKDSHSYQNARFGSSIASVRDLNQDSYNDVVVGAPLEDNHAGAIYIFHGFRGSILKTPKQRITASELATGLQYFGCSIHGQLDLNEDGLIDLAVGALGNAVILWSRPVVQINASLHFEPSKINIFHRDCKRSGRDATCLAAFLCFTPIFLAPHFQTTTVGIRYNATMDERRYTPRAHLDEGGDRFTNRAVLLSSGQELCERINFHVLDTADYVKPVTFSVEYSLEDPDHGPMLDDGWPTTLRVSVPFWNGCNEDEHCVPDLVLDARSDLPTAMEYCQRVLRKPAQDCSAYTLSFDTTVFIIESTRQRVAVEATLENRGENAYSTVLNISQSANLQFASLIQKEDSDGSIECVNEERRLQKQVCNVSYPFFRAKAKVAFRLDFEFSKSIFLHHLEIELAAGSDSNERDSTKEDNVAPLRFHLKYEADVLFTRSSSLSHYEVKPNSSLERYDGIGPPFSCIFRIQNLGLFPIHGMMMKITIPIATRSGNRLLKLRDFLTDEANTSCNIWGNSTEYRPTPVEEDLRRAPQLNHSNSDVVSINCNIRLVPNQEINFHLLGNLWLRSLKALKYKSMKIMVNAALQRQFHSPFIFREEDPSRQIVFEISKQEDWQVPIWIIVGSTLGGLLLLALLVLALWKLGFFRSARRRREPGLDPTPKVLE

SEQ ID NO: 825 - protein, 873 aa, Homo sapiens
MTTRKLSAHSAATPGYKAVTHKHHTGWARMAKTGLPEKGQSQAGGESGSGQLLDQENGAGESALVSVYVHLDFPDKTWPPELSRTLTLPAASASSSPRPLLTGLRLTTGEYMSCFEAQGFKWNLYEVVRVPLKATDVARLPYQLSISCATSPGFQLSCCIPSTNLAYTAAWSPGEGSKASSFNESGSQCFVLAVQRCPMADTTYACDLQSLGLAPLRVPISITIIQDGDITCPEDASVLTWNVTKAGHVAQAPCPESKRGIVRRLCGADGVWGPVHSSCTDARLLALFTRTKLLQAGQGSPAEEVPQILAQLPGQAAEASSPSDLLTLLSTMKYVAKVVAEARIQLDRRALKNLLIATDKVLDMDTRSLWTLAQARKPWAGSTLLLAVETLACSLCPQDHPFAFSLPNVLLQSQLFGPTFPADYSISFPTRPPLQAQIPRHSLAPLVRNGTEISITSLVLRKLDHLLPSNYGQGLGDSLYATPGLVLVISIMAGDRAFSQGEVIMDFGNTDGSPHCVFWDHSLFQGRGGWSKEGCQAQVASASPTAQCLCQHLTAFSVLMSPHTVPEEPALALLTQVGLGASILALLVCLGVYWLVWRVVVRNKISYFRHAALLNMVFCLLAADTCFLGAPFLSPGPRSPLCLAAAFLCHFLYLATFFWMLAQALVLAHQLLFVFHQLAKHRVLPLMVLLGYLCPLGLAGVTLGLYLPQGQYLREGECWLDGKGGALYTFVGPVLAIIGVNGLVLAMAMLKLLRPSLSEGPPAEKRQALLGVIKALLILTPIFGLTWGLGLATLLEEVSTVPHYIFTILNTLQGVFILLFGCLMDRKIQEALRKRFCRAQAPSSTISLATNEGCILEHSKGGSDTARKTDASE

SEQ ID NO: 826 - protein, 293 aa, Homo sapiens
MDTTRYSKWGGSSEEVPGGPWGRWVHWSRRPLFLALAVLVTTVLWAVILSILLSKASTERAALLDGHDLLRTNASKQTAALGALKEEVGDCHSCCSGTQAQLQTTRAELGEAQAKLMEQESALRELRERVTQGLAEAGRGREDVRTELFRALEAVRLQNNSCEPCPTSWLSFEGSCYFFSVPKTTWAAAQDHCADASAHLVIVGGLDEQGFLTRNTRGRGYWLGLRAVRHLGKVQGYQWVDGVSLSFSHWNQGEPNDAWGRENCVMMLHTGLWNDAPCDSEKDGWICEKRHNC

SEQ ID NO: 827 - protein, 617 aa, Homo sapiens
MAFPHRPDAPELPDFSMLKRLARDQLIYLLEQLPGKKDLFIEADLMSPLDRIANVSILKQHEVDKLYKVENKPALSSNEQLCFLVRPRIKNMRYIASLVNADKLAGRTRKYKVIFSPQKFYACEMVLEEEGIYGDVSCDEWAFSLLPLDVDLLSMELPEFFRDYFLEGDQRWINTVAQALHLLSTLYGPFPNCYGIGRCAKMAYELWRNLEEEEDGETKGRRPEIGHIFLLDRDVDFVTALCSQVVYEGLVDDTFRIKCGSVDFGPEVTSSDKSLKVLLNAEDKVFNEIRNEHFSNVFGFLSQKARNLQAQYDRRRGMDIKQMKNFVSQELKGLKQEHRLLSLHIGACESIMKKKTKQDFQELIKTEHALLEGFNIRESTSYIEEHIDRQVSPIESLRLMCLLSITENGLIPKDYRSLKTQYLQSYGPEHLLTFSNLRRAGLLTEQAPGDTLTAVESKVSKLVTDKAAGKITDAFSSLAKRSNFRAISKKLNLIPRVDGEYDLKVPRDMAYVFGGAYVPLSCRIIEQVLERRSWQGLDEVVRLLNCSDFAFTDMTKEDKASSESLRLILVVFLGGCTFSEISALRFLGREKGYRFIFLTTAVTNSARLMEAMSEVKA

SEQ ID NO: 828 - protein, 655 aa, Homo sapiens
MAMAKARKPREALLWALSDLEENDFKKLKFYLRDMTLSEGQPPLARGELEGLIPVDLAELLISKYGEKEAVKVVLKGLKVMNLLELVDQLSHICLHDYREVYREHVRCLEEWQEAGVNGRYNQVLLVAKPSSESPESLACPFPEQELESVTVEALFDSGEKPSLAPSLVVLQGSAGTGKTTLARKMVLDWATGTLYPGRFDYVFYVSCKEVVLLLESKLEQLLFWCCGDNQAPVTEILRQPERLLFILDGFDELQRPFEEKLKKRGLSPKESLLHLLIRRHTLPTCSLLITTRPLALRNLEPLLKQARHVHILGFSEEERARYFSSYFTDEKQADRAFDIVQKNDILYKACQVPGICWVVCSWLQGQMERGKVVLETPRNSTDIFMAYVSTFLPPDDDGGCSELSRHRVLRSLCSLAAEGIQHQRFLFEEAELRKHNLDGPRLAAFLSSNDYQLGLAIKKFYSFRHISFQDFFHAMSYLVKEDQSRLGKESRREVQRLLEVKEQEGNDEMTLTMQFLLDISKKDSFSNLELKFCFRISPCLAQDLKHFKEQMESMKHNRTWDLEFSLYEAKIKNLVKGIQMNNVSFKIKHSNEKKSQSQNLFSVKSSLSHGPKEEQKCPSVHGQKEGKDNIAGTQKEASTGKGRGTEETPKNTYI

SEQ ID NO: 829 - protein, 930 aa, Homo sapiens
MTGLEDQEFDFEFLFEFNQRDEGAAAAAPEHYGYASSNVSPALPLPTAHSTLPAPCHNLQTSTPGIIPPADHPSGYGAALDGGPAGYFLSSGHTRPDGAPALESPRIEITSCLGLYHNNNQFFHDVEVEDVLPSSKRSPSTATLSLPSLEAYRDPSCLSPASSLSSRSCNSEASSYESNYSYPYASPQTSPWQSPCVSPKTTDPEEGFPRGLGACTLLGSPRHSPSTSPRASVTEESWLGARSSRPASPCNKRKYSLNGRQPPYSPHHSPTPSPHGSPRVSVTDDSWLGNTTQYTSSAIVAAINALTTDSSLDLGDGVPVKSRKTTLEQPPSVALKVEPVGEDLGSPPPPADFAPEDYSSFQHIRKGGFCDQYLAVPQHPYQWAKPKPLSPTSYMSPTLPALDWQLPSHSGPYELRIEVQPKSHHRAHYETEGSRGAVKASAGGHPIVQLHGYLENEPLMLQLFIGTADDRLLRPHAFYQVHRITGKTVSTTSHEAILSNTKVLEIPLLPENSMRAVIDCAGILKLRNSDIELRKGETDIGRKNTRVRLVFRVHVPQPSGRTLSLQVASNPIECSQRSAQELPLVEKQSTDSYPVVGGKKMVLSGHNFLQDSKVIFVEKAPDGHHVWEMEAKTDRDLCKPNSLVVEIPPFRNQRITSPVHVSFYVCNGKRKRSQYQRFTYLPANVPIIKTEPTDDYEPAPTCGPVSQGLSPLPRPYYSQQLAMPPDPSSCLVAGFPPCPQRSTLMPAAPGVSPKLHDLSPAAYTKGVASPGHCHLGLPQPAGEAPAVQDVPRPVATHPGSPGQPPPALLPQQVSAPPSSSCPPGLEHSLCPSSPSPPLPPATQEPTCLQPCSPACPPATGRPQHLPSTVRRDESPTAGPRLLPEVHEDGSPNLAPIPVTVKREPEELDQLYLDDVNEIIRNDLSSTSTHS

SEQ ID NO: 830 - protein, 519 aa, Homo sapiens
MGHLENTSVVFPRAIFSLCEKETRKLTLCLFSRSSSAEHPGASKPPISSSSMTSRILLRQQLMREQMQEQERREQQQKLQAAQFMQQRVPVSQTPAINVSVPTTLPSATQVPMEVLKVQTHLENPTKYHIQQAQRQQVKQYLSTTLANKHANQVLSLPCPNQPGDHVMPPVPGSSAPNSPMAMLTLNSNCEKEGFYKFEEQNRAESECPGMNTHSRASCMQMDDVIDDIISLESSYNEEILGLMDPALQMANTLPVSGNLIDLYGNQGLPPPGLTISNSCPANLPNIKRELTESEARALAKERQKKDNHNLIERRRRFNINDRIKELGTLIPKSNDPDMRWNKGTILKASVDYIRKLQREQQRAKELENRQKKLEHANRHLLLRIQELEMQARAHGLSLIPSTGLCSPDLVNRIIKQEPVLENCSQDLLQHHADLTCTTTLDLTDGTITFNNNLGTGTEANQAYSVPTKMGSKLEDILMDDTLSPVGVTDPLLSSVSPGASKTSSRRSSMSMEETEHTC

SEQ ID NO: 831 - protein, 672 aa, Homo sapiens
MEEHTEAGSAPEMGAQKALIDNPADILVIAAYFLLVIGVGLWSMCRTNRGTVGGYFLAGRSMVWWPVGASLFASNIGSGHFVGLAGTGAASGLAVAGFEWNALFVVLLLGWLFAPVYLTAGVITMPQYLRKRFGGRRIRLYLSVLSLFLYIFTKISVDMFSGAVFIQQALGWNIYASVIALLGITMIYTVTGGLAALMYTDTVQTFVILGGACILMGYAFHEVGGYSGLFDKYLGAATSLTVSEDPAVGNISSFCYRPRPDSYHLLRHPVTGDLPWPALLLGLTIVSGWYWCSDQVIVQRCLAGKSLTHIKAGCILCGYLKLTPMFLMVMPGMISRILYPDEVACVVPEVCRRVCGTEVGCSNIAYPRLVVKLMPNGLRGLMLAVMLAALMSSLASIFNSSSTLFTMDIYTRLRPRAGDRELLLVGRLWVVFIVVVSVAWLPVVQAAQGGQLFDYIQAVSSYLAPPVSAVFVLALFVPRVNEQGAFWGLIGGLLMGLARLIPEFSFGSGSCVQPSACPAFLCGVHYLYFAIVLFFCSGLLTLTVSLCTAPIPRKHLHRLVFSLRHSKEEREDLDADEQQGSSLPVQNGCPESAMEMNEPQAPAPSLFRQCLLWFCGMSRGGVGSPPPLTQEEAAAAARRLEDISEDPSWARVVNLNALLMMAVAVFLWGFYA

SEQ ID NO: 832 - protein, 543 aa, Homo sapiens
MESSKKMDSPGALQTNPPLKLHTDRSAGTPVFVPEQGGYKEKFVKTVEDKYKCEKCHLVLCSPKQTECGHRFCESCMAALLSSSSPKCTACQESIVKDKVFKDNCCKREILALQIYCRNESRGCAEQLMLGHLLVHLKNDCHFEELPCVRPDCKEKVLRKDLRDHVEKACKYREATCSHCKSQVPMIALQKHEDTDCPCVVVSCPHKCSVQTLLRSEGTNQQIKAHEASSAVQHVNLLKEWSNSLEKKVSLLQNESVEKNKSIQSLHNQICSFEIEIERQKEMLRNNESKILHLQRVIDSQAEKLKELDKEIRPFRQNWEEADSMKSSVESLQNRVTELESVDKSAGQVARNTGLLESQLSRHDQMLSVHDIRLADMDLRFQVLETASYNGVLIWKIRDYKRRKQEAVMGKTLSLYSQPFYTGYFGYKMCARVYLNGDGMGKGTHLSLFFVIMRGEYDALLPWPFKQKVTLMLMDQGSSRRHLGDAFKPDPNSSSFKKPTGEMNIASGCPVFVAQTVLENGTYIKDDTIFIKVIVDTSDLPDP

SEQ ID NO: 833 - protein, 1173 aa, Homo sapiens
MAVETLSPDWEFDRVDDGSQKIHAEVQLKNYGKFLEEYTSQLRRIEDALDDSIGDVWDFNLDPIALKLLPYEQSSLLELIKTENKVLNKVITVYAALCCEIKKLKYEAETKFYNGLLFYGEGATDASMVEGDCQIQMGRFISFLQELSCFVTRCYEVVMNVVHQLAALYISNKIAPKIIETTGVHFQTMYEHLGELLTVLLTLDEIIDNHITLKDHWTMYKRLLKSVHHNPSKFGIQEEKLKPFEKFLLKLEGQLLDGMIFQACIEQQFDSLNGGVSVSKNSTFAEEFAHSIRSIFANVEAKLGEPSEIDQRDKYVGICGLFVLHFQIFRTIDKKFYKSLLDICKKVPAITLTANIIWFPDNFLIQKIPAAAKLLDRKSLQAIKIHRDTFLQQKAQSLTKDVQSYYVFVSSWMMKMESILSKEQRMDKFAEDLTNRCNVFIQGFLYAYSISTIIKTTMNLYMSMQKPMTKTSVKALCRLVELLKAIEHMFYRRSMVVADSVSHITQHLQHQALHSISVAKKRVISDKKYSEQRLDVLSALVLAENTLNGPSTKQRRLIVSLALSVGTQMKTFKDEELFPLQVVMKKLDLISELRERVQTQCDCCFLYWHRAVFPIYLDDVYENAVDAARLHYMFSALRDCVPAMMHARHLESYEILLDCYDKEIMEILNEHLLDKLCKEIEKDLRLSVHTHLKLDDRNPFKVGMKDLALFFSLNPIRFFNRFIDIRAYVTHYLDKTFYNLTTVALHDWATYSEMRNLATQRYGLVMTEAHLPSQTLEQGLDVLEIMRNIHIFVSRYLYNLNNQIFIERTSNNKHLNTINIRHIANSIRTHGTGIMNTTVNFTYQFLKKKFYIFSQFMYDEHIKSRLIKDIRFFREIKDQNDHKYPFDRAEKFNRGIRKLGVTPEGQSYLDQFRQLISQIGNAMGYVRMIRSGGLHCSSNAIRFVPDLEDIVNFEELVKEEGLAEETLKAARHLDSVLSDHTRNSAEGTEYFKMLVDVFAPEFRRPKNIHLRNFYIIVPPLTLNFVEHSISCKEKLNKKNKIGAAFTDDGFAMGVAYILKLLDQYREFDSLHWFQSVREKYLKEIRAVAKQQNVQSASQDEKLLQTMNLTQKRLDVYLQEFELLYFSLSSARIFFRADKTAAEENQEKKEKEEETKTSNGDLSDSTVSADPVVK

SEQ ID NO: 834 - protein, 803 aa, Homo sapiens
MTTAKEPSASGKSVQQQEQELVGSNPPQRNWKGIAIALLVILVICSLIVTSVILLTPAEDNSLSQKKKVTVEDLFSEDFKIHDPEAKWISDTEFIYREQKGTVRLWNVETNTSTVLIEGKKIESLRAIRYEISPDREYALFSYNVEPIYQHSYTGYYVLSKIPHGDPQSLDPPEVSNAKLQYAGWGPKGQQLIFIFENNIYYCAHVGKQAIRVVSTGKEGVIYNGLSDWLYEEEILKTHIAHWWSPDGTRLAYAAINDSRVPIMELPTYTGSIYPTVKPYHYPKAGSENPSISLHVIGLNGPTHDLEMMPPDDPRMREYYITMVKWATSTKVAVTWLNRAQNVSILTLCDATTGVCTKKHEDESEAWLHRQNEEPVFSKDGRKFFFIRAIPQGGRGKFYHITVSSSQPNSSNDNIQSITSGDWDVTKILAYDEKGNKIYFLSTEDLPRRRQLYSANTVGNFNRQCLSCDLVENCTYFSASFSHSMDFFLLKCEGPGVPMVTVHNTTDKKKMFDLETNEHVKKAINDRQMPKVEYRDIEIDDYNLPMQILKPATFTDTTHYPLLLVVDGTPGSQSVAEKFEVSWETVMVSSHGAVVVKCDGRGSGFQGTKLLHEVRRRLGLLEEKDQMEAVRTMLKEQYIDRTRVAVFGKDYGGYLSTYILPAKGENQGQTFTCGSALSPITDFKLYASAFSERYLGLHGLDNRAYEMTKVAHRVSALEEQQFLIIHPTADEKIHFQHTAELITQLIRGKANYSLQIYPDESHYFTSSSLKQHLYRSIINFFVECFRIQDKLLTVTAKEDEEED

SEQ ID NO: 835 - protein, 400 aa, Homo sapiens
MDSSAAPTNASNCTDALAYSSCSPAPSPGSWVNLSHLDGNLSDPCGPNRTDLGGRDSLCPPTGSPSMITAITIMALYSIVCVVGLFGNFLVMYVIVRYTKMKTATNIYIFNLALADALATSTLPFQSVNYLMGTWPFGTILCKIVISIDYYNMFTSIFTLCTMSVDRYIAVCHPVKALDFRTPRNAKIINVCNWILSSAIGLPVMFMATTKYRQGSIDCTLTFSHPTWYWENLLKICVFIFAFIMPVLIITVCYGLMILRLKSVRMLSGSKEKDRNLRRITRMVLVVVAVFIVCWTPIHIYVIIKALVTIPETTFQTVSWHFCIALGYTNSCLNPVLYAFLDENFKRCFREFCIPTSSNIEQQNSTRIRQNTRDHPSTANTVDRTNHQLENLEAETAPLP

SEQ ID NO: 836 - protein, 535 aa, Homo sapiens
MRSSVSRQTYSTKGGFSSNSASGGSGSQARTSFSSVTVSRSSGSGGGAHCGPGTGGFGSRSLYNLGGHKSISVSVAGGALLGRALGGFGFGSRAFMGQGAGRQTFGPACPPGGIQEVTVNQSLLTPLHVEIDPEIQRVRTQEREQIKTLNNKFASFIDKVRFLEQQNKVLETKWALLQEQGQNLGVTRNNLEPLFEAYLGSMRSTLDRLQSERGRLDSELRNVQDLVEDFKNKYEDEINKHTAAENEFVVLKKDVDAAYMGRMDLHGKVGTLTQEIDFLQQLYEMELSQVQTHVSNTNVVLSMDNNRNLDLDSIIAEVKAQYELIAQRSRAEAEAWYQTKYEELQVTAGKHGDNLRDTKNEIAELTRTIQRLQGEADAAKKQCQQLQTAIAEAEQRGELALKDAQKKLGDLDVALHQAKEDLTRLLRDYQELMNVKLALDVEIATYRKLLESEESRMSGECPSAVSISVTGNSTTVCGGGAASFGGGISLGGSGGATKGGFSTNVGYSTVKGGPVSAGTSILRKTTTVKTSSQRY

SEQ ID NO: 837 - protein, 2430 aa, Homo sapiens
MAPPAHKSILERSENVLMSPWKGKLIVQDRMLCDIALWSTYGAMIPTQLPQELDFKYVMKVSSLKKRLPEAAFRKQNYLEEKVCFQDLCFNLYEVELSNRQGENIDKLTECIKNKQLAIIKCLEDRGFFILLTSSALLSEPDFGGKQMGLHGLHLFRSPLSTGVKDLKVEDDISMKVIPILSTLNCALLETKKSLPEERIHPNTLVKRHFQELYKADRSPSLSVAPQDRMKDPTFLGKLPSGFDLIPPAEKCPSESLTQLNSYFSDPSAYILEVSTALDLLAEHPQSPCVSDGICDAGFSLVMTPDPEFLVSEAEVRKETETKKDSEEMLKAKKRVFPLSPASNLRVQPKRKASMPHMVQSKKVNLCRPFPKRTASRADNSSDSPTTLKLVKGQFPQKRKRGAEVLTAQFVQKTKLDRKNQEAPISKDVPVPTNAKRARKQEKSPVKTVPRAKPPVKKSPQKQRVNIVKGNENPRNRKQLQPVKGETASKLQSEISRGCQEDGISINSVQPENTTAAHNDLPENSIVNYDSQALNMLADLALSSATSSTPVSEARNLHCSSELPQNDVLLSKENSLRGTSDHEYHRGVKTQKGELLPNPSSDRKSNSGSDLTVSQDEESLVPCSQAPAKAQSALTEEMLESSDASQSSSVSVEHSYALLLTEHSKKHLQEREILSPLFPRNGTKSPEAATPVGKVMPFRHQPGLLLQQKPPDDPVVKPKDRPPSARVKKSSCSRIVLSCDDSVKITFKCETEYAFSLDSKYTNNPLEKTVVRALHGPWNTDLPDNVEEVKLLLHMWVALFYSNQNKIIRSSRKVVEHSNPAKYVSINSTLESCELREIEESLGLEKCSADSLLETNEISRAHAAEVSFRDPNCLLPFIKTPLTQGLELCVQNEQKKTFARECDPDTQEDQNFICSYNNEVTGEEAKQESLETSNLVLSGIGSTQTNGPSVPSEEEIVQPLDSTRVASYSGTVTQATFTRTYDGPGSQPVICQSSVYGTLENKVDILDAAVQTKTGTLQDLIQHGSPINNECHPSLERKDDNMGCAVINPEPITLTFEKNAHVPIQTEGVNTADERTTFKKELIKQVSPAASLRHPVSTSENARTQGLRDIPSLVVAGQKGTKYLCASSVGGETLDKAVCSLQKETPLPVSLPSDKTMVMEALSLAKSSSHLSPSEEVRCTQDFLSQTQSLLGLSSEGLLELTQVEVDSSSASTTLGRQCSLNCISSGCHTSGDSLELRKNHKNGPNTENMNLEAFDSVFIKQTSLSVSREVSLELSEEDSDIDLALTISPPTSPREEMPAGEIEQFEEAPFSNLELQDVAEEIGEPEEVALTESREVSSADNVSVYPSVSEEPVENKERKGDNLQPVTLILSKENCTLEIAEEINVTSDFPFDSVIEEVSPASSPEPPVPVKETRPYQAVTPCILKLHGTQCEKSNQISQCESEDLGITEKENVFVGPTHPVGQDNFTQVQQMQVSAEMPLILTDHPGRTGRPTLPGKVTEEIVSSEHDEGLSFSGKVQCYGRELNQPASAAKCTGDFSPSPEKLVKSGNPLQPVSIENRNLDLKHLVLESSEPPFGPRNVIENKSLSDTLVSTTAPSGIVNVSVKQQTSPKSSQNHLFPGDLKTDEGIYLQVKSLTAASVDGAYSTQGCMCSVVPTLCSSSDNATLTHYVRPINAEPVFQAQEIPAGRMASLLKNGEPEAELHKETTGPGTAGPQSNTTSSLKGERKAIHTLQDVSTCETKELLNVGVSSLCAGPYQNTADTKENLSKEPLASFVSESFDTSVCGIATEHVEIENSGEGLRAEAGSETLGRDGEVGVNSDMHYELSGDSDLDLLGDCRNPRLDLEDSYTLRGSYTRKKDVPTDGYESSLNFHNNNQEDWGCSSWVPGMETSLPPGHWTAAVKKEEKCVPPYVQIRDLHGILRTYANFSITKELKDTMRTSHGLRRHPSFSANCGLPSSWTSTWQVADDLTQNTLDLEYLRFAHKLKQTIKNGDSQHSASSANVFPKESPTQISIGAFPSTKISEAPFLHPAPRSRSPLLVTVVESDPRPQGQPRRGYTASSLDSSSSWRERCSHNRDLRNSQRNHTVSFHLNKLKYNSTVKESRNDISLILNEYAEFNKVMKNSNQFIFQDKELNDVSGEATAQEMYLPFPGRSASYEDIIIDVCTNLHVKLRSVVKEACKSTFLFYLVETEDKSFFVRTKNLLRKGGHTEIEPQHFCQAFHRENDTLIIIIRNEDISSHLHQIPSLLKLKHFPSVIFAGVDSPGDVLDHTYQELFRAGGFVISDDKILEAVTLVQLKEIIKILEKLNGNGRWKWLLHYRENKKLKEDERVDSTAHKKNIMLKSFQSANIIELLHYHQCDSRSSTKAEILKCLLNLQIQHIDARFAVLLTDKPTIPREVFENSGILVTDVNNFIENIEKIAAPFRSSYW

SEQ ID NO: 838 - protein, 819 aa, Homo sapiens
MAAPAGKASRTGALRPRAQKGRVRRAVRISSLVAQEVLSLGADVLPEYKLQAPRIHRWTILHYSPFKAVWDWLILLLVIYTAVFTPYSAAFLLKETEEGPPATECGYACQPLAVVDLIVDIMFIVDILINFRTTYVNANEEVVSHPGRIAVHYFKGWFLIDMVAAIPFDLLIFGSGSEELIGLLKTARLLRLVRVARKLDRYSEYGAAVLFLLMCTFALIAHWLACIWYAIGNMEQPHMDSRIGWLHNLGDQIGKPYNSSGLGGPSIKDKYVTALYFTFSSLTSVGFGNVSPNTNSEKIFSICVMLIGSLMYASIFGNVSAIIQRLYSGTARYHTQMLRVREFIRFHQIPNPLRQRLEEYFQHAWSYTNGIDMNAVLKGFPECLQADICLHLNRSLLQHCKPFRGATKGCLRALAMKFKTTHAPPGDTLVHAGDLLTALYFISRGSIEILRGDVVVAILGKNDIFGEPLNLYARPGKSNGDVRALTYCDLHKIHRDDLLEVLDMYPEFSDHFWSSLEITFNLRDTNMIPGSPGSTELEGGFSRQRKRKLSFRRRTDKDTEQPGEVSALGPGRAGAGPSSRGRPGGPWGESPSSGPSSPESSEDEGPGRSSSPLRLVPFSSPRPPGEPPGGEPLMEDCEKSSDTCNPLSGAFSGVSNIFSFWGDSRGRQYQELPRCPAPTPSLLNIPLSSPGRRPRGDVESRLDALQRQLNRLETRLSADMATVLQLLQRQMTLVPPAYSAVTTPGPGPTSTSPLLPVSPLPTLTLDSLSQVSQFMACEELPPGAPELPQEGPTRRLSLPGQLGALTSQPLHRHGSDPGS

SEQ ID NO: 839 - protein, 543 aa, Homo sapiens
MRTLHAVSHPYSNSMRFQRVLYFICAFQNISCGIHYLASVFMGVTPHHVCRPPGNLQNGEIWELSRCSRNKRENTSSLGYEYTGSKKEFPCVDGYIYDQNTWKSTAVTQWNLVCDRKWLAMLIQPLFMFGVLLGSVTFGYFSDRLGRRVVLWATSSSMFLFGIAAAFAVDYYTFMAARFFLAMVASGYLVVGFVYVMEFIGMKSRTWASVHLHSFFAVGTLLVALTGYLVRTWWLYQMILSTVTVPFILCCWVLPETPFWLLSEGRYEEAQKIVDIMAKWNRASSCKLSELLSLDLQGPVSNSPTEVQKHNLSYLFYNWSITKRTLTVWLIWFTGSLGFYSFSLNSVNLGGNEYLNLFLLGVVEIPAYTFVCIAMDKVGRRTVLAYSLFCSALACGVVMVIPQKHYILGVVTAMVGKFAIGAAFGLIYLYTAELYPTIVRSLAVGSGSMVCRLASILAPFSVDLSSIWIFIPQLFVGTMALLSGVLTLKLPETLGKRLATTWEEAAKLESENESKSSKLLLTTNNSGLEKTEAITPRDSGLGE

SEQ ID NO: 840 - protein, 246 aa, Homo sapiens
MFQLPILNFSPQQVAGVCETLEESGDVERLGRFLWSLPVAPAACEALNKNESVLRARAIVAFHGGNYRELYHILENHKFTKESHAKLQALWLEAHYQEAEKLRGRPLGPVDKYRVRKKFPLPRTIWDGEQKTHCFKERTRHLLREWYLQDPYPNPSKKRELAQATGLTPTQVGNWFKNRRQRDRAAAAKNRLQQQVLSQGSGRALRAEGDGTPEVLGVATSPAASLSSKAATSAISITSSDSECDI

SEQ ID NO: 841 - protein, 914 aa, Homo sapiens
MSQSQNAIFTSPTGEENLMNSNHRDSESITDVCSNEDLPEVELVSLLEEQLPQYRLKVDTLFLYENQDWTQSPHQRQHASDALSPVLAEETFRYMILGTDRVEQMTKTYNDIDMVTHLLAERDRDLELAARIGQALLKRNHVLSEQNESLEEQLGQAFDQVNQLQHELCKKDELLRIVSIASEESETDSSCSTPLRFNESFSLSQGLLQLEMLQEKLKELEEENMALRSKACHIKTETVTYEEKEQQLVSDCVKELRETNAQMSRMTEELSGKSDELIRYQEELSSLLSQIVDLQHKLKEHVIEKEELKLHLQASKDAQRQLTMELHELQDRNMECLGMLHESQEEIKELRSRSGPTAHLYFSQSYGAFTGESLAAEIEGTMRKKLSLDEESSLFKQKAQQKRVFDTVRIANDTRGRSISFPALLPIPGSNRSSVIMTAKPFESGLQQTEDKSLLNQGSSSEEVAGSSQKMGQPGPSGDSDLATALHRLSLRRQNYLSEKQFFAEEWQRKIQVLADQKEGVSGCVTPTESLASLCTTQSEITDLSSASCLRGFMPEKLQIVKPLEGSQTLYHWQQLAQPNLGTILDPRPGVITKGFTQLPGDAIYHISDLEEDEEEGITFQVQQPLEVEEKLSTSKPVTGIFLPPITSAGGPVTVATANPGKCLSCTNSTFTFTTCRILHPSDITQVTPSSGFPSLSCGSSGSSSSNTAVNSPALSYRLSIGESITNRRDSTTTFSSTMSLAKLLQERGISAKVYHSPISENPLQPLPKSLAIPSTPPNSPSHSPCPSPLPFEPRVHLSENFLASRPAETFLQEMYGLRPSRNPPDVGQLKMNLVDRLKRLGIARVVKNPGAQENGRCQEAEIGPQKPDSAVYLNSGSSLLGGLRRNQSLPVIMGSFAAPVCTSSPKMGVLKED

SEQ ID NO: 842 - protein, 515 aa, Homo sapiens
MAPEMDQFYRSTMAIYKSIMEQFNPALENLVYLGNNYLRAFHALSEAAEVYFSAIQKIGERALQSPTSQILGEILVQMSDTQRHLNSDLEVVVQTFHGGLLQHMEKNTKLDMQFIKDSRQHYELEYRHRAANLEKCMSELWRMERKRDKNVREMKESVNRLHAQMQAFVSESQRAAELEEKRRYRFLAEKHLLLSNTFLQFFGRARGMLQNRVLLWKEQSEASRSPSRAHSPGLLGPALGPPYPSGRLTPTCLDMPPRPLGEFSSPRSRHGSGSYGTEPDARPASQLEPDRRSLPRTPSASSLYSGSAQSSRSNSFGERPGGGGGARRVRALVSHSEGANHTLLRFSAGDVVEVLVPEAQNGWLYGKLEGSSASGWFPEAYVKALEEGPVNPMTPVTPMTSMTSMSPMTPMNPGNELPSRSYPLRGSHSLDDLLDRPGNSTPSRVPSRAPSPAPPPLPSSRRSSMGSTAVATDVKKLMSSEQYPPQELFPRGTNPFATVKLRPTITNDRSAPLIR

SEQ ID NO: 843 - protein, 514 aa, Homo sapiens
MSRESDVEAQQSHGSSACSQPHGSVTQSQGSSSQSQGISSSSTSTMPNSSQSSHSSSGTLSSLETVSTQELYSIPEDQEPEDQEPEEPTPAPWARLWALQDGFANLECVNDNYWFGRDKSCEYCFDEPLLKRTDKYRTYSKKHFRIFREVGPKNSYIAYIEDHSGNGTFVNTELVGKGKRRPLNNNSEIALSLSRNKVFVFFDLTVDDQSVYPKALRDEYIMSKTLGSGACGEVKLAFERKTCKKVAIKIISKRKFAIGSAREADPALNVETEIEILKKLNHPCIIKIKNFFDAEDYYIVLELMEGGELFDKVVGNKRLKEATCKLYFYQMLLAVQITDFGHSKILGETSLMRTLCGTPTYLAPEVLVSVGTAGYNRAVDCWSLGVILFICLSGYPPFSEHRTQVSLKDQITSGKYNFIPEVWAEVSEKALDLVKKLLVVDPKARFTTEEALRHPWLQDEDMKRKFQDLLSEENESTALPQVLAQPSTSRKRPREGEAEGAETTKRPAVCAAVL

SEQ ID NO: 844 - protein, 302 aa, Homo sapiens
MRRWAWAAVVVLLGPQLVLLGGVGARREAQRTQQPGQRADPPNATASASSREGLPEAPKPSQASGPEFSDAHMTWLNFVRRPDDGALRKRCGSRDKKPRDLFGPPGPPGAEVTAETLLHEFQELLKEATERRFSGLLDPLLPQGAGLRLVGEAFHCRLQGPRRVDKRTLVELHGFQAPAAQGAFLRGSGLSLASGRFTAPVSGIFQFSASLHVDHSELQGKARLRARDVVCVLICIESLCQRHTCLEAVSGLESNSRVFTLQVQGLLQLQAGQYASVFVDNGSGAVLTIQAGSSFSGLLLGT

SEQ ID NO: 845 - protein, 516 aa, Homo sapiens
MPVPERPAAGPDSPRPGTRRAAPRVLFGEWLLGEISSGCYEGLQWLDEARTCFRVPWKHFARKDLSEADARIFKAWAVARGRWPPSSRGGGPPPEAETAERAGWKTNFRCALRSTRRFVMLRDNSGDPADPHKVYALSRELCWREGPGTDQTEAEAPAAVPPPQGGPPGPFLAHTHAGLQAPGPLPAPAGDKGDLLLQAVQQSCLADHLLTASWGADPVPTKAPGEGQEGLPLTGACAGGPGLPAGELYGWAVETTPSPGPQPAALTTGEAAAPESPHQAEPYLSPSPSACTAVQEPSPGALDVTIMYKGRTVLQKVVGHPSCTFLYGPPDPAVRATDPQQVAFPSPAELPDQKQLRYTEELLRHVAPGLHLELRGPQLWARRMGKCKVYWEVGGPPGSASPSTPACLLPRNCDTPIFDFRVFFQELVEFRARQRRGSPRYTIYLGFGQDLSAGRPKEKSLVLVKLEPWLCRVHLEGTQREGVSSLDSSSLSLCLSSANSLYDDIECFLMELEQPA

SEQ ID NO: 846 - protein, 132 aa, Homo sapiens
MVKKFKDSKSVLLITCKTCNRTVKHHGKSRSFVSTLKSNPATPTSKLSLKTPERRTANPNHDMSGSKGKSPASVFRTPTSGQSVSTCSSKNTSKTKKHFSQLKMLLSQNESQKIPKVDFRNFLSSLKGGLLK

SEQ ID NO: 847 - protein, 443 aa, Homo sapiens
MRSEKEGAGGLRAAVAARGPSGREKLSALEVQFHRDSQQQEAETPPTSSSGCGGGAGKPREEKRTALSKVVIRRLPPGLTKEQLEEQLRPLPAHDYFEFFAADLSLYPHLYSRAYINFRNPDDILLFRDRFDGYIFLDSKDPEYKKFLETYCVEEEKTSANPETLLGEMEAKTRELIARRTTPLLEYIKNRKLEKQRIREEKREERRRRELEKKRLREEEKRRRREEERCKKKETDKQKKIAEKEVRIKLLKKPEKGEEPTTEKPKERGEEIDTGGGKQESCAPGAVVKARPMEGSLEEPQETSHSGSDKEHRDVERSQEQESEAQRYHVDDGRRHRAHHEPERLSRRSEDEQRWGKGPGQDRGKKGSQDSGAPGEAMERLGRAQRCDDSPAPRKERLANKDRPALQLYDPGARFRARECGGNRRICKAEGSGTGPEKREEAE

SEQ ID NO: 848 - protein, 882 aa, Homo sapiens
MPGRARTRARGRARRRESYQQEAPGGPRAPGSATTQEPPQLQSTPRPLQEEVPVVRPLQPRAARGGAGGGAQSQGVKEPGPEAGLHTAPLQERRIGGVFQDLVVNTRQDMKHVKDSKTGSEGTVVQLLANHFRVISRPQWVAYKYNVDYKPDIEDGNLRTILLDQHRRKFGERHIFDGNSLLLSRPLKERRVEWLSTTKDKNIVKITVEFSKELTPTSPDCLRYYNILFRRTFKLLDFEQVGRNYYTKKKAIQLYRHGTSLEIWLGYVTSVLQYENSITLCADVSHKLLRIETAYDFIKRTSAQAQTGNIREEVTNKLIGSIVLTKYNNKTYRVDDIDWKQNPEDTFNKSDGSKITYIDYYRQQHKEIVTVKKQPLLVSQGRWKKGLTGTQREPILLIPQLCHMTGLTDEICKDYSIVKELAKHTRLSPRRRHHTLKEFINTLQDNKKVRELLQLWDLKFDTNFLSVPGRVLKNANIVQGRRMVKANSQGDWSREIRELPLLNAMPLHSWLILYSRSSHREAMSLKGHLQSVTAPMGITMKPAEMIEVDGDANSYIDTLRKYTRPTLQMGMSCLLVFKVICILPNDDKRRYDSIKRYLCTKCPIPSQCVVKKTLEKVQARTIVTKIAQQMNCKMGGALWKVETDVQRTMFVGIDCFHDIVNRQKSIAGFVASTNAELTKWYSQCVIQKTGEELVKELEICLKAALDVWCKNESSMPHSVIVYRDGVGDGQLQALLDHEAKKMSTYLKTISPNNFTLAFIVVKKRINTRFFLKHGSNFQNPPPGTVIDVELTRNEWYDFFIVSQSVQDGTVTPTHYNVIYDTIGLSPDTVQRLTYCLCHMYYNLPGIIRVPAPCHYAHKLAYLVGQSIHQEPNRSLSTRLFYL

SEQ ID NO: 849 - protein, 994 aa, Homo sapiens
MSYDYHQNWGRDGGPRSSGGGYGGGPAGGHGGNRGSGGGGGGGGGGRGGRGRHPGHLKGREIGMWYAKKQGQKNKEAERQERAVVHMDERREEQIVQLLNSVQAKNDKESEAQISWFAPEDHGYGTEVSTKNTPCSENKLDIQEKKLINQEKKMFRIRNRSYIDRDSEYLLQENEPDGTLDQKLLEDLQKKKNDLRYIEMQHFREKLPSYGMQKELVNLIDNHQVTVISGETGCGKTTQVTQFILDNYIERGKGSACRIVCTQPRRISAISVAERVAAERAESCGSGNSTGYQIRLQSRLPRKQGSILYCTTGIILQWLQSDPYLSSVSHIVLDEIHERNLQSDVLMTVVKDLLNFRSDLKVILMSATLNAEKFSEYFGNCPMIHIPGFTFPVVEYLLEDVIEKIRYVPEQKEHRSQFKRGFMQGHVNRQEKEEKEAIYKERWPDYVRELRRRYSASTVDVIEMMEDDKVDLNLIVALIRYIVLEEEDGAILVFLPGWDNISTLHDLLMSQVMFKSVNQTQVFKRTPPGVRKIVIATNIAETSITIDDVVYVIDGGKIKETHFDTQNNISTMSAEWVSKANAKQRKGRAGRVQPGHCYHLYNGLRASLLDDYQLPEILRTPLEELCLQIKILRLGGIAYFLSRLMDPPSNEAVLLSIRHLMELNALDKQEELTPLGVHLARLPVEPHIGKMILFGALFCCLDPVLTIAASLSFKDPFVIPLGKEKIADARRKELAKDTRSDHLTVVNAFEGWEEARRRGFRYEKDYCWEYFLSSNTLQMLHNMKGQFAEHLLGAGFVSSRNPKDPESNINSDNEKIIKAVICAGLYPKVAKIRLNLGKKRKMVKVYTKTDGLVAVHPKSVNVEQTDFHYNWLIYHLKMRTSSIYLYDCTEVSPYCLLFFGGDISIQKDNDQETIAVDEWIVFQSPARIAHLVKELRKELDILLQEKIESPHPVDWNDTKSRDCAVLSAIIDLIKTQEKATPRNFPPRFQDGYYS

SEQ ID NO: 850 - protein, 611 aa, Homo sapiens
MDPGAGSETSLTVNEQVIVMSGHETIRVLEVGVDAQLPAEEESKGLEGVAAEGSQSGDPAEASQAAGEAGPDNLGSSAEATVKSPPGIPPSPATAIATFSQAPSQPQASQTLTPLAVQAAPQVLTQENLATVLTGVMVPAGAVTQPLLIPISIAGQVAGQQGLAVWTIPTATVAALPGLTAASPTGGVFKPPLAGLQAAAVLNTALPAPVQAAAPVQASSTAQPRPPAQPQTLFQTQPLLQTTPAILPQPTAATAAAPTPKPVDTPPQITVQPAGFAFSPGIISAASLGGQTQILGSLTTAPVITSAIPSMPGISSQILTNAQGQVIGTLPWVVNSASVAAPAPAQSLQVQAVTPQLLLNAQGQVIATLASSPLPPPVAVRKPSTPESPAKSEVQPIQPTPTVPQPAVVIASPAPAAKPSASAPIPITCSETPTVSQLVSKPHTPSLDEDGINLEEIREFAKNFKIRRLSLGLTQTQVGQALTATEGPAYSQSAICRFEKLDITPKSAQKLKPVLEKWLNEAELRNQEGQQNLMEFVGGEPSKKRKRRTSFTPQAIEALNAYFEKNPLPTGQEITEIAKELNYDREVVRVWFCNRRQTLKNTSKLNVFQIP

SEQ ID NO: 851 - protein, 373 aa, Homo sapiens
MWAAGRWGPTFPSSYAGFSADCRPRSRPSSDSCSVPMTGARGQGLEVVRSPSPPLPLSCSNSTRSLLSPLGHQSFQFDEDDGDGEDEEDVDDEEDVDEDAHDSEAKVASLRGMELQGCASTQVESENNQEEQKQVRLPESRLTPWEVWFIGKEKEERDRLQLKALEELNQQLEKRKEMEEREKRKIIAEEKHKEWVQKKNEQKRKEREQKINKEMEEKAAKELEKEYLQEKAKEKYQEWLKKKNAEECERKKKEKEKEKQQQAEIQEKKEIAEKKFQEWLENAKHKPRPAAKSYGYANGKLTGFYSGNSYPEPAFYNPIPWKPIHMPPPKEAKDLSGRKSKRPVISQPHKSSSLVIHKARSNLCLGTLCRIQR

SEQ ID NO: 852 - protein, 782 aa, Homo sapiens
MARARAGALLALWVLGAAAHPQCLDFRPPFRPTQPLRLCAQYSDFGCCDEGRDAELTRRFWALASRVDAAEWAACAGYARDLLCQECSPYAAHLYDAEDPFTPLRTVPGLCQDYCLDMWHKCRGLFRHLSTDQELWALEGNLARFCRYLSLDDTDYCFPYLLVNKNLNSNLGHVVADAKGCLQLCLEEVANGLRNPVAMVHARDGTHRFFVAEQVGLVWAYLPDRSRLGKPFLNISRVVLTSPWEGDERGFLGIAFHPSFQHNRRLYVYYSVGIRSSEWIRISEFRVSEDDENAVDHSSERIILEVKEPASNHNGGQLLFGDDGYLYIFTGDGGMAGDPFGTFGNAQNKSALLGKVLRIDVDRKERGLPYGIPPDNPFVGDPAAQPEVYALGVRNMWRCSFDRGDPSSGTGRGRLFCGDVGQNKFEEVDVVERGGNYGWRAREGFECYDRSLCANTSLNDLLPIFAYPHTVGKSVTGGYVYRGCEYPNLNGLYIFGDFMSGRLMSLQENPGTGQWQYSEICMGHGQTCEFPGLINNYYPYIISFGEDEAGELYFMSTGEPSATAPRGVVYKIIDASRRAPPGKCQIQPAQVKIRSRLIPFVPKEKFIPKTRSTPRPTARAPTRAPRRGRPTAAPPAPTPRPARPTQQPGSRRGGGRRRGRLNSASRAFRDGEVRLVRPAGLSSGSGRVEVFVGGRWGTVCDDSWNISGAAVVCRQLGFAYAVRAVKRAEFGQGGSLPILLDDVRCAGWERNLLECQHNGVGTHNCEHDEDAGVVCSHQNPDL

SEQ ID NO: 853 - protein, 595 aa, Homo sapiens
MPACCSCSDVFQYETNKVTRIQSMNYGTIKWFFHVIIFSYVCFALVSDKLYQRKEPVISSVHTKVKGIAEVKEEIVENGVKKLVHSVFDTADYTFPLQGNSFFVMTNFLKTEGQEQRLCPEYPTRRTLCSSDRGCKKGWMDPQSKGIQTGRCVVYEGNQKTCEVSAWCPIEAVEEAPRPALLNSAENFTVLIKNNIDFPGHNYTTRNILPGLNITCTFHKTQNPQCPIFRLGDIFRETGDNFSDVAIQGGIMGIEIYWDCNLDRWFHHCRPKYSFRRLDDKTTNVSLYPGYNFRYAKYYKENNVEKRTLIKVFGIRFDILVFGTGGKFDIIQLVVYIGSTLSYFGLAAVFIDFLIDTYSSNCCRSHIYPWCKCCQPCVVNEYYYRKKCESIVEPKPTLKYVSFVDESHIRMVNQQLLGRSLQDVKGQEVPRPAMDFTDLSRLPLALHDTPPIPGQPEEIQLLRKEATPRSRDSPVWCQCGSCLPSQLPESHRCLEELCCRKKPGACITTSELFRKLVLSRHVLQFLLLYQEPLLALDVDSTNSRLRHCAYRCYATWRFGSQDMADFAILPSCCRWRIRKEFPKSEGQYSGFKSPY

SEQ ID NO: 854 - protein, 2320 aa, Homo sapiens
MAEPSSARRPVPLIESELYFLIARYLSAGPCRRAAQVLVQELEQYQLLPKRLDWEGNEHNRSYEELVLSNKHVAPDHLLQICQRIGPMLDKEIPPSISRVTSLLGAGRQSLLRTAKDCRHTVWKGSAFAALHRGRPPEMPVNYGSPPNLVEIHRGKQLTGCSTFSTAFPGTMYQHIKMHRRILGHLSAVYCVAFDRTGHRIFTGSDDCLVKIWSTHNGRLLSTLRGHSAEISDMAVNYENTMIAAGSCDKIIRVWCLRTCAPVAVLQGHTGSITSLQFSPMAKGSQRYMVSTGADGTVCFWQWDLESLKFSPRPLKFTEKPRPGVQMLCSSFSVGGMFLATGSTDHVIRMYFLGFEAPEKIAELESHTDKVDSIQFCNNGDRFLSGSRDGTARIWRFEQLEWRSILLDMATRISGDLSSEEERFMKPKVTMIAWNQNDSIVVTAVNDHVLKVWNSYTGQLLHNLMGHADEVFVLETHPFDSRIMLSAGHDGSIFIWDITKGTKMKHYFNMIEGQGHGAVFDCKFSQDGQHFACTDSHGHLLIFGFGCSKPYEKIPDQMFFHTDYRPLIRDSNNYVLDEQTQQAPHLMPPPFLVDVDGNPHPTKYQRLVPGRENSADEHLIPQLGYVATSDGEVIEQIISLQTNDNDERSPESSILDGMIRQLQQQQDQRMGADQDTIPRGLSNGEETPRRGFRRLSLDIQSPPNIGLRRSGQVEGVRQMHQNAPRSQIATERDLQAWKRRVVVPEVPLGIFRKLEDFRLEKGEEERNLYIIGRKRKTLQLSHKSDSVVLVSQSRQRTCRRKYPNYGRRNRSWRELSSGNESSSSVRHETSCDQSEGSGSSEEDEWRSDRKSESYSESSSDSSSRYSDWTADAGINLQPPLRTSCRRRITRFCSSSEDEISTENLSPPKRRRKRKKENKPKKENLRRMTPAELANMEHLYEFHPPVWITDTTLRKSPFVPQMGDEVIYFRQGHEAYIEAVRRNNIYELNPNKEPWRKMDLRDQELVKIVGIRYEVGPPTLCCLKLAFIDPATGKLMDKSFSIRYHDMPDVIDFLVLRQFYDEARQRNWQSCDRFRSIIDDAWWFGTVLSQEPYQPQYPDSHFQCYIVRWDNTEIEKLSPWDMEPIPDNVDPPEELGASISVTTDELEKLLYKPQAGEWGQKSRDEECDRIISGIDQLLNLDIAAAFAGPVDLCTYPKYCTVVAYPTDLYTIRMRLVNRFYRRLSALVWEVRYIEHNARTFNEPESVIARSAKKITDQLLKFIKNQHCTNISELSNTSENDEQNAEDLDDSDLPKTSSGRRRVHDGKKSIRATNYVESNWKKQCKELVNLIFQCEDSEPFRQPVDLVEYPDYRDIIDTPMDFGTVRETLDAGNYDSPLEFCKDIRLIFSNAKAYTPNKRSKIYSMTLRLSALFEEKMKKISSDFKIGQKFNEKLRRSQRFKQRQNCKGDSQPNKSIRNLKPKRLKSQTKIIPELVGSPTQSTSSRTAYLGTHKTSAGISSGVTSGDSSDSAESSERRKRNRPITNGSTLSESEVEDSLATSLSSSASSSSEESKESSRARESSSRSGLSRSSNLRVTRTRAAQRKTGPVSLANGCGRKATRKRVYLSDSDNNSLETGEILKARAGNNRKVLRKCAAVAANKIKLMSDVEENSSSESVCSGRKLPHRNASAVARKKLLHNSEDEQSLKSEIEEEELKDENQLLPVSSSHTAQSNVDESENRDSESESDLRVARKNWHANGYKSHTPAPSKTKFLKIESSEEDSKSHDSDHACNRTAGPSTSVQKLKAESISEEADSEPGRSGGRKYNTFHKNASFFKKTKILSDSEDSESEEQDREDGKCHKMEMNPISGNLNCDPIAMSQCSSDHGCETDLDSDDDKIEKPNNFMKDSASQDNGLSRKISRKRVCSSDSDSSLQVVKKSSKARTGLLRITRRCAATAANKIKLMSDVEDVSLENVHTRSKNGRKKPLHLACTTAKKKLSDCEGSVHCEVPSEQYACEGKPPDPDSEGSTKVLSQALNGDSDSEDMLNSEHKHRHTNIHKIDAPSKRKSSSVTSSGEDSKSHIPGSETDRTFSSESTLAQKATAENNFEVELNYGLRRWNGRRLRTYGKAPFSKTKVIHDSQETAEKEVKRKRSHPELENVKISETTGNSKFRPDTSSKSSDLGSVTESDIDCTDNTKTKRRKTKGKAKVVRKEFVPRDREPNTKVRTCMHNQKDAVQMPSETLKAKMVPEKVPRRCATVAANKIKIMSNLKETISGPENVWIRKSSRKLPHRNASAAAKKKLLNVYKEDDTTINSESEKELEDINRKMLFLRGFRSWKENAQ

SEQ ID NO: 855 - protein, 321 aa, Homo sapiens
MAAAEAGGDDARCVRLSAERAQALLADVDTLLFDCDGVLWRGETAVPGAPEALRALRARGKRLGFITNNSSKTRAAYAEKLRRLGFGGPAGPGASLEVFGTAYCTALYLRQRLAGAPAPKAYVLGSPALAAELEAVGVASVGVGPEPLQGEGPGDWLHAPLEPDVRAVVVGFDPHFSYMKLTKALRYLQQPGCLLVGTNMDNRLPLENGRFIAGTGCLVRAVEMAAQRQADIIGKPSRFIFDCVSQEYGINPERTVMVGDRLDTDILLGATCGLKTILTLTGVSTLGDVKNNQESDCVSKKKMVPDFYVDSIADLLPALQG

SEQ ID NO: 856 - protein, 379 aa, Homo sapiens
MPHSSLHPSIPCPRGHGAQKAALVLLSACLVTLWGLGEPPEHTLRYLVLHLASLQLGLLLNGVCSLAEELRHIHSRYRGSYWRTVRACLGCPLRRGALLLLSIYFYYSLPNAVGPPFTWMLALLGLSQALNILLGLKGLAPAEISAVCEKGNFNVAHGLAWSYYIGYLRLILPELQARIRTYNQHYNNLLRGAVSQRLYILLPLDCGVPDNLSMADPNIRFLDKLPQQTGDHAGIKDRVYSNSIYELLENGQRAGTCVLEYATPLQTLFAMSQYSQAGFSREDRLEQAKLFCRTLEDILADAPESQNNCRLIAYQEPADDSSFSLSQEVLRHLRQEEKEEVTVGSLKTSAVPSTSTMSQEPELLISGMEKPLPLRTDFS

SEQ ID NO: 857 - protein, 408 aa, Homo sapiens
MSEHVEPAAPGPGPNGGGGGPAPARGPRTPNLNPNPLINVRDRLFHALFFKMAVTYSRLFPPAFRRLFEFFVLLKALFVLFVLAYIHIVFSRSPINCLEHVRDKWPREGILRVEVRHNSSRAPVFLQFCDSGGRGSFPGLAVEPGSNLDMEDEEEEELTMEMFGNSSIKFELDIEPKVFKPPSSTEALNDSQEFPFPETPTKVWPQDEYIVEYSLEYGFLRLSQATRQRLSIPVMVVTLDPTRDQCFGDRFSRLLLDEFLGYDDILMSSVKGLAENEENKGFLRNVVSGEHYRFVSMWMARTSYLAAFAIMVIFTLSVSMLLRYSHHQIFVFIVDLLQMLEMNMAIAFPAAPLLTVILALVGMEAIMSEFFNDTTTAFYIILIVWLADQYDAICCHTSTSKRHWLRIP

SEQ ID NO: 858 - protein, 703 aa, Homo sapiens
MERAAPSRRVPLPLLLLGGLALLAAGVDADVLLEACCADGHRMATHQKDCSLPYATESKECRMVQEQCCHSQLEELHCATGISLANEQDRCATPHGDNASLEATFVKRCCHCCLLGRAAQAQGQSCEYSLMVGYQCGQVFQACCVKSQETGDLDVGGLQETDKIIEVEEEQEDPYLNDRCRGGGPCKQQCRDTGDEVVCSCFVGYQLLSDGVSCEDVNECITGSHSCRLGESCINTVGSFRCQRDSSCGTGYELTEDNSCKDIDECESGIHNCLPDFICQNTLGSFRCRPKLQCKSGFIQDALGNCIDINECLSISAPCPIGHTCINTEGSYTCQKNVPNCGRGYHLNEEGTRCVDVDECAPPAEPCGKGHRCVNSPGSFRCECKTGYYFDGISRMCVDVNECQRYPGRLCGHKCENTLGSYLCSCSVGFRLSVDGRSCEDINECSSSPCSQECANVYGSYQCYCRRGYQLSDVDGVTCEDIDECALPTGGHICSYRCINIPGSFQCSCPSSGYRLAPNGRNCQDIDECVTGIHNCSINETCFNIQGGFRCLAFECPENYRRSAATLQQEKTDTVRCIKSCRPNDVTCVFDPVHTISHTVISLPTFREFTRPEEIIFLRAITPPHPASQANIIFDITEGNLRDSFDIIKRYMDGMTVGVVRQVRPIVGPFHAVLKLEMNYVVGGVVSHRNVVNVHIFVSEYWF

SEQ ID NO: 859 - protein, 1170 aa, Homo sapiens
MDEETRHSLECIQANQIFPRKQLIREDENLQVPFLELHGESTEFVGRAEDAIIALSNYRLHIKFKESLVNVPLQLIESVECRDIFQLHLTCKDCKVIRCQFSTFEQCQEWLKRLNNAIRPPAKIEDLFSFAYHAWCMEVYASEKEQHGDLCRPGEHVTSRFKNEVERMGFDMNNAWRISNINEKYKLCGSYPQELIVPAWITDKELESVSSFRSWKRIPAVIYRHQSNGAVIARCGQPEVSWWGWRNADDEHLVQSVAKACASDSRSSGSKLSTRNTSRDFPNGGDLSDVEFDSSLSNASGAESLAIQPQKLLILDARSYAAAVANRAKGGGCECPEYYPNCEVVFMGMANIHSIRRSFQSLRLLCTQMPDPGNWLSALESTKWLHHLSVLLKSALLVVHAVDQDQRPVLVHCSDGWDRTPQIVALAKLLLDPYYRTIEGFQVLVEMEWLDFGHKFADRCGHGENSDDLNERCPVFLQWLDCVHQLQRQFPCSFEFNEAFLVKLVQHTYSCLFGTFLCNNAKERGEKHTQERTCSVWSLLRAGNKAFKNLLYSSQSEAVLYPVCHVRNLMLWSAVYLPCPSPTTPVDDSCAPYPAPGTSPDDPPLSRLPKTRSYDNLTTACDNTVPLASRRCSDPSLNEKWQEHRRSLELSSLAGPGEDPLSADSLGKPTRVPGGAELSVAAGVAEGQMENILQEATKEESGVEEPAHRAGIEIQEGKEDPLLEKESRRKTPEASAIGLHQDPELGDAALRSHLDMSWPLFSQGISEQQSGLSVLLSSLQVPPRGEDSLEVPVEQFRIEEIAEGREEAVLPIPVDAKVGYGTSQSCSLLPSQVPFETRGPNVDSSTDMLVEDKVKSVSGPQGHHRSCLVNSGKDRLPQTMEPSPSETSLVERPQVGSVVHRTSLGSTLSLTRSPCALPLAECKEGLVCNGAPETENRASEQPPGLSTLQMYPTPNGHCANGEAGRSKDSLSRQLSAMSCSSAHLHSRNLHHKWLHSHSGRPSATSSPDQPSRSHLDDDGMSVYTDTIQQRLRQIESGHQQEVETLKKQVQELKSRLESQYLTSSLHFNGDFGDEVMTRWLPDHLAAHCYACDSAFWLASRKHHCRDTDRVDQTWNCGNVFCSSCCNQKVPVPSQQLFEPSRVCKSCYSSLHPTSSSIDLELDKPIAATSN

SEQ ID NO: 860 - protein, 797 aa, Homo sapiens
MQDGNFLLSALQPEAGVCSLALPSDLQLDRRGAEGPEAERLRAARVQEQVRARLLQLGQQPRHNGAAEPEPEAETARGTSRGQYHTLQAGFSSRSQGLSGDKTSGFRPIAKPAYSPASWSSRSAVDLSCSRRLSSAHNGGSAFGAAGYGGAQPTPPMPTRPVSFHERGGVGSRADYDTLSLRSLRLGPGGLDDRYSLVSEQLEPAATSTYRAFAYERQASSSSSRAGGLDWPEATEVSPSRTIRAPAVRTLQRFQSSHRSRGVGGAVPGAVLEPVARAPSVRSLSLSLADSGHLPDVHGFNSYGSHRTLQRLSSGFDDIDLPSAVKYLMASDPNLQVLGAAYIQHKCYSDAAAKKQARSLQAVPRLVKLFNHANQEVQRHATGAMRNLIYDNADNKLALVEENGIFELLRTLREQDDELRKNVTGILWNLSSSDHLKDRLARDTLEQLTDLVLSPLSGAGGPPLIQQNASEAEIFYNATGFLRNLSSASQATRQKMRECHGLVDALVTSINHALDAGKCEDKSVENAVCVLRNLSYRLYDEMPPSALQRLEGRGRRDLAGAPPGEVVGCFTPQSRRLRELPLAADALTFAEVSKDPKGLEWLWSPQIVGLYNRLLQRCELNRHTTEAAAGALQNITAGDRRWAGVLSRLALEQERILNPLLDRVRTADHHQLRSLTGLIRNLSRNARNKDEMSTKVVSHLIEKLPGSVGEKSPPAEVLVNIIAVLNNLVVASPIAARDLLYFDGLRKLIFIKKKRDSPDSEKSSRAASSLLANLWQYNKLHRDFRAKGYRKEDFLGP

SEQ ID NO: 861 - protein, 474 aa, Homo sapiens
MALAPERAAPRVLFGEWLLGEISSGCYEGLQWLDEARTCFRVPWKHFARKDLSEADARIFKAWAVARGRWPPSSRGGGPPPEAETAERAGWKTNFRCALRSTRRFVMLRDNSGDPADPHKVYALSRELCWREGPGTDQTEAEAPAAVPPPQGGPPGPFLAHTHAGLQAPGPLPAPAGDKGDLLLQAVQQSCLADHLLTASWGADPVPTKAPGEGQEGLPLTGACAGGEAAAPESPHQAEPYLSPSPSACTAVQEPSPGALDVTIMYKGRTVLQKVVGHPSCTFLYGPPDPAVRATDPQQVAFPSPAELPDQKQLRYTEELLRHVAPGLHLELRGPQLWARRMGKCKVYWEVGGPPGSASPSTPACLLPRNCDTPIFDFRVFFQELVEFRARQRRGSPRYTIYLGFGQDLSAGRPKEKSLVLVKLEPWLCRVHLEGTQREGVSSLDSSSLSLCLSSANSLYDDIECFLMELEQPA

SEQ ID NO: 862 - protein, 678 aa, Homo sapiens
MAPSLSPGPAALRRAPQLLLLLLAAECALAALLPAREATQFLRPRQRRAFQVFEEAKQGHLERECVEELCSREEAREVFENDPETDYFYPRYLDCINKYGSPYTKNSGFATCVQNLPDQCTPNPCDRKGTQACQDLMGNFFCLCKAGWGGRLCDKDVNECSQENGGCLQICHNKPGSFHCSCHSGFELSSDGRTCQDIDECADSEACGEARCKNLPGSYSCLCDEGFAYSSQEKACRDVDECLQGRCEQVCVNSPGSYTCHCDGRGGLKLSQDMDTCEDILPCVPFSVAKSVKSLYLGRMFSGTPVIRLRFKRLQPTRLVAEFDFRTFDPEGILLFAGGHQDSTWIVLALRAGRLELQLRYNGVGRVTSSGPVINHGMWQTISVEELARNLVIKVNRDAVMKIAVAGDLFQPERGLYHLNLTVGGIPFHEKDLVQPINPRLDGCMRSWNWLNGEDTTIQETVKVNTRMQCFSVTERGSFYPGSGFAFYSLDYMRTPLDVGTESTWEVEVVAHIRPAADTGVLFALWAPDLRAVPLSVALVDYHSTKKLKKQLVVLAVEHTALALMEIKVCDGQEHVVTVSLRDGEATLEVDGTRGQSEVSAAQLQERLAVLERHLRSPVLTFAGGLPDVPVTSAPVTAFYRGCMTLEVNRRLLDLDEAAYKHSDITAHSCPPVEPAAA

SEQ ID NO: 863 - protein, 565 aa, Homo sapiens
MAKLWFKFQRYFRRKPVRFFTFLALYLTAGSLVFLHSGFVGQPAVSGNQANPAAAGGPAEGAELSFLGDMHLGRGFRDTGEASSIARRYGPWFKGKDGNERAKLGDYGGAWSRALKGRVVREKEEERAKYIGCYLDDTQSRALRGVSFFDYKKMTIFRCQDNCAERGYLYGGLEFGAECYCGHKIQATNVSEAECDMECKGERGSVCGGANRLSVYRLQLAQESARRYGSAVFRGCFRRPDNLSLALPVTAAMLNMSVDKCVDFCTEKEYPLAALAGTACHCGFPTTRFPLHDREDEQLCAQKCSAEEFESCGTPSYFIVYQTQVQDNRCMDRRFLPGKSKQLIALASFPGAGNTWARHLIELATGFYTGSYYFDGSLYNKGFKGERDHWRSGRTICIKTHESGQKEIEAFDAAILLIRNPYKALMAEFNRKYGGHIGFAAHAHWKGKEWPEFVRNYAPWWATHTLDWLKFGKKVLVVHFEDLKQDLFVQLGRMVSLLGVAVREDRLLCVESQKDGNFKRSGLRKLEYDPYTADMQKTISAYIKMVDAALKGRNLTGVPDDYYPR

SEQ ID NO: 864 - protein, 329 aa, Homo sapiens
MDPQCTMGLSNILFVMAFLLSGAAPLKIQAYFNETADLPCQFANSQNQSLSELVVFWQDQENLVLNEVYLGKEKFDSVHSKYMGRTSFDSDSWTLRLHNLQIKDKGLYQCIIHHKKPTGMIRIHQMNSELSVLANFSQPEIVPISNITENVYINLTCSSIHGYPEPKKMSVLLRTKNSTIEYDGVMQKSQDNVTELYDVSISLSVSFPDVTSNMTIFCILETDKTRLLSSPFSIELEDPQPPPDHIPWITAVLPTVIICVMVFCLILWKWKKKKRPRNSYKCGTNTMEREESEQTKKREKIHIPERSDEAQRVFKSSKTSSCDKSDTCF

SEQ ID NO: 865 - protein, 316 aa, Homo sapiens
MASPEHPGSPGCMGPITQCTARTQQEAPATGPDLPHPGPDGHLDTHSGLSSNSSMTTRELQQYWQNQKCRWKHVKLLFEIASARIEERKVSKFVVYQIIVIQTGSFDNNKAVLERRYSDFAKLQKALLKTFREEIEDVEFPRKHLTGNFAEEMICERRRALQEYLGLLYAIRCVRRSREFLDFLTRPELREAFGCLRAGQYPRALELLLRVLPLQEKLTAHCPAAAVPALCAVLLCHRDLDRPAEAFAAGERALQRLQAREGHRYYAPLLDAMVRLAYALGKDFVTLQERLEESQLRRPTPRGITLKELTVREYLH

SEQ ID NO: 866 - protein, 684 aa, Homo sapiens
MACLGFLLPVGFLLLISTVAGGKYGVAHVVSENWSKDYCILFSSDYITLPRDLHHAPLLPLYDGTKAPWCPGEDSPHQAQLRSPSQRPLRQTTAMVMRGNCSFHTKGWLAQGQGAHGLLIVSRVSDQQCSDTTLAPQDPRQPLADLTIPVAMLHYADMLDILSHTRGEAVVRVAMYAPPEPIIDYNMLVIFILAVGTVAAGGYWAGLTEANRLQRRRARRGGGSGGHHQLQEAAAAEGAQKEDNEDIPVDFTPAMTGVVVTLSCSLMLLLYFFYDHFVYVTIGIFGLGAGIGLYSCLSPLVCRLSLRQYQRPPHSLWASLPLPLLLLASLCATVIIFWVAYRNEDRWAWLLQDTLGISYCLFVLHRVRLPTLKNCSSFLLALLAFDVFFVFVTPFFTKTGESIMAQVALGPAESSSHERLPMVLKVPRLRVSALTLCSQPFSILGFGDIVVPGFLVAYCCRFDVQVCSRQIYFVACTVAYAVGLLVTFMAMVLMQMGQPALLYLVSSTLLTSLAVAACRQELSLFWTGQGRAKMCGLGCAPSAGSRQKQEGAADAHTASTLERGTSRGAGDLDSNPGEDTTEIVTISENEATNPEDRSDSSEGWSDAHLDPNELPFIPPGASEELMPLMPMAMLIPLMPLMPPPSELGHVHAQAQAHETGLPWAGLHKRKGLKVRKSMSTQAPL

SEQ ID NO: 867 - protein, 425 aa, Homo sapiens
MSSILPFTPPIVKRLLGWKKGEQNGQEEKWCEKAVKSLVKKLKKTGQLDELEKAITTQNVNTKCITIPRSLDGRLQVSHRKGLPHVIYCRLWRWPDLHSHHELRAMELCEFAFNMKKDEVCVNPYHYQRVETPVLPPVLVPRHTEIPAEFPPLDDYSHSIPENTNFPAGIEPQSNIPETPPPGYLSEDGETSDHQMNHSMDAGSPNLSPNPMSPAHNNLDLQPVTYCEPAFWCSISYYELNQRVGETFHASQPSMTVDGFTDPSNSERFCLGLLSNVNRNAAVELTRRHIGRGVRLYYIGGEVFAECLSDSAIFVQSPNCNQRYGWHPATVCKIPPGCNLKIFNNQEFAALLAQSVNQGFEAVYQLTRMCTIRMSFVKGWGAEYRRQTVTSTPCWIELHLNGPLQWLDKVLTQMGSPSIRCSSVS

SEQ ID NO: 868 - protein, 881 aa, Homo sapiens
MAGAAPRVRYLAGFCCPLGGLAAGKPRVLCHEAEVFLSTGSELVYVYDQEGGLLTAAFRFPDQVWHLELLAPRRLLYALCARRGLYCLSLDHPGRSRSTSQDDRDSEDGDQPSPVIPVDPDACILPDAALCAFTLLDSVLVTLVQGPARWKMQLFEQPCPGEDPRPGGQIGEVELSSYTPPAGVPGKPAAPHFLPVLCSVSPSGSRVPHDLLGGSGGFTLEDALFGLLFGADATLLQSPVVLCGLPDGQLCCVILKALVTSRSAPGDPNALVKILHHLEEPVIFIGALKTEPQAAEAAENFLPDEDVHCDCLVAFGHHGRMLAIKASWDESGKLVPELREYCLPGPVLCAACGGGGRVYHSTPSDLCVVDLSRGSTPLGPEQPEEGPGGLPPMLCPASLNICSVVSLSASPRTHEGGTKLLALSAKGRLMTCSLDLDSEMPGPARMTTESAGQKIKELLSGIGNISERVSFLKKAVDQRNKALTSLNEAMNVSCALLSSGTGPRPISCTTSTTWSRLQTQDVLMATCVLENSSSFSLDQGWTLCIQVLTSSCALDLDSACSAITYTIPVDQLGPGARREVTLPLGPGENGGLDLPVTVSCTLFYSLREVVGGALAPSDSEDPFLDECPSDVLPEQEGVCLPLSRHTVDMLQCLRFPGLAPPHTRAPSPLGPTRDPVATFLETCREPGSQPAGPASLRAEYLPPSVASIKVSAELLRAALKDGHSGVPLCCATLQWLLAENAAVDVVRARALSSIQGVAPDGANVHLIVREVAMTDLCPAGPIQAVEIQVESSSLADICRAHHAVVGRMQTMVTEQATQGSSAPDLRVQYLRQIHANHETLLREVQTLRDRLCTEDEASSCATAQRLLQVYRQLRHPSLILL

SEQ ID NO: 869 - protein, 270 aa, Homo sapiens
MGEAEAPSFEMTWSSTTSSGYCSQEDSDSELEQYFTARTSLARRPRRDQDEPVEWETPDLSQAEIEQKIKEYNAQINSNLFMSLNKDGSYTGFIKVQLKLVRPVSVPSSKKPPSLQDARRGPGRGTSVRRRTSFYLPKDAVKHLHVLSRTRAREVIEALLRKFLVVDDPRKFALFERAERHGQVYLRKLLDDEQPLRLRLLAGPSDKALSFVLKENDSGEVNWDAFSMPELHNFLRILQREEEEHLRQILQKYSYCRQKIQEALHACPLG

SEQ ID NO: 870 - protein, 293 aa, Homo sapiens
MGSRAELCTLLGGFSFLLLLIPGEGAKGGSLRESQGVCSKQTLVVPLHYNESYSQPVYKPYLTLCAGRRICSTYRTMYRVMWREVRREVQQTHAVCCQGWKKRHPGALTCEAICAKPCLNGGVCVRPDQCECAPGWGGKHCHVDVDECRTSITLCSHHCFNTAGSFTCGCPHDLVLGVDGRTCMEGSPEPPTSASILSVAVREAEKDERALKQEIHELRGRLERLEQWAGQAGAWVRAVLPVPPEELQPEQVAELWGRGDRIESLSDQVLLLEERLGACSCEDNSLGLGVNHR

SEQ ID NO: 871 - protein, 385 aa, Homo sapiens
MAAALFVLLGFALLGTHGASGAAGFVQAPLSQQRWVGGSVELHCEAVGSPVPEIQWWFEGQGPNDTCSQLWDGARLDRVHIHATYHQHAASTISIDTLVEEDTGTYECRASNDPDRNHLTRAPRVKWVRAQAVVLVLEPGTVFTTVEDLGSKILLTCSLNDSATEVTGHRWLKGGVVLKEDALPGQKTEFKVDSDDQWGEYSCVFLPEPMGTANIQLHGPPRVKAVKSSEHINEGETAMLVCKSESVPPVTDWAWYKITDSEDKALMNGSESRFFVSSSQGRSELHIENLNMEADPGQYRCNGTSSKGSDQAIITLRVRSHLAALWPFLGIVAEVLVLVTIIFIYEKRRKPEDVLDDDDAGSAPLKSSGQHQNDKGKNVRQRNSS

SEQ ID NO: 872 - protein, 1196 aa, Homo sapiens
MENVDNSLDGSDVSEPAKPEAGLEVAQSILSKFSMKSLFGFTSKLESVNPEEEDAVLKAFHSLDVNPTSQQDDSSNGLDPQEAGSRVSPDLGNDEKIASVETESEGSQRKEAGTSLLAQELLPLSTLKGTKDDVICVRGTLVHTTSDSDSDDGGQEPEEGSSTNGPKSPSGVLSEPSQESKENPGGFRENTVTGEMNGAELCAEDPQRIPPEMSSKLEAGNGGLQTERRPSQDQVGEEGSQDLPAVTNQNSSVGITESASSKKEVSGEKSFQLPAFFSGLRVLKKGATAEGGETITEIKPKDGDLALLKLTQPVQKSLVQAGLQTVKSEKKATDPKATPTLLEQLSLLLNIDMPKTEPKGADPESPRREEMGCNADQESQSGPGVPQTQGGEVKPKSPETALEAFKALFIRPPRKGTTADTSELEALKRKMRHEKESLRAVFERSNSKPADGPSDSKSPDHSLTEQDDRTPGRLQAVWPPPKTKDTEEKVGLKYTEAEYQAAILHLKREHKEEIENLQAQFELRAFHIRGEHAMITARLEETIENLKHELEHRWRGGCEERKDVCISTDDDCPPKTFRNVCVQTDRETFLKPCESESKTTRSNQLVPKKLNISSLSQLSPPNDHKDIHAALQPMEGMASNQQKALPPPPASIPPPPPLPSGLGSLSPAPPMPPVSAGPPLPPPPPPPPPLPPPSSAGPPPPPPPPPLPNSPAPPNPGGPPPAPPPPGLAPPPPPGLFFGLGSSSSQCPRKPAIEPSCPMKPLYWTRIQISDRSQNATPTLWDSLEEPDIRDPSEFEYLFSKDTTQQKKKPLSETYEKKNKVKKIIKLLDGKRSQTVGILISSLHLEMKDIQQAIFNVDDSVVDLETLAALYENRAQEDELVKIRKYYETSKEEELKLLDKPEQFLHELAQIPNFAERAQCIIFRSVFSEGITSLHRKVEIITRASKDLLHVKSVKDILALILAFGNYMNGGNRTRGQADGYSLEILPKLKDVKSRDNGINLVDYVVKYYLRYYDQEAGTEKSVFPLPEPQDFFLASQVKFEDLIKDLRKLKRQLEASEKQMVVVCKESPKEYLQPFKDKLEEFFQKAKKEHKMEESHLENAQKSFETTVRYFGMKPKSGEKEITPSYVFMVWYEFCSDFKTIWKRESKNISKERLKMAQESVSKLTSEKKVETKKINPTASLKERLRQKEASVTTN

SEQ ID NO: 873 - protein, 147 aa, Homo sapiens
MVHLTPEEKSAVTALWGKVNVDEVGGEALGRLLVVYPWTQRFFESFGDLSTPDAVMGNPKVKAHGKKVLGAFSDGLAHLDNLKGTFATLSELHCDKLHVDPENFRLLGNVLVCVLAHHFGKEFTPPVQAAYQKVVAGVANALAHKYH

SEQ ID NO: 874 - protein, 619 aa, Homo sapiens
MRPKRLGRCCAGSRLGPGDPAALTCAPSPSASPAPEPSAQPQARGTGQRVGSRATSGSQFLSEARTGARPASEAGAKAGARRPSAFSAIQGDVRSMPDNSDAPWTRFVFQGPFGSRATGRGTGKAAGIWKTPAAYVGRRPGVSGPERAAFIRELEEALCPNLPPPVKKITQEDVKVMLYLLEELLPPVWESVTYGMVLQRERDLNTAARIGQSLVKQNSVLMEENSKLEALLGSAKEEILYLRHQVNLRDELLQLYSDSDEEDEDEEEEEEEKEAEEEQEEEEAEEDLQCAHPCDAPKLISQEALLHQHHCPQLEALQEKLRLLEEENHQLREEASQLDTLEDEEQMLILECVEQFSEASQQMAELSEVLVLRLENYERQQQEVARLQAQVLKLQQRCRMYGAETEKLQKQLASEKEIQMQLQEEETLPGFQETLAEELRTSLRRMISDPVYFMERNYEMPRGDTSSLRYDFRYSEDREQVRGFEAEEGLMLAADIMRGEDFTPAEEFVPQEELGAAKKVPAEEGVMEEAELVSEETEGWEEVELELDEATRMNVVTSALEASGLGPSHLDMNYVLQQLANWQDAHYRRQLRWKMLQKGECPHGALPAASRTSCRSSCR

SEQ ID NO: 875 - protein, 2353 aa, Homo sapiens
MTEGARAADEVRVPLGAPPPGPAALVGASPESPGAPGREAERGSELGVSPSESPAAERGAELGADEEQRVPYPALAATVFFCLGQTTRPRSWCLRLVCNPWFEHVSMLVIMLNCVTLGMFRPCEDVECGSERCNILEAFDAFIFAFFAVEMVIKMVALGLFGQKCYLGDTWNRLDFFIVVAGMMEYSLDGHNVSLSAIRTVRVLRPLRAINRVPSMRILVTLLLDTLPMLGNVLLLCFFVFFIFGIVGVQLWAGLLRNRCFLDSAFVRNNNLTFLRPYYQTEEGEENPFICSSRRDNGMQKCSHIPGRRELRMPCTLGWEAYTQPQAEGVGAARNACINWNQYYNVCRSGDSNPHNGAINFDNIGYAWIAIFQVITLEGWVDIMYYVMDAHSFYNFIYFILLIIVGSFFMINLCLVVIATQFSETKQRESQLMREQRARHLSNDSTLASFSEPGSCYEELLKYVGHIFRKVKRRSLRLYARWQSRWRKKVDPSAVQGQGPGHRQRRAGRHTASVHHLVYHHHHHHHHHYHFSHGSPRRPGPEPGACDTRLVRAGAPPSPPSPGRGPPDAESVHSIYHADCHIEGPQERARVAHAAATAAASLRLATGLGTMNYPTILPSGVGSGKGSTSPGPKGKWAGGPPGTGGHGPLSLNSPDPYEKIPHVVGEHGLGQAPGHLSGLSVPCPLPSPPAGTLTCELKSCPYCTRALEDPEGELSGSESGDSDGRGVYEFTQDVRHGDRWDPTRPPRATDTPGPGPGSPQRRAQQRAAPGEPGWMGRLWVTFSGKLRRIVDSKYFSRGIMMAILVNTLSMGVEYHEQPEELTNALEISNIVFTSMFALEMLLKLLACGPLGYIRNPYNIFDGIIVVISVWEIVGQADGGLSVLRTFRLLRVLKLVRFLPALRRQLVVLVKTMDNVATFCTLLMLFIFIFSILGMHLFGCKFSLKTDTGDTVPDRKNFDSLLWAIVTVFQILTQEDWNVVLYNGMASTSSWAALYFVALMTFGNYVLFNLLVAILVEGFQAEGDANRSDTDEDKTSVHFEEDFHKLRELQTTELKMCSLAVTPNGHLEGRGSLSPPLIMCTAATPMPTPKSSPFLDAAPSLPDSRRGSSSSGDPPLGDQKPPASLRSSPCAPWGPSGAWSSRRSSWSSLGRAPSLKRRGQCGERESLLSGEGKGSTDDEAEDGRAAPGPRATPLRRAESLDPRPLRPAALPPTKCRDRDGQVVALPSDFFLRIDSHREDAAELDDDSEDSCCLRLHKVLEPYKPQWCRSREAWALYLFSPQNRFRVSCQKVITHKMFDHVVLVFIFLNCVTIALERPDIDPGSTERVFLSVSNYIFTAIFVAEMMVKVVALGLLSGEHAYLQSSWNLLDGLLVLVSLVDIVVAMASAGGAKILGVLRVLRLLRTLRPLRVISRAPGLKLVVETLISSLRPIGNIVLICCAFFIIFGILGVQLFKGKFYYCEGPDTRNISTKAQCRAAHYRWVRRKYNFDNLGQALMSLFVLSSKDGWVNIMYDGLDAVGVDQQPVQNHNPWMLLYFISFLLIVSFFVLNMFVGVVVENFHKCRQHQEAEEARRREEKRLRRLERRRRSTFPSPEAQRRPYYADYSPTRRSIHSLCTSHYLDLFITFIICVNVITMSMEHYNQPKSLDEALKYCNYVFTIVFVFEAALKLVAFGFRRFFKDRWNQLDLAIVLLSLMGITLEEIEMSAALPINPTIIRIMRVLRIARVLKLLKMATGMRALLDTVVQALPQVGNLGLLFMLLFFIYAALGVELFGRLECSEDNPCEGLSRHATFSNFGMAFLTLFRVSTGDNWNGIMKDTLRECSREDKHCLSYLPALSPVYFVTFVLVAQFVLVNVVVAVLMKHLEESNKEAREDAELDAEIELEMAQGPGSARRVDADRPPLPQESPGARDAPNLVARKVSVSRMLSLPNDSYMFRPVVPASAPHPRPLQEVEMETYGAGTPLGSVASVHSPPAESCASLQIPLAVSSPARSGEPLHALSPRGTARSPSLSRLLCRQEAVHTDSLEGKIDSPRDTLDPAEPGEKTPVRPVTQGGSLQSPPRSPRPASVRTRKHTFGQRCVSSRPAAPGGEEAEASDPADEEVSHITSSACPWQPTAEPHGPEASPVAGGERDLRRLYSVDAQGFLDKPGRADEQWRPSAELGSGEPGEAKAWGPEAEPALGARRKKKMSPPCISVEPPAEDEGSARPSAAEGGSTTLRRRTPSCEATPHRDSLEPTEGSGAGGDPAAKGERWGQASCRAEHLTVPSFAFEPLDLGVPSGDPFLDGSHSVTPESRASSSGAIVPLEPPESEPPMPVGDPPEKRRGLYLTVPQCPLEKPGSPSATPAPGGGADDPV

SEQ ID NO: 876 - protein, 2778 aa, Homo sapiens
MALGKVLAMALVLALAVLGSLSPGARAGDCKGQRQVLREAPGFVTDGAGNYSVNGNCEWLIEAPSPQHRILLDFLFLDTECTYDYLFVYDGDSPRGPLLASLSGSTRPPPIEASSGKMLLHLFSDANYNLLGFNASFRFSLCPGGCQSHGQCQPPGVCACEPGWGGPDCGLQECSAYCGSHGTCASPLGPCRCEPGFLGRACDLHLWENQGAGWWHNVSARDPAFSARIGAAGAFLSPPGLLAVFGGQDLNNALGDLVLYNFSANTWESWDLSPAPAARHSHVAVAWAGSLVLMGGELADGSLTNDVWAFSPLGRGHWELLAPPASSSSGPPGLAGHAAALVDDVWLYVSGGRTPHDLFSSGLFRFRLDSTSGGYWEQVIPAGGRPPAATGHSMVFHAPSRALLVHGGHRPSTARFSVRVNSTELFHVDRHVWTTLKGRDGLQGPRERAFHTASVLGNYMVVYGGNVHTHYQEEKCYEDGIFFYHLGCHQWVSGAELAPPGTPEGRAAPPSGRYSHVAAVLGGSVLLVAGGYSGRPRGDLMAYKVPPFVFQAPAPDYHLDYCSMYTDHSVCSRDPECSWCQGACQAAPPPGTPLGACPAASCLGLGRLLGDCQACLAFSSPTAPPRGPGTLGWCVHNESCLPRPEQARCRGEQISGTVGWWGPAPVFVTSLEACVTQSFLPGLHLLTFQQPPNTSQPDKEEVGRWVAHQEKETRRLQRPGSARLFPLPGRDHKYAVEIQGQLNGSAGPGHSELTLLWDRTGVPGGSEISFFFLEPYRSSSCTSYSSCLGCLADQGCGWCLTSATCHLRQGGAHCGDDGAGGSLLVLVPTLCPLCEEHRDCHACTQDPFCEWHQSTSRKGDAACSRRGRGRGALKSPEECPPLCSQRLTCEDCLANSSQCAWCQSTHTCFLFAAYLARYPHGGCRGWDDSVHSEPRCRSCDGFLTCHECLQSHECGWCGNEDNPTLGRCLQGDFSGPLGGGNCSLWVGEGLGLPVALPARWAYARCPDVDECRLGLARCHPRATCLNTPLSYECHCQRGYQGDGISHCNRTCLEDCGHGVCSGPPDFTCVCDLGWTSDLPPPTPAPGPPAPRCSRDCGCSFHSHCRKRGPGFCDECQDWTWGEHCERCRPGSFGNATGSRGCRPCQCNGHGDPRRGHCDNLSGLCFCQDHTEGAHCQLCSPGYYGDPRAGGSCFRECGGRALLTNVSSVALGSRRVGGLLPPGGGAARAGPGLSYCVWVVSATEELQPCAPGTLCPPLTLTFSPDSSTPCTLSYVLAFDGFPRFLDTGVVQSDRSLIAAFCGQRRDRPLTVQALSGLLVLHWEANGSSSWGFNASVGSARCGSGGPGSCPVPQECVPQDGAAGAGLCRCPQGWAGPHCRMALCPENCNAHTGAGTCNQSLGVCICAEGFGGPDCATKLDGGQLVWETLMDSRLSADTASRFLHRLGHTMVDGPDATLWMFGGLGLPQGLLGNLYRYSVSERRWTQMLAGAEDGGPGPSPRSFHAAAYVPAGRGAMYLLGGLTAGGVTRDFWVLNLTTLQWRQEKAPQTVELPAVAGHTLTARRGLSLLLVGGYSPENGFNQQLLEYQLATGTWVSGAQSGTPPTGLYGHSAVYHEATDSLYVFGGFRFHVELAAPSPELYSLHCPDRTWSLLAPSQGAKRDRMRNVRGSSRGLGQVPGEQPGSWGFREVRKKMALWAALAGTGGFLEEISPHLKEPRPRLFHASALLGDTMVVLGGRSDPDEFSSDVLLYQVNCNAWLLPDLTRSASVGPPMEESVAHAVAAVGSRLYISGGFGGVALGRLLALTLPPDPCRLLSSPEACNQSGACTWCHGACLSGDQAHRLGCGGSPCSPMPRSPEECRRLRTCSECLARHPRTLQPGDGEASTPRCKWCTNCPEGACIGRNGSCTSENDCRINQREVFWAGNCSEAACGAADCEQCTREGKCMWTRQFKRTGETRRILSVQPTYDWTCFSHSLLNVSPMPVESSPPLPCPTPCHLLPNCTSCLDSKGADGGWQHCVWSSSLQQCLSPSYLPLRCMAGGCGRLLRGPESCSLGCAQATQCALCLRRPHCGWCAWGGQDGGGRCMEGGLSGPRDGLTCGRPGASWAFLSCPPEDECANGHHDCNETQNCHDQPHGYECSCKTGYTMDNMTGLCRPVCAQGCVNGSCVEPDHCRCHFGFVGRNCSTECRCNRHSECAGVGARDHCLLCRNHTKGSHCEQCLPLFVGSAVGGGTCRPCHAFCRGNSHICISRKELQMSKGEPKKYSLDPEEIENWVTEGPSEDEAVCVNCQNNSYGEKCESCLQGYFLLDGKCTKCQCNGHADTCNEQDGTGCPCQNNTETGTCQGSSPSDRRDCYKYQCAKCRESFHGSPLGGQQCYRLISVEQECCLDPTSQTNCFHEPKRRALGPGRTVLFGVQPKFTNVDIRLTLDVTFGAVDLYVSTSYDTFVVRVAPDTGVHTVHIQPPPAPPPPPPPADGGPRGAGDPGGAGASSGPGAPAEPRVREVWPRGLITYVTVTEPSAVLVVRGVRDRLVITYPHEHHALKSSRFYLLLLGVGDPSGPGANGSADSQGLLFFRQDQAHIDLFVFFSVFFSCFFLFLSLCVLLWKAKQALDQRQEQRRHLQEMTKMASRPFAKVTVCFPPDPTAPASAWKPAGLPPPAFRRSEPFLAPLLLTGAGGPWGPMGGGCCPPAIPATTAGLRAGPITLEPTEDGMAGVATLLLQLPGGPHAPNGACLGSALVTLRHRLHEYCGGGGGAGGSGHGTGAGRKGLLSQDNLTSMSL

SEQ ID NO: 877 - protein, 483 aa, Homo sapiens
MSVTKSTEGPQGAVAIKLDLMSPPESAKKLENKDSTFLDESPSESAGLKKTKGITVFQALIHLVKGNMGTGILGLPLAVKNAGILMGPLSLLVMGFIACHCMHILVKCAQRFCKRLNKPFMDYGDTVMHGLEANPNAWLQNHAHWGRHIVSFFLIITQLGFCCVYIVFLADNLKQVVEAVNSTTNNCYSNETVILTPTMDSRLYMLSFLPFLVLLVLIRNLRILTIFSMLANISMLVSLVIIIQYITQEIPDPSRLPLVASWKTYPLFFGTAIFSFESIGVVLPLENKMKNARHFPAILSLGMSIVTSLYIGMAALGYLRFGDDIKASISLNLPNCWLYQSVKLLYIAGILCTYALQFYVPAEIIIPFAISRVSTRWALPLDLSIRLVMVCLTCLLAILIPRLDLVISLVGSVSGTALALIIPPLLEVTTFYSEGMSPLTIFKDALISILGFVGFVVGTYQALDELLKSEDSHPFSNSTTFVR

SEQ ID NO: 878 - protein, 349 aa, Homo sapiens
MPHIDNDVKLDFKDVLLRPKRSTLKSRSEVDLTRSFSFRNSKQTYSGVPIIAANMDTVGTFEMAKVLCKFSLFTAVHKHYSLVQWQEFAGQNPELCFSHSIWLPAQAQALLTLSSWNRSWKLFPRSICLDVANGYSEHFVEFVKDVRKRFPQHTIMAGNVVTGEMVEELILSGADIIKVGIGPGSVCTTRKKTGVGYPQLSAVMECADAAHGLKGHIISDGGCSCPGDVAKAFGAGADFVMLGGMLAGHSESGGELIERDGKKYKLFYGMSSEMAMKKYAGGVAEYRASEGKTVEVPFKGDVEHTIRDILGGIRSTCTYVGAAKLKELSRRTTFIRVTQQVNPIFSEAC

SEQ ID NO: 879 - protein, 549 aa, Homo sapiens
MDFLIVLVCLIFSVLSTIEQYAALATGTLFWMEIVLVVFFGTEYVVRLWSAGCRSKYVGLWGRLRFARKPISIIDLIVVVASMVVLCVGSKGQVFATSAIRGIRFLQILRMLHVDRQGGTWRLLGSVVFIHRQELITTLYIGFLGLIFSSYFVYLAEKDAVNESGRVEFGSYADALWWGVVTVTTIGYGDKVPQTWVGKTIASCFSVFAISFFALPAGILGSGFALKVQQKQRQKHFNRQIPAAASLIQTAWRCYAAENPDSSTWKIYIRKAPRSHTLLSPSPKPKKSVVVKKKKFKLDKDNGVTPGEKMLTVPHITCDPPEERRLDHFSVDGYDSSVRKSPTLLEVSMPHFMRTNSFAEDLDLEGETLLTPITHISQLREHHRATIKVIRRMQYFVAKKKFQQARKPYDVRDVIEQYSQGHLNLMVRIKELQRRLDQSIGKPSLFISVSEKSKDRGSNTIGARLNRVEDKVTQLDQRLALITDMLHQLLSLHGGSTPGSGGPPREGGAHITQPCGSGGSVDPELFLPSNTLPTYEQLTVPRRGPDEGS

SEQ ID NO: 880 - protein, 2567 aa, Homo sapiens
MAISSRLALWEQKIREEDKSPPPSSPPPLFSVIPGGFIKQLVRGTEKEAKEARQRKQLAVASPEREIPEISISQPNSKSSSGTRSGSQQISQDDQSSSPGSSDILGKESEGSRSPDPEQMTSINGEKAQELGSSATPTKKTVPFKRGVRRGDVLLMVAKLDPDSAKPEKTHPHDAPPCKTSPPATDTGKEKKGETSRTPCGSQASTEILAPKAEKTRTGGLGDPGQGTVALKKGEEGQSIVGKGLGTPKTTELKEAEPQGKDRQGTRPQAQGPGEGVRPGKAEKEGAEPTNTVEKGNVSKDVGSEGKHVRPQIPGRKWGGFLGRRSKWDGPQNKKDKEGVLLSKAEKTGEPQTQMEKTSQVQGELGDDLRMGEKAGELRSTTGKAGESWDKKEKMGQPQGKSGNAGEARSQTEKGCEAPKEVSTMVESPAAPGKGGWPGSRGQEAEEPCSRAGDGAGALETELEGPSQPALEKDAERPRIRKENQDGPAPQEEGKGGQSRDSDQAPEDRWYEAEKVWLAQKDGFTLATVLKPDEGTADLPAGRVRLWIDADKTITEVDEEHVHRANPPELDQVEDLASLISVNESSVLNTLLQRYKAQLLHTCTGPDLIVLQPRGPSVPSAGKVPKGRRDGLPAHIGSMAQRAYWALLNQRRDQSIVALGWSGAGKTTCCEQVLEHLVGMAGSVDGRVSVEKIRATFTVLRAFGSVSMAHSRSATRFSMVMSLDFNATGRITAAQLQTMLLEKSRVARQPEGESNFLVFSQMLAGLDLDLRTELNLHQMADSSSFGMGVWSKPEDKQKAAAAFAQLQGAMEMLGISESEQRAVWRVLAAIYHLGAAGACKVGRKQFMRFEWANYAAEALGCEYEELNTATFKHHLRQIIQQMTFGPSRWGLEDEETSSGLKMTGVDCVEGMASGLYQELFAAVVSLINRSFSSHHLSMASIMVVDSPGFQNPRHQGKDRAATFEELCHNYAHERLQLLFYQRTFVSTLQRYQEEGVPVQFDLPDPSPGTTVAVVDQNPSQVRLPAGGGAQDARGLFWVLDEEVHVEGSSDSVVLERLCAAFEKKGAGTEGSSALRTCEQPLQCEIFHQLGWDPVRYDLTGWLHRAKPNLSALDAPQVLHQSKREELRSLFQARAKLPPVCRAVAGLEGTSQQALQRSRMVRRTFASSLAAVRRKAPCSQIKLQMDALTSMIKRSRLHFIHCLVPNPVVESRSGQESPPPPQPGRDKPGAGGPLALDIPALRVQLAGFHILEALRLHRTGYADHMGLTRFRRQFQVLDAPLLKKLMSTSEGIDERKAVEELLETLDLEKKAVAVGHSQVFLKAGVISRLEKQREKLVSQSIVLFQAACKGFLSRQEFKKLKIRRLAAQCIQKNVAVFLAVKDWPWWQLLGSLQPLLSATIGTEQLRAKEEELTTLRRKLEKSEKLRNELRQNTDLLESKIADLTSDLADERFKGDVACQVLESERAERLQAFREVQELKSKHEQVQKKLGDVNKQLEEAQQKIQLNDLERNPTGGADEWQMRFDCAQMENEFLRKRLQQCEERLDSELTARKELEQKLGELQSAYDGAKKMAHQLKRKCHHLTCDLEDTCVLLENQQSRNHELEKKQKKFDLQLAQALGESVFEKGLREKVTQENTSVRWELGQLQQQLKQKEQEASQLKQQVEMLQDHKRELLGSPSLGENCVAGLKERLWKLESSALEQQKIQSQQENTIKQLEQLRQRFELEIERMKQMHQKDREDQEEELEDVRQSCQKRLHQLEMQLEQEYEEKQMVLHEKQDLEGLIGTLCDQIGHRDFDVEKRLRRDLRRTHALLSDVQLLLGTMEDGKTSVSKEELEKVHSQLEQSEAKCEEALKTQKVLTADLESMHSELENMTRNKSLVDEQLYRLQFEKADLLKRIDEDQDDLNELMQKHKDLIAQSAADIGQIQELQLQLEEAKKEKHKLQEQLQVAQMRIEYLEQSTVDRAIVSRQEAVICDLENKTEFQKVQIKRFEVLVIRLRDSLIKMGEELSQAATSESQQRESSQYYQRRLEELKADMEELVQREAEASRRCMELEKYVEELAAVRQTLQTDLETSIRRIADLQAALEEVASSDSDTESVQTAVDCGSSGRKEMDNVSILSSQPEGSLQSWLSCTLSLATDTMRTPSRQSATSSRILSPRINEEAGDTERTQSALALSRARSTNVHSKTSGDKPVSPHFVRRQKYCHFGDGEVLAVQRKSTERLEPASSPLASRSTNTSPLSREKLPSPSAALSEFVEGLRRKRAQRGQGSTLGLEDWPTLPIYQTTGASTLRRGRAGSDEGNLSLRVGAKSPLEIEGAAGGLLRSTSLKCISSDGVGGTTLLPEKSKTQFSSCESLLESRPSMGRKLSSPTTPRDMLLSPTLRPRRRCLESSVDDAGCPDLGKEPLVFQNRQFAHLMEEPLGSDPFSWKLPSLDYERKTKVDFDDFLPAIRKPQTPTSLAGSAKGGQDGSQRSSIHFETEEANRSFLSGIKTILKKSPEPKEDPAHLSDSSSSSGSIVSFKSADSIKSRPGIPRLAGDGGERTSPERREPGTGRKDDDVASIMKKYLQK

SEQ ID NO: 881 - protein, 354 aa, Homo sapiens
MSSKYPRSVRRCLPLCALTLEAALILLFYFFTHYDASLEDQKGLVASYQVGQDLTVMAALGLGFLTSNFRRHSWSSVAFNLFMLALGVQWAILLDGFLSQFPPGKVVITLFSIRLATMSAMSVLISAGAVLGKVNLAQLVVMVLVEVTALGTLRMVISNIFNTDYHMNLRHFYVFAAYFGLTVAWCLPKPLPKGTEDNDQRATIPSLSAMLGALFLWMFWPSVNSALLRSPIQRKNAMFNTYYALAVSVVTAISGSSLAHPQRKISMTYVHSAVLAGGVAVGTSCHLIPSPWLAMVLGLVAGLISIGGAKCLPDWLPGPPQHWGTQLGHRDSSHVWSPDRFAPKSQNMESTSCG

SEQ ID NO: 882 - protein, 516 aa, Homo sapiens
MPTNGLHQVLKIQFGLVNDTDRYLTAESFGFKVNASAPSLKRKQTWVLEPDPGQGTAVLLRSSHLGRYLSAEEDGRVACEAEQPGRDCRFLVLPQPDGRWVLRSEPHGRFFGGTEDQLSCFATAVSPAELWTVHLAIHPQAHLLSVSRRRYVHLCPREDEMAADGDKPWGVDALLTLIFRSRRYCLKSCDSRYLRSDGRLVWEPEPRACYTLEFKAGKLAFKDCDGHYLAPVGPAGTLKAGRNTRPGKDELFDLEESHPQVVLVAANHRYVSVRQGVNVSANQDDELDHETFLMQIDQETKKCTFYSSTGGYWTLVTHGGIHATATQVSANTMFEMEWRGRRVALKASNGRYVCMKKNGQLAAISDFVGPPPRPAWTGKVAGGAAQQTLSPPGKDEEFTLKLINRPILVLRGLDGFVCHHRGSNQLDTNRSVYDVFHLSFSDGAYRIRGRDGGFWYTGSHGSVCSDGERAEDFVFEFRERGRLAIRARSGKYLRGGASGLLRADADAPAGTALWEY

SEQ ID NO: 883 - protein, 458 aa, Homo sapiens
MESSKLCGLEGSIFRNDWQSKSKIDLQGPEVGYFSQMKIISENVPSYKTHESLTLPRRTHDSEKPYEYKEYEKVFSCDLEFDEYQKIHTGGKNYECNQCWKTFGIDNSSMLQLNIHTGVKPCKYMEYGNTCSFYKDFNVYQKIHNEKFYKCKEYRRTFERVGKVTPLQRVHDGEKHFECSFCGKSFRVHAQLTRHQKIHTDEKTYKCMECGKDFRFHSQLTEHQRIHTGEKPYKCMHCEKVFRISSQLIEHQRIHTGEKPYACKECGKAFGVCRELARHQRIHTGKKPYECKACGKVFRNSSSLTRHQRIHTGEKPYKCKECEKAFGVGSELTRHERIHSGQKPYECKECGKFFRLTSALIQHQRIHSGEKPYECKVCGKAFRHSSALTEHQRIHTGEKPYECKACGKAFRHSSSFTKHQRIHTDDKPYECKECGNSFSVVGHLTCQPKIYTGEKSFD

SEQ ID NO: 884 - protein, 317 aa, Homo sapiens
MRNLSGGHVEEFVLVGFPTTPPLQLLLFVLFFAIYLLTLLENALIVFTIWLAPSLHRPMYFFLGHLSFLELWYINVTIPRLLAAFLTQDGRVSYVGCMTQLYFFIALACTECVLLAVMAYDRYLAICGPLLYPSLMPSSLATRLAAASWGSGFFSSMMKLLFISQLSYCGPNIINHFFCDISPLLNLTCSDKEQAELVDFLLALVMILLPLLAVVSSYTAIIAAILRIPTSRGRHKAFSTCAAHLAVVVIYYSSTLFTYARPRAMYTFNHNKIISVLYTIIVPFFNPAIYCLRNKEVKEAFRKTVMGRCHYPRDVQD

SEQ ID NO: 885 - protein, 2966 aa, Homo sapiens
EIEKGGCGDPGIPAYGKRTGSSFLHGDTLTFECPAAFELVGERVITCQQNNQWSGNKPSCVFSCFFNFTASSGIILSPNYPEEYGNNMNCVWLIISEPGSRIHLIFNDFDVEPQFDFLAVKDDGISDITVLGTFSGNEVPSQLASSGHIVRLEFQSDHSTTGRGFNITYTTFGQNECHDPGIPINGRRFGDRFLLGSSVSFHCDDGFVKTQGSESITCILQDGNVVWSSTVPRCEAPCGGHLTASSGVILPPGWPGYYKDSLHCEWIIEAKPGHSIKITFDRFQTEVNYDTLEVRDGPASSSPLIGEYHGTQAPQFLISTGNFMYLLFTTDNSRSSIGFLIHYESVTLESDSCLDPGIPVNGHRHGGDFGIRSTVTFSCDPGYTLSDDEPLVCERNHQWNHALPSCDALCGGYIQGKSGTVLSPGFPDFYPNSLNCTWTIEVSHGKGVQMIFHTFHLESSHDYLLITEDGSFSEPVARLTGSVLPHTIKAGLFGNFTAQLRFISDFSISYEGFNITFSEYDLEPCDDPGVPAFSRRIGFHFGVGDSLTFSCFLGYRLEGATKLTCLGGGRRVWSAPLPRCVAECGASVKGNEGTLLSPNFPSNYDNNHECIYKIETEAGKGIHLRTRSFQLFEGDTLKVYDGKDSSSRPLGTFTKNELLGLILNSTSNHLWLEFNTNGSDTDQGFQLTYTSFDLVKCEDPGIPNYGYRIRDEGHFTDTVVLYSCNPGYAMHGSNTLTCLSGDRRVWDKPLPSCIAECGGQIHAATSGRILSPGYPAPYDNNLHCTWIIEADPGKTISLHFIVFDTEMAHDILKVWDGPVDSDILLKEWSGSALPEDIHSTFNSLTLQFDSDFFISKSGFSIQFSTSIAATCNDPGMPQNGTRYGDSREAGDTVTFQCDPGYQLQGQAKITCVQLNNRFFWQPDPPTCIAACGGNLTGPAGVILSPNYPQPYPPGKECDWRVKVNPDFVIALIFKSFNMEPSYDFLHIYEGEDSNSPLIGSYQGSQAPERIESSGNSLFLAFRSDASVGLSGFAIEFKEKPREACFDPGNIMNGTRVGTDFKLGSTITYQCDSGYKILDPSSITCVIGADGKPSWDQVLPSCNAPCGGQYTGSEGVVLSPNYPHNYTAGQICLYSITVPKEFVVFGQFAYFQTALNDLAELFDGTHAQARLLSSLSGSHSGETLPLATSNQILLRFSAKSGASARGFHFVYQAVPRTSDTQCSSVPEPRYGRRIGSEFSAGSIVRFECNPGYLLQGSTALHCQSVPNALAQWNDTIPSCVVPCSGNFTQRRGTILSPGYPEPYGNNLNCIWKIIVTEGSGIQIQVISFATEQNWDSLEIHDGGDVTAPRLGSFSGTTVPALLNSTSNQLYLHFQSDISVAAAGFHLEYKTVGLAACQEPALPSNSIKIGDRYMVNDVLSFQCEPGYTLQGRSHISCMPGTVRRWNYPSPLCIATCGGTLSTLGGVILSPGFPGSYPNNLDCTWRISLPIGYGAHIQFLNFSTEANHDFLEIQNGPYHTSPMIGQFSGTDLPAALLSTTHETLIHFYSDHSQNRQGFKLAYQAYELQNCPDPPPFQNGYMINSDYSVGQSVSFECYPGYILIGHPVLTCQHGINRNWNYPFPRCDAPCGYNVTSQNGTIYSPGFPDEYPILKDCIWLITVPPGHGVYINFTLLQTEAVNDYIAVWDGPDQNSPQLGVFSGNTALETAYSSTNQVLLKFHSDFSNGGFFVLNFHAFQLKKCQPPPAVPQAEMLTEDDDFEIGDFVKYQCHPGYTLVGTDILTCKLSSQLQFEGSLPTCEGSSGQSPLLVVLSGNHTEQSNFTSRSNQLYLRWSTDHATSKKGFKIRYAAPYCSLTHPLKNGGILNRTAGAVGSKVHYFCKPGYRMVGHSNATCRRNPLGMYQWDSLTPLCQAVSCGIPESPGNGSFTGNEFTLDSKVVYECHEGFKLESSQQATAVCQEDGLWSNKGKPPTCKPVACPSIEAQLSEHVIWRLVSGSLNEYGAQVLLSCSPGYYLEGWRLLRCQANGTWNIGDERPSCRVISCGSLSFPPNGNKIGTLTVYGATAIFTCNTGYTLVGSHVRECLANGLWSGSETRCLAGHCGSPDPIVNGHISGDGFSYRDTVVYQCNPGFRLVGTSVRICLQDHKWSGQTPVCVPITCGHPGNPAHGFTNGSEFNLNDVVNFTCNTGYLLQGVSRAQCRSNGQWSSPLPTCRVVNCSDPGFVENAIRHGQQNFPESFEYGMSILYHCKKGFYLLGSSALTCMANGLWDRSLPKCLAISCGHPGVPANAVLTGELFTYGAVVHYSCRGSESLIGNDTRVCQEDSHWSGALPHCTGNNPGFCGDPGTPAHGSRLGDDFKTKSLLRFSCEMGHQLRGSPERTCLLNGSWSGLQPVCEAVSCGNPGTPTNGMIVSSDGILFSSSVIYACWEGYKTSGLMTRHCTANGTWTGTAPDCTIISCGDPGTLANGIQFGTDFTFNKTVSYQCNPGYVMEAVTSATIRCTKDGRWNPSKPVCKAVLCPQPPPVQNGTVEGSDFRWGSSISYSCMDGYQLSHSAILSCEGRGVWKGEIPQCLPVFCGDPGIPAEGRLSGKSFTYKSEVFFQCKSPFILVGSSRRVCQADGTWSGIQPTCIDPAHNTCPDPGTPHFGIQNSSRGYEVGSTVFFRCRKGYHIQGSTTRTCLANLTWSGIQTECIPHACRQPETPAHADVRAIDLPTFGYTLVYTCHPGFFLAGGSEHRTCKADMKWTGKSPVCKIPSDVFFVNSLWKGYYEYLGKRQPATLTVDWFNATSSKVNATFSEASPVELKLTGIYKKEEAHLLLKAFQIKGQADIFVSKFENDNWGLDGYVSSGLERGGFTFQGDIHGKDFGKFKLERQDPLNPDQDSSSHYHGTSSGSVAAAILVPFFALILSGFAFYLYKHRTRPKVQYNGYAGHENSNGQASFENPMYDTNLKPTEAKAVRFDTTLNTVCTVV

SEQ ID NO: 886 - protein, 628 aa, Homo sapiens
MDSVVFEDVAVDFTLEEWALLDSAQRDLYRDVMLETFQNLASVDDETQFKASGSVSQQDIYGEKIPKESKIATFTRNVSWASVLGKIWDSLSIEDQTTNQGRNLSRNHGLERLCESNDQCGEALSQIPHLNLYKKIPPGVKQYEYNTYGKVFMHRRTSLKSPITVHTGHKPYQCQECGQAYSCRSHLRMHVRTHNGERPYVCKLCGKTFPRTSSLNRHVRIHTAEKTYECKQCGKAFIDFSSLTSHLRSHTGEKPYKCKECGKAFSYSSTFRRHTITHTGEKPYKCKECAEAFSYSSTFRRHMISHTGEKPHKCKECGEAFSYSSAFRRHMITHTGEKPYECKQCGKTFIYLQSFRRHERIHTGEKPYECKQCGKTFIYPQSFRRHERTHGGEKPYECNQCGKAFSHPSSFRGHMRVHTGEKPYECKQCGKTFNWPISLRKHMRTHTREKPYECKQCGKAFSLSACFREHVRMHPEDKSYECKLCGKAFYCHISLQKHMRRHTAEKLYKCKQCGKAFSWPELLQQHVRTHTVEKPYECKECGKVFKWPSSLPIHMRLHTGEKPYQCKHCGKAFNCSSSLRRHVRIHTTEKQYKCNVGHPPANEFMCSASEKSHQERDLIKVVNMVLPL

SEQ ID NO: 887 - protein, 811 aa, Homo sapiens
MLLLFHSKRMPVAEAPQVAGGQGDGGDGEEAEPEGMFKACEDSKRKARGYLRLVPLFVLLALLVLASAGVLLWYFLGYKAEVMVSQVYSGSLRVLNRHFSQDLTRRESSAFRSETAKAQKMLKELITSTRLGTYYNSSSVYSFGEGPLTCFFWFILQIPEHRRLMLSPEVVQALLVEELLSTVNSSAAVPYRAEYEVDPEGLVILEASVKDIAALNSTLGCYRYSYVGQGQVLRLKGPDHLASSCLWHLQGPKDLMLKLRLEWTLAECRDRLAMYDVAGPLEKRLITSVYGCSRQEPVVEVLASGAIMAVVWKKGLHSYYDPFVLSVQPVVFQACEVNLTLDNRLDSQGVLSTPYFPSYYSPQTHCSWHLTVPSLDYGLALWFDAYALRRQKYDLPCTQGQWTIQNRRLCGLRILQPYAERIPVVATAGITINFTSQISLTGPGVRVHYGLYNQSDPCPGEFLCSVNGLCVPACDGVKDCPNGLDERNCVCRATFQCKEDSTCISLPKVCDGQPDCLNGSDEEQCQEGVPCGTFTFQCEDRSCVKKPNPQCDGRPDCRDGSDEEHCDCGLQGPSSRIVGGAVSSEGEWPWQASLQVRGRHICGGALIADRWVITAAHCFQEDSMASTVLWTVFLGKVWQNSRWPGEVSFKVSRLLLHPYHEEDSHDYDVALLQLDHPVVRSAAVRPVCLPARSHFFEPGLHCWITGWGALREGGPISNALQKVDVQLIPQDLCSEVYRYQVTPRMLCAGYRKGKKDACQGDSGGPLVCKALSGRWFLAGLVSWGLGCGRPNYFGVYTRITGVISWIQQVVT

SEQ ID NO: 888 - protein, 158 aa, Homo sapiens
MLLLDCNPEVDGLKHLLETGASVNAPPDPCKQSPVHLAAGSGLACFLLWQLQTGADLNQQDVLGEAPLHKAAKVGSLECLSLLVASDAQIDLCNKNGQTAEDLAWSCGFPDCAKFLTTIKCMQTIKASEHPDRNDCVAVLRQKRSLGSVENTSGKRKC

SEQ ID NO: 889 - protein, 1133 aa, Homo sapiens
MSPTQWDFPVELCCRPMAFVTLTGLDVVYNAVHRAVWDAFCANRRADRVPISFKVLPGDHEYPKCRPKRTSYEWYIPKGILKTGWMNKHLNLVPALVVVFYELDWDEPQWKEKQSECATRVEIVRQSLQGRNTKVAVVLIQKKTPLPPGEDVIASERAAALCNACELSGKSLFVLPHTDHLVGYIIRLENAFYEHAQTYYYTEIRRVKSHKEFLNKTTHQLLFVRHQFKIAFFSELKQDTQNALKNYRTAYNLVHELRAHETNILEIKTMAGFINYKICRLCFQHNTPLDAIAQFRKHIDLCKKKIGSAELSFEHDAWMSKQFQAFGDLFDEAIKLGLTAIQTQNPGFYYQQAAYYAQERKQLAKTLCNHEASVMYPNPDPLETQTGVLDFYGQRSWRQGILSFDLSDPEKEKVGILAIQLKERNVVHSEIIITLLSNAVAQFKKYKCPRMKSHLMVQMGEEYYYAKDYTKALKLLDYVMCDYRSEGWWTLLTSVLTTALKCSYLMAQLKDYITYSLELLGRASTLKDDQKSRIEKNLINVLMNESPDPEPDCDILAVKTAQKLWADRISLAGSNIFTIGVQDFVPFVQCKAKFHAPSFHVDVPVQFDIYLKADCPHPIRFSKLCVSFNNQEYNQFCVIEEASKANEVLENLTQGKMCLVPGKTRKLLFKFVAKTEDVGKKIEITSVDLALGNETGRCVVLNWQGGGGDAASSQEALQAARSFKRRPKLPDNEVHWDSIIIQASTMIISRVPNISVHLLHEPPALTNEMYCLVVTVQSHEKTQIRDVKLTAGLKPGQDANLTQKTHVTLHGTELCDESYPALLTDIPVGDLHPGEQLEKMLYVRCGTVGSRMFLVYVSYLINTTVEEKEIVCKCHKDETVTIETVFPFDVAVKFVSTKFEHLERVYADIPFLLMTDLLSASPWALTIVSSELQLAPSMTTVDQLESQVDNVILQTGESASECFCLQCPSLGNIEGGVATGHYIISWKRTSAMENIPIITTVITLPHVIVENIPLHVNADLPSFGRVRESLPVKYHLQNKTDLVQDVEISVEPSDAFMFSGLKQIRLRILPGTEQEMLYNFYPLMAGYQQLPSLNINLLRFPNFTNQLLRRFIPTSIFVKPQGRLMDDTSIAAA

SEQ ID NO: 890 - protein, 420 aa, Homo sapiens
MLPGLRRLLQAPASACLLLMLLALPLAAPSCPMLCTCYSSPPTVSCQANNFSSVPLSLPPSTQRLFLQNNLIRTLRPGTFGSNLLTLWLFSNNLSTIYPGTFRHLQALEELDLGDNRHLRSLEPDTFQGLERLQSLHLYRCQLSSLPGNIFRGLVSLQYLYLQENSLLHLQDDLFADLANLSHLFLHGNRLRLLTEHVFRGLGSLDRLLLHGNRLQGVHRAAFRGLSRLTILYLFNNSLASLPGEALADLPSLEFLRLNANPWACDCRARPLWAWFQRARVSSSDVTCATPPERQGRDLRALREADFQACPPAAPTRPGSRARGNSSSNHLYGVAEAGAPPADPSTLYRDLPAEDSRGRQGGDAPTEDDYWGGYGGEDQRGEQMCPGAACQAPPDSRGPALSAGLPSPLLCLLLLVPHHL

SEQ ID NO: 891 - protein, 1205 aa, Homo sapiens
MTKKEEPPPSRVPRAVRVASLLSEGEELSGDDQGDEEEDDHAYEGVPNGGWHTSSLSLSLPSTIAAPHPMDGPPGGSTPVTPVIKAGWLDKNPPQGSYIYQKRWVRLDTDHLRYFDSNKDAYSKRFISVACISHVAAIGDQKFEVITNNRTFAFRAESDVERKEWMQALQQAMAEQRARARLSSAYLLGVPGSEQPDRAGSLELRGFKNKLYVAVVGDKVQLYKNLEEYHLGIGITFIDMSVGNVKEVDRRSFDLTTPYRIFSFSADSELEKEQWLEAMQGAIAEALSTSEVAERIWAAAPNRFCADCGAPQPDWASINLCVVICKRCAGEHRGLGAGVSKVRSLKMDRKVWTETLIELFLQLGNGAGNRFWAANVPPSEALQPSSSPSTRRCHLEAKYREGKYRRYHPLFGNQEELDKALCAAVTTTDLAETQALLGCGAGINCFSGDPEAPTPLALAEQAGQTLQMEFLRNNRTTEVPRLDSMKPLEKHYSVVLPTVSHSGFLYKTASAGKLLQDRRAREEFSRRWCVLGDGVLSYFENERAVTPNGEIRASEIVCLAVPPPDTHGFEHTFEVYTEGERLYLFGLESAEQAHEWVKCIAKAFVPPLAEDLLARDFERLGRLPYKAGLSLQRAQEGWFSLSGSELRAVFPEGPCEEPLQLRKLQELSIQGDSENQVLVLVERRRTLYIQGERRLDFMGWLGAIQKAAASMGDTLSEQQLGDSDIPVIVYRCVDYITQCGLTSEGIYRKCGQTSKTQRLLESLRQDARSVHLKEGEQHVDDVSSALKRFLRDLPDGLFTRAQRLTWLEASEIEDEEEKVSRYRELLVRLPPVNRATVKALISHLYCVQCFSDTNQMNVHNLAIVFGPTLFQTDGQDYKAGRVVEDLINHYVVVFSVDEEELRKQREEITAIVKMRVAGTASGTQHAGDFICTVYLEEKKAETEQHIKVPASMTAEELTLEILDRRNVGIREKDYWTCFEVNEREEAERPLHFAEKVLPILHGLGTDSHLVVKKHQAMEAMLLYLASRVGDTKHGMMKFREDRSLLGLGLPSGGFHDRYFILNSSCLRLYKEVRSQRPWSGAPETSHRPEKEWPIKSLKVYLGVKKKLRPPTCWGFTVVHETEKHEKQQWYLCCDTQMELREWFATFLFVQHDGLVWPSEPSRVSRAVPEVRLGSVSLIPLRGSENEMRRSVAAFTADPLSLLRNV

SEQ ID NO: 892 - protein, 1938 aa, Homo sapiens
MQSFREQSSYHGNQQSYPQEVHGSSRLEEFSPRQAQMFQNFGGTGGSSGSSGSGSGGGRRGAAAAAAAMASETSGHQGYQGFRKEAGDFYYMAGNKDPVTTGTPQPPQRRPSGPVQSYGPPQGSSFGNQYGSEGHVGQFQAQHSGLGGVSHYQQDYTGPFSPGSAQYQQQASSQQQQQQVQQLRQQLYQSHQPLPQATGQPASSSSHLQPMQRPSTLPSSAAGYQLRVGQFGQHYQSSASSSSSSSFPSPQRFSQSGQSYDGSYNVNAGSQYEGHNVGSNAQAYGTQSNYSYQPQSMKNFEQAKIPQGTQQGQQQQQPQQQQHPSQHVMQYTNAATKLPLQSQVGQYNQPEVPVRSPMQFHQNFSPISNPSPAASVVQSPSCSSTPSPLMQTGENLQCGQGSVPMGSRNRILQLMPQLSPTPSMMPSPNSHAAGFKGFGLEGVPEKRLTDPGLSSLSALSTQVANLPNTVQHMLLSDALTPQKKTSKRPSSSKKADSCTNSEGSSQPEEQLKSPMAESLDGGCSSSSEDQGERVRQLSGQSTSSDTTYKGGASEKAGSSPAQGAQNEPPRLNASPAAREEATSPGAKDMPLSSDGNPKVNEKTVGVIVSREAMTGRVEKPGGQDKGSQEDDPAATQRPPSNGGAKETSHASLPQPEPPGGGGSKGNKNGDNNSNHNGEGNGQSGHSAAGPGFTSRTEPSKSPGSLRYSYKDSFGSAVPRNVSGFPQYPTGQEKGDFTGHGERKGRNEKFPSLLQEVLQGYHHHPDRRYSRSTQEHQGMAGSLEGTTRPNVLVSQTNELASRGLLNKSIGSLLENPHWGPWERKSSSTAPEMKQINLTDYPIPRKFEIEPQSSAHEPGGSLSERRSVICDISPLRQIVRDPGAHSLGHMSADTRIGRNDRLNPTLSQSVILPGGLVSMETKLKSQSGQIKEEDFEQSKSQASFNNKKSGDHCHPPSIKHESYRGNASPGAATHDSLSDYGPQDSRPTPMRRVPGRVGGREGMRGRSPSQYHDFAEKLKMSPGRSRGPGGDPHHMNPHMTFSERANRSSLHTPFSPNSETLASAYHANTRAHAYGDPNAGLNSQLHYKRQMYQQQPEEYKDWSSGSAQGVIAAAQHRQEGPRKSPRQQQFLDRVRSPLKNDKDGMMYGPPVGTYHDPSAQEAGRCLMSSDGLPNKGMELKHGSQKLQESCWDLSRQTSPAKSSGPPGMSSQKRYGPPHETDGHGLAEATQSSKPGSVMLRLPGQEDHSSQNPLIMRRRVRSFISPIPSKRQSQDVKNSSTEDKGRLLHSSKEGADKAFNSYAHLSHSQDIKSIPKRDSSKDLPSPDSRNCPAVTLTSPAKTKILPPRKGRGLKLEAIVQKITSPNIRRSASSNSAEAGGDTVTLDDILSLKSGPPEGGSVAVQDADIEKRKGEVASDLVSPANQELHVEKPLPRSSEEWRGSVDDKVKTETHAETVTAGKEPPGAMTSTTSQKPGSNQGRPDGSLGGTAPLIFPDSKNVPPVGILAPEANPKAEEKENDTVTISPKQEGFPPKGYFPSGKKKGRPIGSVNKQKKQQQPPPPPPQPPQIPEGSADGEPKPKKQRQRRERRKPGAQPRKRKTKQAVPIVEPQEPEIKLKYATQPLDKTDAKNKSFYPYIHVVNKCELGAVCTIINAEEEEQTKLVRGRKGQRSLTPPPSSTESKALPASSFMLQGPVVTESSVMGHLVCCLCGKWASYRNMGDLFGPFYPQDYAATLPKNPPPKRATEMQSKVKVRHKSASNGSKTDTEEEEEQQQQQKEQRSLAAHPRFKRRHRSEDCGGGPRSLSRGLPCKKAATEGSSEKTVLDSKPSVPTTSEGGPELELQIPELPLDSNEFWVHEGCILWANGIYLVCGRLYGLQEALEIAREMKCSHCQEAGATLGCYNKGCSFRYHYPCAIDADCLLHEENFSVRCPKHKVRLWR

SEQ ID NO: 893 - protein, 1476 aa, Homo sapiens
MTSSSPAGLEGSDLSSINTMMSAVMSVGKVTENGGSPQGIKSPSKPPGPNRIGRRNQETKEEKSSYNCPLCEKICTTQHQLTMHIRQHNTDTGGADHSCSICGKSLSSASSLDRHMLVHSGERPYKCTVCGQSFTTNGNMHRHMKIHEKDPNSATATAPPSPLKRRRLSSKRKLSHDAESEREDPAPAKKMVEDGQSGDLEKKADEVFHCPVCFKEFVCKYGLETHMETHSDNPLRCDICCVTFRTHRGLLRHNALVHKQLPRDAMGRPFIQNNPSIPAGFHDLGFTDFSCRKFPRISQAWCETNLRRCISEQHRFVCDTCDKAFPMLCSLALHKQTHVAADQGQEKPQATPLPGDALDQKGFLALLGLQHTKDVRPAPAEEPLPDDNQAIQLQTLKCQLPQDPGCTNLLSLSPFEAASLGGSLTVLPATKDSIKHLSLQPFQKGFIIQPDSSIVVKPISGESAIELADIQQILKMAASAPPQISLPPFSKAPAAPLQAIFKHMPPLKPKPLVTPRTVVATSTPPPLINAQQASPGCISPSLPPPPLKLLKGSVEAASNAHLLQSKSGTQPHAATRLSLQQPRAELPGQPEMKTQLEQDSIIEALLPLSMEAKIKQEITEGELKAFMTAPGGKKTPAMRKVLYPCRFCNQVFAFSGVLRAHVRSHLGISPYQCNICDYIAADKAALIRHLRTHSGERPYICKICHYPFTVKANCERHLRKKHLKATRKDIEKNIEYVSSSAAELVDAFCAPDTVCRLCGEDLKHYRALRIHMRTHCGRGLGGGHKGRKPFECKECSAAFAAKRNCIHHILKQHLHVPEQDIESYVLAADGLGPAEAPAAEASGRGEDSGCAALGDCKPLTAFLEPQNGFLHRGPTQPPPPHVSIKLEPASSFAVDFNEPLDFSQKGLALVQVKQENISFLSPSSLVPYDCSMEPIDLSIPKNFRKGDKDLATPSEAKKPEEEAGSSEQPSPCPAPGPSLPVTLGPSGILESPMAPAPAATPEPPAQPLQGPVQLAVPIYSSALVSSPPLVGSSALLSGTALLRPLRPKPPLLLPKPPVTEELPPLASIAQIISSVSSAPTLLKTKVADPGPASTGSNTTASDSLGGSVPKAATTATPAATTSPKESSEPPAPASSPEAASPTEQGPAGTSKKRGRKRGMRSRPRANSGGVDLDSSGEFASIEKMLATTDTNKFSPFLQTAEDNTQDEVAGAPADHHGPSDEEQGSPPEDKLLRAKRNSYTNCLQKITCPHCPRVFPWASSLQRHMLTHTGQKPFPCQKCDAFFSTKSNCERHQLRKHGVTTCSLRRNGLIPQSKESDVGSHDSTGERPYKCQTCERTFTLKHSLVRHQRIHQKARHAKHHGKDSDKEERGEEDSENESTHSGNNAVSENEAELAPNASNHMAVTRSRKEGLASATKDCSHREEKVTAGWPSEPGQGDLNPESPAALGQDLLEPRSKRPAHPILATADGASQLVGME

SEQ ID NO: 894 - protein, 313 aa, Homo sapiens
MSPENQSSVSEFLLLGLPIRPEQQAVFFTLFLGMYLTTVLGNLLIMLLIQLDSHLHTPMYFFLSHLALTDISFSSVTVPKMLMDMRTKYKSILYEECISQMYFFIFFTDLDSFLITSMAYDRYVAICHPLHYTVIMREELCVFLVAVSWILSCASSLSHTLLLTRLSFCAANTIPHVFCDLAALLKLSCSDIFLNELVMFTVGVVVITLPFMCILVSYGYIGATILRVPSTKGIHKALSTCGSHLSVVSLYYGSIFGQYLFPTVSSSIDKDVIVALMYTVVTPMLNPFIYSLRNRDMKEALGKLFSRATFFSW

SEQ ID NO: 895 - protein, 325 aa, Homo sapiens
MLWEETGAAPAPARASDLPYRIHFLSSGLILVTRQLTEDGKLIVEGMLDIFWGVKRPIQLKIQDEKPFSSFTSMKSSDVFSSKGMTRWGEFDDLYRISELDRTQIPMSEKRNSQEDYLSYHSNTLKPHAKDEPDSPVLYRTMSEAALVRKRMKPLMMDRKERQKNRASINGHFYNHETSIFIPAFESETKVRVNSNMRTEEVIKQLLQKFKIENSPQDFALHIIFATGEQRRLKKTDIPLLQRLLQGPSEKNARIFLMDKDAEEISSDVAQYINFHFSLLESILQRLNEEEKREIQRIVTKFNKEKAIILKCLQNKLVIKTETTV

SEQ ID NO: 896 - protein, 318 aa, Homo sapiens
MAAAALPPRPLLLLPLVLLLSGRPTRADSKVFGDLDQVRMTSEGSDCRCKCIMRPLSKDACSRVRSGRARVEDFYTVETVSSGTDCRCSCTAPPSSLNPCENEWKMEKLKKQAPELLKSIKANLSRENEVVKDSVRHLSEQLRHYENHSAIMLGIKKELSRLGLQLLQKDAAAAPATPATGTGSKAQDTARGKGKDISKYGSVQKSFADRGLPKPPKEKLLQVEKLRKESGKGSFLQPTAKPRALAQQQAVIRGFTYYKAGKQEVTEAVADNTLQGTSWLEQLPPKVEGRSNSAEPNSAEQDEAEPRSSERVDLASGT

SEQ ID NO: 897 - protein, 519 aa, Homo sapiens
MAFSELLDLVGGLGRFQVLQTMALMVSIMWLCTQSMLENFSAAVPSHRCWAPLLDNSTAQASILGSLSPEALLAISIPPGPNQRPHQCRRFRQPQWQLLDPNATATSWSEADTEPCVDGWVYDRSIFTSTIVAKWNLVCDSHALKPMAQSIYLAGILVGAAACGPASDRFGRRLVLTWSYLQMAVMVMEWTAARARPLVMTLNSLGFSFGHGLTAAVAYGVRDWTLLQLVVSVPFFLCFLYSWWLAESARWLLTTGRLDWGLQELWRVAAINGKGAVQDTLTPEVLLSAMREELSMGQPPASLGTLLRMPGLRFRTCISTLCWFAFGFTFFGLALDLQALGSNIFLLQMFIGVVDIPAKMGALLLLSHLGRRPTLAASLLLAGLCILANTLVPHEMGALRSALAVLGLGGVGAAFTCITIYSSELFPTVLRMTAVGLGQMAARGGAILGPLVRLLGVHGPWLPLLVYGTVPVLSGLAALLLPETQSLPLPDTIQDVQNQAVKKATHGTLGNSVLKSTQF

SEQ ID NO: 898 - protein, 706 aa, Homo sapiens
MGDERPHYYGKHGTPQKYDPTFKGPIYNRGCTDIICCVFLLLAIVGYVAVGIIAWTHGDPRKVIYPTDSRGEFCGQKGTKNENKPYLFYFNIVKCASPLVLLEFQCPTPQICVEKCPDRYLTYLNARSSRDFEYYKQFCVPGFKNNKGVAEVLQDGDCPAVLIPSKPLARRCFPAIHAYKGVLMVGNETTYEDGHGSRKNITDLVEGAKKANGVLEARQLAMRIFEDYTVSWYWIIIGLVIAMAMSLLFIILLRFLAGIMVWVMIIMVILVLGYGIFHCYMEYSRLRGEAGSDVSLVDLGFQTDFRVYLHLRQTWLAFMIILSILEVIIILLLIFLRKRILIAIALIKEASRAVGYVMCSLLYPLVTFFLLCLCIAYWASTAVFLSTSNEAVYKIFDDSPCPFTAKTCNPETFPSSNESRQCPNARCQFAFYGGESGYHRALLGLQIFNAFMFFWLANFVLALGQVTLAGAFASYYWALRKPDDLPAFPLFSAFGRALRYHTGSLAFGALILAIVQIIRVILEYLDQRLKAAENKFAKCLMTCLKCCFWCLEKFIKFLNRNAYIMIAIYGTNFCTSARNAFFLLMRNIIRVAVLDKVTDFLFLLGKLLIVGSVGILAFFFFTHRIRIVQDTAPPLNYYWVPILTVIVGSYLIAHGFFSVYGMCVDTLFLCFLEDLERNDGSAERPYFMSSTLKKLLNKTNKKAAES

SEQ ID NO: 899 - protein, 716 aa, Homo sapiens
MEDCLHTSSENLSKLVSWAHSHGTICSLIPNLKHLLSEGSHGNLTAMWGCSAGHAYHWPLTATCRAGSQERVCFQDNRSFNSDSPSIIGVPSETQTSPVERYPGRPVKAKLDCNRTRDSCDFSYCSEPSELDETVEEYEDENTLFDMVCESSVTDEDSDFEPQTQRPQSIARKRPGVVPSSLHSSSQTQMVDECSNDVIIKKIKQEIPEDYYIVANAELTGGVDGPALSLTQMAKPKPQTHAGPSCVGSAKLIPHVTSAISTELDPHGMSASPSVISRPIVQKTARVSLASPNRGPPGTHGTNQQVAMQMPVSTSHPNKQISIPLSALQLPGQDEQVASEEFLSHLPSQVSSCEVALSPSVNTEPEVSSSQQQPPVAPAITTEATAQCIPAYSTKLNKFPVFNINDDLNDLCTSAVSPNTTKATRYALNVWRYWCMTNGLKDHTDITKIPAVKLNELLENFYVTVKKSDGSDFLATSLHAIRRGLDRILKNAGVGFSITSSTFSSSTKKLKEKLWVLSKAGMSGARSRNIVYFSLSDEEEMWQAGCLGDDSPITLLSTVVKYNSQYLNMRTLQEHADLMYGDIELLKDPQNQPYFARTDSVKRESRSGSTRVCHGKIYHEHSRGHKQCPYCLLYKYMYIHRPPTQMEAKSPFYLTARKEATDMGSVWYEEQRMGLRSLRGIVPNLAKKVKLENCENFTFVSFTQVSRRLGSHSCCQ

SEQ ID NO: 900 - protein, 590 aa, Homo sapiens
MPRRSRRGIWRIPVDEIDRPGSFAWHMNRSIVLLLKVLAQLRDHSTLLKVSSMLQRTPDQGKKYLRDADRQVLAQRAFILTVKVLEDTLSELAEGSERPGPKVCGLPGARMTTDVSHKASPEDGQEGLPQPKKPPLADGSGPGPEPGGKVGLLNHRPVAMDAGDSADQSGERKDKESPRAGPTEPMDTSEATVCHSDLERTPPLLPGRPARDRGPESRPTELSLEELSISARQQPTPLTPAQPAPAPAPATTTGTRAGGHPEEPLSRLSRKRKLLEDTESGKTLLLDAYRVWQQGQKGVAYDLGRVERIMSETYMLIKQVDEEAALEQAVKFCQVHLGAAAQRQASGDTPTTPKHPKDSRENFFPVTVVPTAPDPVPADSVQRPSDAHTKPRPALAAATTIITCPPSASASTLDQSKDPGPPRPHRPEATPSMASLGPEGKLRPEPRRDGEAQEAASETQPLSSPPTAASSKAPSSGSAQPPEGHPGKPEPSRAKSRPLPNMPKLVIPSAATKFPPEITVTPPTPTLLSPKGSISEETKQKLKSAILSAQSAANVRKESLCQPALEVLETSSQESSLESETDEDDDYMDI

SEQ ID NO: 901 - protein, 1539 aa, Homo sapiens
MDSYFKAAVSDLDKLLDDFEQNPDEQDYLQDVQNAYDSNHCSVSSELASSQRTSLLPKDQECVNSCASSETSYGTNESSLNEKTLKGLTSIQNEKNVTGLDLLSSVDGGTSDEIQPLYMGRCSKPICDLISDMGNLVHATNSEEDIKKLLPDDFKSNADSLIGLDLSSVSDTPCVSSTDHDSDTVREQQNDISSELQNREIGGIKELGIKVDTTLSDSYNYSGTENLKDKKIFNQLESIVDFNMSSALTRQSSKMFHAKDKLQHKSQPCGLLKDVGLVKEEVDVAVITAAECLKEEGKTSALTCSLPKNEDLCLNDSNSRDENFKLPDFSFQEDKTVIKQSAQEDSKSLDLKDNDVIQDSSSALHVSSKDVPSSLSCLPASGSMCGSLIESKARGDFLPQHEHKDNIQDAVTIHEEIQNSVVLGGEPFKENDLLKQEKCKSILLQSLIEGMEDRKIDPDQTVIRAESLDGGDTSSTVVESQEGLSGTHVPESSDCCEGFINTFSSNDMDGQDLDYFNIDEGAKSGPLISDAELDAFLTEQYLQTTNIKSFEENVNDSKSQMNQIDMKGLDDGNINNIYFNAEAGAIGESHGINIICEIVDKQNTIENGLSLGEKSTIPVQQGLPTSKSEITNQLSVSDINSQSVGGARPKQLFSLPSRTRSSKDLNKPDVPDTIESEPSTADTVVPITCAIDSTADPQVSFNSNYIDIESNSEGGSSFVTANEDSVPENTCKEGLVLGQKQPTWVPDSEAPNCMNCQVKFTFTKRRHHCRACGKVFCGVCCNRKCKLQYLEKEARVCVVCYETISKAQAFERMMSPTGSNLKSNHSDECTTVQPPQENQTSSIPSPATLPVSALKQPGVEGLCSKEQKRVWFADGILPNGEVADTTKLSSGSKRCSEDFSPLSPDVPMTVNTVDHSHSTTVEKPNNETGDITRNEIIQSPISQVPSVEKLSMNTGNEGLPTSGSFTLDDDVFAETEEPSSPTGVLVNSNLPIASISDYRLLCDINKYVCNKISLLPNDEDSLPPLLVASGEKGSVPVVEEHPSHEQIILLLEGESFHPVTFVLNANLLVNVKFIFYSSDKYWYFSTNGLHGLGQAEIIILLLCLPNEDTIPKDIFRLFITIYKDALKGKYIENLDNITFTESFLSSKDHGGFLFITPTFQKLDDLSLPSNPFLCGILIQKLEIPWAKVFPMRLMLRLGAEYKAYPAPLTSIRGRKPLFGEIGHTIMNLLVDLRNYQYTLHNIDQLLIHMEMGKSCIKIPRKKYSDVMKVLNSSNEHVISIGASFSTEADSHLVCIQNDGIYETQANSATGHPRKVTGASFVVFNGALKTSSGFLAKSSIVEDGLMVQITPETMNGLRLALREQKDFKITCGKVDAVDLREYVDICWVDAEEKGNKGVISSVDGISLQGFPSEKIKLEADFETDEKIVKCTEVFYFLKDQDLSILSTSYQFAKEIAMACSAALCPHLKTLKSNGMNKIGLRVSIDTDMVEFQAGSEGQLLPQHYLNDLDSALIPVIHGGTSNSSLPLEIELVFFIIEHLF

SEQ ID NO: 902 - protein, 671 aa, Homo sapiens
MNGAPSPEDGASPSSPPLPPPPPPSWREFCESHARAAALDFARRFRLYLASHPQYAGPGAEAAFSRRFAELFLQHFEAEVARASGSLSPPILAPLSPGAEISPHDLSLESCRVGGPLAVLGPSRSSEDLAGPLPSSVSSSSTTSSKPKLKKRFSLRSVGRSVRGSVRGILQWRGTVDPPSSAGPLETSSGPPVLGGNSNSNSSGGAGTVGRGLVSDGTSPGERWTHRFERLRLSRGGGALKDGAGMVQREELLSFMGAEEAAPDPAGVGRGGGVAGPPSGGGGQPQWQKCRLLLRSEGEGGGGSRLEFFVPPKASRPRLSIPCSSITDVRTTTALEMPDRENTFVVKVEGPSEYIMETVDAQHVKAWVSDIQECLSPGPCPATSPRPMTLPLAPGTSFLTRENTDSLELSCLNHSESLPSQDLLLGPSESNDRLSQGAYGGLSDRPSASISPSSASIAASHFDSMELLPPELPPRIPIEEGPPTGTVHPLSAPYPPLDTPETATGSFLFQGEPEGGEGDQPLSGYPWFHGMLSRLKAAQLVLTGGTGSHGVFLVRQSETRRGEYVLTFNFQGKAKHLRLSLNEEGQCRVQHLWFQSIFDMLEHFRVHPIPLESGGSSDVVLVSYVPSSQRQQGREQAGSHAGVCEGDGCHPDASCTLMPFGASDCVTDHLP

SEQ ID NO: 903 - protein, 335 aa, Homo sapiens
MTTVTVTTEIPPRDKMEDNSALYESTSAHIIEETEYVKKIRTTLQKIRTQMFKDEIRHDSTNHKLDAKHCGNLQQGSDSEMDPSCCSLDLLMKKIKGKDLQLLEMNKENEVLKIKLQASREAGAAALRNVAQRLFENYQTQSEEVRKKQEDSKQLLQVNKLEKEQKLKQHVENLNQVAEKLEEKHSQITELENLVQRMEKEKRTLLERKLSLENKLLQLKSSATYGKSCQDLQREISILQEQISHLQFVIHSQHQNLRSVIQEMEGLKNNLKEQDKRIENLREKVNILEAQNKELKTQVALSSETPRTKVSKAVSTSELKTEGVSPYLMLIRLRK

SEQ ID NO: 904 - protein, 129 aa, Homo sapiens
MILSNTTAVTPFLTKLWQETVQQGGNMSGLARRSPRSSDGKLEALYVLMVLGFFGFFTLGIMLSYIRSKKLEHSNDPFNVYIESDAWQEKDKAYVQARVLESYRSCYVVENHLAIEQPNTHLPETKPSP

SEQ ID NO: 905 - protein, 268 aa, Homo sapiens
MSGKANASKKNAQQLKRNPKRKKDNEEVVLSENKVRNTVKKNKNHLKDLSSEGQTKHTNLKHGKTAASKRKTWQPLSKSTRDHLQTMMESVIMTILSNSIKEKEEIQYHLNFLKKRLLQQCETLKVPPKKMEDLTNVSSLLNMERARDKANEEGLALLQEEIDKMVETTELMTGNIQSLKNKIQILASEVEEEEERVKQMHQINSSGVLSLPELSQKTLKAPTLQKEILALIPNQNALLKDLDILHNSSQMKSMSTFIEEAYKKLDAS

SEQ ID NO: 906 - protein, 163 aa, Homo sapiens
MTVKTLHGPAMVKYLLLSILGLAFLSEAAARKIPKVGHTFFQKPESCPPVPGGSMKLDIGIINENQRVSMSRNIESRSTSPWNYTVTWDPNRYPSEVVQAQCRNLGCINAQGKEDISMNSVPIQQETLVVRRKHQGCSVSFQLEKVLVTVGCTCVTPVIHHVQ

SEQ ID NO: 907 - protein, 242 aa, Homo sapiens
MGPRARPALLLLMLLQTAVLQGRLLRSHSLHYLFMGASEQDLGLSLFEALGYVDDQLFVFYDHESRRVEPRTPWVSSRISSQMWLQLSQSLKGWDHMFTVDFWTIMENHNHSKVTTLRCRALNYYPQNITMKWLKDKQPMDAKEFEPKDVLPNGDGTYQGWITLAVPPGEEQRYTCQVEHPGLDQPLIVIWEPSPSGTLVIGVISGIAVFVVILFIGILFIILRKRQGSRGAMGHYVLAERE

SEQ ID NO: 908 - protein, 143 aa, Homo sapiens
MPRAGMGASLRPGTGPHPDTGDRKQIYNILSTLGLRPSTTDCDIVRRACESVSTRAAHMCSAGLAGVINRMRESRSEDVMRITVGVDGSVYKLHPSFKERFHASVRRLTPSCEITFIESEEGSGRGAALVSAVACKKACMLGQ

SEQ ID NO: 909 - protein, 1557 aa, Homo sapiens
QGEMRVPEEALKHEKFTIQLQLSQKSSESELSKSASAKSIDSKVADAATEVQHKTTEALKSEEKAMDISAMPRGTPLYGQPSWWGDDEVDEKRAFKTNGKPEEKNHEAGTSGCGIDAKQVEEQSAAANEEVLFPFCREPSYFEIPTKEFQQPSQITESTIHEIPTKDTPSSHITGAGHASFTIEFDDSTPGKVTIRDHVTKFTSDQRHKSKKSSPGTQDLLGIQTGMMAPENKVADWLAQNNPPQMLWERTEEDSKSIKSDVPVYLKRLKGNKHDDGTQSDSENAGAHRRCSKRATLEEHLRRHHSEHKKLQKVQATEKHQDQAVVSQTAFMIAFFDEDNPRKRRSYSFTQSAGILCQETTYSTPHTKLEKAKSPTADAKVVSLSLQTSSAHHRGGHGVPHGKLLKQKSEEPSVSIPFLQTALLRSSGSLGHRPSQEMDKMLKNQATSATSEKDNDDDQSDKGTYTIELENPNSEEVEARKMIDKVFGVDDNQDYNRPVINEKHKDLIKDWALSSAAAVMEERKPLTTSGFHHSEEGTSSSGSKRWVSQWASLAANHTRHDQEERIMEFSAPLPLENETEISESGMTVRSTGSATSLASQGERRRRTLPQLPNEEKSLESHRAKVVTQRSEIGEKQDTELQEKETPTQVYQKDKQDADRPLSKMNRAVNGETLKTGGDNKTLLHLGSSAPGKEKSETDKETSLVKQTLAKLQQQEQREEAQWTPTKLSSKNVSGQTDKCREETFKQESQPPEKNSGHSTSKGDRVAQSESKRRKAEEILKSQTPKGGDKKESSKSLVRQGSFTIEKPSPNIPIELIPHINKQTSSTPSSLALTSASRIRERSESLDPDSSMDTTLILKDTEAVMAFLEAKLREDNKTDEGPDTPSYNRDNSISPESDVDTASTISLVTGETERKSTQKRKSFTSLYKDRCSTGSPSKDVTKSSSSGAREKMEKKTKSRSTDVGSRADGRKFVQSSGRIRQPSVDLTDDDQTSSVPHSAISDIMSSDQETYSCKPHGRTPLTSADEHVHSKLEGSKVTKSKTSPVVSGSSSKSTTLPRPRPTRTSLLRRARLGEASDSELADADKASVASEVSTTSSTSKPPTGRRNISRIDLLAQPRRTRLGSLSARSDSEATISRSSASSRTAEAIIRSGARLVPSDKFSPRIRANSISRLSDSKVKSMTSAHGSASVNSRWRRFPTDYASTSEDEFGSNRNSPKHTRLRTSPALKTTRLQSAGSAMPTSSSFKHRIKEQEDYIRDWTAHREEIARISQDLALIAREINDVAGEIDSVTSSGTAPSTTVSTAATTPGSAIDTREEVGDLHGEMHKLVDRVFDESLNFRKIPPLVHSKTPEGNNGRSGDPRPQAAEPPDHLTITRRRTWSRDEVMGDNLLLSSVFQFSKKIRQSIDKTAGKIRILFKDKDRNWDDIESKLRAESEVPIVKTSSMEISSILQELKRVEKQLQAINAMIDPDGTLEALNNMGFPSAMLPSPPKQKSSPVNNHHSPGQTPTLGQPEARALHPAAVSAAAEFENAESEADFSIHFNRFNPDGEEEDVTVQE

SEQ ID NO: 910 - protein, 359 aa, Homo sapiens
MQAAALPEEIRWLLEDAEEFLAEGLRNENLSAVARDHRDHILRGFQQIKARYYWDFQPQGGDIGQDSSDDNHSGTLGLSLTSDAPFLSDYQDEGMEDIVKGAQELDNVIKQGYLEKKSKDHSFFGSEWQKRWCVVSRGLFYYYANEKSKQPKGTFLIKGYGVRMAPHLRRDSKKESCFELTSQDRRSYEFTATSPAEARDWVDQISFLLKDLSSLTIPYEEDEEEEEKEETYDDIDGFDSPSCGSQCRPTILPGSVGIKEPTEEKEEEDIYEVLPDEEHDLEEDESGTRRKGVDYASYYQGLWDCHGDQPDELSFQRGDLIRILSKEYNMYGWWVGELNSLVGIVPKEYLTTAFEVEER

SEQ ID NO: 911 - protein, 2355 aa, Homo sapiens
MLRGPGPGLLLLAVQCLGTAVPSTGASKSKRQAQQMVQPQSPVAVSQSKPGCYDNGKHYQINQQWERTYLGNALVCTCYGGSRGFNCESKPEAEETCFDKYTGNTYRVGDTYERPKDSMIWDCTCIGAGRGRISCTIANRCHEGGQSYKIGDTWRRPHETGGYMLECVCLGNGKGEWTCKPIAEKCFDHAAGTSYVVGETWEKPYQGWMMVDCTCLGEGSGRITCTSRNRCNDQDTRTSYRIGDTWSKKDNRGNLLQCICTGNGRGEWKCERHTSVQTTSSGSGPFTDVRAAVYQPQPHPQPPPYGHCVTDSGVVYSVGMQWLKTQGNKQMLCTCLGNGVSCQETAVTQTYGGNSNGEPCVLPFTYNGRTFYSCTTEGRQDGHLWCSTTSNYEQDQKYSFCTDHTVLVQTRGGNSNGALCHFPFLYNNHNYTDCTSEGRRDNMKWCGTTQNYDADQKFGFCPMAAHEEICTTNEGVMYRIGDQWDKQHDMGHMMRCTCVGNGRGEWTCIAYSQLRDQCIVDDITYNVNDTFHKRHEEGHMLNCTCFGQGRGRWKCDPVDQCQDSETGTFYQIGDSWEKYVHGVRYQCYCYGRGIGEWHCQPLQTYPSSSGPVEVFITETPSQPNSHPIQWNAPQPSHISKYILRWRPKNSVGRWKEATIPGHLNSYTIKGLKPGVVYEGQLISIQQYGHQEVTRFDFTTTSTSTPVTSNTVTGETTPFSPLVATSESVTEITASSFVVSWVSASDTVSGFRVEYELSEEGDEPQYLDLPSTATSVNIPDLLPGRKYIVNVYQISEDGEQSLILSTSQTTAPDAPPDTTVDQVDDTSIVVRWSRPQAPITGYRIVYSPSVEGSSTELNLPETANSVTLSDLQPGVQYNITIYAVEENQESTPVVIQQETTGTPRSDTVPSPRDLQFVEVTDVKVTIMWTPPESAVTGYRVDVIPVNLPGEHGQRLPISRNTFAEVTGLSPGVTYYFKVFAVSHGRESKPLTAQQTTKLDAPTNLQFVNETDSTVLVRWTPPRAQITGYRLTVGLTRRGQPRQYNVGPSVSKYPLRNLQPASEYTVSLVAIKGNQESPKATGVFTTLQPGSSIPPYNTEVTETTIVITWTPAPRIGFKLGVRPSQGGEAPREVTSDSGSIVVSGLTPGVEYVYTIQVLRDGQERDAPIVNKVVTPLSPPTNLHLEANPDTGVLTVSWERSTTPDITGYRITTTPTNGQQGNSLEEVVHADQSSCTFDNLSPGLEYNVSVYTVKDDKESVPISDTIIPAVPPPTDLRFTNIGPDTMRVTWAPPPSIDLTNFLVRYSPVKNEEDVAELSISPSDNAVVLTNLLPGTEYVVSVSSVYEQHESTPLRGRQKTGLDSPTGIDFSDITANSFTVHWIAPRATITGYRIRHHPEHFSGRPREDRVPHSRNSITLTNLTPGTEYVVSIVALNGREESPLLIGQQSTVSDVPRDLEVVAATPTSLLISWDAPAVTVRYYRITYGETGGNSPVQEFTVPGSKSTATISGLKPGVDYTITVYAVTGRGDSPASSKPISINYRTEIDKPSQMQVTDVQDNSISVKWLPSSSPVTGYRVTTTPKNGPGPTKTKTAGPDQTEMTIEGLQPTVEYVVSVYAQNPSGESQPLVQTAVTNIDRPKGLAFTDVDVDSIKIAWESPQGQVSRYRVTYSSPEDGIHELFPAPDGEEDTAELQGLRPGSEYTVSVVALHDDMESQPLIGTQSTAIPAPTDLKFTQVTPTSLSAQWTPPNVQLTGYRVRVTPKEKTGPMKEINLAPDSSSVVVSGLMVATKYEVSVYALKDTLTSRPAQGVVTTLENVSPPRRARVTDATETTITISWRTKTETITGFQVDAVPANGQTPIQRTIKPDVRSYTITGLQPGTDYKIYLYTLNDNARSSPVVIDASTAIDAPSNLRFLATTPNSLLVSWQPPRARITGYIIKYEKPGSPPREVVPRPRPGVTEATITGLEPGTEYTIYVIALKNNQKSEPLIGRKKTDELPQLVTLPHPNLHGPEILDVPSTVQKTPFVTHPGYDTGNGIQLPGTSGQQPSVGQQMIFEEHGFRRTTPPTTATPIRHRPRPYPPNVGQEALSQTTISWAPFQDTSEYIISCHPVGTDEEPLQFRVPGTSTSATLTGLTRGATYNVIVEALKDQQRHKVREEVVTVGNSVNEGLNQPTDDSCFDPYTVSHYAVGDEWERMSESGFKLLCQCLGFGSGHFRCDSSRWCHDNGVNYKIGEKWDRQGENGQMMSCTCLGNGKGEFKCDPHEATCYDDGKTYHVGEQWQKEYLGAICSCTCFGGQRGWRCDNCRRPGGEPSPEGTTGQSYNQYSQRYHQRTNTNVNCPIECFMPLDVQADREDSRE

SEQ ID NO: 912 - protein, 418 aa, Homo sapiens
MDSSAAPTNASNCTDALAYSSCSPAPSPGSWVNLSHLDGNLSDPCGPNRTDLGGRDSLCPPTGSPSMITAITIMALYSIVCVVGLFGNFLVMYVIVRYTKMKTATNIYIFNLALADALATSTLPFQSVNYLMGTWPFGTILCKIVISIDYYNMFTSIFTLCTMSVDRYIAVCHPVKALDFRTPRNAKIINVCNWILSSAIGLPVMFMATTKYRQGSIDCTLTFSHPTWYWENLLKICVFIFAFIMPVLIITVCYGLMILRLKSVRMLSGSKEKDRNLRRITRMVLVVVAVFIVCWTPIHIYVIIKALVTIPETTFQTVSWHFCIALGYTNSCLNPVLYAFLDENFKRCFREFCIPTSSNIEQQNSTRIRQNTRDHPSTANTVDRTNHQPPLAVSMAQIFTRYPPPTHREKTCNDYMKR

SEQ ID NO: 913 - protein, 1447 aa, Homo sapiens
MFRAGEASKRPLPGPSPPRVRSVEVARGRAGYGFTLSGQAPCVLSCVMRGSPADFVGLRAGDQILAVNEINVKKASHEDVVKLIGKCSGVLHMVIAEGVGRFESCSSDEEGGLYEGKGWLKPKLDSKALGINRAERVVEEMQSGGIFNMIFENPSLCASNSEPLKLKQRSLSESAATRFDVGHESINNPNPNMLSKEEISKVIHDDSVFSIGLESHDDFALDASILNVAMIVGYLGSIELPSTSSNLESDSLQAIRGCMRRLRAEQKIHSLVTMKIMHDCVQLSTDKAGVVAEYPAEKLAFSAVCPDDRRFFGLVTMQTNDDGSLAQEEEGALRTSCHVFMVDPDLFNHKIHQGIARRFGFECTADPDTNGCLEFPASSLPVLQFISVLYRDMGELIEGMRARAFLDGDADAHQNNSTSSNSDSGIGNFHQEEKSNRVLVVDLGGSSSRHGPGGSAWDGVGGRGAQPWGAPWTGPFCPDPEGSPPFEAAHQTDRFWDLNKHLGPASPVEVPPASLRSSVPPSKRGTVGAGCGFNQRWLPVHVLREWQCGHTSDQDSYTDSTDGWSSINCGTLPPPMSKIPADRYRVEGSFAQPPLNAPKREWSRKAFGMQSIFGPHRNVRKTKEDKKGSKFGRGTGLTQPSQRTSARRSFGRSKRFSITRSLDDLESATVSDGELTGADLKDCVSNNSLSSNASLPSVQSCRRLRERRVASWAVSFERLLQDPVGVRYFSDFLRKEFSEENILFWQACEYFNHVPAHDKKELSYRAREIFSKFLCSKATTPVNIDSQAQLADDVLRAPHPDMFKEQQLQIFNLMKFDSYTRFLKSPLYQECILAEVEGRALPDSQQVPSSPASKHSLGSDHSSVSTPKKLSGKSKSGRSLNEELGDEDSEKKRKGAFFSWSRTRSTGRSQKKREHGDHADDALHANGGLCRRESQGSVSSAGSLDLSEACRTLAPEKDKATKHCCIHLPDGTSCVVAVKAGFSIKDILSGLCERHGINGAAADLFLVGGDKPLVLHQDSSILESRDLRLEKRTLFRLDLVPINRSVGLKAKPTKPVTEVLRPVVARYGLDLSGLLVRLSGEKEPLDLGAPISSLDGQRVVLEEKDPSRGKASADKQKGVPVKQNTAVNSSSRNHSATGEERTLGKSNSIKIKGENGKNARDPRLSKREESIAKIGKKKYQKINLDEAEEFFELISKAQSNRADDQRGLLRKEDLVLPEFLRLPPGSTELTLPTPAAVAKGFSKRSATGNGRESASQPGEQWEPVQESSDSPSTSPGSASSPPGPPGTTPPGQKSPSGPFCTPQSPVSLAQEGTAQIWKRQSQEVEAGGIQTVEDEHVAELTLMGEGDISSPNSTLLPPPSTPQEVPGPSRPGSGTHGSRDLPVNRIIDVDLVTGSAPGRDGGIAGAQAGPGRSQASGGPPTSDLPGLGPVPGEPAKPKTSAHHATFV

SEQ ID NO: 914 - protein, 297 aa, Homo sapiens
MFSRAGVAGLSAWTLQPQWIQVRNMATLKDITRRLKSIKNIQKITKSMKMVAAAKYARAERELKPARIYGLGSLALYEKADIKGPEDKKKHLLIGVSSDRGLCGAIHSSIAKQMKSEVATLTAAGKEVMLVGIGDKIRGILYRTHSDQFLVAFKEVGRKPPTFGDASVIALELLNSGYEFDEGSIIFNKFRSVISYKTEEKPIFSLNTVASADSMSIYDDIDADVLQNYQEYNLANIIYYSLKESTTSEQSARMTAMDNASKNASEMIDKLTLTFNRTRQAVITKELIEIISGAAAL

SEQ ID NO: 915 - protein, 1113 aa, Homo sapiens
MFSQVPRTPASGCYYLNSMTPEGQEMYLRFDQTTRRSPYRMSRILARHQLVTKIQQEIEAKEACDWLRAAGFPQYAQLYEDSQFPINIVAVKNDHDFLEKDLVEPLCRRLNTLNKCASMKLDVNFQRKKGDDSDEEDLCISNKWTFQRTSRRWSRVDDLYTLLPRGDRNGSPGGTGMRNTTSSESVLTDLSEPEVCSIHSESSGGSDSRSQPGQCCTDNPVMLDAPLVSSSLPQPPRDVLNHPFHPKNEKPTRARAKSFLKRMETLRGKGAHGRHKGSGRTGGLVISGPMLQQEPESFKAMQCIQIPNGDLQNSPPPACRKGLPCSGKSSGESSPSEHSSSGVSTPCLKERKCHEANKRGGMYLEDLDVLAGTALPDAGDQSRMHEFHSQENLVVHIPKDHKPGTFPKALSIESLSPTDSSNGVNWRTGSISLGREQVPGAREPRLMASCHRASRVSIYDNVPGSHLYASTGDLLDLEKDDLFPHLDDILQHVNGLQEVVDDWSKDVLPELQTHDTLVGEPGLSTFPSPNQITLDFEGNSVSEGRTTPSDVERDVTSLNESEPPGVRDRRDSGVGASLTRPNRRLRWNSFQLSHQPRPAPASPHISSQTASQLSLLQRFSLLRLTAIMEKHSMSNKHGWTWSVPKFMKRMKVPDYKDKAVFGVPLIVHVQRTGQPLPQSIQQALRYLRSNCLDQVGLFRKSGVKSRIHALRQMNENFPENVNYEDQSAYDVADMVKQFFRDLPEPLFTNKLSETFLHIYQYVSKEQRLQAVQAAILLLADENREVLQTLLCFLNDVVNLVEENQMTPMNLAVCLAPSLFHLNLLKKESSPRVIQKKYATGKPDQKDLNENLAAAQGLAHMIMECDRLFEVPHELVAQSRNSYVEAEIHVPTLEELGTQLEESGATFHTYLNHLIQGLQKEAKEKFKGWVTCSSTDNTDLAFKKVGDGNPLKLWKASVEVEAPPSVVLNRVLRERHLWDEDFVQWKVVETLDRQTEIYQYVLNSMAPHPSRDFVVLRTWKTDLPKGMCTLVSLSVEHEEAQLLGGVRAVVMDSQYLIEPCGSGKSRLTHICRIDLKGHSPEWYSKGFGHLCAAEVARIRNSFQPLIAEGPETKI

SEQ ID NO: 916 - protein, 1549 aa, Homo sapiens
MPSDFISLLSADLDLESPKSLYSRDSLKLHPSQNFHRAGLLEESVYDLLPKELQLPPSRETSVASMSQTSGGEAGSPPPAVVAADASSAPSSSSMGGACSSFTTSSSPTIYSTSVTDSKAMQVESCSSAVGVSNRGVSEKQLTSNTVQQHPSTPKRHTVLYISPPPEDLLDNSRMSCQDEGCGLESEQSCSMWMEDSPSNFSNMSTSSYNDNTEVPRKSRKRNPKQRPGVKRRDCEESNMDIFDADSAKAPHYVLSQLTTDNKGNSKAGNGTLENQKGTGVKKSPMLCGQYPVKSEGKELKIVVQPETQHRARYLTEGSRGSVKDRTQQGFPTVKLEGHNEPVVLQVFVGNDSGRVKPHGFYQACRVTGRNTTPCKEVDIEGTTVIEVGLDPSNNMTLAVDCVGILKLRNADVEARIGIAGSKKKSTRARLVFRVNIMRKDGSTLTLQTPSSPILCTQPAGVPEILKKSLHSCSVKGEEEVFLIGKNFLKGTKVIFQENVSDENSWKSEAEIDMELFHQNHLIVKVPPYHDQHITLPVSVGIYVVTNAGRSHDVQPFTYTPDPAAAGALNVNVKKEISSPARPCSFEEAMKAMKTTGCNLDKVNIIPNALMTPLIPSSMIKSEDVTPMEVTAEKRSSTIFKTTKSVGSTQQTLENISNIAGNGSFSSPSSSHLPSENEKQQQIQPKAYNPETLTTIQTQDISQPGTFPAVSASSQLPNSDALLQQATQFQTRETQSREILQSDGTVVNLSQLTEASQQQQQSPLQEQAQTLQQQISSNIFPSPNSVSQLQNTIQQLQAGSFTGSTASGSSGSVDLVQQVLEAQQQLSSVLFSAPDGNENVQEQLSADIFQQVSQIQSGVSPGMFSSTEPTVHTRPDNLLPGRAESVHPQSENTLSNQQQQQQQQQQVMESSAAMVMEMQQSICQAAAQIQSELFPSTASANGNLQQSPVYQQTSHMMSALSTNEDMQMQCELFSSPPAVSGNETSTTTTQQVATPGTTMFQTSSSGDGEETGTQAKQIQNSVFQTMVQMQHSGDNQPQVNLFSSTKSMMSVQNSGTQQQGNGLFQQGNEMMSLQSGNFLQQSSHSQAQLFHPQNPIADAQNLSQETQGSLFHSPNPIVHSQTSTTSSEQMQPPMFHSQSTIAVLQGSSVPQDQQSTNIFLSQSPMNNLQTNTVAQEAFFAAPNSISPLQSTSNSEQQAAFQQQAPISHIQTPMLSQEQAQPPQQGLFQPQVALGSLPPNPMPQSQQGTMFQSQHSIVAMQSNSPSQEQQQQQQQQQQQQQQQQQSILFSNQNTMATMASPKQPPPNMIFNPNQNPMANQEQQNQSIFHQQSNMAPMNQEQQPMQFQSQSTVSSLQNPGPTQSESSQTPLFHSSPQIQLVQGSPSSQEQQVTLFLSPASMSALQTSINQQDMQQSPLYSPQNNMPGIQGATSSPQPQATLFHNTAGGTMNQLQNSPGSSQQTSGMFLFGIQNNCSQLLTSGPATLPDQLMAISQPGQPQNEGQPPVTTLLSQQMPENSPLASSINTNQNIEKIDLLVSLQNQGNNLTGSF

SEQ ID NO: 917 - protein, 278 aa, Homo sapiens
MQWLRVRESPGEATGHRVTMGTAALGPVWAALLLFLLMCEIPMVELTFDRAVASGCQRCCDSEDPLDPAHVSSASSSGRPHALPEIRPYINITILKGDKGDPGPMGLPGYMGREGPQGEPGPQGSKGDKGEMGSPGAPCQKRFFAFSVGRKTALHSGEDFQTLLFERVFVNLDGCFDMATGQFAAPLRGIYFFSLNVHSWNYKETYVHIMHNQKEAVILYAQPSERSIMQSQSVMLDLAYGDRVWVRLFKRQRENAIYSNDFDTYITFSGHLIKAEDD

SEQ ID NO: 918 - protein, 128 aa, Homo sapiens
MASSSTVPLGFHYETKYVVLSYLGLLSQEKLQEQHLSSPQGVQLDIASQSLDQEILLKVKTEIEEELKSLDKEISEDFGASGFATTNAFGIDKTWSRTFERTAAVWRDIPGGLFGRVHHSARWLGHCV

SEQ ID NO: 919 - protein, 3097 aa, Homo sapiens
MSGSSGGAAAPAASSGPAAAASAAGSGCGGGAGEGAEEAAKDLADIAAFFRSGFRKNDEMKAMDVLPILKEKVAYLSGGRDKRGGPILTFPARSNHDRIRQEDLRRLISYLACIPSEEVCKRGFTVIVDMRGSKWDSIKPLLKILQESFPCCIHVALIIKPDNFWQKQRTNFGSSKFEFETNMVSLEGLTKVVDPSQLTPEFDGCLEYNHEEWIEIRVAFEDYISNATHMLSRLEELQDILAKKELPQDLEGARNMIEEHSQLKKKVIKAPIEDLDLEGQKLLQRIQSSESFPKKNSGSGNADLQNLLPKVSTMLDRLHSTRQHLHQMWHVRKLKLDQCFQLRLFEQDAEKMFDWITHNKGLFLNSYTEIGTSHPHAMELQTQHNHFAMNCMNVYVNINRIMSVANRLVESGHYASQQIRQIASQLEQEWKAFAAALDERSTLLDMSSIFHQKAEKYMSNVDSWCKACGEVDLPSELQDLEDAIHHHQGIYEHITLAYSEVSQDGKSLLDKLQRPLTPGSSDSLTASANYSKAVHHVLDVIHEVLHHQRQLENIWQHRKVRLHQRLQLCVFQQDVQQVLDWIENHGEAFLSKHTGVGKSLHRARALQKRHEDFEEVAQNTYTNADKLLEAAEQLAQTGECDPEEIYQAAHQLEDRIQDFVRRVEQRKILLDMSVSFHTHVKELWTWLEELQKELLDDVYAESVEAVQDLIKRFGQQQQTTLQVTVNVIKEGEDLIQQLRDSAISSNKTPHNSSINHIETVLQQLDEAQSQMEELFQERKIKLELFLQLRIFERDAIDIISDLESWNDELSQQMNDFDTEDLTIAEQRLQHHADKALTMNNLTFDVIHQGQDLLQYVNEVQASGVELLCDRDVDMATRVQDLLEFLHEKQQELDLAAEQHRKHLEQCVQLRHLQAEVKQVLGWIRNGESMLNAGLITASSLQEAEQLQREHEQFQHAIEKTHQSALQVQQKAEAMLQANHYDMDMIRDCAEKVASHWQQLMLKMEDRLKLVNASVAFYKTSEQVCSVLESLEQEYKREEDWCGGADKLGPNSETDHVTPMISKHLEQKEAFLKACTLARRNADVFLKYLHRNSVNMPGMVTHIKAPEQQVKNILNELFQRENRVLHYWTMRKRRLDQCQQYVVFERSAKQALEWIHDNGEFYLSTHTSTGSSIQHTQELLKEHEEFQITAKQTKERVKLLIQLADGFCEKGHAHAAEIKKCVTAVDKRYRDFSLRMEKYRTSLEKALGISSDSNKSSKSLQLDIIPASIPGSEVKLRDAAHELNEEKRKSARRKEFIMAELIQTEKAYVRDLRECMDTYLWEMTSGVEEIPPGIVNKELIIFGNMQEIYEFHNNIFLKELEKYEQLPEDVGHCFVTWADKFQMYVTYCKNKPDSTQLILEHAGSYFDEIQQRHGLANSISSYLIKPVQRITKYQLLLKELLTCCEEGKGEIKDGLEVMLSVPKRANDAMHLSMLEGFDENIESQGELILQESFQVWDPKTLIRKGRERHLFLFEMSLVFSKEVKDSSGRSKYLYKSKLFTSELGVTEHVEGDPCKFALWVGRTPTSDNKIVLKASSIENKQDWIKHIREVIQERTIHLKGALKEPIHIPKTAPATRQKGRRDGEDLDSQGDGSSQPDTISIASRTSQNTLDSDKLSGGCELTVVIHDFTACNSNELTIRRGQTVEVLERPHDKPDWCLVRTTDRSPAAEGLVPCGSLCIAHSRSSMEMEGIFNHKDSLSVSSNDASPPASVASLQPHMIGAQSSPGPKRPGNTLRKWLTSPVRRLSSGKADGHVKKLAHKHKKSREVRKSADAGSQKDSDDSAATPQDETVEERGRNEGLSSGTLSKSSSSGMQSCGEEEGEEGADAVPLPPPMAIQQHSLLQPDSQDDKASSRLLVRPTSSETPSAAELVSAIEELVKSKMALEDRPSSLLVDQGDSSSPSFNPSDNSLLSSSSPIDEMEERKSSSLKRRHYVLQELVETERDYVRDLGYVVEGYMALMKEDGVPDDMKGKDKIVFGNIHQIYDWHRDFFLGELEKCLEDPEKLGSLFVKHERRLHMYIAYCQNKPKSEHIVSEYIDTFFEDLKQRLGHRLQLTDLLIKPVQRIMKYQLLLKDFLKYSKKASLDTSELERAVEVMCIVPRRCNDMMNVGRLQGFDGKIVAQGKLLLQDTFLVTDQDAGLLPRCRERRIFLFEQIVIFSEPLDKKKGFSMPGFLFKNSIKVSCLCLEENVENDPCKFALTSRTGDVVETFILHSSSPSVRQTWIHEINQILENQRNFLNALTSPIEYQRNHSGGGGGGGSGGSGGGGGSGGGGAPSGGSGHSGGPSSCGGAPSTSRSRPSRIPQPVRHHPPVLVSSAASSQAEADKMSGTSTPGPSLPPPGAAPEAGPSAPSRRPPGADAEGSEREAEPIPKMKVLESPRKGAANASGSSPDAPAKDARASLGTLPLGKPRAGAASPLNSPLSSAVPSLGKEPFPPSSPLQKGGSFWSSIPASPASRPGSFTFPGDSDSLQRQTPRHAAPGKDTDRMSTCSSASEQSVQSTQSNGSESSSSSNISTMLVTHDYTAVKEDEINVYQGEVVQILASNQQNMFLVFRAATDQCPAAEGWIPGFVLGHTSAVIVENPDGTLKKSTSWHTALRLRKKSEKKDKDGKREGKLENGYRKSREGLSNKVSVKLLNPNYIYDVPPEFVIPLSEVTCETGETVVLRCRVCGRPKASITWKGPEHNTLNNDGHYSISYSDLGEATLKIVGVTTEDDGIYTCIAVNDMGSASSSASLRVLGPGMDGIMVTWKDNFDSFYSEVAELGRGRFSVVKKCDQKGTKRAVATKFVNKKLMKRDQVTHELGILQSLQHPLLVGLLDTFETPTSYILVLEMADQGRLLDCVVRWGSLTEGKIRAHLGEVLEAVRYLHNCRIAHLDLKPENILVDESLAKPTIKLADFGDAVQLNTTYYIHQLLGNPEFAAPEIILGNPVSLTSDTWSVGVLTYVLLSGVSPFLDDSVEETCLNICRLDFSFPDDYFKGVSQKAKEFVCFLLQEDPAKRPSAALALQEQWLQAGNGRSTGVLDTSRLTSFIERRKHQNDVRPIRSIKNFLQSRLLPRV

SEQ ID NO: 920 - protein, 255 aa, Homo sapiens
MILNKALLLGALALTTVMSPCGGEDIVADHVASCGVNLYQFYGPSGQYTHEFDGDEQFYVDLERKETAWRWPEFSKFGGFDPQGALRNMAVAKHNLNIMIKRYNSTAATNEVPEVTVFSKSPVTLGQPNTLICLVDNIFPPVVNITWLSNGQSVTEGVSETSFLSKSDHSFFKISYLTFLPSADEIYDCKVEHWGLDQPLLKHWEPEIPAPMSELTETVVCALGLSVGLMGIVVGTVFIIQGLRSVGASRHQGPL

SEQ ID NO: 921 - protein, 213 aa, Homo sapiens [sequence omitted]

SEQ ID NO: 922 - protein, 601 aa, Homo sapiens
MAKTPSDHLLSTLEELVPYDFEKFKFKLQNTSVQKEHSRIPRSQIQRARPVKMATLLVTYYGEEYAVQLTLQVLRAINQRLLAEELHRAAIQDMGSCYVAQVGLELLISNNPPIFASETAGITGRPPDTAASPRCHAQEGDPVDGTCVRDSCSFPEAVSGHPQASGSRSPGCPRCQDSHERKSPGSLSPQPLPQCKRHLKQVQLLFCEDHDEPICLICSLSQEHQGHRVRPIEEVALEHKKKIQKQLEHLKKLRKSGEEQRSYGEEKAVSFLKQTEALKQRVQRKLEQVYYFLEQQEHFFVASLEDVGQMVGQIRKAYDTRVSQDIALLDALIGELEAKECQSEWELLQDIGDILHRAKTVPVPEKWTTPQEIKQKIQLLHQKSEFVEKSTKYFSETLRSEMEMFNVPELIGAQAHAVNVILDAETAYPNLIFSDDLKSVRLGNKWERLPDGPQRFDSCIIVLGSPSFLSGRRYWEVEVGDKTAWILGACKTSISRKGNMTLSPENGYWVVIMMKENEYQASSVPPTRLLIKEPPKRVGIFVDYRVGSISFYNVTARSHIYTFASCSFSGPLQPIFSPGTRDGGKNTAPLTICPVGGQGPD

SEQ ID NO: 923 - protein, 414 aa, Homo sapiens
MGRPRVRQAWPGCCGHTGRLPAGRGYLASHMCDPAGAELIGDGMSDPTPPSNACTGHIQDPASQRLTWNKSPKSVLVIKKMRDASLLQPFKELCTHLMEENMIVYVEKKVLEDPAIASDESFGAVKKKFCTFREDYDDISNQIDFIICLGGDGTLLYASSLFQGSVPPVMAFHLGSLGFLTPFSFENFQSQVTQVIEGNAAVVLRSRLKVRVVKELRGKKTAVHNGLGENGSQAAGLDMDVGKQAMQYQVLNEVVIDRGPSSYLSNVDVYLDGHLITTVQGDGVIVSTPTGSTAYAAAAGASMIHPNVPAIMITPICPHSLSFRPIVVPAGVELKIMLSPEARNTAWVSFDGRKRQEIRHGDSISITTSCYPLPSICVRDPVSDWFESLAQCLHWNVRKKQAHFEEEEEEEEEG

SEQ ID NO: 924 - protein, 343 aa, Homo sapiens
MNQLGGLFVNGRPLPLDTRQQIVRLAVSGMRPCDISRILKVSNGCVSKILGRYYRTGVLEPKGIGGSKPRLATPPVVARIAQLKGECPALFAWEIQRQLCAEGLCTQDKTPSVSSINRVLRALQEDQGLPCTRLRSPAVLAPAVLTPHSGSETPRGTHPGTGHRNRTIFSPSQAEALEKEFQRGQYPDSVARGKLATATSLPEDTVRVWFSNRRAKWRRQEKLKWEMQLPGASQGLTVPRVAPGIISAQQSPGSVPTAALPALEPLGPSCYQLCWATAPERCLSDTPPKACLKPCWGHLPPQPNSLDSGLLCLPCPSSHCHLASLSGSQALLWPGCPLLYGLE

SEQ ID NO: 925 - protein, 574 aa, Homo sapiens
MSIQENISSLQLRSWVSKSQRDLAKSILIGAPGGPAGYLRRASVAQLTQELGTAFFQQQQLPAAMADTFLEHLCLLDIDSEPVAARSTSIIATIGPASRSVERLKEMIKAGMNIARLNFSHGSHEYHAESIANVREAVESFAGSPLSYRPVAIALDTKGPEIRTGILQGGPESEVELVKGSQVLVTVDPAFRTRGNANTVWVDYPNIVRVVPVGGRIYIDDGLISLVVQKIGPEGLVTQVENGGVLGSRKGVNLPGAQVDLPGLSEQDVRDLRFGVEHGVDIVFASFVRKASDVAAVRAALGPEGHGIKIISKIENHEGVKRFDEILEVSDGIMVARGDLGIEIPAEKVFLAQKMMIGRCNLAGKPVVCATQMLESMITKPRPTRAETSDVANAVLDGADCIMLSGETAKGNFPVEAVKMQHAIAREAEAAVYHRQLFEELRRAAPLSRDPTEVTAIGAVEAAFKCCAAAIIVLTTTGRSAQLLSRYRPRAAVIAVTRSAQAARQVHLCRGVFPLLYREPPEAIWADDVDRRVQFGIESGKLRGFLRVGDLVIVVTGWRPGSGYTNIMRVLSIS

SEQ ID NO: 926 - protein, 663 aa, Homo sapiens
MAGMKTASGDYIDSSWELRVFVGEEDPEAESVTLRVTGESHIGGVLLKIVEQINRKQDWSDHAIWWEQKRQWLLQTHWTLDKYGILADARLFFGPQHRPVILRLPNRRALRLRASFSQPLFQAVAAICRLLSIRHPEELSLLRAPEKKEKKKKEKEPEEELYDLSKVVLAGGVAPALFRGMPAHFSDSAQTEACYHMLSRPQPPPDPLLLQRLPRPSSLSDKTQLHSRWLDSSRCLMQQGIKAGDALWLRFKYYSFFDLDPKTDPVRLTQLYEQARWDLLLEEIDCTEEEMMVFAALQYHINKLSQSGEVGEPAGTDPGLDDLDVALSNLEVKLEGSAPTDVLDSLTTIPELKDHLRIFRPRKLTLKGYRQHWVVFKETTLSYYKSQDEAPGDPIQQLNLKGCEVVPDVNVSGQKFCIKLLVPSPEGMSEIYLRCQDEQQYARWMAGCRLASKGRTMADSSYTSEVQAILAFLSLQRTGSGGPGNHPHGPDASAEGLNPYGLVAPRFQRKFKAKQLTPRILEAHQNVAQLSLAEAQLRFIQAWQSLPDFGISYVMVRFKGSRKDEILGIANNRLIRIDLAVGDVVKTWRFSNMRQWNVNWDIRQVAIEFDEHINVAFSCVSASCRIVHEYIGGYIFLSTRERARGEELDEDLFLQLTGGHEAF

SEQ ID NO: 927 - protein, 950 aa, Homo sapiens [sequence omitted]

SEQ ID NO: 928 - protein, 1068 aa, Homo sapiens
VAGTPTSSQPSFGPSIRERPSQSLCPCPCPAGEGDPAWPALERRLVTSRGRQPSPQSHAQLLTRRRHSSEQVPPESEPRADFRSGKWLQEPATGDARDSRQALRARMSSKHRICSQEEVVIPCAYDSDSESVDLELSNLEIIKKGSSSIELTDLDIPDIPGLHCEPLSHSPRHLTQQDPLSEAIVEKLIQSIQKVFNGELKGELEKLKFLGDLSSLSQALPYDETAKSFIHSHIADIVHTLNVLVQEERPHSLSSSMRQEVFVTIADLSYQDVHLLLGSEDRAELFSLTIKSIITLPSVRTLTQIQEIMPNGTCNTECLYRQTFQAFSEMLQSLVVKDPHLENLDTIIKHLVPWLQSVKDHERERATASMAQVLKCLSKHLNLKLPLRFQRLGHLVALMALLCGDPQEKVAEEAAEGIHSLLHITLRLKYITHDKKDQQNLKRALTKCREFLELHSSAAKCFYNCPFRIAQVFEGFLDSNELCQFIMTTFDTLKTLKHPCIQRSAGELLLTLAKNTESQFEKVPEIMGVICAQLSIISQPRVRQQIINTVSLFISRPKYTDIVLSFLLCHPVPYNRHLAEVWRMLSVELPSTTWILWRLLRKLQKCHNEPAQEKMAYVAVAATDALYEVFLGNRLRAATFRLFPQLLMTLLIQIHHSIGLTMSDVDIPSGLYTEQEVPSEVTPLCFAMQATKTLLLRTCCLQEFNIMEKNKGWALLGGKDGHLQGLFLLANALLERNQLLAQKVMYLLVPLLNRGNDKHKLTSAGFFVELLRSPVAKRLPSIYSVARFKDWLQDGNHLFRILGLRGLYNLVGHQEMREDIKSLLPYIVDSLRETDEKIVLSAIQILLQLVRTMDFTTLAAMMRTLFSLFGDVRSDVHRFSVTLFGAAIKSVKNPDKKSIENQVLDSLVPLLLYSQDENDAVAEESRQVLTICAQFLKWKLPQEVYSKDPWHIKPTEAGTICRFFEKKCKGKINILEQTLMYSKNPKLPIRRSAVLFVGLLSKYMDHNELRRMGTDWIEDDLRDLLCDPEPSLCIIASQTLLLVQMARAEPKPKQRVNWLQKLMGRSSA

SEQ ID NO: 929 - protein, 497 aa, Homo sapiens
MAMSSLGCLCALTVLIRYCNRDFDDEKILIQHQKAKHFKCHICHKKLYTGPGLAIHCMQVHKETIDAVPNAIPGRTDIELEIYGMEGIPEKDMDERRRLLEQKTQESQKKKQQDDSDEYDDDDSAASTSFQPQPVQPQQGYIPPMAQPGLPPVPGAPGMPPGIPPLMPGVPPLMPGMPPVMPGMPPGLHHQRKYTQSFCGENIMMPMGGMMPPGPGIPPLMPGMPPGMPPPVPRPGIPPMTQAQAVSAPGILNRPPAPTATVPAPQPPVTKPLFPSAGQMGTPVTSSSTASSNSESLSASSKALFPSTAQAQAAVQGPVGTDFKPLNSTPATTTEPPKPTFPAYTQSTASTTSTTNSTAAKPAASITSKPATLTTTSATSKLIHPDEDISLEERRAQLPKYQRNLPRPGQAPIGNPPVGPIGGMMPPQPGIPQQQGMRPPMPPHGQYGGHHQGMPGYLPGAMPPYGQGPPMVPPYQGGPPRPPMGMRPPVMSQGGRY

SEQ ID NO: 930 - protein, 230 aa, Homo sapiens
MGRPLLLPLLPLLLPPAFLQPSGSTGSGPSYLYGVTQPKHLSASMGGSVEIPFSFYYPWELATAPDVRISWRRGHFHRQSFYSTRPPSIHKDYVNRLFLNWTEGQKSGFLRISNLQKQDQSVYFCRVELDTRSSGRQQWQSIEGTKLSITQGQQRTKATTPAREPFQNTEEPYENIRNEGQNTDPKLNPKDDGIVYASLALSSSTSPRAPPSHRPLKSPQNETLYSVLKA

SEQ ID NO: 931 - protein, 205 aa, Homo sapiens
MMRTLITTHPLPLLLLPQQLLQLVQFQEVDTDFDFPEEDKKEEFEECLEKFFSTGPARPPTKEKVKRRVLIEPGMPLNHIEYCNHEIMGKNVYYKHRWVAEHYFLLMQYDELQKICYNRFVPCKNGIRKCNRSKGLVEGVYCNLTEAFEIPACKYESLYRKGYVLITCSWQNEMQKRIPHTINDLVEPPEHRSFLSEDGVFVISP

SEQ ID NO: 932 - protein, 428 aa, Homo sapiens
MALAVAPWGRQWEEARALGRAVRMLQRLEEQCVDPRLSVSPPSLRDLLPRTAQLLREVAHSRRAAGGGGPGGPGGSGDFLLIYLANLEAKSRQVAALLPPRGRRSANDELFRAGSRLRRQLAKLAIIFSHMHAELHALFPGGKYCGHMYQLTKAPAHTFWRESCGARCVLPWAEFESLLGTCHPVEPGCTALALRTTIDLTCSGHVSIFEFDVFTRLFQPWPTLLKNWQLLAVNHPGYMAFLTYDEVQERLQACRDKPGSYLYPDGKTHNPDLTELGQAEPQQRIHVSEEQLQLYWAMDSTFELCKICAESNKDVKIEPCGHLLCSCCLAAWQHSDSQTCPFCRCEIKGWEAVSIYQFHGQATAEDSGNSSDQEGRELELGQVPLSAPPLPPRPDLPPRKPRNAQPKVRLLKGNSPPAALGPQDPAPA

SEQ ID NO: 933 - protein, 1104 aa, Homo sapiens
MKVTVCFGRTGIVVPCKEGQLRVGELTQQALQRYLKTREKGPGYWVKIHHLEYTDGGILDPDDVLADVVEDKDKLIAVFEEQEPLHKIESPSGNPADRQSPDAFETEVAAQLAAFKPIGGEIEVTPSALKLGTPLLVRRSSDPVPGPPADTQPSASHPGGQSLKLVVPDSTQNLEDREVLNGVQTELLTSPRTKDTLSDMTRTVEISGEGGPLGIHVVPFFSSLSGRILGLFIRGIEDNSRSKREGLFHENECIVKINNVDLVDKTFAQAQDVFRQAMKSPSVLLHVLPPQNREQYEKSVIGSLNIFGNNDGVLKTKVPPPVHGKSGLKTANLTGTDSPETDASASLQQNKSPRVPRLGGKPSSPSLSPLMGFGSNKNAKKIKIDLKKGPEGLGFTVVTRDSSIHGPGPIFVKNILPKGAAIKDGRLQSGDRILEVNGRDVTGRTQEELVAMLRSTKQGETASLVIARQEGHFLPRELKGEPDCCALSLETSEQLTFEIPLNDSGSAGLGVSLKGNKSRETGTDLGIFIKSIIHGGAAFKDGRLRMNDQLIAVNGESLLGKSNHEAMETLRRSMSMEGNIRGMIQLVILRRPERPMEDPAECGAFSKPCFENCQNAVTTSRRNDNSILHPLGTCSPQDKQKGLLLPNDGWAESEVPPSPTPHSALGLGLEDYSHSSGVDSAVYFPDQHINFRSVTPARQPESINLKASKSMDLVPDESKVHSLAGQKSESPSKDFGPTLGLKKSSSLESLQTAVAEVRKNDLPFHRPRPHMVRGRGCNESFRAAIDKSYDGPEEIEADGLSDKSSHSGQGALNCESAPQGNSELEDMENKARKVKKTKEKEKKKEKGKLKVKEKKRKEENEDPERKIKKKGFGAMLRFGKKKEDKGGKAEQKGTLKHGGLREEELEKMKEERESGRPTGGSTDRIQKLRKEYYQARREGFPLYEDDEGRARPSEYDLLWVPGRGPDGNAHNLRFEGMERQYASLPRGGPADPVDYLPAAPRGLYKERELPYYPGAHPMHPPKGSYPRPTELRVADLRYPQHYPPPPAPQHKGPFRQDVPPSPPQHQRMPAYQETGRPGPRGGSPDQYPYRTQDSRQKNPMTAAV

SEQ ID NO: 934 - protein, 917 aa, Homo sapiens
MNRFNGLCKVCSERRYRQITIPRGKDGFGFTICCDSPVRVQAVDSGGPAERAGLQQLDTVLQLNERPVEHWKCVELAHEIRSCPSEIILLVWRMVPQVKPGPDGGVLRRASCKSTHDLQSPPNKREKNCTHGVQARPEQRHSCHLVCDSSDGLLLGGWERYTEVAKRGGQHTLPALSRATAPTDPNYIILAPLNPGSQLLRPVYQEDTIPEESGSPSKGKSYTGLGKKSRLMKTVQTMKGHGNYQNCPVVRPHATHSSYGTYVTLAPKVLVFPVFVQPLDLCNPARTLLLSEELLLYEGRNKAAEVTLFAYSDLLLFTKEDEPGRCDVLRNPLYLQSVKLQEGSSEDLKFCVLYLAEKAECLFTLEAHSQEQKKRVCWCLSENIAKQQQLAASPPDSKMFETEADEKREMALEEGKGPGAEDSPPSKEPSPGQELPPGQDLPPNKDSPSGQEPAPSQEPLSSKDSATSEGSPPGPDAPPSKDVPPCQEPPPAQDLSPCQDLPAGQEPLPHQDPLLTKDLPAIQESPTRDLPPCQDLPPSQVSLPAKALTEDTMSSGDLLAATGDPPAAPRPAFVIPEVRLDSTYSQKAGAEQGCSGDEEDAEEAEEVEEGEEGEEDEDEDTSDDNYGERSEAKRSSMIETGQGAEGGLSLRVQNSLRRRTHSEGSLLQEPRGPCFASDTTLHCSDGEGAASTWGMPSPSTLKKELGRNGGSMHHLSLFFTGHRKMSGADTVGDDDEASRKRKSKNLAKDMKNKLGIFRRRNESPGAPPAGKADKMMKSFKPTSEEALKWGESLEKLLVHKYGLAVFQAFLRTEFSEENLEFWLACEDFKKVKSQSKMASKAKKIFAEYIAIQACKEVNLDSYTREHTKDNLQSVTRGCFDLAQKRIFGLMEKDSYPRFLRSDLYLDLINQKKMSPPL

SEQ ID NO: 935 - protein, 383 aa, Homo sapiens
MTATEALLRVLLLLLAFGHSTYGAECFPACNPQNGFCEDDNVCRCQPGWQGPLCDQCVTSPGCLHGLCGEPGQCICTDGWDGELCDRDVRACSSAPCANNRTCVSLDDGLYECSCAPGYSGKDCQKKDGPCVINGSPCQHGGTCVDDEGRASHASCLCPPGFSGNFCEIVANSCTPNPCENDGVCTDIGGDFRCRCPAGFIDKTCSRPVTNCASSPCQNGGTCLQHTQVSYECLCKPEFTGLTCVKKRALSPQQVTRLPSGYGLAYRLTPGVHELPVQQPEHRILKVSMKELNKKTPLLTEGQAICFTILGVLTSLVVLGTVGIVFLNKCETWVSNLRYNHMLRKKKNLLLQYNSGEDLAVNIIFPEKIDMTTFSKEAGDEEI

SEQ ID NO: 936 - protein, 291 aa, Homo sapiens
MQAKNKDALQPIKEDRTGKAQDDAFWLQSLITDAFHDKGFQKIKEYFQQKESHFPQKYNRLLLYRLDRSINKELDKNEFQSVSLLLKCIQRFLVDGLKEDEPLLIRQGLIPKLVSWFERTTGILTSEGLASDTSLICVIEDFFDTALIISRSSSEGKIQMLDSFLLSLGFLVTEKTVNHLLQQEGLKTFNCILHAVPREERKKFPLSEGMCHLMKDLARTLLTVGDYDQQVAISEALCRLTIKKSRDELVHKWFDDEVIAEAFKEIKDREFETDSRRFLNHLNNRLGDQRR

SEQ ID NO: 937 - protein, 468 aa, Homo sapiens
MWLFFGITGLLTAALSGHPSPAPPDQLNTSSAESELWEPGERLPVRLTNGSSSCSGTVEVRLEASWEPACGALWDSRAAEAVCRALGCGGAEAASQLAPPTPELPPPPAAGNTSVAANATLAGAPALLCSGAEWRLCEVVEHACRSDGRRARVTCAENRALRLVDGGGACAGRVEMLEHGEWGSVCDDTWDLEDAHVVCRQLGCGWAVQALPGLHFTPGRGPIHRDQVNCSGAEAYLWDCPGLPGQHYCGHKEDAGAVCSEHQSWRLTGGADRCEGQVEVHFRGVWNTVCDSEWYPSEAKVLCQSLGCGTAVERPKGLPHSLSGRMYYSCNGEELTLSNCSWRFNNSNLCSQSLAARVLCSASRSLHNLSTPEVPASVQTVTIESSVTVKIENKESRELMLLIPSIVLGILLLGSLIFIAFILLRIKGKYALPVMVNHQHLPTTIPAGSNSYQPVPITIPKEGPGPAP

SEQ ID NO: 938 - protein, 1756 aa, Homo sapiens
MNSLFRKRNKGKYSPTVQTRSISNKELSELIEQLQKNADQVEKNIVDTEAKMQSDLARLQEGRQPEHRDVTLQKVLDSEKLLYVLEADAAIAKHMKHPQGDMIAEDIRQLKERVTNLRGKHKQIYRLAVKEVDPQVNWAALVEEKLDKLNNQSFGTDLPLVDHQVEEHNIFHNEVKAIGPHLAKDGDKEQNSELRAKYQKLLAASQARQQHLSSLQDYMQRCTNELYWLDQQAKGRMQYDWSDRNLDYPSRRRQYENFINRNLEAKEERINKLHSEGDQLLAAEHPGRNSIEAHMEAVHADWKEYLNLLICEESHLKYMEDYHQFHEDVKDAQELLRKVDSDLNQKYGPDFKDRYQIELLLRELDDQEKVLDKYEDVVQGLQKRGQQVVPLKYRRETPLKPIPVEALCDFEGEQGLISRGYSYTLQKNNGESWELMDSAGNKLIAPAVCFVIPPTDPEALALADSLGSQYRSVRQKAAGSKRTLQQRYEVLKTENPGDASDLQGRQLLAGLDKVASDLDRQEKAITGILRPPLEQGRAVQDSAERAKDLKNITNELLRIEPEKTRSTAEGEAFIQALPGSGTTPLLRTRVEDTNRKYEHLLQLLDLAQEKVDVANRLEKSLQQSWELLATHENHLNQDDTVPESSRVLDSKGQELAAMACELQAQKSLLGEVEQNLQAAKQCSSTLASRFQEHCPDLERQEAEVHKLGQRFNNLRQQVERRAQSLQSAKAAYEHFHRGHDHVLQFLVSIPSYEPQETDSLSQMETKLKNQKNLLDEIASREQEVQKICANSQQYQQAVKDYELEAEKLRSLLDLENGRRSHVSKRARLQSPATKVKEEEAALAAKFTEVYAINRQRLQNLEFALNLLRQQPEVEVTHETLQRNRPDSGVEEAWKIRKELDEETERRRQLENEVKSTQEEIWTLRNQGPQESVVRKEVLKKVPDPVLEESFQQLQRTLAEEQHKNQLLQEELEALQLQLRALEQETRDGGQEYVVKEVLRIEPDRAQADEVLQLREELEALRRQKGAREAEVLLLQQRVAALAEEKSRAQEKVTEKEVVKLQNDPQLEAEYQQLQEDHQRQDQLREKQEEELSFLQDKLKRLEKERAMAEGKITVKEVLKVEKDAATEREVSDLTRQYEDEAAKARASQREKTELLRKIWALEEENAKVVVQEKVREIVRPDPKAESEVANLRLELVEQERKYRGAEEQLRSYQSELEALRRRGPQVEVKEVTKEVIKYKTDPEMEKELQRLREEIVDKTRLIERCDLEIYQLKKEIQALKDTKPQVQTKEVVQEILQFQEDPQTKEEVASLRAKLSEEQKKQVDLERERASQEEQIARKEEELSRVKERVVQQEVVRYEEEPGLRAEASAFAESIDVELRQIDKLRAELRRLQRRRTELERQLEELERERQARREAEREVQRLQQRLAALEQEEAEAREKVTHTQKVVLQQDPQQAREHALLRLQLEEEQHRRQLLEGELETLRRKLAALEKAEVKEKVVLSESVQVEKGDTEQEIQRLKSSLEEESRSKRELDVEVSRLEARLSELEFHNSKSSKELDFLREENHKLQLERQNLQLETRRLQSEINMAATETRDLRNMTVADSGTNHDSRLWSLERELDDLKRLSKDKDLEIDELQKRLGSVAVKREQRENHLRRSIVVIHPDTGRELSPEEAHRAGLIDWNMFVKLRSQECDWEEISVKGPNGESSVIHDRKSGKKFSIEEALQSGRLTPAQYDRYVNKDMSIQELAVLVSGQK

SEQ ID NO: 939 - protein, 27118 aa, Homo sapiens
MTTQAPTFTQPLQSVVVLEGSTATFEAHISGFPVPEVSWFRDGQVISTSTLPGVQISFSDGRAKLTIPAVTKANSGRYSLKATNGSGQATSTAELLVKAETAPPNFVQRLQSMTVRQGSQVRLQVRVTGIPTPVVKFYRDGAEIQSSLDFQISQEGDLYSLLIAEAYPEDSGTYSVNATNSVGRATSTAELLVQGEEEVPAKKTKTIVSTAQISESRQTRIEKKIEAHFDARSIATVEMVIDGAAGQQLPHKTPPRIPPKPKSRSPTPPSIAAKAQLARQQSPSPIRHSPSPVRHVRAPTPSPVRSVSPAARISTSPIRSVRSPLLMRKTQASTVATGPEVPPPWKQEGYVASSSEAEMRETTLTTSTQIRTEERWEGRYGVQEQVTISGAAGAAASVSASASYAAEAVATGAKEVKQDADKSAAVATVVAAVDMARVREPVISAVEQTAQRTTTTAVHIQPAQEQVRKEAEKTAVTKVVVAADKAKEQELKSRTKEVITTKQEQMHVTHEQIRKETEKTFVPKVVISAAKAKEQETRISEEITKKQKQVTQEAIMKETRKTVVPKVIVATPKVKEQDLVSRGREGITTKREQVQITQEKMRKEAEKTALSTIAVATAKAKEQETILRTRETMATRQEQIQVTHGKVDVGKKAEAVATVVAAVDQARVREPREPGHLEESYAQQTTLEYGYKERISAAKVAEPPQRPASEPHVVPKAVKPRVIQAPSETHIKTTDQKGMHISSQIKKTTDLTTERLVHVDKRPRTASPHFTVSKISVPKTEHGYEASIAGSAIATLQKELSATSSAQKITKSVKAPTVKPSETRVRAEPTPLPQFPFADTPDTYKSEAGVEVKKEVGVSITGTTVREERFEVLHGREAKVTETARVPAPVEIPVTPPTLVSGLKNVTVIEGESVTLECHISGYPSPTVTWYREDYQIESSIDFQITFQSGIARLMIREAFAEDSGRFTCSAVNEAGTVSTSCYLAVQVSEEFEKETTAVTEKFTTEEKRFVESRDVVMTDTSLTEEQAGPGEPAAPYFITKPVVQKLVEGGSVVFGCQVGGNPKPHVYWKKSGVPLTTGYRYKVSYNKQTGECKLVISMTFADDAGEYTIVVRNKHGETSASASLLEEADYELLMKSQQEMLYQTQVTAFVQEPKVGETAPGFVYSEYEKEYEKEQALIRKKMAKDTVVVRTYVEDQEFHISSFEERLIKEIEYRIIKTTLEELLEEDGEEKMAVDISESEAVESGFDSRIKNYRILEGMGVTFHCKMSGYPLPKIAWYKDGKRIKHGERYQMDFLQDGRASLRIPVVLPEDEGIYTAFASNIKGNAICSGKLYVEPAAPLGAPTYIPTLEPVSRIRSLSPRSVSRSPIRMSPARMSPARMSPARMSPARMSPGRRLEETDESQLERLYKPVFVLKPVSFKCLEGQTARFDLKVVGRPMPETFWFHDGQQIVNDYTHKVVIKEDGTQSLIIVPATPSDSGEWTVVAQNRAGRSSISVILTVEAVEHQVKPMFVEKLKNVNIKEGSRLEMKVRATGNPNPDIVWLKNSDIIVPHKYPKIRIEGTKGEAALKIDSTVSQDSAWYTATAINKAGRDTTRCKVNVEVEFAEPEPERKLIIPRGTYRAKEIAAPELEPLHLRYGQEQWEEGDLYDKEKQQKPFFKKKLTSLRLKRFGPAHFECRLTPIGDPTMVVEWLHDGKPLEAANRLRMINEFGYCSLDYGVAYSRDSGIITCRATNKYGTDHTSATLIVKDEKSLVEESQLPEGRKGLQRIEELERMAHEGALTGVTTDQKEKQKPDIVLYPEPVRVLEGETARFRCRVTGYPQPKVNWYLNGQLIRKSKRFRVRYDGIHYLDIVDCKSYDTGEVKVTAENPEGVIEHKVKLEIQQREDFRSVLRRAPEPRPEFHVHEPGKLQFEVQKVDRPVDTTETKEVVKLKRAERITHEKVPEESEELRSKFKRRTEEGYYEAITAVELKSRKKDESYEELLRKTKDELLHWTKELTEEEKKALAEEGKITIPTFKPDKIELSPSMEAPKIFERIQSQTVGQGSDAHFRVRVVGKPDPECEWYKNGVKIERSDRIYWYWPEDNVCELVIRDVTAEDSASIMVKAINIAGETSSHAFLLVQAKQLITFTQELQDVVAKEKDTMATFECETSEPFVKVKWYKDGMEVHEGDKYRMHSDRKVHFLSILTIDTSDAEDYSCVLVEDENVKTTAKLIVEGAVVEFVKELQDIEVPESYSGELECIVSPENIEGKWYHNDVELKSNGKYTITSRRGRQNLTVKDVTKEDQGEYSFVIDGKKTTCKLKMKPRPIAILQGLSDQKVCEGDIVQLEVKVSLESVEGVWMKDGQEVQPSDRVHIVIDKQSHMLLIEDMTKEDAGNYSFTIPALGLSTSGRVSVYSVDVITPLKDVNVIEGTKAVLECKVSVPDVTSVKWYLNDEQIKPDDRVQAIVKGTKQRLVINRTHASDEGPYKLIVGRVETNCNLSVEKIKIIRGLRDLTCTETQNVVFEVELSHSGIDVLWNFKDKEIKPSSKYKIEAHGKIYKLTVLNMMKDDEGKYTFYAGENMTSGKLTVAGGAISKPLTDQTVAESQEAVFECEVANPDSKGEWLRDGKHLPLTNNIRSESDGHKRRLIIAATKLDDIGEYTYKVATSKTSAKLKVEAVKIKKTLKNLTVTETQDAVFTVELTHPNVKGVQWIKNGVVLESNEKYAISVKGTIYSLRIKNCAIVDESVYGFRLGRLGASARLHVETVKIIKKPKDVTALENATVAFEVSVSHDTVPVKWFHKSVEIKPSDKHRLVSERKVHKLMLQNISPSDAGEYTAVVGQLECKAKLFVETLHITKTMKNIEVPETKTASFECEVSHFNVPSMWLKNGVEIEMSEKFKIVVQGKLHQLIIMNTSTEDSAEYTFVCGNDQVSATLTVTPIMITSMLKDINAEEKDTITFEVTVNYEGISYKWLKNGVEIKSTDKCQMRTKKLTHSLNIRNVHFGDAADYTFVAGKATSTATLYVEARHIEFRKHIKDIKVLEKKRAMFECEVSEPDITVQWMKDDQELQITDRIKIQKEKYVHRLLIPSTRMSDAGKYTVVAGGNVSTAKLFVEGRDVRIRSIKKEVQVIEKQRAVVEFEVNEDDVDAHWYKDGIEINFQVQERHKYVVERRIHRMFISETRQSDAGEYTFVAGRNRSSVTLYVNAPEPPQVLQELQPVTVQSGKPARFCAVISGRPQPKISWYKEEQLLSTGFKCKFLHDGQEYTLLLIEAFPEDAAVYTCEAKNDYGVATTSASLSVEVPEVVSPDQEMPVYPPAIITPLQDTVTSEGQPARFQCRVSGTDLKVSWYSKDKKIKPSRFFRMTQFEDTYQLEIAEAYPEDEGTYTFVASNAVGQVSSTANLSLEVQALDRQSSGKDVRESTKSQAVADSSFTKEESKISQKEIKSFQGSSYEYEVQVFESVSQSSIHTAASVQDTQLCHTASLSQIAESTELSKECAKESTGEAPKIFLHLQDVTVKCGDTAQFLCVLKDDSFIDVTWTHEGAKIEESERLKQSQNGNIQFLTICNVQLVDQGLYSCIVHNDCGERTTSAVLSVEGAPESILHERIEQEIEMEMKEFSSSFLSAEEEGLHSAELQLSKINETLELLSESPVYPTKFDSEKEGTGPIFIKEVSNADISMGDVATLSVTVIGIPKPKIQWFFNGVLLTPSADYKFVFDGDDHSLIILFTKLEDEGEYTCMASNDYGKTICSAYLKINSKGEGHKDTETESAVAKSLEKLGGPCPPHFLKELKPIRCAQGLPAIFEYTVVGEPAPTVTWFKENKQLCTSVYYTIIHNPNGSGTFIVNDPQREDSGLYICKAENMLGESTCAAELLVLLEDTDMTDTPCKAKSTPEAPEDFPQTPLKGPAVEALDSEQEIATFVKDTILKAALITEENQQLSYEHIAKANELSSQLPLGAQELQSILEQDKLTPESTREFLCINGSIHFQPLKEPSPNLQLQIVQSQKTFSKEGILMPEEPETQAVLSDTEKIFPSAMSIEQINSLTVEPLKTLLAEPEGNYPQSSIEPPMHSYLTSVAEEVLSPKEKTVSDTNREQRVTLQKQEAQSALILSQSLAEGHVESLQSPDVMISQVNYEPLVPSEHSCTEGGKILIESANPLENAGQDSAVRIEEGKSLRFPLALEEKQVLLKEEHSDNVVMPPDQIIESKREPVAIKKVQEVQGRDLLSKESLLSGIPEEQRLNLKIQICRALQAAVASEQPGLFSEWLRNIEKVEVEAVNITQEPRHIMCMYLVTSAKSVTEEVTIIIEDVDPQMANLKMELRDALCAIIYEEIDILTAEGPRIQQGAKTSLQEEMDSFSGSQKVEPITEPEVESKYLISTEEVSYFNVQSRVKYLDATPVTKGVASAVVSDEKQDESLKPSEEKEESSSESGTEEVATVKIQEAEGGLIKEDGPMIHTPLVDTVSEEGDIVHLTTSITNAKEVNWYFENKLVPSDEKFKCLQDQNTYTLVIDKVNTEDHQGEYVCEALNDSGKTATSAKLTVVKRAAPVIKRKIEPLEVALGHLAKFTCEIQSAPNVRFQWFKAGREIYESDKCSIRSSKYISSLEILRTQVVDCGEYTCKASNEYGSVSCTATLTVTVPGGEKKVRKLLPERKPEPKEEVVLKSVLRKRPEEEEPKVEPKKLEKVKKPAVPEPPPPKPVEEVEVPTVTKRERKIPEPTKVPEIKPAIPLPAPEPKPKPEAEVKTIKPPPVEPEPTPIAAPVTVPVVGKKAEAKAPKEEAAKPKGPIKGVPKKTPSPIEAERRKLRPGSGGEKPPDEAPFTYQLKAVPLKFVKEIKDIILTESEFVGSSAIFECLVSPSTAITTWMKDGSNIRESPKHRFIADGKDRKLHIIDVQLSDAGEYTCVLRLGNKEKTSTAKLVVEELPVRFVKTLEEEVTVVKGQPLYLSCELNKERDVVWRKDGKIVVEKPGRIVPGVIGLMRALTINDADDTDAGTYTVTVENANNLECSSCVKVVEVIRDWLVKPIRDQHVKPKGTAIFACDIAKDTPNIKWFKGYDEIPAEPNDKTEILRDGNHLYLKIKNAMPEDIAEYAVEIEGKRYPAKLTLGEREVELLKPIEDVTIYEKESASFDAEISEADIPGQWKLKGELLRPSPTCEIKAEGGKRFLTLHKVKLDQAGEVLYQALNAITTAILTVKEIELDFAVPLKDVTVPERRQARFECVLTREANVIWSKGPDIIKSSDKFDIIADGKKHILVINDSQFDDEGVYTAEVEGKKTSARLFVTGIRLKFMSPLEDQTVKEGETATFVCELSHEKMHVVWFKNDAKLHTSRTVLISSEGKTHKLEMKEVTLDDISQIKAQVKELSSTAQLKVLEADPYFTVKLHDKTAVEKDEITLKCEVSKDVPVKWFKDGEEIVPSPKYSIKADGLRRILKIKKADLKDKGEYVCDCGTDKTKANVTVEARLIKVEKPLYGVEVFVGETAHFEIELSEPDVHGQWKLKGQPLTASPDCEIIEDGKKHILILHNCQLGMTGEVSFQAANAKSAANLKVKELPLIFITPLSDVKVFEKDEAKFECEVSREPKTFRWLKGTQEITGDDRFELIKDGTKHSMVIKSAAFEDEAKYMFEAEDKHTSGKLIIEGIRLKFLTPLKDVTAKEKESAVFTVELSHDNIRVKWFKNDQRLHTTRSVSMQDEGKTHSITFKDLSIDDTSQIRVEAMGMSSEAKLTVLEGDPYFTGKLQDYTGVEKDEVILQCEISKADAPVKWFKDGKEIKPSKNAVIKADGKKRMLILKKALKSDIGQYTCDCGTDKTSGKLDIEDREIKLVRPLHSVEVMETETARFETEISEDDIHANWKLKGEALLQTPDCEIKEEGKIHSLVLHNCRLDQTGGVDFQAANVKSSAHLRVKPRVIGLLRPLKDVTVTAGETATFDCELSYEDIPVEWYLKGKKLEPSDKVVPRSEGKVHTLTLRDVKLEDAGEVQLTAKDFKTHANLFVKEPPVEFTKPLEDQTVEEGATAVLECEVSRENAKVKWFKNGTEILKSKKYEIVADGRVRKLVIHDCTPEDIKTYTCDAKDFKTSCNLNVVPPHVEFLRPLTDLQVREKEMARFECELSRENAKVKWFKDGAEIKKGKKYDIISKGAVRILVINKCLLDDEAEYSCEVRTARTSGMLTVLEEEAVFTKNLANIEVSETDTIKLVCEVSKPGAEVIWYKGDEEIIETGRYEILTEGRKRILVIQNAHLEDAGNYNCRLPSSRTDGKVKVHELAAEFISKPQNLEILEGEKAEFVCSISKESFPVQWKRDDKTLESGDKYDVIADGKKRVLVVKDATLQDMGTYVVMVGAARAAAHLTVIEKLRIVVPLKDTRVKEQQEVVFNCEVNTEGAKAKWFRNEEAIFDSSKYIILQKDLVYTLRIRDAHLDDQANYNVSLTNHRGENVKSAANLIVEEEDLRIVEPLKDIETMEKKSVTFWCKVNRLNVTLKWTKNGEEVPFDNRVSYRVDKYKHMLTIKDCGFPDEGEYIVTAGQDKSVAELLIIEAPTEFVEHLEDQTVTEFDDAVFSCQLSREKANVKWYRNGREIKEGKKYKFEKDGSIHRLIIKDCRLDDECEYACGVEDRKSRARLFVEEIPVEIIRPPQDILEAPGADVVFLAELNKDKVEVQWLRNNMVVVQGDKHQMMSEGKIHRLQICDIKPRDQGEYRFIAKDKEARAKLELAAAPKIKTADQDLVVDVGKPLTMVVPYDAYPKAEAEWFKENEPLSTKTIDTTAEQTSFRILEAKKGDKGRYKIVLQNKHGKAEGFINLKVIDVPGPVRNLEVTETFDGEVSLAWEEPLTDGGSKIIGYVVERRDIKRKTWVLATDRAESCEFTVTGLQKGGVEYLFRVSARNRVGTGEPVETDNPVEARSKYDVPGPPLNVTITDVNRFGVSLTWEPPEYDGGAEITNYVIELRDKTSIRWDTAMTVRAEDLSATVTDVVEGQEYSFRVRAQNRIGVGKPSAATPFVKVADPIERPSPPVNLTSSDQTQSSVQLKWEPPLKDGGSPILGYIIERCEEGKDNWIRCNMKLVPELTYKVTGLEKGNKYLYRVSAENKAGVSDPSEILGPLTADDAFVEPTMDLSAFKDGLEVIVPNPITILVPSTGYPRPTATWCFGDKVLETGDRVKMKTLSAYAELVISPSERSDKGIYTLKLENRVKTISGEIDVNVIARPSAPKELKFGDITKDSVHLTWEPPDDDGGSPLTGYVVEKREVSRKTWTKVMDFVTDLEFTVPDLVQGKEYLFKVCARNKCGPGEPAYVDEPVNMSTPATVPDPPENVKWRDRTANSIFLTWDPPKNDGGSRIKGYIVERCPRGSDKWVACGEPVAETKMEVTGLEEGKWYAYRVKALNRQGASKPSRPTEEIQAVDTQEAPEIFLDVKLLAGLTVKAGTKIELPATVTGKPEPKITWTKADMILKQDKRITIENVPKKSTVTIVDSKRSDTGTYIIEAVNVCGRATAVVEVNVLDKPGPPAAFDITDVTNESCLLTWNPPRDDGGSKITNYVVERRATDSEVWHKLSSTVKDTNFKATKLIPNKEYIFRVAAENMYGVGEPVQASPITAKYQFDPPGPPTRLEPSDITKDAVTLTWCEPDDDGGSPITGYWVERLDPDTDKWVRCNKMPVKDTTYRVKGLTNKKKYRFRVLAENLAGPGKPSKSTEPILIKDPIDPPWPPGKPTVKDVGKTSVRLNWTKPEHDGGAKIESYVIEMLKTGTDEWVRVAEGVPTTQHLLPGLMEGQEYSFRVRAVNKAGESEPSEPSDPVLCREKLYPPSPPRWLEVINITKNTADLKWTVPEKDGGSPITNYIVEKRDVRRKGWQTVDTTVKDTKCTVTPLTEGSLYVFRVAAENAIGQSDYTEIEDSVLAKDTFTTPGPPYALAVVDVTKRHVDLKWEPPKNDGGRPIQRYVIEKKERLGTRWVKAGKTAGPDCNFRVTDVIEGTEVQFQVRAENEAGVGHPSEPTEILSIEDPTSPPSPPLDLHVTDAGRKHIAIAWKPPEKNGGSPIIGYHVEMCPVGTEKWMRVNSRPIKDLKFKVEEGVVPDKEYVLRVRAVNAIGVSEPSEISENVVAKDPDCKPTIDLETHDIIVIEGEKLSIPVPFRAVPVPTVSWHKDGKEVKASDRLTMKNDHISAHLEVPKSVRADAGIYTITLENKLGSATASINVKVIGLPGPCKDIKASDITKSSCKLTWEPPEFDGGTPILHYVLERREAGRRTYIPVMSGENKLSWTVKDLIPNGEYFFRVKAVNKVGGGEYIELKNPVIAQDPKQPPDPPVDVEVHNPTAEAMTITWKPPLYDGGSKIMGYIIEKIAKGEERWKRCNEHLVPILTYTAKGLEEGKEYQFRVRAENAAGISEPSRATPPTKAVDPIDAPKVILRTSLEVKRGDEIALDASISGSPYPTITWIKDENVIVPEEIKKRAAPLVRRRKGEVQEEEPFVLPLTQRLSIDNSKKGESQLRVRDSLRPDHGLYMIKVENDHGIAKAPCTVSVLDTPGPPINFVFEDIRKTSVLCKWEPPLDDGGSEIINYTLEKKDKTKPDSEWIVVTSTLRHCKYSVTKLIEGKEYLFRVRAENRFGPGPPCVSKPLVAKDPFGPPDAPDKPIVEDVTSNSMLVKWNEPKDNGSPILGYWLEKREVNSTHWSRVNKSLLNALKANVDGLLEGLTYVFRVCAENAAGPGKFSPPSDPKTAHDPISPPGPPIPRVTDTSSTTIELEWEPPAFNGGGEIVGYFVDKQLVGTNEWSRCTEKMIKVRQYTVKEIREGADYKLRVSAVNAAGEGPPGETQPVTVAEPQEPPAVELDVSVKGGIQIMAGKTLRIPAVVTGRPVPTKVWTKEEGELDKDRVVIDNVGTKSELIIKDALRKDHGRYVITATNSCGSKFAAARVEVFDVPGPVLDLKPVVTNRKMCLLNWSDPEDDGGSEITGFIIERKDAKMHTWRQPIETERSKCDITGLLEGQEYKFRVIAKNKFGCGPPVEIGPILAVDPLGPPTSPERLTYTERTKSTITLDWKEPRSNGGSPIQGYIIEKRRHDKPDFERVNKRLCPTTSFLVENLDEHQMYEFRVKAVNEIGESEPSLPLNVVIQDDEVPPTIKLRLSVRGDTIKVKAGEPVHIPADVTGLPMPKIEWSKNETVIEKPTDALQITKEEVSRSEAKTELSIPKAVREDKGTYTVTASNRLGSVFRNVHVEVYDRPSPPRNLAVTDIKAESCYLTWDAPLDNGGSEITHYVIDKRDASRKKAEWEEVTNTAVEKRYGIWKLIPNGQYEFRVRAVNKYGISDECKSDKVVIQDPYRLPGPPGKPKVLARTKGSMLVSWTPPLDNGGSPITGYWLEKREEGSPYWSRVSRAPITKVGLKGVEFNVPRLLEGVKYQFRAMAINAAGIGPPSEPSDPEVAGDPIFPPGPPSCPEVKDKTKSSISLGWKPPAKDGGSPIKGYIVEMQEEGTTDWKRVNEPDKLITTCECVVPNLKELRKYRFRVKAVNEAGESEPSDTTGEIPATDIQEEPEVFIDIGAQDCLVCKAGSQIRIPAVIKGRPTPKSSWEFDGKAKKAMKDGVHDIPEDAQLETAENSSVIIIPECKRSHTGKYSITAKNKAGQKTANCRVKVMDVPGPPKDLKVSDITRGSCRLSWKMPDDDGGDRIKGYVIEKRTIDGKAWTKVNPDCGSTTFVVPDLLSEQQYFFRVRAENRFGIGPPVETIQRTTARDPIYPPDPPIKLKIGLITKNTVHLSWKPPKNDGGSPVTHYIVECLAWDPTGTKKEAWRQCNKRDVEELQFTVEDLVEGGEYEFRVKAVNAAGVSKPSATVGPVTVKDQTCPPSIDLKEFMEVEEGTNVNIVAKIKGVPFPTLTWFKAPPKKPDNKEPVLYDTHVNKLVVDDTCTLVIPQSRRSDTGLYTITAVNNLGTASKEMRLNVLGRPGPPVGPIKFESVSADQMTLSWFPPKDDGGSKITNYVIEKREANRKTWVHVSSEPKECTYTIPKLLEGHEYVFRIMAQNKYGIGEPLDSEPETARNLFSVPGAPDKPTVSSVTRNSMTVNWEEPEYDGGSPVTGYWLEMKDTTSKRWKRVNRDPIKAMTLGVSYKVTGLIEGSDYQFRVYAINAAGVGPASLPSDPATARDPIAPPGPPFPKVTDWTKSSADLEWSPPLKDGGSKVTGYIVEYKEEGKEEWEKGKDKEVRGTKLVVTGLKEGAFYKFRVRAVNIAGIGEPGEVTDVIEMKDRLVSPDLQLDASVRDRIVVHAGGVIRIIAYVSGKPPPTVTWNMNERTLPQEATIETTAISSSMVIKNCQRSHQGVYSLLAKNEAGERKKTIIVDVLDVPGPVGTPFLAHNLTNESCKLTWFSPEDDGGSPITNYVIEKRESDRRAWTPVTYTVTRQNATVQGLIQGKAYFFRIAAENSIGMGPFVETSEALVIREPITVPERPEDLEVKEVTKNTVTLTWNPPKYDGGSEIINYVLESRLIGTEKFHKVTNDNLLSRKYTVKGLKEGDTYEYRVSAVNIVGQGKPSFCTKPITCKDELAPPTLHLDFRDKLTIRVGEAFALTGRYSGKPKPKVSWFKDEADVLEDDRTHIKTTPATLALEKIKAKRSDSGKYCVVVENSTGSRKGFCQVNVVDRPGPPVGPVSFDEVTKDYMVISWKPPLDDGGSKITNYIIEKKEVGKDVWMPVTSASAKTTCKVSKLLEGKDYIFRIHAENLYGISDPLVSDSMKAKDRFRVPDAPDQPIVTEVTKDSALVTWNKPHDGGKPITNYILEKRETMSKRWARVTKDPIHPYTKFRVPDLLEGCQYEFRVSAENEIGIGDPSPPSKPVFAKDPIAKPSPPVNPEAIDTTCNSVDLTWQPPRHDGGSKILGYIVEYQKVGDEEWRRANHTPESCPETKYKVTGLRDGQTYKFRVLAVNAAGESDPAHVPEPVLVKDRLEPPELILDANMAREQHIKVGDTLRLSAIIKGVPFPKVTWKKEDRDAPTKARIDVTPVGSKLEIRNAAHEDGGIYSLTVENPAGSKTVSVKVLVLDKPGPPRDLEVSEIRKDSCYLTWKEPLDDGGSVITNYVVERRDVASAQWSPLSATSKKKSHFAKHLNEGNQYLFRVAAENQYGRGPFVETPKPIKALDPLHPPGPPKDLHHVDVDKTEVSLVWNKPDRDGGSPITGYLVEYQEEGTQDWIKFKTVTNLECVVTGLQQGKTYRFRVKAENIVGLGLPDTTIPIECQEKLVPPSVELDVKLIEGLVVKAGTTVRFPAIIRGVPVPTAKWTTDGSEIKTDEHYTVETDNFSSVLTIKNCLRRDTGEYQITVSNAAGSKTVAVHLTVLDVPGPPTGPINILDVTPEHMTISWQPPKDDGGSPVINYIVEKQDTRKDTWGVVSSGSSKTKLKIPHLQKGCEYVFRVRAENKIGVGPPLDSTPTVAKHKFSPPSPPGKPVVTDITENAATVSWTLPKSDGGSPITGYYMERREVTGKWVRVNKTPIADLKFRVTGLYEGNTYEFRVFAENLAGLSKPSPSSDPIKACRPIKPPGPPINPKLKDKSRETADLVWTKPLSDGGSPILGYVVECQKPGTAQWNRINKDELIRQCAFRVPGLIEGNEYRFRIKAANIVGEGEPRELAESVIAKDILHPPEVELDVTCRDVITVRVGQTIRILARVKGRPEPDITWTKEGKVLVREKRVDLIQDLPRVELQIKEAVRADHGKYIISAKNSSGHAQGSAIVNVLDRPGPCQNLKVTNVTKENCTISWENPLDNGGSEITNFIVEYRKPNQKGWSIVASDVTKRLIKANLLANNEYYFRVCAENKVGVGPTIETKTPILAINPIDRPGEPENLHIADKGKTFVYLKWRRPDYDGGSPNLSYHVERRLKGSDDWERVHKGSIKETHYMVDRCVENQIYEFRVQTKNEGGESDWVKTEEVVVKEDLQKPVLDLKLSGVLTVKAGDTIRLEAGVRGKPFPEVAWTKDKDATDLTRSPRVKIDTRADSSKFSLTKAKRSDGGKYVVTATNTAGSFVAYATVNVLDKPGPVRNLKIVDVSSDRCTVCWDPPEDDGGCEIQNYILEKCETKRMVWSTYSATVLTPGTTVTRLIEGNEYIFRVRAENKIGTGPPTESKPVIAKTKYDKPGRPDPPEVTKVSKEEMTVVWNPPEYDGGKSITGYFLEKKEKHSTRWVPVNKSAIPERRMKVQNLLPDHEYQFRVKAENEIGIGEPSLPSRPVVAKDPIEPPGPPTNFRVVDTTKHSITLGWGKPVYDGGAPIIGYVVEMRPKIADASPDEGWKRCNAAAQLVRKEFTVTSLDENQEYEFRVCAQNQVGIGRPAELKEAIKPKEILEPPEIDLDASMRKLVIVRAGCPIRLFAIVRGRPAPKVTWRKVGIDNVVRKGQVDLVDTMAFLVIPNSTRDDSGKYSLTLVNPAGEKAVFVNVRVLDTPGPVSDLKVSDVTKTSCHVSWAPPENDGGSQVTHYIVEKREADRKTWSTVTPEVKKTSFHVTNLVPGNEYYFRVTAVNEYGPGVPTDVPKPVLASDPLSEPDPPRKLEVTEMTKNSATLAWLPPLRDGGAKIDGYITSYREEEQPADRWTEYSVVKDLSLVVTGLKEGKKYKFRVAARNAVGVSLPREAEGVYEAKEQLLPPKILMPEQITIKAGKKLRIEAHVYGKPHPTCKWKKGEDEVVTSSHLAVHKADSSSILIIKDVTRKDSGYYSLTAENSSGTDTQKIKVVVMDAPGPPQPPFDISDIDADACSLSWHIPLEDGGSNITNYIVEKCDVSRGDWVTALASVTKTSCRVGKLIPGQEYIFRVRAENRFGISEPLTSPKMVAQFPFGVPSEPKNARVTKVNKDCIFVAWDRPDSDGGSPIIGYLIERKERNSLLWVKANDTLVRSTEYPCAGLVEGLEYSFRIYALNKAGSSPPSKPTEYVTARMPVDPPGKPEVIDVTKSTVSLIWARPKHDGGSKIIGYFVEACKLPGDKWVRCNTAPHQIPQEEYTATGLEEKAQYQFRAIARTAVNISPPSEPSDPVTILAENVPPRIDLSVAMKSLLTVKAGTNVCLDATVFGKPMPTVSWKKDGTLLKPAEGIKMAMQRNLCTLELFSVNRKDSGDYTITAENSSGSKSATIKLKVLDKPGPPASVKINKMYSDRAMLSWEPPLEDGGSEITNYIVDKRETSRPNWAQVSATVPITSCSVEKLIEGHEYQFRICAENKYGVGDPVFTEPAIAKNPYDPPGRCDPPVISNITKDHMTVSWKPPADDGGSPITGYLLEKRETQAVNWTKVNRKPIIERTLKATGLQEGTEYEFRVTAINKAGPGKPSDASKAAYARDPQYPPGPPAFPKVYDTTRSSVSLSWGKPAYDGGSPIIGYLVEVKRADSDNWVRCNLPQNLQKTRFEVTGLMEDTQYQFRVYAVNKIGYSDPSDVPDKHYPKDILIPPEGELDADLRKTLILRAGVTMRLYVPVKGRPPPKITWSKPNVNLRDRIGLDIKSTDFDTFLRCENVNKYDAGKYILTLENSCGKKEYTIVVKVLDTPGPPVNVTVKEISKDSAYVTWEPPIIDGGSPIINYVVQKRDAERKSWSTVTTECSKTSFRVANLEEGKSYFFRVFAENEYGIGDPGETRDAVKASQTPGPVVDLKVRSVSKSSCSIGWKKPHSDGGSRIIGYVVDFLTEENKWQRVMKSLSLQYSAKDLTEGKEYTFRVSAENENGEGTPSEITVVARDDVVAPDLDLKGLPDLCYLAKENSNFRLKIPIKGKPAPSVSWKKGEDPLATDTRVSVESSAVNTTLIVYDCQKSDAGKYTITLKNVAGTKEGTISIKVVGKPGIPTGPIKFDEVTAEAMTLKWAPPKDDGGSEITNYILEKRDSVNNKWVTCASAVQKTTFRVTRLHEGMEYTFRVSAENKYGVGEGLKSEPIVARHPFDVPDAPPPPNIVDVRHDSVSLTWTDPKKTGGSPITGYHLEFKERNSLLWKRANKTPIRMRDFKVTGLTEGLEYEFRVMAINLAGVGKPSLPSEPVVALDPIDPPGKPEVINITRNSVTLIWTEPKYDGGHKLTGYIVEKRDLPSKSWMKANHVNVPECAFTVTDLVEGGKYEFRIRAKNTAGAISAPSESTETIICKDEYEAPTIVLDPTIKDGLTIKAGDTIVLNAISILGKPLPKSSWSKAGKDIRPSDITQITSTPTSSMLTIKYATRKDAGEYTITATNPFGTKVEHVKVTVLDVPGPPGPVEISNVSAEKATLTWTPPLEDGGSPIKSYILEKRETSRLLWTVVSEDIQSCRHVATKLIQGNEYIFRVSAVNHYGKGEPVQSEPVKMVDRFGPPGPPEKPEVSNVTKNTATVSWKRPVDDGGSEITGYHVERREKKSLRWVRAIKTPVSDLRCKVTGLQEGSTYEFRVSAENRAGIGPPSEASDSVLMKDAAYPPGPPSNPHVTDTTKKSASLAWGKPHYDGGLEITGYVVEHQKVGDEAWIKDTTGTALRITQFVVPDLQTKEKYNFRISAINDAGVGEPAVIPDVEIVEREMAPDFELDAELRRTLVVRAGLSIRIFVPIKGRPAPEVTWTKDNINLKNRANIENTESFTLLIIPECNRYDTGKFVMTIENPAGKKSGFVNVRVLDTPGPVLNLRPTDITKDSVTLHWDLPLIDGGSRITNYIVEKREATRKSYSTATTKCHKCTYKVTGLSEGCEYFFRVMAENEYGIGEPTETTEPVKASEAPSPPDSLNIMDITKSTVSLAWPKPKHDGGSKITGYVIEAQRKGSDQWTHITTVKGLECVVRNLTEGEEYTFQVMAVNSAGRSAPRESRPVIVKEQTMLPELDLRGIYQKLVIAKAGDNIKVEIPVLGRPKPTVTWKKGDQILKQTQRVNFETTATSTILNINECVRSDSGPYPLTARNIVGEVGDVITIQVHDIPGPPTGPIKFDEVSSDFVTFSWDPPENDGGVPISNYVVEMRQTDSTTWVELATTVIRTTYKATRLTTGLEYQFRVKAQNRYGVGPGITSACIVANYPFKVPGPPGTPQVTAVTKDSMTISWHEPLSDGGSPILGYHVERKERNGILWQTVSKALVPGNIFKSSGLTDGIAYEFRVIAENMAGKSKPSKPSEPMLALDPIDPPGKPVPLNITRHTVTLKWAKPEYTGGFKITSYIVEKRDLPNGRWLKANFSNILENEFTVSGLTEDAAYEFRVIAKNAAGAISPPSEPSDAITCRDDVEAPKIKVDVKFKDTVILKAGEAFRLEADVSGRPPPTMEWSKDGKELEGTAKLEIKIADFSTNLVNKDSTRRDSGAYTLTATNPGGFAKHIFNVKVLDRPGPPEGPLAVTEVTSEKCVLSWFPPLDDGGAKIDHYIVQKRETSRLAWTNVASEVQVTKLKVTKLLKGNEYIFRVMAVNKYGVGEPLESEPVLAVNPYGPPDPPKNPEVTTITKDSMVVCWGHPDSDGGSEIINYIVERRDKAGQRWIKCNKKTLTDLRYKVSGLTEGHEYEFRIMAENAAGISAPSPTSPFYKACDTVFKPGPPGNPRVLDTSRSSISIAWNKPIYDGGSEITGYMVEIALPEEDEWQIVTPPAGLKATSYTITGLTENQEYKIRIYAMNSEGLGEPALVPGTPKAEDRMLPPEIELDADLRKVVTIRACCTLRLFVPIKGRPAPEVKWARDHGESLDKASIESTSSYTLLIVGNVNRFDSGKYILTVENSSGSKSAFVNVRVLDTPGPPQDLKVKEVTKTSVTLTWDPPLLDGGSKIKNYIVEKRESTRKAYSTVATNCHKTSWKVDQLQEGCSYYFRVLAENEYGIGLPAETAESVKASERPLPPGKITLMDVTRNSVSLSWEKPEHDGGSRILGYIVEMQTKGSDKWATCATVKVTEATITGLIQGEEYSFRVSAQNEKGISDPRQLSVPVIAKDLVIPPAFKLLFNTFTVLAGEDLKVDVPFIGRPTPAVTWHKDNVPLKQTTRVNAESTENNSLLTIKDACREDVGHYVVKLTNSAGEAIETLNVIVLDKPGPPTGPVKMDEVTADSITLSWGPPKYDGGSSINNYIVEKRDTSTTTWQIVSATVARTTIKACRLKTGCEYQFRIAAENRYGKSTYLNSEPTVAQYPFKVPGPPGTPVVTLSSRDSMEVQWNEPISDGGSRVIGYHLERKERNSILWVKLNKTPIPQTKFKTTGLEEGVEYEFRVSAENIVGIGKPSKVSECYVARDPCDPPGRPEAIIVTRNSVTLQWKKPTYDGGSKITGYIVEKKELPEGRWMKASFTNIIDTHFEVTGLVEDHRYEFRVIARNAAGVFSEPSESTGAITARDEVDPPRISMDPKYKDTIVVHAGESFKVDADIYGKPIPTIQWIKGDQELSNTARLEIKSTDFATSLSVKDAVRVDSGNYILKAKNVAGERSVTVNVKVLDRPGPPEGPVVISGVTAEKCTLAWKPPLQDGGSDIINYIVERRETSRLVWTVVDANVQTLSCKVTKLLEGNEYTFRIMAVNKYGVGEPLESEPVVAKNPFVVPDAPKAPEVTTVTKDSMIVVWERPASDGGSEILGYVLEKRDKEGIRWTRCHKRLIGELRLRVTGLIENHDYEFRVSAENAAGLSEPSPPSAYQKACDPIYKPGPPNNPKVIDITRSSVFLSWSKPIYDGGCEIQGYIVEKCDVSVGEWTMCTPPTGINKTNIEVEKLLEKHEYNFRICAINKAGVGEHADVPGPIIVEEKLEAPDIDLDLELRKIINIRAGGSLRLFVPIKGRPTPEVKWGKVDGEIRDAAIIDVTSSFTSLVLDNVNRYDSGKYTLTLENSSGTKSAFVTVRVLDTPSPPVNLKVTEITKDSVSITWEPPLLDGGSKIKNYIVEKREATRKSYAAVVTNCHKNSWKIDQLQEGCSYYFRVTAENEYGIGLPAQTADPIKVAEVPQPPGKITVDDVTRNSVSLSWTKPEHDGGSKIIQYIVEMQAKHSEKWSECARVKSLQAVITNLTQGEEYLFRVVAVNEKGRSDPRSLAVPIVAKDLVIEPDVKPAFSSYSVQVGQDLKIEVPISGRPKPTITWTKDGLPLKQTTRINVTDSLDLTTLSIKETHKDDGGQYGITVANVVGQKTASIEIVTLDKPDPPKGPVKFDDVSAESITLSWNPPLYTGGCQITNYIVQKRDTTTTVWDVVSATVARTTLKVTKLKTGTEYQFRIFAENRYGQSFALESDPIVAQYPYKEPGPPGTPFATAISKDSMVIQWHEPVNNGGSPVIGYHLERKERNSILWTKVNKTIIHDTQFKAQNLEEGIEYEFRVYAENIVGVGKASKNSECYVARDPCDPPGTPEPIMVKRNEITLQWTKPVYDGGSMITGYIVEKRDLPDGRWMKASFTNVIETQFTVSGLTEDQRYEFRVIAKNAAGAISKPSDSTGPITAKDEVELPRISMDPKFRDTIVVNAGETFRLEADVHGKPLPTIEWLRGDKEIEESARCEIKNTDFKALLIVKDAIRIDGGQYILRASNVAGSKSFPVNVKVLDRPGPPEGPVQVTGVTSEKCSLTWSPPLQDGGSDISHYVVEKRETSRLAWTVVASEVVTNSLKVTKLLEGNEYVFRIMAVNKYGVGEPLESAPVLMKNPFVLPGPPKSLEVTNIAKDSMTVCWNRPDSDGGSEIIGYIVEKRDRSGIRWIKCNKRRITDLRLRVTGLTEDHEYEFRVSAENAAGVGEPSPATVYYKACDPVFKPGPPTNAHIVDTTKNSITLAWGKPIYDGGSEILGYVVEICKADEEEWQIVTPQTGLRVTRFEISKLTEHQEYKIRVCALNKVGLGEATSVPGTVKPEDKLEAPELDLDSELRKGIVVRAGGSARIHIPFKGRPTPEITWSREEGEFTDKVQIEKGVNYTQLSIDNCDRNDAGKYILKLENSSGSKSAFVTVKVLDTPGPPQNLAVKEVRKDSAFLVWEPPIIDGGAKVKNYVIDKRESTRKAYANVSSKCSKTSFKVENLTEGAIYYFRVMAENEFGVGVPVETVDAVKAAEPPSPPGKVTLTDVSQTSASLMWEKPEHDGGSRVLGYVVEMQPKGTEKWSIVAESKVCNAVVTGLSSGQEYQFRVKAYNEKGKSDPRVLGVPVIAKDLTIQPSLKLPFNTYSIQAGEDLKIEIPVIGRPRPNISWVKDGEPLKQTTRVNVEETATSTVLHIKEGNKDDFGKYTVTATNSAGTATENLSVIVLEKPGPPVGPVRFDEVSADFVVISWEPPAYTGGCQISNYIVEKRDTTTTTWHMVSATVARTTIKITKLKTGTEYQFRIFAENRYGKSAPLDSKAVIVQYPFKEPGPPGTPFVTSISKDQMLVQWHEPVNDGGTKIIGYHLEQKEKNSILWVKLNKTPIQDTKFKTTGLDEGLEYEFKVSAENIVGIGKPSKVSECFVARDPCDPPGRPEAIVITRNNVTLKWKKPAYDGGSKITGYIVEKKDLPDGRWMKASFTNVLETEFTVSGLVEDQRYEFRVIARNAAGNFSEPSDSSGAITARDEIDAPNASLDPKYKDVIVVHAGETFVLEADIRGKPIPDVVWSKDGKELEETAARMEIKSTIQKTTLVVKDCIRTDGGQYILKLSNVGGTKSIPITVKVLDRPGPPEGPLKVTGVTAEKCYLAWNPPLQDGGANISHYIIEKRETSRLSWTQVSTEVQALNYKVTKLLPGNEYIFRVMAVNKYGIGEPLESGPVTACNPYKPPGPPSTPEVSAITKDSMVVTWARPVDDGGTEIEGYILEKRDKEGVRWTKCNKKTLTDLRLRVTGLTEGHSYEFRVAAENAAGVGEPSEPSVFYRACDALYPPGPPSNPKVTDTSRSSVSLAWSKPIYDGGAPVKGYVVEVKEAAADEWTTCTPPTGLQGKQFTVTKLKENTEYNFRICAINSEGVGEPATLPGSVVAQERIEPPEIELDADLRKVVVLRASATLRLFVTIKGRPEPEVKWEKAEGILTDRAQIEVTSSFTMLVIDNVTRFDSGRYNLTLENNSGSKTAFVNVRVLDSPSAPVNLTIREVKKDSVTLSWEPPLIDGGAKITNYIVEKRETTRKAYATITNNCTKTTFRIENLQEGCSYYFRVLASNEYGIGLPAETTEPVKVSEPPLPPGRVTLVDVTRNTATIKWEKPESDGGSKITGYVVEMQTKGSEKWSTCTQVKTLEATISGLTAGEEYVFRVAAVNEKGRSDPRQLGVPVIARDIEIKPSVELPFHTFNVKAREQLKIDVPFKGRPQATVNWRKDGQTLKETTRVNVSSSKTVTSLSIKEASKEDVGTYELCVSNSAGSITVPITIIVLDRPGPPGPIRIDEVSCDSITISWNPPEYDGGCQISNYIVEKKETTSTTWHIVSQAVARTSIKIVRLTTGSEYQFRVCAENRYGKSSYSESSAVVAEYPFSPPGPPGTPKVVHATKSTMLVTWQVPVNDGGSRVIGYHLEYKERSSILWSKANKILIADTQMKVSGLDEGLMYEYRVYAENIAGIGKCSKSCEPVPARDPCDPPGQPEVTNITRKSVSLKWSKPHYDGGAKITGYIVERRELPDGRWLKCNYTNIQETYFEVTELTEDQRYEFRVFARNAADSVSEPSESTGPIIVKDDVEPPRVMMDVKFRDVIVVKAGEVLKINADIAGRPLPVISWAKDGIEIEERARTEIISTDNHTLLTVKDCIRRDTGQYVLTLKNVAGTRSVAVNCKVLDKPGPPAGPLEINGLTAEKCSLSWGRPQEDGGADIDYYIVEKRETSHLAWTICEGELQMTSCKVTKLLKGNEYIFRVTGVNKYGVGEPLESVAIKALDPFTVPSPPTSLEITSVTKESMTLCWSRPESDGGSEISGYIIERREKNSLRWVRVNKKPVYDLRVKSTGLREGCEYEYRVYAENAAGLSLPSETSPLIRAEDPVFLPSPPSKPKIVDSGKTTITIAWVKPLFDGGAPITGYTVEYKKSDDTDWKTSIQSLRGTEYTISGLTTGAEYVFRVKSVNKVGASDPSDSSDPQIAKEREEEPLFDIDSEMRKTLIVKAGASFTMTVPFRGRPVPNVLWSKPDTDLRTRAYVDTTDSRTSLTIENANRNDSGKYTLTIQNVLSAASLTLVVKVLDTPGPPTNITVQDVTKESAVLSWDVPENDGGAPVKNYHIEKREASKKAWVSVTNNCNRLSYKVTNLQEGAIYYFRVSGENEFGVGIPAETKEGVKITEKPSPPEKLGVTSISKDSVSLTWLKPEHDGGSRIVHYVVEALEKGQKNWVKCAVAKSTHHVVSGLRENSEYFFRVFAENQAGLSDPRELLLPVLIKEQLEPPEIDMKNFPSHTVYVRAGSNLKVDIPISGKPLPKVTLSRDGVPLKATMRFNTEITAENLTINLKESVTADAGRYEITAANSSGTTKAFINIVVLDRPGPPTGPVVISDITEESVTLKWEPPKYDGGSQVTNYILLKRETSTAVWTEVSATVARTMMKVMKLTTGEEYQFRIKAENRFGISDHIDSACVTVKLPYTTPGPPSTPWVTNVTRESITVGWHEPVSNGGSAVVGYHLEMKDRNSILWQKANKLVIRTTHFKVTTISAGLIYEFRVYAENAAGVGKPSHPSEPVLAIDACEPPRNVRITDISKNSVSLSWQQPAFDGGSKITGYIVERRDLPDGRWTKASFTNVTETQFIISGLTQNSQYEFRVFARNAVGSISNPSEVVGPITCIDSYGGPVIDLPLEYTEVVKYRAGTSVKLRAGISGKPAPTIEWYKDDKELQTNALVCVENTTDLASILIKDADRLNSGCYELKLRNAMGSASATIRVQILDKPGPPGGPIEFKTVTAEKITLLWRPPADDGGAKITHYIVEKRETSRVVWSMVSEHLEECIITTTKIIKGNEYIFRVRAVNKYGIGEPLESDSVVAKNAFVTPGPPGIPEVTKITKNSMTVVWSRPIADGGSDISGYFLEKRDKKSLGWFKVLKETIRDTRQKVTGLTENSDYQYRVCAVNAAGQGPFSEPSEFYKAADPIDPPGPPAKIRIADSTKSSITLGWSKPVYDGGSAVTGYVVEIRQGEEEEWTTVSTKGEVRTTEYVVSNLKPGVNYYFRVSAVNCAGQGEPIEMNEPVQAKDILEAPEIDLDVALRTSVIAKAGEDVQVLIPFKGRPPPTVTWRKDEKNLGSDARYSIENTDSSSLLTIPQVTRNDTGKYILTIENGVGEPKSSTVSVKVLDTPAACQKLQVKHVSRGTVTLLWDPPLIDGGSPIINYVIEKRDATKRTWSVVSHKCSSTSFKLIDLSEKTPFFFRVLAENEIGIGEPCETTEPVKAAEVPAPIRDLSMKDSTKTSVILSWTKPDFDGGSVITEYVVERKGKGEQTWSHAGISKTCEIEVSQLKEQSVLEFRVFAKNEKGLSDPVTIGPITVKELIITPEVDLSDIPGAQVTVRIGHNVHLELPYKGKPKPSISWLKDGLPLKESEFVRFSKTENKITLSIKNAKKEHGGKYTVILDNAVCRIAVPITVITLGPPSKPKGPIRFDEIKADSVILSWDVPEDNGGGEITCYSIEKRETSQTNWKMVCSSVARTTFKVPNLVKDAEYQFRVRAENRYGVSQPLVSSIIVAKHQFRIPGPPGKPVIYNVTSDGMSLTWDAPVYDGGSEVTGFHVEKKERNSILWQKVNTSPISGREYRATGLVEGLDYQFRVYAENSAGLSSPSDPSKFTLAVSPVDPPGTPDYIDVTRETITLKWNPPLRDGGSKIVGYSIEKRQGNERWVRCNFTDVSECQYTVTGLSPGDRYEFRIIARNAVGTISPPSQSSGIIMTRDENVPPIVEFGPEYFDGLIIKSGESLRIKALVQGRPVPRVTWFKDGVEIEKRMNMEITDVLGSTSLFVRDATRDHRGVYTVEAKNASGSAKAEIKVKVQDTPGKVVGPIRFTNITGEKMTLWWDAPLNDGCAPITHYIIEKRETSRLAWALIEDKCEAQSYTAIKLINGNEYQFRVSAVNKFGVGRPLDSDPVVAQIQYTVPDAPGIPEPSNITGNSITLTWARPESDGGSEIQQYILERREKKSTRWVKVISKRPISETRFKVTGLTEGNEYEFHVMAENAAGVGPASGISRLIKCREPVNPPGPPTVVKVTDTSKTTVSLEWSKPVFDGGMEIIGYIIEMCKADLGDWHKVNAEACVKTRYTVTDLQAGEEYKFRVSAINGAGKGDSCEVTGTIKAVDRLTAPELDIDANFKQTHVVRAGASIRLFIAYQGRPTPTAVWSKPDSNLSLRADIHTTDSFSTLTVENCNRNDAGKYTLTVENNSGSKSITFTVKVLDTPGPPGPITFKDVTRGSATLMWDAPLLDGGARIHHYVVEKREASRRSWQVISEKCTRQIFKVNDLAEGVPYYFRVSAVNEYGVGEPYEMPEPIVATEQPAPPRRLDVVDTSKSSAVLAWLKPDHDGGSRITGYLLEMRQKGSDFWVEAGHTKQLTFTVERLVEKTEYEFRVKAKNDAGYSEPREAFSSVIIKEPQIEPTADLTGITNQLITCKAGSPFTIDVPISGRPAPKVTWKLEEMRLKETDRVSITTTKDRTTLTVKDSMRGDSGRYFLTLENTAGVKTFSVTVVVIGRPGPVTGPIEVSSVSAESCVLSWGEPKDGGGTEITNYIVEKRESGTTAWQLVNSSVKRTQIKVTHLTKYMEYSFRVSSENRFGVSKPLESAPIIAEHPFVPPSAPTRPEVYHVSANAMSIRWEEPYHDGGSKIIGYWVEKKERNTILWVKENKVPCLECNYKVTGLVEGLEYQFRTYALNAAGVSKASEASRPIMAQNPVDAPGRPEVTDVTRSTVSLIWSAPAYDGGSKVVGYIIERKPVSEVGDGRWLKCNYTIVSDNFFTVTALSEGDTYEFRVLAKNAAGVISKGSESTGPVTCRDEYAPPKAELDARLHGDLVTIRAGSDLVLDAAVGGKPEPKIIWTKGDKELDLCEKVSLQYTGKRATAVIKFCDRSDSGKYTLTVKNASGTKAVSVMVKVLDSPGPCGKLTVSRVTQEKCTLAWSLPQEDGGAEITHYIVERRETSRLNWVIVEGECPTLSYVVTRLIKNNEYIFRVRAVNKYGPGVPVESEPIVARNSFTIPSPPGIPEEVGTGKEHIIIQWTKPESDGGNEISNYLVDKREKKSLRWTRVNKDYVVYDTRLKVTSLMEGCDYQFRVTAVNAAGNSEPSEASNFISCREPSYTPGPPSAPRVVDTTKHSISLAWTKPMYDGGTDIVGYVLEMQEKDTDQWYRVHTNATIRNTEFTVPDLKMGQKYSFRVAAVNVKGMSEYSESIAEIEPVERIEIPDLELADDLKKTVTIRAGASLRLMVSVSGRPPPVITWSKQGIDLASRAIIDTTESYSLLIVDKVNRYDAGKYTIEAENQSGKKSATVLVKVYDTPGPCPSVKVKEVSRDSVTITWEIPTIDGGAPVNNYIVEKREAAMRAFKTVTTKCSKTLYRISGLVEGTMYYFRVLPENIYGIGEPCETSDAVLVSEVPLVPAKLEVVDVTKSTVTLAWEKPLYDGGSRLTGYVLEACKAGTERWMKVVTLKPTVLEHTVTSLNEGEQYLFRIRAQNEKGVSEPRETVTAVTVQDLRVLPTIDLSTMPQKTIHVPAGRPVELVIPIAGRPPPAASWFFAGSKLRESERVTVETHTKVAKLTIRETTIRDTGEYTLELKNVTGTTSETIKVIILDKPGPPTGPIKIDEIDATSITISWEPPELDGGAPLSGYVVEQRDAHRPGWLPVSESVTRSTFKFTRLTEGNEYVFRVAATNRFGIGSYLQSEVIECRSSIRIPGPPETLQIFDVSRDGMTLTWYPPEDDGGSQVTGYIVERKEVRADRWVRVNKVPVTMTRYRSTGLTEGLEYEHRVTAINARGSGKPSRPSKPIVAMDPIAPPGKPQNPRVTDTTRTSVSLAWSVPEDEGGSKVTGYLIEMQKVDQHEWTKCNTTPTKIREYTLTHLPQGAEYRFRVLACNAGGPGEPAEVPGTVKVTEMLEYPDYELDERYQEGIFVRQGGVIRLTIPIKGKPFPICKWTKEGQDISKRAMIATSETHTELVIKEADRGDSGTYDLVLENKCGKKAVYIKVRVIGSPNSPEGPLEYDDIQVRSVRVSWRPPADDGGADILGYILERREVPKAAWYTIDSRVRGTSLVVKGLKENVEYHFRVSAENQFGISKPLKSEEPVTPKTPLNPPEPPSNPPEVLDVTKSSVSLSWSRPKDDGGSRVTGYYIERKETSTDKWVRHNKTQITTTMYTVTGLVPDAEYQFRIIAQNDVGLSETSPASEPVVCKDPFDKPSQPGELEILSISKDSVTLQWEKPECDGGKEILGYWVEYRQSGDSAWKKSNKERIKDKQFTIGGLLEATEYEFRVFAENETGLSRPRRTAMSIKTKLTSGEAPGIRKEMKDVTTKLGEAAQLSCQIVGRPLPDIKWYRFGKELIQSRKYKMSSDGRTHTLTVMTEEQEDEGVYTCIATNEVGEVETSSKLLLQATPQFHPGYPLKEKYYGAVGSTLRLHVMYIGRPVPAMTWFHGQKLLQNSENITIENTEHYTHLVMKNVQRKTHAGKYKVQLSNVFGTVDAILDVEIQDKPDKPTGPIVIEALLKNSAVISWKPPADDGGSWITNYVVEKCEAKEGAEWQLVSSAISVTTCRIVNLTENAGYYFRVSAQNTFGISDPLEVSSVVIIKSPFEKPGAPGKPTITAVTKDSCVVAWKPPASDGGAKIRNYYLEKREKKQNKWISVTTEEIRETVFSVKNLIEGLEYEFRVKCENLGGESEWSEISEPITPKSDVPIQAPHFKEELRNLNVRYQSNATLVCKVTGHPKPIVKWYRQGKEIIADGLKYRIQEFKGGYHQLIIASVTDDDATVYQVRATNQGGSVSGTASLEVEVPAKIHLPKTLEGMGAVHALRGEVVSIKIPFSGKPDPVITWQKGQDLIDNNGHYQVIVTRSFTSLVFPNGVERKDAGFYVVCAKNRFGIDQKTVELDVADVPDPPRGVKVSDVSRDSVNLTWTEPASDGGSKITNYIVEKCATTAERWLRVGQARETRYTVINLFGKTSYQFRVIAENKFGLSKPSEPSEPTITKEDKTRAMNYDEEVDETREVSMTKASHSSTKELYEKYMIAEDLGRGEFGIVHRCVETSSKKTYMAKFVKVKGTDQVLVKKEISILNIARHRNILHLHESFESMEELVMIFEFISGLDIFERINTSAFELNEREIVSYVHQVCEALQFLHSHNIGHFDIRPENIIYQTRRSSTIKIIEFGQARQLKPGDNFRLLFTAPEYYAPEVHQHDVVSTATDMWSLGTLVYVLLSGINPFLAETNQQIIENIMNAEYTFDEEAFKEISIEAMDFVDRLLVKERKSRMTASEALQHPWLKQKIERVSTKVIRTLKHRRYYHTLIKKDLNMVVSAARISCGGAIRSQKGVSVAKVKVASIEIGPVSGQIMHAVGEEGGHVKYVCKIENYDQSTQVTWYFGVRQLENSEKYEITYEDGVAILYVKDITKLDDGTYRCKVVNDYGEDSSYAELFVKGVREVYDYYCRRTMKKIKRRTDTMRLLERPPEFTLPLYNKTAYVGENVRFGVTITVHPEPHVTWYKSGQKIKPGDNDKKYTFESDKGLYQLTINSVTTDDDAEYTVVARNKYGEDSCKAKLTVTLHPPPTDSTLRPMFKRLLANAECQEGQSVCFEIRVSGIPPPTLKWEKDGQPLSLGPNIEIIHEGLDYYALHIRDTLPEDTGYYRVTATNTAGSTSCQAHLQVERLRYKKQEFKSKEEHERHVQKQIDKTLRMAEILSGTESVPLTQVAKEALREAAVLYKPAVSTKTVKGEFRLEIEEKKEERKLRMPYDVPEPRKYKQTTIEEDQRIKQFVPMSDMKWYKKIRDQYEMPGKLDRVVQKRPKRIRLSRWEQFYVMPLPRITDQYRPKWRIPKLSQDDLEIVRPARRRTPSPDYDFYYRPRRRSLGDISDEELLLPIDDYLAMKRTEEERLRLEEELELGFSASPPSRSPPHFELSSLRYSSPQAHVKVEETRKDFRYSTYHIPTKAEASTSYAELRERHAQAAYRQPKQRQRIMAEREDEELLRPVTTTQHLSEYKSELDFMSKEEKSRKKSRRQREVTEITEIEEEYEISKHAQRESSSSASRLLRRRRSLSPTYIELMRPVSELIRSRPQPAEEYEDDTERRSPTPERTRPRSPSPVSSERSLSRFERSARFDIFSRYESMKAALKTQKTSERKYEVLSQQPFTLDHAPRITLRMRSHRVPCGQNTRFILNVQSKPTAEVKWYHNGVELQESSKIHYTNTSGVLTLEILDCHTDDSGTYRAVCTNYKGEASDYATLDVTGGDYTTYASQRRDEEVPRSVFPELTRTEAYAVSSFKKTSEMEASSSVREVKSQMTETRESLSSYEHSASAEMKSAALEEKSLEEKSTTRKIKTTLAARILTKPRSMTVYEGESARFSCDTDGEPVPTVTWLRKGQVLSTSARHQVTTTKYKSTFEISSVQASDEGNYSVVVENSEGKQEAEFTLTIQKARVTEKAVTSPPRVKSPEPRVKSPEAVKSPKRVKSPEPSHPKAVSPTETKPTPTEKVQHLPVSAPPKITQFLKAEASKEIAKLTCVVESSVLRAKEVTWYKDGKKLKENGHFQFHYSADGTYELKINNLTESDQGEYVCEISGEGGTSKTNLQFMGQAFKSIHEKVSKISETKKSDQKTTESTVTRKTEPKAPEPISSKPVIVTGLQDTTVSSDSVAKFAVKATGEPRPTAIWTKDGKAITQGGKYKLSEDKGGFFLEIHKTDTSDSGLYTCTVKNSAGSVSSSCKLTIKAIKDTEAQKVSTQKTSEITPQKKAVVQEEISQKALRSEEIKMSEAKSQEKLALKEEASKVLISEEVKKSAATSLEKSIVHEEITKTSQASEEVRTHAEIKAFSTQMSINEGQRLVLKANIAGATDVKWVLNGVELTNSEEYRYGVSGSDQTLTIKQASHRDEGILTCISKTKEGIVKCQYDLTLSKELSDAPAFISQPRSQNINEGQNVLFTCEISGEPSPEIEWFKNNLPISISSNVSISRSRNVYSLEIRNASVSDSGKYTIKAKNFRGQCSATASLMVLPLVEEPSREVVLRTSGDTSLQGSFSSQSVQMSASKQEASFSSFSSSSASSMTEMKFASMSAQSMSSMQESFVEMSSSSFMGISNMTQLESSTSKMLKAGIRGIPPKIEALPSDISIDEGKVLTVACAFTGEPTPEVTWSCGGRKIHSQEQGRFHIENTDDLTTLIIMDVQKQDGGLYTLSLGNEFGSDSATVNIHIRSI

SEQ ID NO: 940 - protein, 369 aa, Homo sapiens
MLWEETGAAPAPARASDLPYRISSDHLKKEEKMTMMAHQYPSWIFINEKTFITREQLNSLLKTYNIFYENQKNLHILYGETEDGKLIVEGMLDIFWGVKRPIQLKIQDEKPFSSFTSMKSSDVFSSKGMTRWGEFDDLYRISELDRTQIPMSEKRNSQEDYLSYHSNTLKPHAKDEPDSPVLYRTMSEAALVRKRMKPLMMDRKERQKNRASINGHFYNHETSIFIPAFESETKVRVNSNMRTEEVIKQLLQKFKIENSPQDFALHIIFATGEQRRLKKTDIPLLQRLLQGPSEKNARIFLMDKDAEEISSDVAQYINFHFSLLESILQRLNEEEKREIQRIVTKFNKEKAIILKCLQNKLVIKTETTV

SEQ ID NO: 941 - protein, 601 aa, Homo sapiens
MWLFFGITGLLTAALSGHPSPAPPDQLNTSSAESELWEPGERLPVRLTNGSSSCSGTVEVRLEASWEPACGALWDSRAAEAVCRALGCGGAEAASQLAPPTPELPPPPAAGNTSVAANATLAGAPALLCSGAEWRLCEVVEHACRSDGRRARVTCAENRALRLVDGGGACAGRVEMLEHGEWGSVCDDTWDLEDAHVVCRQLGCGWAVQALPGLHFTPGRGPIHRDQVNCSGAEAYLWDCPGLPGQHYCGHKEDAGAVCSEHQSWRLTGGADRCEGQVEVHFRGVWNTVCDSEWYPSEAKVLCQSLGCGTAVERPKGLPHSLSGRMYYSCNGEELTLSNCSWRFNNSNLCSQSLAARVLCSASRSLHNLSTPEVPASVQTVTIESSVTVKIENKESRELMLLIPSIVLGILLLGSLIFIAFILLRIKGKYVFMLPIQVQAPPPEDSDSGSDSDYEHYDFSAQPPVALTTFYNSQRHRVTDEEVQQSRFQMPPLEEGLEELHASHIPTANPGHCITDPPSLGPQYHPRSNSESSTSSGEDYCNSPKSKLPPWNPQVFSSERSSFLEQPPNLELAGTQPAFSGSPSPQPDSTDNDDYDDISAA

SEQ ID NO: 942 - protein, 610 aa, Homo sapiens
MDSVAFEDVAVNFTQEEWALLGPSQKSLYRNVMQETIRNLDCIEMKWEDQNIGDQCQNAKRNLRSHTCEIKDDSQCGETFGQIPDSIVNKNTPRVNPCDSGECGEVVLGHSSLNCNIRVDTGHKSCEHQEYGEKPYTHKQRGKAISHQHSFQTHERPPTGKKPFDCKECAKTFSSLGNLRRHMAAHHGDGPYKCKLCGKAFVWPSLFHLHERTHTGEKPYECKQCSKAFPFYSSYLRHERIHTGEKAYECKQCSKAFPDYSTYLRHERTHTGEKPYKCTQCGKAFSCYYYTRLHERTHTGEQPYACKQCGKTFYHHTSFRRHMIRHTGDGPHKCKICGKGFDCPSSVRNHETTHTGEKPYECKQCGKVLSHSSSFRSHMITHTGDGPQKCKICGKAFGCPSLFQRHERTHTGEKPYQCKQCGKAFSLAGSLRRHEATHTGVKPYKCQCGKAFSDLSSFQNHETTHTGEKPYECKECGKAFSCFKYLSQHKRTHTVEKPYECKTCRKAFSHFSNLKVHERIHSGEKPYECKECGKAFSWLTCLLRHERIHTGEKPYECLQCGKAFTRSRFLRGHEKTHTGEKLYECKECGKALSSLRSLHRHKRTHWKDTL

SEQ ID NO: 943 - protein, 277 aa, Homo sapiens
QKNWLREFYQVVHTHKPHFMALHCQEFGGKNYEASMSHVDKFVKELLSSDAMKEYNRARVYLDENYKSQEHFTALGSFYFLHESLKNIYQFDFKAKKYRKVAGKEIYSDTLESTPMLEKEKFPQDYFPECKWSRKGFIRTRWCIADCAFDLVNIHLFHDASNLVAWETSPSVYSGIRHKALGYVLDRIIDQRFEKVSYFVFGDFNFRLDSKSVVELLEFDKELSVFKDRLYELDISFPPSYPYSEDARQGEQYMNTRCPAWCDRILMSPSAKELVLR

SEQ ID NO: 944 - protein, 776 aa, Homo sapiens
MAEPRQEFEVMEDHAGTYGLGDRKDQGGYTMHQDQEGDTDAGLKESPLQTPTEDGSEEPGSETSDAKSTPTAEDVTAPLVDEGAPGKQAAAQPHTEIPEGTTAEEAGIGDTPSLEDEAAGHVTQEPESGKVVQEGFLREPGPPGLSHQLMSGMPGAPLLPEGPREATRQPSGTGPEDTEGGRHAPELLKHQLLGDLHQEGPPLKGAGGKERPGSKEEVDEDRDVDESSPQDSPPSKASPAQDGRPPQTAAREATSIPGFPAEGAIPLPVDFLSKVSTEIPASEPDGPSVGRAKGQDAPLEFTFHVEITPNVQKEQAHSEEHLGRAAFPGAPGEGPEARGPSLGEDTKEADLPEPSEKQPAAAPRGKPVSRVPQLKARMVSKSKDGTGSDDKKAKTSTRSSAKTLKNRPCLSPKHPTPGSSDPLIQPSSPAVCPEPPSSPKYVSSVTSRTGSSGAKEMKLKGADGKTKIATPRGAAPPGQKGQANATRIPAKTPPAPKTPPSSATKQVQRRPPPAGPRSERGEPPKSGDRSGYSSPGSPGTPGSRSRTPSLPTPPTREPKKVAVVRTPPKSPSSAKSRLQTAPVPMPDLKNVKSKIGSTENLKHQPGGGKVQIINKKLDLSNVQSKCGSKDNIKHVPGGGSVQIVYKPVDLSKVTSKCGSLGNIHHKPGGGQVEVKSEKLDFKDRVQSKIGSLDNITHVPGGGNKKIETHKLTFRENAKAKTDHGAEIVYKSPVVSGDTSPRHLSNVSSTGSIDMVDSPQLATLADEVSASLAKQGL

SEQ ID NO: 945 - protein, 628 aa, Homo sapiens
MAAAGAGPGQEAGAGPGPGAVANATGAEEGEMKPVAAGAAAPPGEGISAAPTVEPSSGEAEGGEANLVDVSGGLETESSNGKDTLEGAGDTSEVMDTQAGSVDEENGRQLGEVELQCGICTKWFTADTFGIDTSSCLPFMTNYSFHCNVCHHSGNTYFLRKQANLKEMCLSALANLTWQSRTQDEHPKTMFSKDKDIIPFIDKYWECMTTRQRPGKMTWPNNIVKTMSKERDVFLVKEHPDPGSKDPEEDYPKFGLLDQDLSNIGPAYDNQKQSSAVSTSGNLNGGIAAGSSGKGRGAKRKQQDGGTTGTTKKARSDPLFSAQRLPPHGYPLEHPFNKDGYRYILAEPDPHAPDPEKLELDCWAGKPIPGDLYRACLYERVLLALHDRAPQLKISDDRLTVVGEKGYSMVRASHGVRKGAWYFEITVDEMPPDTAARLGWSQPLGNLQAPLGYDKFSYSWRSKKGTKFHQSIGKHYSSGYGQGDVLGFYINLPEDTETAKSLPDTYKDKALIKFKSYLYFEEKDFVDKAEKSLKQTPHSEIIFYKNGVNQGVAYKDIFEGVYFPAISLYKSCTVSINFGPCFKYPPKDLTYRPMSDMGWGAVVEHTLADVLYHVETEVDGRRSPPWEP

SEQ ID NO: 946 - protein, 232 aa, Homo sapiens
MESETEPEPVTLLVKSPNQRHRDLELSGDRGWSVGHLKAHLSRVYPERPRPEDQRLIYSGKLLLDHQCLRDLLPKEKRHVLHLVCNVKSPSKMPEINAKVAESTEEPAGSNRGQYPEDSSSDGLRQREVLRNLSSPGWENISRHHVGWFPFRPRPVQNFPNDGPPPDVVNQDPNNNLQEGTDPETEDPNHLPPDRDVLDGEQTSPSFMSTAWLVFKTFFASLLPEGPPAIAN

SEQ ID NO: 947 - protein, 647 aa, Homo sapiens
MPLVDFFCETCSKPWLVGWWDQFKRMLNRELTHLSEMSRSGNQVSEYISTTFLDKQNEVEIPSPTMKEREKQQAPRPRPSQPPPPPVPHLQPMSQITGLKKLMHSNSLNNSNIPRFGVKTDQEELLAQELENLNKWGLNIFCVSDYAGGRSLTCIMYMIFQERDLLKKFRIPVDTMVTYMLTLEDHYHADVAYHNSLHAADVLQSTHVLLATPALDAVFTDLEILAALFAAAIHDVDHPGVSNQFLINTNSELALMYNDESVLENHHLAVGFKLLQEDNCDIFQNLSKRQRQSLRKMVIDMVLATDMSKHMTLLADLKTMVETKKVTSSGVLLLDNYSDRIQVLRNMVHCADLSNPTKPLELYRQWTDRIMAEFFQQGDRERERGMEISPMCDKHTASVEKSQVGFIDYIVHPLWETWADLVHPDAQEILDTLEDNRDWYYSAIRQSPSPPPEEESRGPGHPPLPDKFQFELTLEEEEEEEISMAQIPCTAQEALTAQGLSGVEEALDATIAWEASPAQESLEVMAQEASLEAELEAVYLTQQAQSTGSAPVAPDEFSSREEFVVAVSHSSPSALALQSPLLPAWRTLSVSEHAPGLPGLPSTAAEVEAQREHQAAKRACSACAGTFGEDTSALPAPGGGGSGGDPT

SEQ ID NO: 948 - protein, 2458 aa, Homo sapiens
MVLLLCLSCLIFSCLTFSWLKIWGKMTDSKPITKSKSEANLIPSQEPFPASDNSGETPQRNGEGHTLPKTPSQAEPASHKGPKDAGRRRNSLPPSHQKPPRNPLSSSDAAPSPELQANGTGTQGLEATDTNGLSSSARPQGQQAGSPSKEDKKQANIKRQLMTNFILGSFDDYSSDEDSVAGSSRESTRKGSRASLGALSLEAYLTTGEAETRVPTMRPSMSGLHLVKRGREHKKLDLHRDFTVASPAEFVTRFGGDRVIEKVLIANNGIAAVKCMRSIRRWAYEMFRNERAIRFVVMVTPEDLKANAEYIKMADHYVPVPGGPNNNNYANVELIVDIAKRIPVQAVWAGWGHASENPKLPELLCKNGVAFLGPPSEAMWALGDKIASTVVAQTLQVPTLPWSGSGLTVEWTEDDLQQGKRISVPEDVYDKGCVKDVDEGLEAAERIGFPLMIKASEGGGGKGIRKAESAEDFPILFRQVQSEIPGSPIFLMKLAQHARHLEVQILADQYGNAVSLFGRDCSIQRRHQKIVEEAPATIAPLAIFEFMEQCAIRLAKTVGYVSAGTVEYLYSQDGSFHFLELNPRLQVEHPCTEMIADVNLPAAQLQIAMGVPLHRLKDIRLLYGESPWGVTPISFETPSNPPLARGHVIAARITSENPDEGFKPSSGTVQELNFRSSKNVWGYFSVAATGGLHEFADSQFGHCFSWGENREEAISNMVVALKELSIRGDFRTTVEYLINLLETESFQNNDIDTGWLDYLIAEKVQAEKPDIMLGVVCGALNVADAMFRTCMTDFLHSLERGQVLPADSLLNLVDVELIYGGVKYILKVARQSLTMFVLIMNGCHIEIDAHRLNDGGLLLSYNGNSYTTYMKEEVDSYRITIGNKTCVFEKENDPTVLRSPSAGKLTQYTVEDGGHVEAGSSYAEMEVMKMIMTLNVQERGRVKYIKRPGAVLEAGCVVARLELDDPSKVHPAEPFTGELPAQQTLPILGEKLHQVFHSVLENLTNVMSGFCLPEPVFSIKLKEWVQKLMMTLRHPSLPLLELQEIMTSVAGRIPAPVEKSVRRVMAQYASNITSVLCQFPSQQIATILDCHAATLQRKADREVFFINTQSIVQLVQRYRSGIRGYMKTVVLDLLRRYLRVEHHFQQAHYDKCVINLREQFKPDMSQVLDCIFSHAQVAKKNQLVIMLIDELCGPDPSLSDELISILNELTQLSKSEHCKVALRARQILIASHLPSYELRHNQVESIFLSAIDMYGHQFCPENLKKLILSETTIFDVLPTFFYHANKVVCMASLEVYVRRGYIAYELNSLQHRQLPDGTCVVEFQFMLPSSHPNRMTVPISITNPDLLRHSTELFMDSGFSPLCQRMGAMVAFRRFEDFTRNFDEVISCFANVPKDTPLFSEARTSLYSEDDCKSLREEPIHILNVSIQCADHLEDEALVPILRTFVQSKKNILVDYGLRRITFLIAQEKEFPKFFTFRARDEFAEDRIYRHLEPALAFQLELNRMRNFDLTAVPCANHKMHLYLGAAKVKEGVEVTDHRFFIRAIIRHSDLITKEASFEYLQNEGERLLLEAMDELEVAFNNTSVRTDCNHIFLNFVPTVIMDPFKIEESVRYMVMRYGSRLWKLRVLQAEVKINIRQTTTGSAVPIRLFITNESGYYLDISLYKEVTDSRSGNIMFHSFGNKQGPQHGMLINTPYVTKDLLQAKRFQAQTLGTTYIYDFPEMFRQALFKLWGSPDKYPKDILTYTELVLDSQGQLVEMNRLPGGNEVGMVAFKMRFKTQEYPEGRDVIVIGNDITFRIGSFGPGEDLLYLRASEMARAEGIPKIYVAANSGARIGMAEEIKHMFHVAWVDPEDPHKGFKYLYLTPQDYTRISSLNSVHCKHIEEGGESRYMITDIIGKDDGLGVENLRGSGMIAGESSLAYEEIVTISLVTCRAIGIGAYLVRLGQRVIQVENSHIILTGASALNKVLGREVYTSNNQLGGVQIMHYNGVSHITVPDDFEGVYTILEWLSYMPKDNHSPVPIITPTDPIDREIEFLPSRAPYDPRWMLAGRPHPTLKGTWQSGFFDHGSFKEIMAPWAQTVVTGRARLGGIPVGVIAVETRTVEVAVPADPANLDSEAKIIQQAGQVWFPDSAYKTAQAVKDFNREKLPLMIFANWRGFSGGMKDMYDQVLKFGAYIVDGLRQYKQPILIYIPPYAELRGGSWVVIDATINPLCIEMYADKESRGGVLEPEGTVEIKFRKKDLIKSMRRIDPAYKKLMEQLGEPDLSDKDRKDLEGRLKAREDLLLPIYHQVAVQFADFHDTPGRMLEKGVISDILEWKTARTFLYWRLRRLLLEDQVKQEILQASGELSHVHIQSMLRRWFVETEGAVKAYLWDNNQVVVQWLEQHWQAGDGPRSTIRENITYLKHDSVLKTIRGLVEENPEVAVDCVIYLSQHISPAERAQVVHLLSTMDSPAST

SEQ ID NO: 949 - protein, 530 aa, Homo sapiens
MSLKWTSVFLLIQLSCYFSSGSCGKVLVWPTEYSHWINMKTILEELVQRGHEVTVLTSSASTLVNASKSSAIKLEVYPTSLTKNYLEDSLLKILDRWIYGVSKNTFWSYFSQLQELCWEYYDYSNKLCKDAVLNKKLMMKLQESKFDVILADALNPCGELLAELFNIPFLYSLRFSVGYTFEKNGGGFLFPPSYVPVVMSELSDQMIFMERIKNMIHMLYFDFWFQIYDLKKWDQFYSEVLGRPTTLFETMGKAEMWLIRTYWDFEFPRPFLPNVDFVGGLHCKPAKPLPKEMEEFVQSSGENGIVVFSLGSMISNMSEESANMIASALAQIPQKVLWRFDGKKPNTLGSNTRLYKWLPQNDLLGHPKTKAFITHGGTNGIYEAIYHGIPMVGIPLFADQHDNIAHMKAKGAALSVDIRTMSSRDLLNALKSVINDPVYKENVMKLSRIHHDQPMKPLDRAVFWIEFVMRHKGAKHLRVAAHNLTWIQYHSLDVIAFLLACVATVIFIITKFCLFCFRKLAKKGKKKKRD

SEQ ID NO: 950 - protein, 3396 aa, Homo sapiens
MTAWLISLMSIEVLLLAVRHLSLHIEPEEGSLAGGTWITVIFDGLELGVLYPNNGSQLEIHLVNVNMVVPALRSVPCDVFPVFLDLPVVTCRTRSVLSEAHEGLYFLEAYFGGQLVSSPNPGPRDSCTFKFSKAQTPIVHQVYPPSGVPGKLIHVYGWIITGRLETFDFDAEYIDSPVILEAQGDKWVTPCSLINRQMGSCYPIQEDHGLGTLQCHVEGDYIGSQNVSFSVFNKGKSMVHKKAWLISAKQDLFLYQTHSEILSVFPETGSLGGRTNITITGDFFDNSAQVTIAGIPCDIRHVSPRKIECTTRAPGKDVRLTTPQPGNRGLLFEVGDAVEGLELTEATPGYRWQIVPNASSPFGFWSQEGQPFRARLSGFFVAPETNNYTFWIQADSQASLHFSWSEEPRTKVKVASISVGTADWFDSWEQNRDEGTWQQKTPKLELLGGAMYYLEAEHHGIAPSRGMRIGVQIHNTWLNPDVVTTYLREKHQIRVRAQRLPEVQVLNVSGRGNFFLTWDNVSSQPIPANATAHLIQTTIEELLAVKCKLEPLWSNILLRLGFERGPEVSNSDGDLTSGTEPFCGRFSLRQPRHLVLTPPAAQKGYRLDQYTHLCLAYKGHMNKILKMIVSFTIGFQNMVKNTTCDWSLTRTSPESWQFDCTDLWETCVRCFGDLQPPPANSPVLVHQINLLPLAQETGLFYVDEIIIADTNVTVSQADSGTARPGGNLVESVSVVGSPPVYSVTSWLAGCGTELPLITARSVPTEGTEEGSGLVLVTTQRRQRTSPPLGGHFRIQLPNTVISDVPVQISAHHLHQLLQNNADDFTSRYLNASDFTVKEDLYTCYEHVWTLSWSTQIGDLPNFIRVSDENLTGVNPAAATRVVYDGGVFLGPIFGDMLATANQHTQVVVRVNDVPAHCPGSCSFQYLQGSTPCVHSVWYSIDGDINLMIYITGTGFSGDSQFLQVTVNKTSCKVIFSNQTNVVCQTDLLPVGMHRILMLVRPSGLAISATGEDLFLNVKPRLDMVEPSRAADIGGLWATIRGSSLEGVSLILFGSYSCAINVATSNSSRIQCKVPPRGKDGRIVNVTVIRGDYSAVLPRAFTYVSSLNPVIVTLSRNISNIAGGETLVIGVARLMNYTDLDVEVHVQDALAPVHTQSAWGLEVALPPLPAGLHRISVSINGVSIHSQGVDLHIQYLTEVFSIEPCCGSLLGGTILSISGIGFSRDPALVWVLVGNRSCDIVNLTEASIWCETLPAPQIPDAGAPTVPAAVEVWAGNRFFARGPSPSLVGKGFTFMYEAAATPVVTAMQGEITNSSLSLHVGGSNLSNSVILLGNLNCDVETQSFQGNVSLSGCSIPLHSLEAGIYPLQVRQKQMGFANMSVVLQQFAVMPRIMAIFPSQGSACGGTILTVRGLLLNSRRRSVRVDLSGPFTCVILSLGDHTILCQVSLEGDPLPGASFSLNVTVLVNGLTSECQGNCTLFIREEASPVMDALSTNTSGSLTTVLIRGQRLATTADEPMVFVDDQLPCNVTFFNASHVVCQTRDLAPGPHYLSVFYTRNGYACSGNVSRHFYIMPQVFHYFPKNFSLHGGSLLTIEGTGLRGQNTTSVYIDQQTCLTVNIGAELIRCIVPTGNGSVALEIEVDGLWYHIGVIGYNKAFTPELISISQSDDILTFAVAQISGAANIDIFIGMSPCVGVSGNHTVLQCVVPSLPAGEYHVRGYDCIRGWASSALVFTSRVIITAVTENFGCLGGRLVHVFGAGFSPGNVSAAVCGAPCRVLANATVSAFSCLVLPLDVSLAFLCGLKREEDSCEAARHTYVQCDLTVAMATEQLLESWPYLYICEESSQCLFVPDHWAESMFPSFSGLFISPKLERDEVLIYNSSCNITMETEAEMECETPNQPITVKITEIRKRWGQNTQGNFSLQFCRRWSRTHSWFPERLPQDGDNVTVENGQLLLLDTNTSILNLLHIKGGKLIFMAPGPIELRAHAILVSDGGELRIGSEDKPFQGRAQITLYGSSYSTPFFPYGVKFLAVRNGTLSLHGSLPEVIVTCLRATAHALDTVLALEDAVDWNPGDEVVIISGTGVKGAKPMEEIVTVETVQDTDLYLKSPLRYSHNFTENWVAGEHHILKATVALLSRSITIQGNLTNEREKLLVSCQEANAPEGNLQHCLYSMSEKMLGSRDMGARVIVQSFPEEPSQVQLKGVQFQVLGQAFHKHLSSLTLVGAMRESFIQGCTVRNSFSRGLSMCGTLGLKVDSNVFYNILGHALLVGTCTEMRYISWEAIHGRKDDWSGHGNIIRNNVIIQVSGAEGLSNPEMLTPSGIYICSPTNVIEGNRVCGAGYGYFFHLMTNQTSQAPLLSFTQNIAHSCTRYGLFVYPKFQPPWDNVTGTTLFQSFTVWESAGGAQIFRSSNLRLKNFKVYSCRDFGIDVLESDANTSVTDSLLLGHFAHKGSLCMSSGIKTPKRWELMVSNTTFVNFDLINCVAIRTCSDCSQGQGGFTVKTSQLKFTNSSNLVAFPFPHAAILEDLDGSLSGKNRSHILASMETLSASCLVNSSFGRVVHGSACGGGVLFHRMSIGLANTPEVSYDLTMTDSRNKTTTVNYVRDTLSNPRGWMALLLDQETYSLQSENLWINRSLQYSATFDNFAPGNYLLLVHTDLPPYPDILLRCGSRVGLSFPFLPSPGQNQGCDWFFNSQLRQLTYLVSGEGQVQVILRVKEGMPPTISASTSAPESALKWSLPETWQGVEEGWGGYNNTIPGPGDDVLILPNRTVLVDTDLPFFKGLYVMGTLDFPVDRSNVLSVACMVIAGGELKVGTLENPLEKEQKLLILLRASEGVFCDRMNGIHIDPGTIGVYGKVHLYSAYPKNSWTHLGADIASGNERIIVEDAVDWRPHDKIVLSSSSYEPHEAEVLTVKEVKGHHVRIYERLKHRHIGSVHVTEDGRHIRLAAEVGLLTRNIQIQPDVSCRGRLFVGSFRKSSREEFSGVLQLLNVEIQNFGSPLYSSVEFSNVSAGSWIISSTLHQSCGGGIHAAASHGVLLNDNIVFGTAGHGIDLEGQAYTVTNNLVVLMTQPAWSTIWVAGIKVNQVKDINLHGNVVAGSERLGFHIRGHKCSSCELLWSDNVAHSSLHGLHLYKESGLDNCTRISGFLAFKNFDYGAMLHVENSVEIENITLVDNTIGLLAVVYVFSAPQNSVKKVQIVLRNSVIVATSSSFDCIQDKVKPHSANLTSTDRAPSNPRGGRIGILWPVFTSEPNQWPQEPWHKVRNDHSISGIMKLQDVTFSSFVKSCYSDDLDVCILPNAENSGIMHPITAERTRMLKIKDKNKFYFPSLQPRKDLGKVVCPELDCASPRKYLFKDLDGRALGLPPPVSVFPKTEAEWTASFFNAVTTEQALKISE

SEQ ID NO: 951 - protein, 1158 aa, Homo sapiens
MSADSSPLVGSTPTGYGTLTIGTSIDPLSSSVSSVRLSGYCGSPWRVIGYHVVVWMMAGIPLLLFRWKPLWGVRLRLRPCNLAHAETLVIEIRDKEDSSWQLFTVQVQTEAIGEGSLEPSPQSQAEDGRSQAAVGAVPEGAWKDTAQLHKSEEAKRVLRYYLFQGQRYIWIETQQAFYQVSLLDHGRSCDDVHRSRHGLSLQDQMVRKAIYGPNVISIPVKSYPQLLVDEALNPYYGFQAFSIALWLADHYYWYALCIFLISSISICLSLYKTRKQSQTLRDMVKLSMRVCVCRPGGEEEWVDSSELVPGDCLVLPQEGGLMPCDAALVAGECMVNESSLTGESIPVLKTALPEGLGPYCAETHRRHTLFCGTLILQARAYVGPHVLAVVTRTGFCTAKGGLVSSILHPRPINFKFYKHSMKFVAALSVLALLGTIYSIFILYRNRVPLNEIVIRALDLVTVVVPPALPAAMTVCTLYAQSRLRRQGIFCIHPLRINLGGKLQLVCFDKTGTLTEDGLDVMGVVPLKGQAFLPLVPEPRRLPVGPLLRALATCHALSRLQDTPVGDPMDLKMVESTGWVLEEEPAADSAFGTQVLAVMRPPLWEPQLQAMEEPPVPVSVLHRFPFSSALQRMSVVVAWPGATQPEAYVKGSPELVAGLCNPETVPTDFAQMLQSYTAAGYRVVALASKPLPTVPSLEAAQQLTRDTVEGDLSLLGLLVMRNLLKPQTTPVIQALRRTRIRAVMVTGDNLQTAVTVARGCGMVAPQEHLIIVHATHPERGQPASLEFLPMESPTAVNGVKVLVQGTVFARMAPEQKTELVCELQKLQYCVGMCGDGANDCGALKAADVGISLSQAEASVVSPFTSSMASIECVPMVIREGRCSLDTSFSVFKYMALYSLTQFISVLILYTINTNLGDLQFLAIDLVITTTVAVLMSRTGPALVLGRVRPPGALLSVPVLSSLLLQMVLVTGVQLGGYFLTLAQPWFVPLNRTVAAPDNLPNYENTVVFSLSSFQYLILAAAVSKGAPFRRPLYTNERARPVPPRLPAPPPAQAGLQEALQAAGTRAGRAALAAAARRPPEVVQAHGHPRHWNSLPLSHQLDPSPATPPPPPPTSLRLATVYTPPPRPPPPWGSVDYCPLPWTIPRRGGSPQLPSVLLSV

SEQ ID NO: 952 - protein, 1709 aa, Homo sapiens
MGFLPKLLLLASFFPAGQASWGVSSPQDVQGVKGSCLLIPCIFSFPADVEVPDGITAIWYYDYSGQRQVVSHSADPKLVEARFRGRTEFMGNPEHRVCNLLLKDLQPEDSGSYNFRFEISEVNRWSDVKGTLVTVTEEPRVPTIASPVELLEGTEVDFNCSTPYVCLQEQVRLQWQGQDPARSVTFNSQKFEPTGVGHLETLHMAMSWQDHGRILRCQLSVANHRAQSEIHLQVKYAPKGVKILLSPSGRNILPGELVTLTCQVNSSYPAVSSIKWLKDGVRLQTKTGVLHLPQAAWSDAGVYTCQAENGVGSLVSPPISLHIFMAEVQVSPAGPILENQTVTLVCNTPNEAPSDLRYSWYKNHVLLEDAHSHTLRLHLATRADTGFYFCEVQNVHGSERSGPVSVVVNHPPLTPVLTAFLETQAGLVGILHCSVVSEPLATLVLSHGGHILASTSGDSDHSPRFSGTSGPNSLRLEIRDLEETDSGEYKCSATNSLGNATSTLDFHANAARLLISPAAEVVEGQAVTLSCRSGLSPTPDARFSWYLNGALLHEGPGSSLLLPAASSTDAGSYHCRARDGHSASGPSSPAVLTVLYPPRQPTFTTRLDLDAAGAGAGRRGLLLCRVDSDPPARLQLLHKDRVVATSLPSGGGCSTCGGCSPRMKVTKAPNLLRVEIHNPLLEEEGLYLCEASNALGNASTSATFNGQATVLAIAPSHTLQEGTEANLTCNVSREAAGSPANFSWFRNGVLWAQGPLETVTLLPVARTDAALYACRILTEAGAQLSTPVLLSVLYPPDRPKLSALLDMGQGHMALFICTVDSRPLALLALFHGEHLLATSLGPQVPSHGRFQAKAEANSLKLEVRELGLGDSGSYRCEATNVLGSSNTSLFFQVRGAWVQVSPSPELQEGQAVVLSCQVHTGVPEGTSYRWYRDGQPLQESTSATLRFAAITLTQAGAYHCQAQAPGSATTSLAAPISLHVSYAPRHVTLTTLMDTGPGRLGLLLCRVDSDPPAQLRLLHGDRLVASTLQGVGGPEGSSPRLHVAVAPNTLRLEIHGAMLEDEGVYICEASNTLGQASASADFDAQAVNVQVWPGATVREGQLVNLTCLVWTTHPAQLTYTWYQDGQQRLDAHSIPLPNVTVRDATSYRCGVGPPGRAPRLSRPITLDVLYAPRNLRLTYLLESHGGQLALVLCTVDSRPPAQLALSHAGRLLASSTAASVPNTLRLELRGPQPRDEGFYSCSARSPLGQANTSLELRLEGVRVILAPEAAVPEGAPITVTCADPAAHAPTLYTWYHNGRWLQEGPAASLSFLVATRAHAGAYSCQAQDAQGTRSSRPAALQVLYAPQDAVLSSFRDSRARSMAVIQCTVDSEPPAELALSHDGKVLATSSGVHSLASGTGHVQVARNALRLQVQDVPAGDDTYVCTAQNLLGSISTIGRLQVEGARVVAEPGLDVPEGAALNLSCRLLGGPGPVGNSTFAWFWNDRRLHAEPVPTLAFTHVARAQAGMYHCLAELPTGAAASAPVMLRVLYPPKTPTMMVFVEPEGGLRGILDCRVDSEPLASLTLHLGSRLVASSQPQGAPAEPHIHVLASPNALRVDIEALRPSDQGEYICSASNVLGSASTSTYFGVRALHRLHQFQQLLWVLGLLVGLLLLLLGLGACYTWRRRRVCKQSMGENSVEMAFQKETTQLIDPDAATCETSTCAPPLG

SEQ ID NO: 953 - protein, 1484 aa, Homo sapiens
MCPEEGGAAGLGELRSWWEVPAIAHFCSLFRTAFRLPDFEIEELEAALHRDDVEFISDLIACLLQGCYQRRDITPQTFHSYLEDIINYRWELEEGKPNPLREASFQDLPLRTRVEILHRLCDYRLDADDVFDLLKGLDADSLRVEPLGEDNSGALYWYFYGTRMYKEDPVQGKSNGELSLSRESEGQKNVSSIPGKTGKRRGRPPKRKKLQEEILLSEKQEENSLASEPQTRHGSQGPGQGTWWLLCQTEEEWRQVTESFRERTSLRERQLYKLLSEDFLPEICNMIAQKGKRPQRTKAELHPRWMSDHLSIKPVKQEETPVLTRIEKQKRKEEEEERQILLAVQKKEQEQMLKEERKRELEEKVKAVEGMCSVRVVWRGACLSTSRPVDRAKRRKLREERAWLLAQGKELPPELSHLDPNSPMREEKKTKDLFELDDDFTAMYKVLDVVKAHKDSWPFLEPVDESYAPNYYQIIKAPMDISSMEKKLNGGLYCTKEEFVNDMKTMFRNCRKYNGESSEYTKMSDNLERCFHRAMMKHFPGEDGDTDEEFWIREDEKREKRRSRAGRSGGSHVWTRSRDPEGSSRKQQPMENGGKSLPPTRRAPSSGDDQSSSSTQPPREVGTSNGRGFSHPLHCGGTPSQAPFLNQMRPAVPGTFGPLRGSDPATLYGSSGVPEPHPGEPVQQRQPFTMQPPVGINSLRGPRLGTPEEKQMCGGLTHLSNMGPHPGSLQLGQISGPSQDGSMYAPAQFQPGFIPPRHGGAPARPPDFPESSEIPPSHMYRSYKYLNRVHSAVWNGNHGATNQGPLGPDEKPHLGPGPSHQPRTLGHVMDSRVMRPPVPPNQWTEQSGFLPHGVPSSGYMRPPCKSAGHRLQPPPVPAPSSLFGAPAQALRGVQGGDSMMDSPEMIAMQQLSSRVCPPGVPYHPHQPAHPRLPGPFPQVAHPMSVTVSAPKPALGNPGRAPENSEAQEPENDQAEPLPGLEEKPPGVGTSEGVYLTQLPHPTPPLQTDCTRQSSPQERETVGPELKSSSSESADNCKAMKGKNPWPSDSSYPGPAAQGCVRDLSTVADRGALSENGVIGEASPCGSEGKGLGSSGSEKLLCPRGRTLQETMPCTGQNAATPPSTDPGLTGGTVSQFPPLYMPGLEYPNSAAHYHISPGLQGVGPVMGGKSPASHPQHFPPRGFQSNHPHSGGFPRYRPPQGMRYSYHPPPQPSYHHYQRTPYYACPQSFSDWQRPLHPQGSPSGPPASQPPPPRSLFSDKNAMASLQGCETLNAALTSPTRMDAVAAKVPNDGQNPGPEEEKLDESMERPESPKEFLDLDNHNAATKRQSSLSASEYLYGTPPPLSSGMGFGSSAFPPHSVMLQTGPPYTPQRPASHFQPRAYSSPVAALPPHHPGATQPNGLSQEGPIYRCQEEGLGHFQAVMMEQIGTRSGIRGPFQEMYRPSGMQMHPVQSQASFPKTPTAATSQEEVPPHKPPTLPLDQS

SEQ ID NO: 954 - protein, 2634 aa, Homo sapiens
MSGGAAEKQSSTPGSLFLSPPAPAPKNGSSSDSSVGEKLGAAAADAVTGRTEEYRRRRHTMDKDSRGAAATTTTTEHRFFRRSVICDSNATALELPGLPLSLPQPSIPAAVPQSAPPEPHREETVTATATSQVAQQPPAAAAPGEQAVAGPAPSTVPSSTSKDRPVSQPSLVGSKEEPPPARSGSGGGSAKEPQEERSQQQDDIEELETKAVGMSNDGRFLKFDIEIGRGSFKTVYKGLDTETTVEVAWCELQDRKLTKSERQRFKEEAEMLKGLQHPNIVRFYDSWESTVKGKKCIVLVTELMTSGTLKTYLKRFKVMKIKVLRSWCRQILKGLQFLHTRTPPIIHRDLKCDNIFITGPTGSVKIGDLGLATLKRASFAKSVIGTPEFMAPEMYEEKYDESVDVYAFGMCMLEMATSEYPYSECQNAAQIYRRVTSGVKPASFDKVAIPEVKEIIEGCIRQNKDERYSIKDLLNHAFFQEETGVRVELAEEDDGEKIAIKLWLRIEDIKKLKGKYKDNEAIEFSFDLERDVPEDVAQEMVESGYVCEGDHKTMAKAIKDRVSLIKRKREQRQLVREEQEKKKQEESSLKQQVEQSSASQTGIKQLPSASTGIPTASTTSASVSTQVEPEEPEADQHQQLQYQQPSISVLSDGTVDSGQGSSVFTESRVSSQQTVSYGSQHEQAHSTGTVPGHIPSTVQAQSQPHGVYPPSSVPRRGRSMSVCVPIFLLLPLCPASLPVLFHPTASTVCTSFSFPPPDCPEETFAEKLSKALESVLPMHSASQRKHRRSSLPSLFVSTPQSMAHPCGGTPTYPESQIFFPTIHERPVSFSPPPTCPPKVAISQRRKSTSFLEAQTHHFQPLLRTVGQSLLPPGGSPTNWTPEAVVMLGTTASRVTGESCEIQVHPMFEPSQVYSDYRPGLVLPEEAHYFIPQEAVYVAGVHYQARVAEQYEGIPYNSSVLSSPMKQIPEQKPVQGGPTSSSVFEFPSGQAFLVGHLQNLRLDSGLGPGSPLSSISAPISTDATRLKFHPVFVPHSAPAVLTHNNESRSNCVFEFHVHTPSSSSGEGGGILPQRVYRNRQVAVDLNQEELPPQSVGLHGYLQPVTEEKHNYHAPELTVSVVEPIGQNWPIGSPEYSSDSSQITSSDPSDFQSPPPTGGAAAPFGSDVSMPFIHLPQTVLQESPLFFCFPQGTTSQQVLTASFSSGGSALHPQAQGQSQGQPSSSSLTGVSSSQPIQHPQQQQGIQQTAPPQQTVQYSLSQTSTSSEATTAQPVSQPQAPQVLPQVSAGKQSTQGVSQVAPAEPVAVAQTQATQPTTLASSVDSAHSDVASGMSDGNENVPSSSGRHEGRTTKRHYRKSVRSRSRHEKTSRPKLRILNVSNKGDRVVECQLETHNRKMVTFKFDLDGDNPEEIATIMVNNDFILAIERESFVDQVREIIEKADEMLSEDVSVEPEGDQGLESLQGKDDYGFSGSQKLEGEFKQPIPASSMPQQIGIPTSSLTQVVHSAGRRFIVSPVPESRLRESKVFPSEITDTVAASTAQSPGMNLSHSASSLSLQQAFSELRRAQMTEGPNTAPPNFSHTGPTFPVVPPFLSSIAGVPTTAAATAPVPATSSPPNDISTSVIQSEVTVPTEEGIAGVATSTGVVTSGGLPIPPVSESPVLSSVVSSITIPAVVSISTTSPSLQVPTSTSEIVVSSTALYPSVTVSATSASAGGSTATPGPKPPAVVSQQAAGSTTVGATLTSVSTTTSFPSTASQLCIQLSSSTSTPTLAETVVVSAHSLDKTSHSSTTGLAFSLSAPSSSSSPGAGVSSYISQPGGLHPLVIPSVIASTPILPQAAGPTSTPLLPQVPSIPPLVQPVANVPAVQQTLIHSQPQPALLPNQPHTHCPEVDSDTQPKAPGIDDIKTLEEKLRSLFSEHSSSGAQHASVSLETSLVIESTVTPGIPTTAVAPSKLLTSTTSTCLPPTNLPLGTVALPVTPVVTPGQVSTPVSTTTSGVKPGTAPSKPPLTKAPVLPVGTELPAGTLPSEQLPPFPGPSLTQSQQPLEDLDAQLRRTLSPEMITVTSAVGPVSMAAPTAITEAGTQPQKGVSQVKEGPVLATSSGAGVFKMGRFQVSVAADGAQKEGKNKSEDAKSVHFESSTSESSVLSSSSPESTLVKPEPNGITIPGISSDVPESAHKTTASEAKSDTGQPTKVGRFQVTTTANKVGRFSVSKTEDKITDTKKEGPVASPPFMDLEQAVLPAVIPKKEKPELSEPSHLNGPSSDPEAAFLSRDVDDGSGSPHSPHQLSSKSLPSQNLSQSLSNSFNSSYMSSDNESDIEDEDLKLELRRLRDKHLKEIQDLQSRQKHEIESLYTKLGKVPPAVIIPPAAPLSGRRRRPTKSKGSKSSRSSSLGNKSPQLSGNLSGQSAASVLHPQQTLHPPGNIPESGQNQLLQPLKPSPSSDNLYSAFTSDGAISVPSLSAPGQGTSSTNTVGATVNSQAAQAQPPAMTSSRKGTFTDDLHKLVDNWARDAMNLSGRRGSKGHMNYEGPGMARKFSAPGQLCISMTSNLGGSAPISAASATSLGHFTKSMCPPQQYGFPATPFGAQWSGTGGPAPQPLGQFQPVGTASLQNFNISNLQKSISNPPGSNLRTT

SEQ ID NO: 955 - protein, 1351 aa, Homo sapiens
MELLPPLPQSFLLLLLLPAKPAAGEDWQCPRTPYAASRDFDVKYVVPSFSAGGLVQAMVTYEGDRNESAVFVAIRNRLHVLGPDLKSVQSLATGPAGDPGCQTCAACGPGPHGPPGDTDTKVLVLDPALPALVSCGSSLQGRCFLHDLEPQGTAVHLAAPACLFSAHHNRPDDCPDCVASPLGTRVTVVEQGQASYFYVASSLDAAVAASFSPRSVSIRRLKADASGFAPGFVALSVLPKHLVSYSIEYVHSFHTGAFVYFLTVQPASVTDDPSALHTRLARLSATEPELGDYRELVLDCRFAPKRRRRGAPEGGQPYPVLRVAHSAPVGAQLATELSIAEGQEVLFGVFVTGKDGGPGVGPNSVVCAFPIDLLDTLIDEGVERCCESPVHPGLRRGLDFFQSPSFCPNPPGLEALSPNTSCRHFPLLVSSSFSRVDLFNGLLGPVQVTALYVTRLDNVTVAHMGTMDGRILQVELVRSLNYLLYVSNFSLGDSGQPVQRDVSRLGDHLLFASGDQVFQVPIQGPGCRHFLTCGRCLRAWHFMGCGWCGNMCGQQKECPGSWQQDHCPPKLTEFHPHSGPLRGSTRLTLCGSNFYLHPSGLVPEGTHQVTVGQSPCRPLPKDSSKLRPVPRKDFVEEFECELEPLGTQAVGPTNVSLTVTNMPPGKHFRVDGTSVLRGFSFMEPVLIAVQPLFGPRAGGTCLTLEGQSLSVGTSRAVLVNGTECLLARVSEGQLLCATPPGATVASVPLSLQVGGAQVPGSWTFQYREDPVVLSISPNCGYINSHITICGQHLTSAWHLVLSFHDGLRAVESRCERQLPEQQLCRLPEYVVRDPQGWVAGNLSARGDGAAGFTLPGFRFLPPPHPPSANLVPLKPEEHAIKFEVCVDGECHILGRVVRPGPDGVPQSTLLGILLPLLLLVAALATALVFSYWWRRKQLVLPPNLNDLASLDQTAGATPLPILYSGSDYRSGLALPAIDGLDSTTCVHGASFSDSEDESCVPLLRKESIQLRDLDSALLAEVKDVLIPHERVVTHSDRVIGKGHFGVVYHGEYIDQAQNRIQCAIKSLSRITEMQQVEAFLREGLLMRGLNHPNVLALIGIMLPPEGLPHVLLPYMCHGDLLQFIRSPQRNPTVKDLISFGLQVARGMEYLAEQKFVHRDLAARNCMLDESFTVKVADFGLARDILDREYYSVQQHRHARLPVKWMALESLQTYRFTTKSDVWSFGVLLWELLTRGAPPYRHIDPFDLTHFLAQGRRLPQPEYCPDSLYQVMQQCWEADPAVRPTFRVLVGEVEQIVSALLGDHYVQLPATYMNLGPSTSHEMNVRPEQPQFSPMPGNVRRPRPLSEPPRPT

SEQ ID NO: 956 - protein, 1166 aa, Homo sapiens
MDGRTPRPQDAPARRKPKAKAPLPPAETKYTDVSSAADSVESTAFIMEQKENMIDKDVELSVVLPGDIIKSTTVHGSKPMMDLLIFLCAQYHLNPSSYTIDLLSAEQNHIKFKPNTPIGMLEVEKVILKPKMLDKKKPTPIIPEKTVRVVINFKKTQKTIVRVSPHASLQELAPIICSKCEFDPLHTLLLKDYQSQEPLDLTKSLNDLGLRELYAMDVNRESCQISQNLDIMKEKENKGFFSFFQRSKKKRDQTASAPATPLVNKHRPTFTRSNTISKPYISNTLPSDAPKKRRAPLPPMPASQSVPQDLAHIQERPASCIVKSMSVDETDKSPCEAGRVRAGSLQLSSMSAGNSSLRRTKRKAPSPPSKIPPHQSDENSRVTALQPVDGVPPDSASEANSPEELSSPETFHPGLSSQEQCTAPKLMEETSVFECPGTPEAAITSLTSGISSDYSLEEIDEKEELSEVPKVEAENISPKSQDIPFVSTDIINTLKNDPDSALGNGSGEFSQNSMEEKQETKSTDGQEPHSVVYDTSNGKKVVDSIRNLKSLGPNQENVQNEIIVYPENTEDNMKNGVKKTEINVEGVAKNNNIDMEVERPSNSEAHETDTAISYKENHLAASSVPDQKLNQPSAEKTKDAAIQTTPSCNSFDGKHQDHNLSDSKVEECVQTSNNNISTQHSCLSSQDSVNTSREFRSQGTLIIHSEDPLTVKDPICAHGNDDLLPPVDRIDKNSTASYLKNYPLYRQDYNPKPKPSNEITREYIPKIGMTTYKIVPPKSLEISKDWQSETIEYKDDQDMHALGKKHTHENVKETAIQTEDSAISESPEEPLPNLKPKPNLRTEHQVPSSVSSPDDAMVSPLKPAPKMTRDTGTAPFAPNLEEINNILESKFKSRASNAQAKPSSFFLQMQKRVSGHYVTSAAAKSVHAAPNPAPKELTNKEAERDMLPSPEQTLSPLSKMPHSVPQPLVEKTDDDVIGQAPAEASPPPIAPKPVTIPASQVSTQNLKTLKTFGAPRPYSSSGPSPFALAVVKRSQSFSKERTESPSASALVQPPANTEEGKTHSVNKFVDIPQLGVSDKENNSAHNEQNSQIPTPTDGPSFTVMRQSSLTFQSSDPEQMRQSLLTAIRSGEAAAKLKRVTIPSNTISVNGRSRLSHSMSPDAQDGH

SEQ ID NO: 957 - protein, 984 aa, Homo sapiens
METKGYHSLPEGLDMERRWGQVSQAVERSSLGPTERTDENNYMEIVNVSCVSGAIPNNSTQGSSKEKQELLPCLQQDNNRPGILTSDIKTELESKELSATVAESMGLYMDSVRDADYSYEQQNQQGSMSPAKIYQNVEQLVKFYKGNGHRPSTLSCVNTPLRSFMSDSGSSVNGGVMRAVVKSPIMCHEKSPSVCSPLNMTSSVCSPAGINSVSSTTASFGSFPVHSPITQGTPLTCSPNVENRGSRSHSPAHASNVGSPLSSPLSSMKSSISSPPSHCSVKSPVSSPNNVTLRSSVSSPANINNSRCSVSSPSNTNNRSTLSSPAASTVGSICSPVNNAFSYTASGTSAGSSTLRDVVPSPDTQEKGAQEVPFPKTEEVESAISNGVTGQLNIVQYIKPEPDGAFSSSCLGGNSKINSDSSFSVPIKQESTKHSCSGTSFKGNPTVNPFPFMDGSYFSFMDDKDYYSLSGILGPPVPGFDGNCEGSGFPVGIKQEPDDGSYYPEASIPSSAIVGVNSGGQSFHYRIGAQGTISLSRSARDQSFQHLSSFPPVNTLVESWKSHGDLSSRRSDGYPVLEYIPENVSSSTLRSVSTGSSRPSKICLVCGDEASGCHYGVVTCGSCKVFFKRAVEGQHNYLCAGRNDCIIDKIRRKNCPACRLQKCLQAGMNLGARKSKKLGKLKGIHEEQPQQQQPPPPPPPPQSPEEGTTYIAPAKEPSVNTALVPQLSTISRALTPSPVMVLENIEPEIVYAGYDSSKPDTAENLLSTLNRLAGKQMIQVVKWAKVLPGFKNLPLEDQITLIQYSWMCLSSFALSWRSYKHTNSQFLYFAPDLVFNEEKMHQSAMYELCQGMHQISLQFVRLQLTFEEYTIMKVLLLLSTIPKDGLKSQAAFEEMRTNYIKELRKMVTKCPNNSGQSWQRFYQLTKLLDSMHDLVSDLLEFCFYTFRESHALKVEFPAMLVEIISDQLPKVESGNAKPLYFHRK

SEQ ID NO: 958 - protein, 147 aa, Homo sapiens
MGGCMHSTQDKSLHLEGDPNPSAAPTSTCAPRKMPKRISISKQLASVKALRKCSDLEKAIATTALIFRNSSDSDGKLEKAIAKDLLQTQFRNFAEGQETKPKYREILSELDEHTENKLDFEDFMILLLSITVMSDLLQNIRNVKIMK

SEQ ID NO: 959 - protein, 170 aa, Homo sapiens
MDEQPRLMHSHAGVGMAGHPGLSQHLQDGAGGTEGEGGRKQDIGDILQQIMTITDQSLDEAQARKHALNCHRMKPALFNVLCEIKEKTVLSIRGAQEEEPTDPQLMRLDNMLLAEGVAGPEKGGGSAAAAAAAAASGGAGSDNSVEHSDYRAKLSQIRQIYHTELEKYEQ

SEQ ID NO: 960 - protein, 500 aa, Homo sapiens
MQTKGGQTWARRALLLGILWATAHLPLSGTSLPQRLPRATGNSTQCVISPSSEFPEGFFTRQERRDGGIIIYFLIIVYMFMAISIVCDEYFLPSLEIISESLGLSQDVAGTTFMAAGSSAPELVTAFLGVFITKGDIGISTILGSAIYNLLGICAACGLLSNTVSTLSCWPLFRDCAAYTISAAAVLGIIYDNQVYWYEGALLLLIYGLYVLVLCFDIKINQYIIKKCSPCCACLAKAMERSEQQPLMGWEDEGQPFIRRQSRTDSGIFYEDSGYSQLSISLHGLSQVSEDPPSVFNMPEADLKRIFWVLSLPIITLLFLTTPDCRKKFWKNYFVITFFMSAIWISAFTYILVWMVTITGETLEIPDTVMGLTLLAAGTSIPDTIASVLVARKGKGDMAMSNIVGSNVFDMLCLGIPWFIKTAFINGSAPAEVNSRGLTYITISLNISIIFLFLAVHFNGWKLDRKLGIVCLLSYLGLATLSVLYELGIIGNNKIRGCGG

SEQ ID NO: 961 - protein, 446 aa, Homo sapiens
MEMEQEKMTMNKELSPDAAAYCCSACHGDETWSYNHPIRGRAKSRSLSASPALGSTKEFRRTRSLHGPCPVTTFGPKACVLQNPQTIMHIQDPASQRLTWNKSPKSVLVIKKMRDASLLQPFKELCTHLMEENMIVYVEKKVLEDPAIASDESFGAVKKKFCTFREDYDDISNQIDFIICLGGDGTLLYASSLFQGSVPPVMAFHLGSLGFLTPFSFENFQSQVTQVIEGNAAVVLRSRLKVRVVKELRGKKTAVHNGLGENGSQAAGLDMDVGKQAMQYQVLNEVVIDRGPSSYLSNVDVYLDGHLITTVQGDGVIVSTPTGSTAYAAAAGASMIHPNVPAIMITPICPHSLSFRPIVVPAGVELKIMLSPEARNTAWVSFDGRKRQEIRHGDSISITTSCYPLPSICVRDPVSDWFESLAQCLHWNVRKKQAHFEEEEEEEEEG

SEQ ID NO: 962 - protein, 6885 aa, Homo sapiens
MASSPELPTEDEQGSWGIDDLHISLQAEQEDTQKKAFTCWINSQLARHTSPSVISDLFTDIKKGHVLLDLLEVLSGQQLPRDKGSNTFQCRINIEHALTFLRNRSIKLINIHVTDIIDGNPSIILGLIWTIILHFHIEKLAQTLSCNYNQPSLDDVSVVDSSPASSPPAKKCSKVQARWQMSARKALLLWAQEQCATYESVNVTDFKSSWRNGMAFLAIIHALRPDLIDMKSVKHRSNKDNLREAFRIAEQELKIPRLLEPEDVDVVDPDEKSIMTYVAQFLQYSKDAPGTGEEAQGKVKDAMGWLTLQKEKLQKLLKDSENDTYFKKYNSLLSFMESFNEEKKSFLDVLSIKRDLDELDKDHLQLREAWDGLDHQINAWKIKLNYALPPPLHQTEAWLQEVEELMDEDLSASQDHSQAVTLIQEKMTLFKSLMDRFEHHSNILLTFENKDENHLPLVPPNKLEEMKRRINNILEKKFILLLEFHYYKCLVLGLVDEVKSKLDIWNIKYGSRESVELLLEDWHKFIEEKEFLARLDTSFQKCGEIYKNLAGECQNINKQYMMVKSDVCMYRKNIYNVKSTLQKVLACWATYVENLRLLRACFEETKKEEIKEVPFETLAQWNLEHATLNEAGNFLVEVSNDVVGSSISKELRRLNKRWRKLVSKTQLEMNLPLMIKKQDQPTFDNSGNILSKEEKATVEFSTDMSVELPENYNQNIKAGEKHEKENEEFTGQLKVAKDVEKLIGQVEIWEAEAKSVLDQDDVDTSMEESLKHLIAKGSMFDELMARSEDMLQMDIQNISSQESFQHVLTTGLQAKIQEAKEKVQINVVKLIAALKNLTDVSPDLDIRLKMEESQKELESYMMRAQQLLGQRESPGELISKHKEALIISNTKSLAKYLKAVEELKNNVTEDIKMSLEEKSRDVCAKWESLHHELSLYVQQLKIDIEKGKLSDNILKLEKQINKEKKLIRRGRTKGLIKEHEACFSEEGCLYQLNHHMEVLRELCEELPSQKSQQEVKRLLKDYEQKIERLLKCASEIHMTLQPTAGGTSKNEGTITTSENRGGDPHSEAPFAKSDNQPSTEKAMEPTMKFSLASVLRPLQEESIMEKDYSASINSLLERYDTYRDILEHHLQNNKFRITSDFSSEEDRSSSCLQAKLTDLQVIKNETDARWKEFEIISLKLENHVNDIKKPFVIKERDTLKERERELQMTLNTRMESLETALRLVLPVEKASLLLCGSDLPLHKMAIQGFHLIDADRIYQHLRNIQDSIAKQIEICNRLEEPGNFVLKELHPFDLHAMQNIILKYKTQFEGMNHRVQRSEDTLKALEDFLASLRTAKLSAEPVTDLSASDTQVAQENTLTVKNKEGEIHLMKDKAKHLDKCLKMLDMSFKDAERGDDTSCENLLDAFSIKLSETHGYGVQEEFTEENKLLEACIFKNNELLKNIQDVQSQISKIGLKDPTVPAVKHRKKSLIRLDKVLDEYEEEKRHLQEMANSLPHFKDGREKTVNQQCQNTVVLWENTKALVTECLEQCGRVLELLKQYQNFKSILTTLIQKEESVISLQASYMGKENLKKRIAEIEIVKEEFNEHLEVVDKINQVCKNLQFYLNKMKTFEEPPFEKEANIIVDRWLDINEKTEDYYENLGRALALWDKLFNLKNVIDEWTEKALQKMELHQLTEEDRERLKEELQVHEQKTSEFSRRVAEIQFLLQSSEIPLELQVMESSILNKMEHVQKCLTGESNCHALSGSTAELREDLDQAKTQIGMTESLLKALSPSDSLEIFTKLEEIQQQILQQKHSMILLENQIGCLTPELSELKKQYESVSDLFNTKKSVLQDHFSKLLNDQCKNFNDWFSNIKVNLKECFESSETKKSVEQKLQKLSDFLTLEGRNSKIKQVDSVLKHVKKHLPKAHVKELISWLVGQEFELEKMESICQARAKELEDSLQQLLRLQDDHRNLRKWLTNQEEKWKGMEEPGEKTELFCQALARKREQFESVAQLNNSLKEYGFTEEEEIIMEATCLMDRYQTLLRQLSEIEEEDKLLPTEDQSFNDLAHDVIHWIKEIKESLMVLNSSEGKMPLEERIQKIKEIILLKPEGDARIETIMKQAESSEAPLVQKTLTDISNQWDNTLHLASTYLSHQEKLLLEGEKYLQSKEDLRLMLIELKKKQEAGFALQHGLQEKKAQLKIYKKFLKKAQDLTSLLKELKSQGNYLLECTKNPSFSEEPWLEIKHLHESLLQQLQDSVQNLDGHVREHDSYQVCVTDLNTTLDNFSKEFVSFSDKPVDQIAVEEKLQKLQELENRLSLQDGTLKKILALAKSVKQNTSSVGQKIIKDDIKSLQCKQKDLENRLASAKQEMECCLNSILKSKRSTEKKGKFTLPGREKQATSDVQESTQESAAVEKLEEDWEINKDSAVEMAMSKQLSLNAQESMKNTEDERKVNELQNQPLELDTMLRNEQLEEIEKLYTQLEAKKAAIKPLEQTECLNKTETGALVLHNIGYSAQHLDNLLQALITLKKNKESQYCVLRDFQEYLAAVESSMKALLTDKESLKVGPLDSVTYLDKIKKFIASIEKEKDSLGNLKIKWENLSNHVTDMDKKLLESQIKQLEHGWEQVEQQIQKKYSQQVVEYDEFTTLMNKVQDTEISLQQQQQHLQLRLKSPEERAGNQSMIALTTDLQATKHGFSVLKGQAELQMKRIWGEKEKKNLEDGINNLKKQWETLEPLHLEAENQIKKCDIRNKMKETILWAKNLLGELNPSIPLLPDDILSQIRKCKVTHDGILARQQSVESLAEEVKDKVPSLTTYEGSDLNNTLEDLRNQYQMLVLKSTQRSQQLEFKLEERSNFFAIIRKFQLMVQESETLIIPRVETAATEAELKHHHVTLEASQKELQEIDSGISTHLQELTNIYEELNVFERLFLEDQLKNLKIRTNRIQRFIQNTCNEVEHKIKFCRQFHEKTSALQEEADSIQRNELLLNQEVNKGVKEEIYNLKDRLTAIKCCILQVLKLKKVFDYIGLNWDFSQLDQLQTQVFEKEKELEEKIKQLDTFEEEHGKYQALLSKMRAIDLQIKKMTEVVLKAPDSSPESRRLNAQILSQRIEKAKCLCDEIIKKLNENKTFDDSFKEKEILQIKLNAEENDKLYKVLQNMVLELSPKELDEKNCQDKLETSLHVLNQIKSQLQQPLLINLEIKHIQNEKDNCEAFQEQVWAEMCSIKAVTAIEKQREENSSEASDVETKLREFEDLQMQLNTSIDLRTNVLNDAYENLTRYKEAVTRAVESITSLEAIIIPYRVDVGNPEESLEMPLRKQEELESTVAHIQDLTEKLGMISSPEAKLQLQYTLQELVSKNSAMKEAFKAQETEAERYLENYKCYRKMEEDIYTNLSKMETVLGQSMSSLPLSYREALERLEQSKALVSNLISTKEELMKLRQILRLLRLRCTENDGICLLKIVSALWEKWLSLLEAAKEWEMWCEELKQEWKFVSEEIEREAIILDNLQEELPEISKTKEAATTEELSELLDCLCQYGENVEKQQLLLTLLLQRIRSIQNVPESSGAVETVPAFQEITSMKERCNKLLQKVQKNKELVQTEIQERHSFTKEIIALKNFFQQTTTSFQNMAFQDHPEKSEQFEELQSILKKGKLTFENIMEKLRIKYSEMYTIVPAEIESQVEECRKALEDIDEKISNEVLKSSPSYAMRRKIEEINNGLHNVEKMLQQKSKNIEKAQEIQKKMWDELDLWHSKLNELDSEVQDIVEQDPGQAQEWMDNLMIPFQQYQQVSQRAECRTSQLNKATVKMEEYSDLLKSTEAWIENTSHLLANPADYDSLRTLSHHASTVQMALEDSEQKHNLLHSIFMDLEDLSIIFETDELTQSIQELSNQVTALQQKIMESLPQIQRMADDVVAIESEVKSMEKRVSKIKTILLSKEIFDFSPEEHLKHGEVILENIRPMKKTIAEIVSYQVELRLPQTGMKPLPVFQRTNQLLQDIKLLENVTQEQNELLKVVIKQTNEWDEEIENLKQILNNYSAQFSLEHMSPDQADKLPQLQGEIERMEKQILSLNQRKEDLLVDLKATVLNLHQHLKQEQEGVERDRLPAVTSEEGGVAERDASERKLNRRGSMSYLAAVEEEVEESSVKSDNGDEKAEPSPQSWSSLWKHDKDMEEDRASSSSGTIVQEAYGKISTSDNSMAQILTPDSLNTEQGPECSLRPNQTEEGTTPPIEADTLDSSDAQGGLEPRVEKTRPEPTEVLHACKTQVAELELWLQQANVAVEPETLNADMQQVLEQQLVGCQAMLTEIEHKVAFLLETCKDQGLGDNGATQHEAEALSLKLKTVKCNLEKVQMMLQEKHSEDQHPTILKKSSEPEHQEALQPVNLSELESIVTERPQFSRQKDFQQQQVLELKPMEQKDFIKFIEFNAKKMWPQYCQHDNDTTQESSASNQASSPENDVPDSILSPQGQNGDKWQYLHHELSSKIKLPLPQLVEPQVSTNMGILPSVTMYNFRYPTTEELKTYTTQLEDLRQEASNLQTQENMTEEAYINLDKKLFELFLTLSQCLSSVEEMLEMPRLYREDGSGQQVHYETLALELKKLYLALSDKKGDLLKAMTWPGENTNLLLECFDNLQVCLEHTQAAAVCRSKSLKAGLDYNRSYQNEIKRLYHQLIKSKTSLQQSLNEISGQSVAEQLQKADAYTVELENAESRVAKLRDEGERLHLPYALLQEVYKLEDVLDSMWGMLRARYTELSSPFVTESQQDALLQGMVELVKIGKEKLAHGHLKQTKSKVALQAQIENHKVFFQKLVADMLLIQAYSAKILPSLLQNRETFWAEQVTEVKILEEKSRQCGMKLQSLLQKWEEFDENYASLEKDLEILISTLPSVSLVEETEERLVERISFYQQIKRNIGGKHARLYQTLNEGKQLVASVSCPELEGQIAKLEEQWLSLNKKIDHELHRLQALLKHLLSYNRDSDQLTKWLESSQHTLNYWKEQSLNVSQDLDTIRSNINNFFEFSKEVDEKSSLKTAVISIGNQLLHLKETDTATLRASLAQFEQKWTMLITQLPDIQEKLHQLQMEKLPSRKAITEMISWMNNVEHQTSDEDSVHSPSSASQVKHLLQKHKEFRMEMDYKQWIVDFVNQSLLQLSTCDVESKRYERTEFAEHLGEMNRQWHRVHGMLNRKIQHLEQLLESITESENKIQILNNWLEAQEERLKTLQKPESVISVQKLLLDCQDIENQLAIKSKALDELKQSYLTLESGAVPLLEDTASRIDELFQKRSSVLTQVNQLKTSMQSVLQEWKIYDQLYDEVNMMTIRFWYCMEHSKPVVLSLETLRCQVENLQSLQDEAESSEGSWEKLQEVIGKLKGLCPSVAEIIEEKCQNTHKRWTQVNQAIADQLQKAQSLLQLWKAYSNAHGEAAARLKQQEAKFQQLANISMSGNNLAEILPPALQDIKELQHDVQKTKEAFLQNSSVLDRLPQPAESSTHMLLPGPLHSLQRAAYLEKMLLVKANEFEFVLSQFKDFGVRLESLKGLIMHEEENLDRLHQQEKENPDSFLNHVLALTAQSPDIEHLNEVSLKLPLSDVAVKTLQNMNRQWIRATATALERCSELQGIGLNEKFLYCCEKWIQLLEKIEEALKVDVANSLPELLEQQKTYKMLEAEVSINQTIADSYVTQSLQLLDTTEIENRPEFITEFSKLTDRWQNAVQGVRQRKGDVDGLVRQWQDFTTSVENLFRFLTDTSHLLSAVKGQERFSLYQTRSLIHELKNKEIHFQRRRTTCALTLEAGEKLLLTTDLKTKESVGRRISQLQDSWKDMEPQLAEMIKQFQSTVETWDQCEKKIKELKSRLQVLKAQSEDPLPELHEDLHNEKELIKELEQSLASWTQNLKELQTMKADLTRHVLVEDVMVLKEQIEHLHRQWEDLCLRVAIRKQEIEDRLNTWVVFNEKNKELCAWLVQMENKVLQTADISIEEMIEKLQKDCMEEINLFSENKLQLKQMGDQLIKASNKSRAAEIDDKLNKINDRWQHLFDVIGSRVKKLKETFAFIQQLDKNMSNLRTWLARIESELSKPVVYDVCDDQEIQKRLAEQQDLQRDIEQHSAGVESVFNICDVLLHDSDACANETECDSIQQTTRSLDRRWRNICAMSMERRMKIEETWRLWQKFLDDYSRFEDWLKSAERTAACPNSSEVLYTSAKEELKRFEAFQRQIHERLTQLELINKQYRRLARENRTDTASRLKQMVHEGNQRWDNLQRRVTAVLRRLRHFTNQREEFEGTRESILVWLTEMDLQLTNVEHFSESDADDKMRQLNGFQQEITLNTNKIDQLIVFGEQLIQKSEPLDAVLIEDELEELHRYCQEVFGRVSRFHRRLTSCTPGLEDEKEASENETDMEDPREIQTDSWRKRGESEEPSSPQSLCHLVAPGHERSGCETPVSVDSIPLEWDHTGDVGGSSSHEEDEEGPYYSALSGKSISDGHSWHVPDSPSCPEHHYKQMEGDRNVPPVPPASSTPYKPPYGKLLLPPGTDGGKEGPRVLNGNPQQEDGGLAGITEQQSGAFDRWEMIQAQELHNKLKIKQNLQQLNSDISAITTWLKKTEAELEMLKMAKPPSDIQEIELRVKRLQEILKAFDTYKALVVSVNVSSKEFLQTESPESTELQSRLRQLSLLWEAAQGAVDSWRGGLRQSLMQCQDFHQLSQNLLLWLASAKNRRQKAHVTDPKADPRALLECRRELMQLEKELVERQPQVDMLQEISNSLLIKGHGEDCIEAEEKVHVIEKKLKQLREQVSQDLMALQGTQNPASPLPSFDEVDSGDQPPATSVPAPRAKQFRAVRTTEGEEETESRVPGSTRPQRSFLSRVVRAALPLQLLLLLLLLLACLLPSSEEDYSCTQANNFARSFYPMLRYTNGPPPT

SEQ ID NO: 963 - protein, 152 aa, Homo sapiens
MCSLPMARYYIIKYADQKALYTRDGQLLVGDPVADNCCAEKICILPNRGLARTKVPIFLGIQGGSRCLACVETEEGPSLQLEDVNIEELYKGGEEATRFTFFQSSSGSAFRLEAAAWPGWFLCGPAEPQQPVQLTKESEPSARTKFYFEQSW

SEQ ID NO: 964 - protein, 519 aa, Homo sapiens
MDLVGVASPEPGTAAAWGPSKCPWAIPQNTISCSLADVMSEQLAKELQLEEEAAVFPEVAVAEGPFITGENIDTSSDLMLAQMLQMEYDREYDAQLRREEKKFNGDSKVSISFENYRKVHPYEDSDSSEDEVDWQDTRDDPYRPAKPVPTPKKGFIGKGKDITTKHDEVVCGRKNTARMENFAPEFQVGDGIGMDLKLSNHVFNALKQHAYSEERRSARLHEKKEHSTAEKAVDPKTRLLMYKMVNSGMLETITGCISTGKESVVFHAYGGSMEDEKEDSKVIPTECAIKVFKTTLNEFKNRDKYIKDDFRFKDRFSKLNPRKIIRMWAEKEMHNLARMQRAGIPCPTVVLLKKHILVMSFIGHDQVPAPKLKEVKLNSEEMKEAYYQTLHLMRQLYHECTLVHADLSEYNMLWHAGKVWLIDVSQSVEPTHPHGLEFLFRDCRNVSQFFQKGGVKEALSERELFNAVSGLNITADNEADFLAEIEALEKMNEDHVQKNGRKAASFLKDDGDPPLLYDE

SEQ ID NO: 965 - protein, 1028 aa, Homo sapiens
MRLLWKLVILLPLINSSAGDGLLSRPIFTQEPHDVIFPLDLSKSEVILNCAANGYPSPHYRWKQNGTDIDFTMSYHYRLDGGSLAINSPHTDQDIGMYQCLATNLLGTILSRKAKLQFAYIEDFETKTRSTVSVREGQGVVLLCGPPPHFGDLSYAWTFNDNPLYVQEDNRRFVSQETGNLYIAKVEPSDVGNYTCFITNKEAQRSVQGPPTPLVQRTDGVMGEYEPKIEVRFPETIQAAKDSSVKLECFALGNPVPDISWRRLDGSPLPGKVKYSKSQAILEIPNFQQEDEGFYECIASNLRGRNLAKGQLIFYAPPEWEQKIQNTHLSIYDNLLWECKASGKPNPWYTWLKNGERLNPEERIQIENGTLIITMLNVSDSGVYQCAAENKYQIIYANAELRVLASAPDFSKSPVKKKSFVQVGGDIVIGCKPNAFPRAAISWKRGTETLRQSKRIFLLEDGSLKIYNITRSDAGSYTCIATNQFGTAKNTGSLIVKERTVITVPPSKMDVTVGESIVLPCQVSHDPSIEVVFVWFFNGDVIDLKKGVAHFERIGGESVGDLMIRNIQLHHSGKYLCTVQTTLESLSAVADIIVRGPPGPPEDVQVEDISSTTSQLSWRAGPDNNSPIQIFTIQTRTPFSVGWQAVATVPEILNGKTYNATVVGLSPWVEYEFRVVAGNSIGIGEPSEPSELLRTKASVPVVAPVNIHGGGGSRSELVITWESIPEELQNGEGFGYIIMFRPVGSTTWSKEKVSSVESSRFVYRNESIIPLSPFEVKVGVYNNEGEGSLSTVTIVYSGEDEPQLAPRGTSLQSFSASEMEVSWNAIAWNRNTGRVLGYEVLYWTDDSKESMIGKIRVSGNVTTKNITGLKANTIYFASVRAYNTAGTGPSSPPVNVTTKKSPPSQPPANIAWKLTNSKLCLNWEHVKTMENESEVLGYKILYRQNRQSKTHILETNNTSAELLVPFEEDYLIEIRTVSDGGDGSSSEEIRIPKMSSLSSRGIQFLEPSTHFLSIVIVIFHCFAIQPLI

SEQ ID NO: 966 - protein, 1218 aa, Homo sapiens
MEENSKKDHRALLNQGEEDELEVFGYRDHNVRKAFCLVASVLTCGGLLLVFYWRPQWRVWANCIPCPLQEADTVLLRTTDEFQRYMRKKVFCLYLSTLKFPVSKKWEESLVADRHSVINQALIKPELKLRCMEVQKIRYVWNDLEKRFQKVGLLEDSNSCSDIHQTFGLGLTSEEQEVRRLVCGPNAIEVEIQPIWKLLVKQVLNPFYVFQAFTLTLWLSQGYIEYSVAIIILTVISIVLSVYDLRQQSVKLHNLVEDHNKVQVTIIVKDKGLEELESRLLVPGDILILPGKFSLPCDAVLIDGSCVVNEGMLTGESIPVTKTPLPQMENTMPWKCHSLEDYRKHVLFCGTEVIQVKPSGQGPVRAVVLQTGYNTAKGDLVRSILYPRPLNFKLYSDAFKFIVFLACLGVMGFFYALGVYMYHGVPPKDTVTMALILLTVTVPPVLPAALTIGNVYAQKRLKKKKIFCISPQRINMCGQINLVCFDKTGTLTEDGLDLWGTVPTADNCFQEAHSFASGQAVPWSPLCAAMASCHSLILLNGTIQGDPLDLKMFEGTAWKMEDCIVDSCKFGTSVSNIIKPGPKASKSPVEAIITLCQFPFSSSLQRMSVIAQLAGENHFHVYMKGAPEMVARFCRSETVPKNFPQELRSYTVQGFRVIALAHKTLKMGNLSEVEHLAREKVESELTFLGLLIMENRLKKETKLVLKELSEARIRTVMITGDNLQTAITVAKNSEMIPPGSQVIIVEADEPEEFVPASVTWQLVENQETGPGKKEIYMHTGNSSTPRGEGGSCYHFAMSGKSYQVIFQHFNSLLPKILVNGTVFARMSPGQKSSLIEEFQKLNYYVGMCGDGANDCGALKAAHAGISLSEQEASVASPFTSKTTNIQCVPHLIREGRAALVSSFGVFKYLTMYGIIQFISALLLYWQLQLFGNYQYLMQDVAITLMVCLTMSSTHAYPKLAPYRPAGQLLSPPLLLSIFLNSCFSCIVQISAFLYVKQQPWYCEVYQYSECFLANQSNFSTNVSLERNWTGNATLIPGSILSFETTTLWPITTINYITVAFIFSKGKPFRKPIYTNYIFSFLLLAALGLTIFILFSDFQVIYRGMELIPTITSWRVLILVVALTQFCVAFFVEDSILQNHELWLLIKREFGFYSKSQYRTWQKKLAEDSTWPPINRTDYSGDGKNGFYINGGYESHEQIPKRKLKLGGQPTEQHFWARL

SEQ ID NO: 967 - protein, 1188 aa, Homo sapiens
MGPRKKSVKTCIMNNEIPEEMTADETKDYMNQLSHEVLCHIFRYLPLQDIMCMECLSRKLKEAVTLYLRVVRVVDLCAGRWWEYMPSGFTDASFLTLLKKMPDVEQLYGLHPRYLERRRVRGHEAFSIPGVLEALQACPNLVGVETSHLELVESIWTYMPHVHILGKFRNRNGAFPIPPENKLKIPIGAKIQTLHLVGVNVPEIPCIPMLRHLYMKWVRLTKPQPFKDFLCISLRTFVMRNCAGPTNSLKYVPLVTGLASARNLEHLEMVRVPFLGGLIQHVVEDSWRSGGFRNLHTIVLGACKNALEVDLGYLIITAARRLHEVRIQPSLTKDGVFSALKMAELEFPQFETLHLGYVDEFLLQSRMANADLVKYGLADVVENPGIITDIGMKAVNEVFSCIKYLAIYNCPHLHNPYNWISDHSRWTRLVDINLVRCHALKLDSFGQFIELLPSLEFISLDQMFREPPKGCARVGLSAGTGIGVSSALVSNQNSNNDDNNAQNNNANIHDNNHHHPDDSDEENDFRQDLQPGEQQFAADALNEMEDIVQEDGEVVAESGNNTPAHSQAIIPVDVDEEQAGPSGLQRVVKPTSITVHDSESDDEEDSLELQEVWIPKNGTRRYSEREEKTGESVQSRELSVSGKGKTPLRKRYNSHQMGQSKQFPLEESSCEKGCQVTSEQIKADMKAARDIPEKKKNKDVYPSCSSTTASTVGNSSSHNTASQSPDFVRTVNSGGSSEPSPTEVDVSRQCACSPGGSEDSEAMEEGDAESSVCPRCCCHRPQESQRRTSRCSDEERPSTSRACVVNGPDGTRSAFSFRTLPQGGSSGPAHDERTNGSGSGATGEDRRGSSQPESCDVQSNEDYPRRPLTRARSRLSHVLLVSESEVAKTKPRHAMKRKRTADKSTSTSDPVIEDDHVQVLVLKSKNLVGVTMTNCGITDLVLKDCPKMMFIHATRCRVLKHLKVENAPIVNRFDYAQCKKLNMDQVLDQILRMPPERNRIIYLRPMQQVDTLTLEQKLFSGPYPYHICIIHEFSNPPNVRNKVRIRSWMDTIANINQELIKYEFFPEATRSEEDLKKYPKYPWGREIYTLEGVVDGAPYSMISDFPWLRSLRAAEPNSFARYDFEDDEESTIYAPRRKGQLSADICMETIGEEISEMRQMKKGVFQRVVAIFIHYCDVNGEPVEDDYI

SEQ ID NO: 968 - protein, 799 aa, Homo sapiens
MNLGKELSNETHVSNDQQSATVSDGELTGADLKDCVSNNSLSSNASLPSVQSCRRLRERRVASWAVSFERLLQDPVGVRYFSDFLRKEFSEENILFWQACEYFNHVPAHDKKELSYRAREIFSKFLCSKATTPVNIDSQAQLADDVLRAPHPDMFKEQQLQIFNLMKFDSYTRFLKSPLYQECILAEVEGRALPDSQQVPSSPASKHSLGSDHSSVSTPKKLSGKSKSGRSLNEELGDEDSEKKRKGAFFSWSRTRSTGRSQKKREHGDHADDALHANGGLCRRESQGSVSSAGSLDLSEACRTLAPEKDKATKHCCIHLPDGTSCVVAVKAGFSIKDILSGLCERHGINGAAADLFLVGGDKPLVLHQDSSILESRDLRLEKRTLFRLDLVPINRSVGLKAKPTKPVTEVLRPVVARYGLDLSGLLVRLSGEKEPLDLGAPISSLDGQRVVLEEKDPSRGKASADKQKGVPVKQNTAVNSSSRNHSATGEERTLGKSNSIKIKGENGKNARDPRLSKREESIAKIGKKKYQKINLDEAEEFFELISKAQSNRADDQRGLLRKEDLVLPEFLRLPPGSTELTLPTPAAVAKGFSKRSATGNGRESASQPGEQWEPVQESSDSPSTSPGSASSPPGPPGTTPPGQKSPSGPFCTPQSPVSLAQEGTAQIWKRQSQEVEAGGIQTVEDEHVAELTLMGEGDISSPNSTLLPPPSTPQEVPGPSRPGSGTHGSRDLPVNRIIDVDLVTGSAPGRDGGIAGAQAGPGRSQASGGPPTSDLPGLGPVPGEPAKPKTSAHHATFV

SEQ ID NO: 969 - protein, 251 aa, Homo sapiens
MIYTMKKVHALWASVCLLLNLAPAPLNADSEEDEEHTIITDTELPPLKLMHSFCAFKADDGPCKAIMKRFFFNIFTRQCEEFIYGGCEGNQNRFESLEECKKMCTRDNANRIIKTTLQQEKPDFCFLEEDPGICRGYITRYFYNNQTKQCERFKYGGCLGNMNNFETLEECKNICEDGPNGFQVDNYGTQLNAVNNSLTPQSTKVPSLFVTKEGTNDGWKNAAHIYQVFLNAFCIHASMFFLGLDSISCLC

SEQ ID NO: 970 - protein, 570 aa, Homo sapiens
MGFLQLLVVAVLASEHRVAGAAEVFGNSSEGLIEFSVGKFRYFELNRPFPEEAILHDISSNVTFLIFQIHSQYQNTTVSFSPTLLSNSSETGTASGLVFILRPEQSTCTWYLGTSGIQPVQNMAILLSYSERDPVPGGCNLEFDLDIDPNIYLEYNFFETTIKFAPANLGYARGVDPPPCDAGTDQDSRWRLQYDVYQYFLPENDLTEEMLLKHLQRMVSVPQVKASALKVVTLTANDKTSVSFSSLPGQGVIYNVIVWDPFLNTSAAYIPAHTYACSFEAGEGSCASLGRVSSKVFFTLFALLGFFICFFGHRFWKTELFFIGFIIMGFFFYILITRLTPIKYDVNLILTAVTGSVGGMFLVAVWWRFGILSICMLCVGLVLGFLISSVTFFTPLGNLKIFHDDGVFWVTFSCIAILIPVVFMGCLRILNILTCGVIGSYSVVLAIDSYWSTSLSYITLNVLKRALNKDFHRAFTNVPFQTNDFIILAVWGMLAVSGITLQIRRERGRPFFPPHPYKLWKQERERRVTNILDPSYHIPPLRERLYGRLTQIKGLFQKEQPAGERTPLLL

SEQ ID NO: 971 - protein, 173 aa, Homo sapiens
MHWKMLLLLLLYYNAEASMCHRWSRAVLFPAAHRPKRSSSLPLNPVLQTSLEEVELLYEFLLAELEISPDLQISIKDEELASLRKASDFRTVCNNVIPKSIPDIRRLSASLSSHPGILKKEDFERTVLTLAYTAYRTALSHGHQKDIWAQSLVSLFQALRHDLMRSSQPGVPP

SEQ ID NO: 972 - protein, 508 aa, Homo sapiens
MPPKRNEKYKLPIPFPEGKVLDDMEGNQWVLGKKIGSGGFGLIYLAFPTNKPEKDARHVVKVEYQENGPLFSELKFYQRVAKKDCIKKWIERKQLDYLGIPLFYGSGLTEFKGRSYRFMVMERLGIDLQKISGQNGTFKKSTVLQLGIRMLDVLEYIHENEYVHGDIKAANLLLGYKNPDQVYLADYGLSYRYCPNGNHKQYQENPRKGHNGTIEFTSLDAHKGVALSRRSDVEILGYCMLRWLCGKLPWEQNLKDPVAVQTAKTNLLDELPQSVLKWAPSGSSCCEIAQFLVCAHSLAYDEKPNYQALKKILNPHGIPLGPLDFSTKGQSINVHTPNSQKVDSQKAATKQVNKAHNRLIEKKVHSERSAESCATWKVQKEEKLIGLMNNEAAQESTRRRQKYQESQEPLNEVNSFPQKISYTQFPNSFYEPHQDFTSPDIFKKSRSPSWYKYTSTVSTGITDLESSTGLWPTISQFTLSEETNADVYYYRIIIPVLLMLVFLALFFL

SEQ ID NO: 973 - protein, 685 aa, Homo sapiens
MDHAEENEILAATQRYYVERPIFSHPVLQERLHTKDKVPDSIADKLKQAFTCTPKKIRNIIYMFLPITKWLPAYKFKEYVLGDLVSGISTGVLQLPQGLAFAMLAAVPPIFGLYSSFYPVIMYCFLGTSRHISIGPFAVISLMIGGVAVRLVPDDIVIPGGVNATNGTEARDALRVKVAMSVTLLSGIIQFCLGVCRFGFVAIYLTEPLVRGFTTAAAVHVFTSMLKYLFGVKTKRYSGIFSVVYSTVAVLQNVKNLNVCSLGVGLMVFGLLLGGKEFNERFKEKLPAPIPLEFFAVVMGTGISAGFNLKESYNVDVVGTLPLGLLPPANPDTSLFHLVYVDAIAIAIVGFSVTISMAKTLANKHGYQVDGNQELIALGLCNSIGSLFQTFSISCSLSRSLVQEGTGGKTQLAGCLASLMILLVILATGFLFESLPQAVLSAIVIVNLKGMFMQFSDLPFFWRTSKIELTIWLTTFVSSLFLGLDYGLITAVIIALLTVIYRTQSPSYKVLGKLPETDVYIDIDAYEEVKEIPGIKIFQINAPIYYANSDLYSNALKRKTGVNPAVIMGARRKAMRKYAKEVGNANMANATVVKADAEVDGEDATKPEEEDGEVKYPPIVIKSTFPEEMQRFMPPGDNVHTVILDFTQVNFIDSVGVKTLAGIVKEYGDVGIYVYLAGCSAFIQR

SEQ ID NO: 974 - protein, 398 aa, Homo sapiens
MSIVTVQLGQCGNQIGFEVFDALLSDSHSSQGLCSMRENEAYQASCKERFFSEEENGVPIARAVLVDMEPKVINQMLSKAAQSGQWKYGQHACFCQKQGSGNNWAYGYSVHGPRHEESIMNIIRKEVEKCDSFSGFFIIMSMAGGTGSGLGAFVTQNLEDQYSNSLKMNQIIWPYGTGEVIVQNYNSILTLSHLYRSSDALLLHENDAIHKICAKLMNIKQISFSDINQVLAHQLGSVFQPTYSAESSFHYRRNPLGIDRHVWPPLSGLPPLSKMSLNKDLHFNTSIANLVILRGKDVQSADVEGFKDPALYTSWLKPVNAFNVWKTQRAFSKYEKSAVLVSNSQFLVKPLDMIVGKAWNMFASKAYIHQYTKFGIEEEDFLDSFTSLEQVVASYCNL

SEQ ID NO: 975 - protein, 1483 aa, Homo sapiens
MAPLLGRKPFPLVKPLPGEEPLFTIPHTQEAFRTREEYEARLERYSERIWTCKSTGSSQLTHKEAWEEEQEVAELLKEEFPAWYEKLVLEMVHHNTASLEKLVDTAWLEIMTKYAVGEECDFEVGKEKMLKVKIVKIHPLEKVDEEATEKKSDGACDSPSSDKENSSQIAQDHQKKETVVKEDEGRRESINDRARRSPRKLPTSLKKGERKWAPPKFLPHKYDVKLQNEDKIISNVPADSLIRTERPPNKEIVRYFIRHNALRAGTGENAPWVVEDELVKKYSLPSKFSDFLLDPYKYMTLNPSTKRKNTGSPDRKPSKKSKTDNSSLSSPLNPKLWCHVHLKKSLSGSPLKVKNSKNSKSPEEHLEEMMKMMSPNKLHTNFHIPKKGPPAKKPGKHSDKPLKAKGRSKGILNGQKSTGNSKSPKKGLKTPKTKMKQMTLLDMAKGTQKMTRAPRNSGGTPRTSSKPHKHLPPAALHLIAYYKENKDREDKRSALSCVISKTARLLSSEDRARLPEELRSLVQKRYELLEHKKRWASMSEEQRKEYLKKKREELKKKLKEKAKERREKEMLERLEKQKRYEDQELTGKNLPAFRLVDTPEGLPNTLFGDVAMVVEFLSCYSGLLLPDAQYPITAVSLMEALSADKGGFLYLNRVLVILLQTLLQDEIAEDYGELGMKLSEIPLTLHSVSELVRLCLRRSDVQEESEGSDTDDNKDSAAFEDNEVQDEFLEKLETSEFFELTSEEKLQILTALCHRILMTYSVQDHMETRQQMSAELWKERLAVLKEENDKKRAEKQKRKEMEAKNKENGKVENGLGKTDRKKEIVKFEPQVDTEAEDMISAVKSRRLLAIQAKKEREIQEREMKVKLERQAEEERIRKHKAAAEKAFQEGIAKAKLVMRRTPIGTDRNHNRYWLFSDEVPGLFIEKGWVHDSIDYRFNHHCKDHTVSGDEDYCPRSKKANLGKNASMNTQHGTATEVAVETTTPKQGQNLWFLCDSQKELDELLNCLHPQGIRESQLKERLEKRYQDIIHSIHLARKPNLGLKSCDGNQELLNFLRSDLIEVATRLQKGGLGYVEETSEFEARVISLEKLKDFGECVIALQASVIKKFLQGFMAPKQKRRKLQSEDSAKTEEVDEEKKMVEEAKVASALEKWKTAIREAQTFSRMHVLLGMLDACIKWDMSAENARCKVCRKKGEDDKLILCDECNKAFHLFCLRPALYEVPDGEWQCPACQPATARRNSRGRNYTEESASEDSEDDESDEEEEEEEEEEEEEDYEVAGLRLRPRKTIRGKHSVIPPAARSGRRPGKKPHSTRRSQPKAPPVDDAEVDELVLQTKRSSRRQSLELQKCEEILHKIVKYRFSWPFREPVTRDEAEDYYDVITHPMDFQTVQNKCSCGSYRSVQEFLTDMKQVFTNAEVYNCRGSHVLSCMVKTEQCLVALLHKHLPGHPYVRRKRKKFPDRLAEDEGDSEPEAVGQSRGRRQKK

SEQ ID NO: 976 - protein, 336 aa, Homo sapiens
MSRSVLEALTSSTAMQCVPSDGCAMLLRVRASITLHERLRGLEACAMSLDTQETQCQSVWVARASHRQQGGQQLQVHFGCFAVSVAQHLYVTLRTIPHFCGVQLDQRHLVEAGKLSYWVDRRRKAILVQVPRASGSPDYYLRLCLKRFTCEDAGAPVRVTANSVSQAVFLPYSQELPCLCLEGWSATPDAVRIQICPFENDTEALEVLWDTVYYHPESQTLSWEPACPVSGHVSLCWRPGPGAGCRKLQQSSQLVHRRVQYPLVDTQPQLCLKFSTSWGSWVRCPFEQRRFPTPPTSRCTCVTGGSHSSLPANAHSRPARSLQPQVTWQPPLLLPS

SEQ ID NO: 977 - protein, 383 aa, Homo sapiens
MEGSSSYEVPSVAAADLEEGAGQTRSLPATPSKDVHKGVGGIIFSSSPILDLSESGLCRLEEVFRIPSLQQLHLQRNALCVIPQDFFQLLPNLTWLDLRYNRIKALPSGIGAHQHLKTLLLERNPIKMLPVELGSVTTLKALNLRHCPLEFPPQLVVQKGLVAIQRFLRMWAVEHSLPRNPTSQEAPPVREMTLRDLPSPGLELSGDHASNQGAVNAQDPEGAVMKEKASFLPPVEKPDLSELRKSADSSENWPSEEEIRRFWKLRQEIVEHVKADVLGDQLLTRELPPNLKAALNIEKELPKPRHVFRTRVPRKQALQRLHERKTRIMGVVGRAPTHMGEGRQPPPGASYPTSCHRTKWRSEQKDWKRAERRRSESSRRSRL

SEQ ID NO: 978 - protein, 219 aa, Homo sapiens
MEPLRLLILLFVTELSGAHNTTVFQGVAGQSLQVSCPYDSMKHWGRRKAWCRQLGEKGPCQRVVSTHNLWLLSFLRRWNGSTAITDDTLGGTLTITLRNLQPHDAGLYQCQSLHGSEADTLRKVLVEVLADPLDHRDAGDLWFPGESESFEDAHVEHSISRAERHVKEDDGRKSPGEVPPGTSPACILATWPPGLLVLLWQETTLPEHCFSWTLEAGTG

SEQ ID NO: 979 - protein, 2718 aa, Homo sapiens
MADEEAEQERLSCGEGGCVAELQRLGERLQELELQLRESRVPAVEAATDYCQQLCQTLLEYAEKWKTSEDPLPLLEVYTVAIQSYVKARPYLTSECENVALVLERLALSCVELLLCLPVELSDKQWEQFQTLVQVAHEKLMENGSCELHFLATLAQETGVWKNPVLCTILSQEPLDKDKAFEGPILLDMRIKHLIKTNQLSQATALAKLCSDHPEIGIKGSFKQTYLVCLCTSSPNGKLIEEISEVDCKDALEMICNLESEGDEKSALVLCTAFLSRQLQQGDMYCAWELTLFWSKLQQRVEPSIQVYLERCRQLSLLTKTVYHIFFLIKVINSETEGAGLATCIELCVKALRLESTENTEVKISICKTISCLLPDDLEVKRACQLSEFLIEPTVDAYYAVEMLYNQPDQKYDEENLPIPNSLRCELLLVLKTQWPFDPEFWDWKTLKRQCLALMGEEASIVSSIDELNDSEVYEKVVDYQEESKETSMNGLSGGVGANSGLLKDIGDEKQKKREIKQLRERGFISARFRNWQAYMQYCVLCDKEFLGHRIVRHAQKHYKDGIYSCPICAKNFNSKETFVPHVTLHVKQSSKERLAAMKPLRRLGRPPKITTTNENQKTNTVAKQEQRPIKKNSLYSTDFIVFNDNDGSDDENDDKDKSYEPEVIPVQKPVPVNEFNCPVTFCKKGFKYFKNLIAHVKGHKDNEDAKRFLEMQSKKVICQYCRRHFVSVTHLNDHLQMHCGSKPYICIQMKCKAGFNSYAELLTHRKEHQVFRAKCMFPKCGRIFSEAYLLYDHEAQHYNTYTCKFTGCGKVYRSQGELEKHLDDHSTPPEKVLPPEAQLNSSGDSIQPSEVNQNTAENIEKERSMLPSENNIENSLLADRSDAWDKSKAESAVTKQDQISASELRQANGPLSNGLENPATTPLLQSSEVAVSIKVSLNQGIEDNFGKQENSTVEGSGEALVTDLHTPVEDTCNDLCHPGFQERKEQDCFNDAHVTQNSLVNSETLKIGDLTPQNLERQVNNLMTFSVQNQAAFQNNLPTSKFECGDNVKTSSNLYNLPLKTLESIAFVPPQSDLSNSLGTPSVPPKAPVQKFSCQVEGCTRTYNSSQSIGKHMKTAHPDQYAAFKMQRKSKKGQKANNLNTPNNGKFVYFLPSPVNSSNPFFTSQTKANGNPACSAQLQHVSPPIFPAHLASVSTPLLSSMESVINPNITSQDKNEQGGMLCSQMENLPSTALPAQMEDLTKTVLPLNIDSGSDPFLPLPAESSSMSLFPSPADSGTNSVFSQLENNTNHYSSQIEGNTNSSFLKGGNGENAVFPSQVNVANNFSSTNAQQSAPEKVKKDRGRGPNGKERKPKHNKRAKWPAIIRDGKFICSRCYRAFTNPRSLGGHLSKRSYCKPLDGAEIAQELLQSNGQPSLLASMILSTNAVNLQQPQQSTFNPEACFKDPSFLQLLAENRSPAFLPNTFPRSGVTNFNTSVSQEGSEIIKQALETAGIPSTFEGAEMLSHVSTGCVSDASQVNATVMPNPTVPPLLHTVCHPNTLLTNQNRTSNSKTSSIEECSSLPVFPTNDLLLKTVENGLCSSSFPNSGGPSQNFTSNSSRVSVISGPQNTRSSHLNKKGNSASKRRKKVAPPLIAPNASQNLVTSDLTTMGLIAKSVEIPTTNLHSNVIPTCEPQSLVENLTQKLNNVNNQLFMTDVKENFKTSLESHTVLAPLTLKTENGDSQMMALNSCTTSINSDLQISEDNVIQNFEKTLEIIKTAMNSQILEVKSGSQGAGETSQNAQINYNIQLPSVNTVQNNKLPDSSPFSSFISVMPTKSNIPQSEVSHKEDQIQEILEGLQKLKLENDLSTPASQCVLINTSVTLTPTPVKSTADITVIQPVSEMINIQFNDKVNKPFVCQNQGCNYSAMTKDALFKHYGKIHQYTPEMILEIKKNQLKFAPFKCVVPTCTKTFTRNSNLRAHCQLVHHFTTEEMVKLKIKRPYGRKSQSENVPASRSTQVKKQLAMTEENKKESQPALELRAETQNTHSNVAVIPEKQLVEKKSPDKTESSLQVITVTSEQCNTNALTNTQTKGRKIRRHKKEKEEKKRKKPVSQSLEFPTRYSPYRPYRCVHQGCFAAFTIQQNLILHYQAVHKSDLPAFSAEVEEESEAGKESEETETKQTLKEFRCQVSDCSRIFQAITGLIQHYMKLHEMTPEEIESMTASVDVGKFPCDQLECKSSFTTYLNYVVHLEADHGIGLRASKTEEDGVYKCDCEGCDRIYATRSNLLRHIFNKHNDKHKAHLIRPRRLTPGQENMSSKANQEKSKSKHRGTKHSRCGKEGIKMPKTKRKKKNNLENKNAKIVQIEENKPYSLKRGKHVYSIKARNDALSECTSRFVTQYPCMIKGCTSVVTSESNIIRHYKCHKLSKAFTSQHRNLLIVFKRCCNSQVKETSEQEGAKNDVKDSDTCVSESNDNSRTTATVSQKEVEKNEKDEMDELTELFITKLINEDSTSVETQANTSSNVSNDFQEDNLCQSERQKASNLKRVNKEKNVSQNKKRKVEKAEPASAAELSSVRKEEETAVAIQTIEEHPASFDWSSFKPMGFEVSFLKFLEESAVKQKKNTDKDHPNTGNKKGSHSNSRKNIDKTAVTSGNHVCPCKESETFVQFANPSQLQCSDNVKIVLDKNLKDCTELVLKQLQEMKPTVSLKKLEVHSNDPDMSVMKDISIGKATGRGQY

SEQ ID NO: 980 - protein, 1131 aa, Homo sapiens
MAGARSRDPWGASGICYLFGSLLVELLFSRAVAFNLDVMGALRKEGEPGSLFGFSVALHRQLQPRPQSWLLVGAPQALALPGQQANRTGGLFACPLSLEETDCYRVDIDQGADMQKESKENQWLGVSVRSQGPGGKIVTCAHRYEARQRVDQILETRDMIGRCFVLSQDLAIRDELDGGEWKFCEGRPQGHEQFGFCQQGTAAAFSPDSHYLLFGAPGTYNWKGLLFVTNIDSSDPDQLVYKTLDPADRLPGPAGDLALNSYLGFSIDSGKGLVRAEELSFVAGAPRANHKGAVVILRKDSASRLVPEVMLSGERLTSGFGYSLAVADLNSDGWPDLIVGAPYFFERQEELGGAVYVYLNQGGHWAGISPLRLCGSPDSMFGISLAVLGDLNQDGFPDIAVGAPFDGDGKVFIYHGSSLGVVAKPSQVLEGEAVGIKSFGYSLSGSLDMDGNQYPDLLVGSLADTAVLFRARPILHVSHEVSIAPRSIDLEQPNCAGGHSVCVDLRVCFSYIAVPSSYSPTVDADTDRRLRGQVPRVTFLSRNLEEPKHQASGTVWLKHQHDRVCGDAMFQLQENVKDKLRAIVVTLSYSLQTPRLRRQAPGQGLPPVAPILNAHQPSTQRAEIHFLKQGCGEDKICQSNLQLVRARFCTRVSDTEFQPLPMDVDGTTALFALSGQPVIGLELMVTNLPSDPAQPQADGDDAHEAQLLVMLPDSLHYSGVRALDPAEKPLCLSNENASHVECELGNPMKRGAQVTFYLILSTSGISIETTELEVELLLATISEQELHPVSARARVFIELPLSIAGMAIPQQLFFSGVVRGERAMQSERDVGSKVKYEVTVSNQGQSLRTLGSAFLNIMWPHEIANGKWLLYPMQVELEGGQGPGQKGLCSPRPNILHLDVDSRDRRRRELEPPEQQEPGERQEPSMSWWPVSSAEKKKNITLDCARGTANCVVFSCPLYSFDRAAVLHVWGRLWNSTFLEEYSAVKSLEVIVRANITVKSSIKNLMLRDASTVIPVMVYLDPMAVVAEGVPWWVILLAVLAGLLVLALLVLLLWKMGFFKRAKHPEATVPQYHAVKIPREDRQQFKEEKTGTILRNNWGSPRREGPDAHPILAADGHPELGPDGHPGPGTA

SEQ ID NO: 981 - protein, 602 aa, Homo sapiens
MRPKRLGRCCAGSRLGPGDPAALTCAPSPSASPAPEPSAQPQARGTGQRVGSRATSGSQFLSEARTGARPASEAGAKAGARRPSAFSAIQGDVRSMPDNSDAPWTRFVFQGPFGSRATGRGTGKAAGIWKTPAAYVGRRPGVSGPERAAFIRELEEALCPNLPPPVKKITQEDVKVMLYLLEEVCTAFLIQLLPPVWESVTYGMVLQRERDLNTAARIGQSLVKQNSVLMEENSKLEALLGSAKEEILYLRHQVNLRDELLQLYSDSDEEDEDEEEEEEEKEAEEEQEEEEAEEDLQCAHPCDAPKLISQEALLHQHHCPQLEALQEKLRLLEEENHQLREEASQLDTLEDEEQMLILECVEQFSEASQQMAELSEVLVLRLENYERQQQEVARLQAQVLKLQQRCRMETLPGFQETLAEELRTSLRRMISDPVYFMERNYEMPRGDTSSLRYDFRYSEDREQVRGFEAEEGLMLAADIMRGEDFTPAEEFVPQEELGAAKKVPAEEGVMEEAELVSEETEGWEEVELELDEATRMNVVTSALEASGLGPSHLDMNYVLQQLANWQDAHYRRQLRWKMLQKGECPHGALPAASRTSCRSSCR

SEQ ID NO: 982 - protein, 423 aa, Homo sapiens
MLPPQKKPWESMAKGLVLGALFTSFLLLVYSYAVPPLHAGLASTTPEAAASCSPPALEPEAVIRANGSAGECQPRRNIVFLKTHKTASSTLLNILFRFGQKHRLKFAFPNGRNDFDYPTFFARSLVQDYRPGACFNIICNHMRFHYDEVRGLVPTNAIFITVLRDPARLFESSFHYFGPVVPLTWKLSAGDKLTEFLQDPDRYYDPNGFNAHYLRNLLFFDLGYDNSLDPSSPQVQEHILEVERRFHLVLLQEYFDESLVLLKDLLCWELEDVLYFKLNARRDSPVPRLSGELYGRATAWNMLDSHLYRHFNASFWRKVEAFGRERMAREVAALRHANERMRTICIDGGHAVDAAAIQDEAMQPWQPLGTKSILGYNLKKSIGQRHAQLCRRMLTPEIQYLMDLGANLWVTKLWKFIRDFLRW

SEQ ID NO: 983 - protein, 948 aa, Homo sapiens
MAEANNPSEQELESEPRSWSLLEQLGLAGADLAAPGVQQQLELERERLRREIRKELKLKEGAENLRRATTDLGRSLGPVELLLRGSSRRLDLLHQQLQELHAHVVLPDPAATHDGPQSPGAGGPTCSATNLSRVAGLEKQLAIELKVKQGAENMIQTYSNGSTKDRKLLLTAQQMLQDSKTKIDIIRMQLRRALQAGQLENQAAPDDTQGSPDLGAVELRIEELRHHFRVEHAVAEGAKNVLRLLSAAKAPDRKAVSEAQEKLTESNQKLGLLREALERRLGELPADHPKGRLLREELAAASSAAFSTRLAGPFPATHYSTLCKPAPLTGTLEVRVVGCRDLPETIPWNPTPSMGGPGTPDSRPPFLSRPARGLYSRSGSLSGRSSLKAEAENTSEVSTVLKLDNTVVGQTSWKPCGPNAWDQSFTLELERARELELAVFWRDQRGLCALKFLKLEDFLDNERHEVQLDMEPQGCLVAEVTFRNPVIERIPRLRRQKKIFSKQQGKAFQRARQMNIDVATWVRLLRRLIPNATGTGTFSPGASPGSEARTTGDISVEKLNLGTDSDSSPQKSSRDPPSSPSSLSSPIQESTAPELPSETQETPGPALCSPLRKSPLTLEDFKFLAVLGRGHFGKVLLSEFRPSGELFAIKALKKGDIVARDEVESLMCEKRILAAVTSAGHPFLVNLFGCFQTPEHVCFVMEYSAGGDLMLHIHSDVFSEPRAIFYSACVVLGLQFLHEHKIVYRDLKLDNLLLDTEGYVKIADFGLCKEGMGYGDRTSTFCGTPEFLAPEVLTDTSYTRAVDWWGLGVLLYEMLVGESPFPGDDEEEVFDSIVNDEVRYPRFLSAEAIGIMRRLLRRNPERRLGSSERDAEDVKKQPFFRTLGWEALLARRLPPPFVPTLSGRTDVSNFDEEFTGEAPTLSPPRDARPLTAAEQAAFLDFDFVAGGC

SEQ ID NO: 984 - protein, 429 aa, Homo sapiens
MASNSIFDSFPTYSPTFIRDPSTSRRFTPPSPAFPCGGGGGKMGENSGALSAQAAVGPGGRARPEVRSMVDVLADHAGELVRTDSPNFLCSVLPSHWRCNKTLPVAFKVVALGDVPDGTVVTVMAGNDENYSAELRNASAVMKNQVARFNDLRFVGRSGRGKSFTLTITVFTNPTQVATYHRAIKVTVDGPREPRRHRQKLEDQTKPFPDRFGDLERLRMRVTPSTPSPRGSLSTTSHFSSQPQTPIQGTSELNPFSDPRQFDRSFPTLPTLTESRFPDPRMHYPGAMSAAFPYSATPSGTSISSLSVAGMPATSRFHHTYLPPPYPGAPQNQSGPFQANPSPYHLYYGTSSGSYQFSMVAGSSSGGDRSPTRMLASCTSSAASVAAGNLMNPSLGGQSDGVEADGSHSNSPTALSTPGRMDEAVWRPY

SEQ ID NO: 985 - protein, 250 aa, Homo sapiens [sequence omitted]

SEQ ID NO: 986 - protein, 2817 aa, Homo sapiens
MSEKSGQSTKAKDGKKYATLSLFNTYKGKSLETQKTTARHGLQSLGKVGISRRMPPPANLPSLKAENKGNDPNVNIVPKDGTGWASKQEQHEEEKTPEVPPAQPKPGVAAPPEVAPAPKSWASNKQGGQGDGIQVNSQFQQEFPSLQAAGDQEKKEKETNDDNYGPGPSLRPPNVACWRDGGKAAGSPSSSDQDEKLPGQDESTAGTSEQNDILKVVEKRIACGPPQAKLNGQQAALASQYRAMMPPYMFQQYPRMTYPPLHGPMRFPPSLSETNKGLRGRGPPPSWASEPERPSILSASELKELDKFDNLDAEADEGWAGAQMEVDYTEQLNFSDDDEQGSNSPKENNSEDQGSKASENNENKKETDEVSNTKSSSQIPAQPSVAKVPYGKGPSFNQERGTSSHLPPPPKLLAQQHPPPDRQAVPGRPGPFPSKQQVADEDEIWKQRRRQQSEISAAVERARKRREEEERRMEEQRKAACAEKLKRLDEKLGILEKQPSPEEIREREREKEREREKELEKEQEQEREKEREKDRERQQEKEKELEKEQEKQREMEKERKQEKEKELERQKEKEKELQKMKEQEKECELEKEREKLEEKIEPREPNLEPMVEKQESENSCNKEEEPVFTRQDSNRSEKEATPVVHETEPESGSQPRPAVLSGYFKQFQKSLPPRFQRQQEQMKQQQWQQQQQQGVLPQTVPSQPSSSTVPPPPHRPLYQPMQPHPQHLASMGFDPRWLMMQSYMDPRMMSGRPAMDIPPIHPGMIPPKPLMRRDQMEGSPNSSESFEHIARSARDHAISLSEPRMLWGSDPYPHAEPQQATTPKATEEPEDVRSEAALDQEQITAAYSVEHNQLEAHPKADFIRESSEAQVQKFLSRSVEDVRPHHTDANNQSACFEAPDQKTLSAPQEERISAVESQPSRKRSVSHGSNHTQKPDEQRSEPSAGIPKVTSRCIDSKEPIERPEEKPKKEGFIRSSEGPKPEKVYKSKSETRWGPRPSSNRREEVNDRPVRRSGPIKKPVLRDMKEEREQRKEKEGEKAEKVTEKVVVKPEKTEKKDLPPPPPPPQPPAPIQPQSVPPPIQPEAEKFPSTETATLAQKPSQDTEKPLEPVSTVQVEPAVKTVNQQTMAAPVVKEEKQPEKVISKDLVIERPRPDSRPAVKKESTLPPRTYWKEARERDWFPDQGYRGRGRGEYYSRGRSYRGSYGGRGRGGRGHTRDYPQYRDNKPRAEHIPSGPLRQREESETRSESSDFEVVPKRRRQRGSETDTDSEIHESASDKDSLSKGKLPKREERPENKKPVKPHSSFKPDNHVRIDNRLLEKPYVRDDDKAKPGFLPKGEPTRRGRGGTFRRGGRDPGGRPSRPSTLRRPAYRDNQWNPRQSEVPKPEDGEPPRRHEQFIPIAADKRPPKFERKFDPARERPRRQRPTRPPRQDKPPRFRRLREREAASKSNEVVAVPTNGTVNNVAQEPVNTLGDISGNKTPDLSNQNSSDQANEEWETASESSDFNERRERDEKKNADLNAQTVVKVGENVLPPKREIAKRSFSSQRPVDRQNRRGNNGPPKSGRNFSGPRNERRSGPPSKSGKRGPFDDQPAGTTGVDLINGSSAHHQEGVPNGTGQKNSKDSTGKKREDPKPGPKKPKEKVDALSQFDLNNYASVVIIDDHPEVTVIEDPQSNLNDDGFTEVVSKKQQKRLQDEERRKKEEQVIQVWNKKNANEKGRSQTSKLPPRFAKKQATGIQQAQSSASVPPLASAPLPPSTSASVPASTSAPLPATLTPVPASTSAPVPASTLAPVLASTSAPVPASPLAPVSASASVSASVPASTSAAAITSSSAPASAPAPTPILASVSTPASVTILASASIPILASALASTSAPTPAPAASSPAAPVITAPTIPASAPTASVPLAPASASAPAPAPTPVSAPNPAPPAPAQTQAQTHKPVQNPLQTTSQSSKQPPPSIRLPSAQTPNGTDYVASGKSIQTPQSHGTLTAELWDNKVAPPAVLNDISKKLGPISPPQPPSVSAWNKPLTSFGSAPSSEGAKNGQESGLEIGTDTIQFGAPASNGNENEVVPVLSEKSADKIPEPKEQRQKQPRAGPIKAQKLPDLSPVENKEHKPGPIGKERSLKNRKVKDAQQVEPEGQEKPSPATVRSTDPVTTKETKAVSEMSTEIGTMISVSSAEYGTNAKESVTDYTTPSSSLPNTVATNNTKMEDTLVNNVPLPNTLPLPKRETIQQSSSLTSVPPTTFSLTFKMESARKAWENSPNVREKGSPVTSTAPPIATGVSSSASGPSTANYNSFSSASMPQIPVASVTPTASLSGAGTYTTSSLSTKSTTTSDPPNICKVKPQQLQTSSLPSASHFSQLSCMPSLIAQQQQNPQVYVSQSAAAQIPAFYMDTSHLFNTQHARLAPPSLAQQQGFQPGLSQPTSVQQIPIPIYAPLQGQHQAQLSLGAGPAVSQAQELFSSSLQPYRSQPAFMQSSLSQPSVVLSGTAIHNFPTVQHQELAKAQSGLAFQQTSNTQPIPILYEHQLGQASGLGGSQLIDTHLLQARANLTQASNLYSGQVQQPGQTNFYNTAQSPSALQQVTVPLPASQLSLPNFGSTGQPLIALPQTLQPPLQHTTPQAQAQSLSRPAQVSQPFRGLIPAGTQHSMIATTGKMSEMELKAFGSGIDIKPGTPPIAGRSTTPTSSPFRATSTSPNSQSSKMNSIVYQKQFQSAPATVRMTQPFPTQFAPQAKQRAEVLQSTQRFFSEQQQSKQIGGGKAQKVDSDSSKPPETLTDPPGVCQEKVEEKPPPAPSIATKPVRTGPIKPQAIKTEETKS

SEQ ID NO: 987 - protein, 394 aa, Homo sapiens
MIVFIFLAMGLSLENEYTSQTNNCTYLREQCLRDANGCKHAWRVMEDACNDSDPGDPCKMRNSSYCNLSIQYLVESNFQFKECLCTDDFYCTVNKLLGKKCINKSDNVKEDKFKWNLTTRSHHGFKGMWSCLEVAEACVGDVVCNAQLASYLKACSANGNPCDLKQCQAAIRFFYQNIPFNIAQMLAFCDCAQSDIPCQQSKEALHSKTCAVNMVPPPTCLSVIRSCQNDELCRRHYRTFQSKCWQRVTRKCHEDENCISTLSKQDLTCSGSDDCKAAYIDILGTVLQVQCTCRTITQSEESLCKIFQHMLHRKSCFNYPTLSNVKGMALYTRKHANKITLTGFHSPFNGEVIYAAMCMTVTCGILLLVMVKLRTSRISSKARDPSSIQIPGEL

SEQ ID NO: 988 - protein, 378 aa, Homo sapiens
MARCGEGSAAPMVLLGSAGVCSKGLQRKGPCERRRLKATVSEQLSQDLLRLLREEFHTDVTFSVGCTLFKAHKAVLLARVPDFYFHTIGQTSNSLTNQEPIAVENVEALEFRTFLQIIYSSNRNIKNYEEEILRKKIMEIGISQKQLDISFPKCENSSDCSLQKHEIPEDISDRDDDFISNDNYDLEPASELGEDLLKLYVKPCCPDIDIFVDGKRFKAHRAILSARSSYFAAMLSGCWAESSQEYVTLQGISHVELNVMMHFIYGGTLDIPDKTNVGQILNMADMYGLEGLKEVAIYILRRDYCNFFQKPVPRTLTSILECLIIAHSVGVESLFADCMKWIVKHFARFWSERSFANIPPEIQKSCLNMLIQSLVSIT

SEQ ID NO: 989 - protein, 443 aa, Homo sapiens
MYDCMETFAPGPRRLYGAAGPGAGLLRRATGGSCFAGLESFAWPQPASLQSVETQSTSSEEMVPSSPSPPPPPRVYKPCFVCNDKSSGYHYGVSSCEGCKGFFRRSIQKNMVYTCHRDKNCIINKVTRNRCQYCRLQKCFEVGMSKEAVRNDRNKKKKEVKEEGSPDSYELSPQLEELITKVSKAHQETFPSLCQLGKYTTNSSADHRVQLDLGLWDKFSELATKCIIKIVEFAKRLPGFTGLSIADQITLLKAACLDILMLRICTRYTPEQDTMTFSDGLTLNRTQMHNAGFGPLTDLVFAFAGQLLPLEMDDTETGLLSAICLICGDRMDLEEPEKVDKLQEPLLEALRLYARRRRPSQPYMFPRMLMKITDLRGISTKGAERAITLKMEIPGPMPPLIREMLENPEMFEDDSSQPGPHPNASSEDEVPGGQGKGGLKSPA

SEQ ID NO: 990 - protein, 279 aa, Homo sapiens
MRALTVQRVKFAMDLPLLKRAGQDLAEKTKNFVSRSLVIGEVLSMADMATGVKCGIIYWLFGGAIRNLGSPEHVTKWFQPLQEQKYTGMFAMTERGHGSNARGIQTEATFDLSAQEFVIDTPCENAEKMYIGNAMYGNYAAVFAQLIIDGRSQGPHCFIVPVRDENGSLYPGVTAIDMMYKEGLHGVDNGILIFDKVRIPRENLLDKFGSVAPDGQYHSPIRNKSARFNAMLAALTPSRLAVAFQAMGAMKLGLTIAIRYSHRSRIISQNCCSAPAGLY

SEQ ID NO: 991 - protein, 194 aa, Homo sapiens
MWLPQLDLMRVISAKSQGYSIVTQITGPTTVNGLERGSLTVQCVYRSGWETYLKWWCRGAIWRDCKILVKTSGSEQEVKRDRVSIKDNQKNRTFTVTMEDLMKTDADTYWCGIEKTGNDLGVTVQVTIDPAPVTQEETSSSPTLTGHHLDNSSRDVPRAGTAAPGGRPLLCRPDPAAGRNLPAKGYHEAFLCPG

SEQ ID NO: 992 - protein, 32759 aa, Homo sapiens
MTTQAPTFTQPLQSVVVLEGSTATFEAHISGFPVPEVSWFRDGQVISTSTLPGVQISFSDGRAKLTIPAVTKANSGRYSLKATNGSGQATSTAELLVKAETAPPNFVQRLQSMTVRQGSQVRLQVRVTGIPTPVVKFYRDGAEIQSSLDFQISQEGDLYSLLIAEAYPEDSGTYSVNATNSVGRATSTAELLVQGEEEVPAKKTKTIVSTAQISESRQTRIEKKIEAHFDARSIATVEMVIDGAAGQQLPHKTPPRIPPKPKSRSPTPPSIAAKAQLARQQSPSPIRHSPSPVRHVRAPTPSPVRSVSPAARISTSPIRSVRSPLLMRKTQASTVATGPEVPPPWKQEGYVASSSEAEMRETTLTTSTQIRTEERWEGRYGVQEQVTISGAAGAAASVSASASYAAEAVATGAKEVKQDADKSAAVATVVAAVDMARVREPVISAVEQTAQRTTTTAVHIQPAQEQVRKEAEKTAVTKVVVAADKAKEQELKSRTKEVITTKQEQMHVTHEQIRKETEKTFVPKVVISAAKAKEQETRISEEITKKQKQVTQEAIRQETEITAASMVVVATAKSTKLETVPGAQEETTTQQDQMHLSYEKIMKETRKTVVPKVIVATPKVKEQDLVSRGREGITTKREQVQITQEKMRKEAEKTALSTIAVATAKAKEQETILRTRETMATRQEQIQVTHGKVDVGKKAEAVATVVAAVDQARVREPREPGHLEESYAQQTTLEYGYKERISAAKVAEPPQRPASEPHVVPKAVKPRVIQAPSETHIKTTDQKGMHISSQIKKTTDLTTERLVHVDKRPRTASPHFTVSKISVPKTEHGYEASIAGSAIATLQKELSATSSAQKITKSVKAPTVKPSETRVRAEPTPLPQFPFADTPDTYKSEAGVEVKKEVGVSITGTTVREERFEVLHGREAKVTETARVPAPVEIPVTPPTLVSGLKNVTVIEGESVTLECHISGYPSPTVTWYREDYQIESSIDFQITFQSGIARLMIREAFAEDSGRFTCSAVNEAGTVSTSCYLAVQVSEEFEKETTAVTEKFTTEEKRFVESRDVVMTDTSLTEEQAGPGEPAAPYFITKPVVQKLVEGGSVVFGCQVGGNPKPHVYWKKSGVPLTTGYRYKVSYNKQTGECKLVISMTFADDAGEYTIVVRNKHGETSASASLLEEADYELLMKSQQEMLYQTQVTAFVQEPKVGETAPGFVYSEYEKEYEKEQALIRKKMAKDTVVVRTYVEDQEFHISSFEERLIKEIEYRIIKTTLEELLEEDGEEKMAVDISESEAVESGFDSRIKNYRILEGMGVTFHCKMSGYPLPKIAWYKDGKRIKHGERYQMDFLQDGRASLRIPVVLPEDEGIYTAFASNIKGNAICSGKLYVEPAAPLGAPTYIPTLEPVSRIRSLSPRSVSRSPIRMSPARMSPARMSPARMSPARMSPGRRLEETDESQLERLYKPVFVLKPVSFKCLEGQTARFDLKVVGRPMPETFWFHDGQQIVNDYTHKVVIKEDGTQSLIIVPATPSDSGEWTVVAQNRAGRSSISVILTVEAVEHQVKPMFVEKLKNVNIKEGSRLEMKVRATGNPNPDIVWLKNSDIIVPHKYPKIRIEGTKGEAALKIDSTVSQDSAWYTATAINKAGRDTTRCKVNVEVEFAEPEPERKLIIPRGTYRAKEIAAPELEPLHLRYGQEQWEEGDLYDKEKQQKPFFKKKLTSLRLKRFGPAHFECRLTPIGDPTMVVEWLHDGKPLEAANRLRMINEFGYCSLDYGVAYSRDSGIITCRATNKYGTDHTSATLIVKDEKSLVEESQLPEGRKGLQRIEELERMAHEGALTGVTTDQKEKQKPDIVLYPEPVRVLEGETARFRCRVTGYPQPKVNWYLNGQLIRKSKRFRVRYDGIHYLDIVDCKSYDTGEVKVTAENPEGVIEHKVKLEIQQREDFRSVLRRAPEPRPEFHVHEPGKLQFEVQKVDRPVDTTETKEVVKLKRAERITHEKVPEESEELRSKFKRRTEEGYYEAITAVELKSRKKDESYEELLRKTKDELLHWTKELTEEEKKALAEEGKITIPTFKPDKIELSPSMEAPKIFERIQSQTVGQGSDAHFRVRVVGKPDPECEWYKNGVKIERSDRIYWYWPEDNVCELVIRDVTAEDSASIMVKAINIAGETSSHAFLLVQAKQLITFTQELQDVVAKEKDTMATFECETSEPFVKVKWYKDGMEVHEGDKYRMHSDRKVHFLSILTIDTSDAEDYSCVLVEDENVKTTAKLIVEGAVVEFVKELQDIEVPESYSGELECIVSPENIEGKWYHNDVELKSNGKYTITSRRGRQNLTVKDVTKEDQGEYSFVIDGKKTTCKLKMKPRPIAILQGLSDQKVCEGDIVQLEVKVSLESVEGVWMKDGQEVQPSDRVHIVIDKQSHMLLIEDMTKEDAGNYSFTIPALGLSTSGRVSVYSVDVITPLKDVNVIEGTKAVLECKVSVPDVTSVKWYLNDEQIKPDDRVQAIVKGTKQRLVINRTHASDEGPYKLIVGRVETNCNLSVEKIKIIRGLRDLTCTETQNVVFEVELSHSGIDVLWNFKDKEIKPSSKYKIEAHGKIYKLTVLNMMKDDEGKYTFYAGENMTSGKLTVAGGAISKPLTDQTVAESQEAVFECEVANPDSKGEWLRDGKHLPLTNNIRSESDGHKRRLIIAATKLDDIGEYTYKVATSKTSAKLKVEAVKIKKTLKNLTVTETQDAVFTVELTHPNVKGVQWIKNGVVLESNEKYAISVKGTIYSLRIKNCAIVDESVYGFRLGRLGASARLHVETVKIIKKPKDVTALENATVAFEVSVSHDTVPVKWFHKSVEIKPSDKHRLVSERKVHKLMLQNISPSDAGEYTAVVGQLECKAKLFVETLHITKTMKNIEVPETKTASFECEVSHFNVPSMWLKNGVEIEMSEKFKIVVQGKLHQLIIMNTSTEDSAEYTFVCGNDQVSATLTVTPIMITSMLKDINAEEKDTITFEVTVNYEGISYKWLKNGVEIKSTDKCQMRTKKLTHSLNIRNVHFGDAADYTFVAGKATSTATLYVEARHIEFRKHIKDIKVLEKKRAMFECEVSEPDITVQWMKDDQELQITDRIKIQKEKYVHRLLIPSTRMSDAGKYTVVAGGNVSTAKLFVEGRDVRIRSIKKEVQVIEKQRAVVEFEVNEDDVDAHWYKDGIEINFQVQERHKYVVERRIHRMFISETRQSDAGEYTFVAGRNRSSVTLYVNAPEPPQVLQELQPVTVQSGKPARFCAVISGRPQPKISWYKEEQLLSTGFKCKFLHDGQEYTLLLIEAFPEDAAVYTCEAKNDYGVATTSASLSVEVPEVVSPDQEMPVYPPAIITPLQDTVTSEGQPARFQCRVSGTDLKVSWYSKDKKIKPSRFFRMTQFEDTYQLEIAEAYPEDEGTYTFVASNAVGQVSSTANLSLEAPESILHERIEQEIEMEMKAAPVIKRKIEPLEVALGHLAKFTCEIQSAPNVRFQWFKAGREIYESDKCSIRSSKYISSLEILRTQVVDCGEYTCKASNEYGSVSCTATLTVTEAYPPTFLSRPKSLTTFVGKAAKFICTVTGTPVIETIWQKDGAALSPSPNWRISDAENKHILELSNLTIQDRGVYSCKASNKFGADICQAELIIIDKPHFIKELEPVQSAINKKVHLECQVDEDRKVTVTWSKDGQKLPPGKDYKICFEDKIATLEIPLAKLKDSGTYVCTASNEAGSSSCSATVTVREPPSFVKKVDPSYLMLPGESARLHCKLKGSPVIQVTWFKNNKELSESNTVRMYFVNSEAILDITDVKVEDSGSYSCEAVNDVGSDSCSTEIVIKEPPSFIKTLEPADIVRGTNALLQCEVSGTGPFEISWFKDKKQIRSSKKYRLFSQKSLVCLEIFSFNSADVGEYECVVANEVGKCGCMATHLLKEPPTFVKKVDDLIALGGQTVTLQAAVRGSEPISVTWMKGQEVIREDGKIKMSFSNGVAVLIIPDVQISFGGKYTCLAENEAGSQTSVGELIVKEPAKIIERAELIQVTAGDPATLEYTVAGTPELKPKWYKDGRPLVASKKYRISFKNNVAQLKFYSAELHDSGQYTFEISNEVGSSSCETTFTVLDRDIAPFFTKPLRNVDSVVNGTCRLDCKIAGSLPMRVSWFKDGKEIAASDRYRIAFVEGTASLEIIRVDMNDAGNFTCRATNSVGSKDSSGALIVQEPPSFVTKPGSKDVLPGSAVCLKSTFQGSTPLTIRWFKGNKELVSGGSCYITKEALESSLELYLVKTSDSGTYTCKVSNVAGGVECSANLFVKEPATFVEKLEPSQLLKKGDATQLACKVTGTPPIKITWFANDREIKESSKHRMSFVESTAVLRLTDVGIEDSGEYMCEAQNEAGSDHCSSIVIVKESPYFTKEFKPIEVLKEYDVMLLAEVAGTPPFEITWFKDNTILRSGRKYKTFIQDHLVSLQILKFVAADAGEYQCRVTNEVGSSICSARVTLREPPSFIKKIESTSSLRGGTAAFQATLKGSLPITVTWLKDSDEITEDDNIRMTFENNVASLYLSGIEVKHDGKYVCQAKNDAGIQRCSALLSVKEPATITEEAVSIDVTQGDPATLQVKFSGTKEITAKWFKDGQELTLGSKYKISVTDTVSILKIISTEKKDSGEYTFEVQNDVGRSSCKARINVLDLIIPPSFTKKLKKMDSIKGSFIDLECIVAGSHPISIQWFKDDQEISASEKYKFSFHDNTAFLEISQLEGTDSGTYTCSATNKAGHNQCSGHLTVKEPPYFVEKPQSQDVNPNTRVQLKALVGGTAPMTIKWFKDNKELHSGAARSVWKDDTSTSLELFAAKATDSGTYICQLSNDVGTATSKATLFVKEPPQFIKKPSPVLVLRNGQSTTFECQITGTPKIRVSWYLDGNEITAIQKHGISFIDGLATFQISGARVENSGTYVCEARNDAGTASCSIELKVKEPPTFIRELKPVEVVKYSDVELECEVTGTPPFEVTWLKNNREIRSSKKYTLTDRVSVFNLHITKCDPSDTGEYQCIVSNEGGSCSCSTRVALKEPPSFIKKIENTTTVLKSSATFQSTVAGSPPISITWLKDDQILDEDDNVYISFVDSVATLQIRSVDNGHSGRYTCQAKNESGVERCYAFLLVQEPAQIVEKAKSVDVTEKDPMTLECVVAGTPELKVKWLKDGKQIVPSRYFSMSFENNVASFRIQSVMKQDSGQYTFKVENDFGSSSCDAYLRVLDQNIPPSFTKKLTKMDKVLGSSIHMECKVSGSLPISAQWFKDGKEISTSAKYRLVCHERSVSLEVNNLELEDTANYTCKVSNVAGDDACSGILTVKEPPSFLVKPGRQQAIPDSTVEFKAILKGTPPFKIKWFKDDVELVSGPKCFIGLEGSTSFLNLYSVDASKTGQYTCHVTNDVGSDSCTTMLLVTEPPKFVKKLEASKIVKAGDSSRLECKIAGSPEIRVVWFRNEHELPASDKYRMTFIDSVAVIQMNNLSTEDSGDFICEAQNPAGSTSCSTKVIVKEPPVFSSFPPIVETLKNAEVSLECELSGTPPFEVVWYKDKRQLRSSKKYKIASKNFHTSIHILNVDTSDIGEYHCKAQNEVGSDTCVCTVKLKEPPRFVSKLNSLTVVAGEPAELQASIEGAQPIFVQWLKEKEEVIRESENIRITFVENVATLQFAKAEPANAGKYICQIKNDGGMRENMATLMVLEPAVIVEKAGPMTVTVGETCTLECKVAGTPELSVEWYKDGKLLTSSQKHKFSFYNKISSLRILSVERQDAGTYTFQVQNNVGKSSCTAVVDVSDRAVPPSFTRRLKNTGGVLGASCILECKVAGSSPISVAWFHEKTKIVSGAKYQTTFSDNVCTLQLNSLDSSDMGNYTCVAANVAGSDECRAVLTVQEPPSFVKEPEPLEVLPGKNVTFTSVIRGTPPFKVNWFRGARELVKGDRCNIYFEDTVAELELFNIDISQSGEYTCVVSNNAGQASCTTRLFVKEPAAFLKRLSDHSVEPGKSIILESTYTGTLPISVTWKKDGFNITTSEKCNIVTTEKTCILEILNSTKRDAGQYSCEIENEAGRDVCGALVSTLEPPYFVTELEPLEAAVGDSVSLQCQVAGTPEITVSWYKGDTKLRPTPEYRTYFTNNVATLVFNKVNINDSGEYTCKAENSIGTASSKTVFRIQERQLPPSFARQLKDIEQTVGLPVTLTCRLNGSAPIQVCWYRDGVLLRDDENLQTSFVDNVATLKILQTDLSHSGQYSCSASNPLGTASSSARLTAREPKKSPFFDIKPVSIDVIAGESADFECHVTGAQPMRITWSKDNKEIRPGGNYTITCVGNTPHLRILKVGKGDSGQYTCQATNDVGKDMCSAQLSVKEPPKFVKKLEASKVAKQGESIQLECKISGSPEIKVSWFRNDSELHESWKYNMSFINSVALLTINEASAEDSGDYICEAHNGVGDASCSTALTVKAPPVFTQKPSPVGALKGSDVILQCEISGTPPFEVVWVKDRKQVRNSKKFKITSKHFDTSLHILNLEASDVGEYHCKATNEVGSDTCSCSVKFKEPPRFVKKLSDTSTLIGDAVELRAIVEGFQPISVVWLKDRGEVIRESENTRISFIDNIATLQLGSPEASNSGKYICQIKNDAGMRECSAVLTVLEPARIIEKPEPMTVTTGNPFALECVVTGTPELSAKWFKDGRELSADSKHHITFINKVASLKIPCAEMSDKGLYSFEVKNSVGKSNCTVSVHVSDRIVPPSFIRKLKDVNAILGASVVLECRVSGSAPISVGWFQDGNEIVSGPKCQSSFSENVCTLNLSLLEPSDTGIYTCVAANVAGSDECSAVLTVQEPPSFEQTPDSVEVLPGMSLTFTSVIRGTPPFKVKWFKGSRELVPGESCNISLEDFVTELELFEVQPLESGDYSCLVTNDAGSASCTTHLFVKEPATFVKRLADFSVETGSPIVLEATYTGTPPISVSWIKDEYLISQSERCSITMTEKSTILEILESTIEDYAQYSCLIENEAGQDICEALVSVLEPPYFIEPLEHVEAVIGEPATLQCKVDGTPEIRISWYKEHTKLRSAPAYKMQFKNNVASLVINKVDHSDVGEYSCKADNSVGAVASSAVLVIKARKLPPFFARKLKDVHETLGFPVAFECRINGSEPLQVSWYKDGVLLKDDANLQTSFVHNVATLQILQTDQSHIGQYNCSASNPLGTASSSAKLILSEHEVPPFFDLKPVSVDLALGESGTFKCHVTGTAPIKITWAKDNREIRPGGNYKMTLVENTATLTVLKVGKGDAGQYTCYASNIAGKDSCSAQLGVQEPPRFIKKLEPSRIVKQDEFTRYECKIGGSPEIKVLWYKDETEIQESSKFRMSFVDSVAVLEMHNLSVEDSGDYTCEAHNAAGSASSSTSLKVKEPPIFRKKPHPIETLKGADVHLECELQGTPPFHVSWYKDKRELRSGKKYKIMSENFLTSIHILNVDAADIGEYQCKATNDVGSDTCVGSIALKAPPRFVKKLSDISTVVGKEVQLQTTIEGAEPISVVWFKDKGEIVRESDNIWISYSENIATLQFSRVEPANAGKYTCQIKNDAGMQECFATLSVLEPATIVEKPESIKVTTGDTCTLECTVAGTPELSTKWFKDGKELTSDNKYKISFFNKVSGLKIINVAPSDSGVYSFEVQNPVGKDSCTASLQVSDRTVPPSFTRKLKETNGLSGSSVVMECKVYGSPPISVSWFHEGNEISSGRKYQTTLTDNTCALTVNMLEESDSGDYTCIATNMAGSDECSAPLTVREPPSFVQKPDPMDVLTGTNVTFTSIVKGTPPFSVSWFKGSSELVPGDRCNVSLEDSVAELELFDVDTSQSGEYTCIVSNEAGKASCTTHLYIKAPAKFVKRLNDYSIEKGKPLILEGTFTGTPPISVTWKKNGINVTPSQRCNITTTEKSAILEIPSSTVEDAGQYNCYIENASGKDSCSAQILILEPPYFVKQLEPVKVSVGDSASLQCQLAGTPEIGVSWYKGDTKLRPTTTYKMHFRNNVATLVFNQVDINDSGEYICKAENSVGEVSASTFLTVQEQKLPPSFSRQLRDVQETVGLPVVFDCAISGSEPISVSWYKDGKPLKDSPNVQTSFLDNTATLNIFKTDRSLAGQYSCTATNPIGSASSSARLILTEGKNPPFFDIRLAPVDAVVGESADFECHVTGTQPIKVSWAKDSREIRSGGKYQISYLENSAHLTVLKVDKGDSGQYTCYAVNEVGKDSCTAQLNIKERLIPPSFTKRLSETVEETEGNSFKLEGRVAGSQPITVAWYKNNIEIQPTSNCEITFKNNTLVLQVRKAGMNDAGLYTCKVSNDAGSALCTSSIVIKEPKKPPVFDQHLTPVTVSEGEYVQLSCHVQGSEPIRIQWLKAGREIKPSDRCSFSFASGTAVLELRDVAKADSGDYVCKASNVAGSDTTKSKVTIKDKPAVAPATKKAAVDGRLFFVSEPQSIRVVEKTTATFIAKVGGDPIPNVKWTKGKWRQLNQGGRVFIHQKGDEAKLEIRDTTKTDSGLYRCVAFNEHGEIESNVNLQVDERKKQEKIEGDLRAMLKKTPILKKGAGEEEEIDIMELLKNVDPKEYEKYARMYGITDFRGLLQAFELLKQSQEEETHRLEIEEIERSERDEKEFEELVSFIQQRLSQTEPVTLIKDIENQTVLKDNDAVFEIDIKINYPEIKLSWYKGTEKLEPSDKFEISIDGDRHTLRVKNCQLKDQGNYRLVCGPHIASAKLTVIEPAWERHLQDVTLKEGQTCTMTCQFSVPNVKSEWFRNGRILKPQGRHKTEVEHKVHKLTIADVRAEDQGQYTCKYEDLETSAELRIEAEPIQFTKRIQNIVVSEHQSATFECEVSFDDAIVTWYKGPTELTESQKYNFRNDGRCHYMTIHNVTPDDEGVYSVIARLEPRGEARSTAELYLTTKEIKLELKPPDIPDSRVPIPTMPIRAVPPEEIPPVVAPPIPLLLPTPEEKKPPPKRIEVTKKAVKKDAKKVVAKPKEMTPREEIVKKPPPPTTLIPAKAPEIIDVSSKAEEVKIMTITRKKEVQKEKEAVYEKKQAVHKEKRVFIESFEEPYDELEVEPYTEPFEQPYYEEPDEDYEEIKVEAKKEVHEEWEEDFEEGQEYYEREEGYDEGEEEWEEAYQEREVIQVQKEVYEESHERKVPAKVPEKKAPPPPKVIKKPVIEKIEKTSRRMEEEKVQVTKVPEVSKKIVPQKPSRTPVQEEVIEVKVPAVHTKKMVISEEKMFFASHTEEEVSVTVPEVQKEIVTEEKIHVAISKRVEPPPKVPELPEKPAPEEVAPVPIPKKVEPPAPKVPEVPKKPVPEEKKPVPVPKKEPAAPPKVPEVPKKPVPEEKIPVPVAKKKEAPPAKVPEVQKGVVTEEKITIVTQREESPPPAVPEIPKKKVPEERKPVPRKEEEVPPPPKVPALPKKPVPEEKVAVPVPVAKKAPPPRAEVSKKTVVEEKRFVAEEKLSFAVPQRVEVTRHEVSAEEEWSYSEEEEGVSISVYREEEREEEEEAEVTEYEVMEEPEEYVVEEKLHIISKRVEAEPAEVTERQEKKIVLKPKIPAKIEEPPPAKVPEAPKKIVPEKKVPAPVPKKEKVPPPKVPEEPKKPVPEKKVPPKVIKMEEPLPAKVTERHMQITQEEKVLVAVTKKEAPPKARVPEEPKRAVPEEKVLKLKPKREEEPPAKVTEFRKRVVKEEKVSIEAPKREPQPIKEVTIMEEKERAYTLEEEAVSVQREEEYEEYEEYDYKEFEEYEPTEEYDQYEEYEEREYERYEEHEEYITEPEKPIPVKPVPEEPVPTKPKAPPAKVLKKAVPEEKVPVPIPKKLKPPPPKVPEEPKKVFEEKIRISITKREKEQVTEPAAKVPMKPKRVVAEEKVPVPRKEVAPPVRVPEVPKELEPEEVAFEEEVVTHVEEYLVEEEEEYIHEEEEFITEEEVVPVIPVKVPEVPRKPVPEEKKPVPVPKKKEAPPAKVPEVPKKPEEKVPVLIPKKEKPPPAKVPEVPKKPVPEEKVPVPVPKKVEAPPAKVPEVPKKPVPEKKVPVPAPKKVEAPPAKVPEVPKKLIPEEKKPTPVPKKVEAPPPKVPKKREPVPVPVALPQEEEVLFEEEIVPEEEVLPEEEEVLPEEEEVLPEEEEVLPEEEEIPPEEEEVPPEEEYVPEEEEFVPEEEVLPEVKPKVPVPAPVPEIKKKVTEKKVVIPKKEEAPPAKVPEVPKKVEEKRIILPKEEEVLPVEVTEEPEEEPISEEEIPEEPPSIEEVEEVAPPRVPEVIKKAVPEAPTPVPKKVEAPPAKVSKKIPEEKVPVPVQKKEAPPAKVPEVPKKVPEKKVLVPKKEAVPPAKGRTVLEEKVSVAFRQEVVVKERLELEVVEAEVEEIPEEEEFHEVEEYFEEGEFHEVEEFIKLEQHRVEEEHRVEKVHRVIEVFEAEEVEVFEKPKAPPKGPEISEKIIPPKKPPTKVVPRKEPPAKVPEVPKKIVVEEKVRVPEEPRVPPTKVPEVLPPKEVVPEKKVPVPPAKKPEAPPPKVPEAPKEVVPEKKVPVPPPKKPEVPPTKVPEVPKAAVPEKKVPEAIPPKPESPPPEVPEAPKEVVPEKKVPAAPPKKPEVTPVKVPEAPKEVVPEKKVPVPPPKKPEVPPTKVPEVPKVAVPEKKVPEAIPPKPESPPPEVFEEPEEVALEEPPAEVVEEPEPAAPPQVTVPPKKPVPEKKAPAVVAKKPELPPVKVPEVPKEVVPEKKVPLVVPKKPEAPPAKVPEVPKEVVPEKKVAVPKKPEVPPAKVPEVPKKPVLEEKPAVPVPERAESPPPEVYEEPEEIAPEEEIAPEEEKPVPVAEEEEPEVPPPAVPEEPKKIIPEKKVPVIKKPEAPPPKEPEPEKVIEKPKLKPRPPPPPPAPPKEDVKEKIFQLKAIPKKKVPEKPQVPEKVELTPLKVPGGEKKVRKLLPERKPEPKEEVVLKSVLRKRPEEEEPKVEPKKLEKVKKPAVPEPPPPKPVEEVEVPTVTKRERKIPEPTKVPEIKPAIPLPAPEPKPKPEAEVKTIKPPPVEPEPTPIAAPVTVPVVGKKAEAKAPKEEAAKPKGPIKGVPKKTPSPIEAERRKLRPGSGGEKPPDEAPFTYQLKAVPLKFVKEIKDIILTESEFVGSSAIFECLVSPSTAITTWMKDGSNIRESPKHRFIADGKDRKLHIIDVQLSDAGEYTCVLRLGNKEKTSTAKLVVEELPVRFVKTLEEEVTVVKGQPLYLSCELNKERDVVWRKDGKIVVEKPGRIVPGVIGLMRALTINDADDTDAGTYTVTVENANNLECSSCVKVVEVIRDWLVKPIRDQHVKPKGTAIFACDIAKDTPNIKWFKGYDEIPAEPNDKTEILRDGNHLYLKIKNAMPEDIAEYAVEIEGKRYPAKLTLGEREVELLKPIEDVTIYEKESASFDAEISEADIPGQWKLKGELLRPSPTCEIKAEGGKRFLTLHKVKLDQAGEVLYQALNAITTAILTVKEIELDFAVPLKDVTVPERRQARFECVLTREANVIWSKGPDIIKSSDKFDIIADGKKHILVINDSQFDDEGVYTAEVEGKKTSARLFVTGIRLKFMSPLEDQTVKEGETATFVCELSHEKMHVVWFKNDAKLHTSRTVLISSEGKTHKLEMKEVTLDDISQIKAQVKELSSTAQLKVLEADPYFTVKLHDKTAVEKDEITLKCEVSKDVPVKWFKDGEEIVPSPKYSIKADGLRRILKIKKADLKDKGEYVCDCGTDKTKANVTVEARLIKVEKPLYGVEVFVGETAHFEIELSEPDVHGQWKLKGQPLTASPDCEIIEDGKKHILILHNCQLGMTGEVSFQAANAKSAANLKVKELPLIFITPLSDVKVFEKDEAKFECEVSREPKTFRWLKGTQEITGDDRFELIKDGTKHSMVIKSAAFEDEAKYMFEAEDKHTSGKLIIEGIRLKFLTPLKDVTAKEKESAVFTVELSHDNIRVKWFKNDQRLHTTRSVSMQDEGKTHSITFKDLSIDDTSQIRVEAMGMSSEAKLTVLEGDPYFTGKLQDYTGVEKDEVILQCEISKADAPVKWFKDGKEIKPSKNAVIKADGKKRMLILKKALKSDIGQYTCDCGTDKTSGKLDIEDREIKLVRPLHSVEVMETETARFETEISEDDIHANWKLKGEALLQTPDCEIKEEGKIHSLVLHNCRLDQTGGVDFQAANVKSSAHLRVKPRVIGLLRPLKDVTVTAGETATFDCELSYEDIPVEWYLKGKKLEPSDKVVPRSEGKVHTLTLRDVKLEDAGEVQLTAKDFKTHANLFVKEPPVEFTKPLEDQTVEEGATAVLECEVSRENAKVKWFKNGTEILKSKKYEIVADGRVRKLVIHDCTPEDIKTYTCDAKDFKTSCNLNVVPPHVEFLRPLTDLQVREKEMARFECELSRENAKVKWFKDGAEIKKGKKYDIISKGAVRILVINKCLLDDEAEYSCEVRTARTSGMLTVLEEEAVFTKNLANIEVSETDTIKLVCEVSKPGAEVIWYKGDEEIIETGRYEILTEGRKRILVIQNAHLEDAGNYNCRLPSSRTDGKVKVHELAAEFISKPQNLEILEGEKAEFVCSISKESFPVQWKRDDKTLESGDKYDVIADGKKRVLVVKDATLQDMGTYVVMVGAARAAAHLTVIEKLRIVVPLKDTRVKEQQEVVFNCEVNTEGAKAKWFRNEEAIFDSSKYIILQKDLVYTLRIRDAHLDDQANYNVSLTNHRGENVKSAANLIVEEEDLRIVEPLKDIETMEKKSVTFWCKVNRLNVTLKWTKNGEEVPFDNRVSYRVDKYKHMLTIKDCGFPDEGEYIVTAGQDKSVAELLIIEAPTEFVEHLEDQTVTEFDDAVFSCQLSREKANVKWYRNGREIKEGKKYKFEKDGSIHRLIIKDCRLDDECEYACGVEDRKSRARLFVEEIPVEIIRPPQDILEAPGADVVFLAELNKDKVEVQWLRNNMVVVQGDKHQMMSEGKIHRLQICDIKPRDQGEYRFIAKDKEARAKLELAAAPKIKTADQDLVVDVGKPLTMVVPYDAYPKAEAEWFKENEPLSTKTIDTTAEQTSFRILEAKKGDKGRYKIVLQNKHGKAEGFINLKVIDVPGPVRNLEVTETFDGEVSLAWEEPLTDGGSKIIGYVVERRDIKRKTWVLATDRAESCEFTVTGLQKGGVEYLFRVSARNRVGTGEPVETDNPVEARSKYDVPGPPLNVTITDVNRFGVSLTWEPPEYDGGAEITNYVIELRDKTSIRWDTAMTVRAEDLSATVTDVVEGQEYSFRVRAQNRIGVGKPSAATPFVKVADPIERPSPPVNLTSSDQTQSSVQLKWEPPLKDGGSPILGYIIERCEEGKDNWIRCNMKLVPELTYKVTGLEKGNKYLYRVSAENKAGVSDPSEILGPLTADDAFVEPTMDLSAFKDGLEVIVPNPITILVPSTGYPRPTATWCFGDKVLETGDRVKMKTLSAYAELVISPSERSDKGIYTLKLENRVKTISGEIDVNVIARPSAPKELKFGDITKDSVHLTWEPPDDDGGSPLTGYVVEKREVSRKTWTKVMDFVTDLEFTVPDLVQGKEYLFKVCARNKCGPGEPAYVDEPVNMSTPATVPDPPENVKWRDRTANSIFLTWDPPKNDGGSRIKGYIVERCPRGSDKWVACGEPVAETKMEVTGLEEGKWYAYRVKALNRQGASKPSRPTEEIQAVDTQEAPEIFLDVKLLAGLTVKAGTKIELPATVTGKPEPKITWTKADMILKQDKRITIENVPKKSTVTIVDSKRSDTGTYIIEAVNVCGRATAVVEVNVLDKPGPPAAFDITDVTNESCLLTWNPPRDDGGSKITNYVVERRATDSEVWHKLSSTVKDTNFKATKLIPNKEYIFRVAAENMYGVGEPVQASPITAKYQFDPPGPPTRLEPSDITKDAVTLTWCEPDDDGGSPITGYWVERLDPDTDKWVRCNKMPVKDTTYRVKGLTNKKKYRFRVLAENLAGPGKPSKSTEPILIKDPIDPPWPPGKPTVKDVGKTSVRLNWTKPEHDGGAKIESYVIEMLKTGTDEWVRVAEGVPTTQHLLPGLMEGQEYSFRVRAVNKAGESEPSEPSDPVLCREKLYPPSPPRWLEVINITKNTADLKWTVPEKDGGSPITNYIVEKRDVRRKGWQTVDTTVKDTKCTVTPLTEGSLYVFRVAAENAIGQSDYTEIEDSVLAKDTFTTPGPPYALAVVDVTKRHVDLKWEPPKNDGGRPIQRYVIEKKERLGTRWVKAGKTAGPDCNFRVTDVIEGTEVQFQVRAENEAGVGHPSEPTEILSIEDPTSPPSPPLDLHVTDAGRKHIAIAWKPPEKNGGSPIIGYHVEMCPVGTEKWMRVNSRPIKDLKFKVEEGVVPDKEYVLRVRAVNAIGVSEPSEISENVVAKDPDCKPTIDLETHDIIVIEGEKLSIPVPFRAVPVPTVSWHKDGKEVKASDRLTMKNDHISAHLEVPKSVRADAGIYTITLENKLGSATASINVKVIGLPGPCKDIKASDITKSSCKLTWEPPEFDGGTPILHYVLERREAGRRTYIPVMSGENKLSWTVKDLIPNGEYFFRVKAVNKVGGGEYIELKNPVIAQDPKQPPDPPVDVEVHNPTAEAMTITWKPPLYDGGSKIMGYIIEKIAKGEERWKRCNEHLVPILTYTAKGLEEGKEYQFRVRAENAAGISEPSRATPPTKAVDPIDAPKVILRTSLEVKRGDEIALDASISGSPYPTITWIKDENVIVPEEIKKRAAPLVRRRKGEVQEEEPFVLPLTQRLSIDNSKKGESQLRVRDSLRPDHGLYMIKVENDHGIAKAPCTVSVLDTPGPPINFVFEDIRKTSVLCKWEPPLDDGGSEIINYTLEKKDKTKPDSEWIVVTSTLRHCKYSVTKLIEGKEYLFRVRAENRFGPGPPCVSKPLVAKDPFGPPDAPDKPIVEDVTSNSMLVKWNEPKDNGSPILGYWLEKREVNSTHWSRVNKSLLNALKANVDGLLEGLTYVFRVCAENAAGPGKFSPPSDPKTAHDPISPPGPPIPRVTDTSSTTIELEWEPPAFNGGGEIVGYFVDKQLVGTNEWSRCTEKMIKVRQYTVKEIREGADYKLRVSAVNAAGEGPPGETQPVTVAEPQEPPAVELDVSVKGGIQIMAGKTLRIPAVVTGRPVPTKVWTKEEGELDKDRVVIDNVGTKSELIIKDALRKDHGRYVITATNSCGSKFAAARVEVFDVPGPVLDLKPVVTNRKMCLLNWSDPEDDGGSEITGFIIERKDAKMHTWRQPIETERSKCDITGLLEGQEYKFRVIAKNKFGCGPPVEIGPILAVDPLGPPTSPERLTYTERTKSTITLDWKEPRSNGGSPIQGYIIEKRRHDKPDFERVNKRLCPTTSFLVENLDEHQMYEFRVKAVNEIGESEPSLPLNVVIQDDEVPPTIKLRLSVRGDTIKVKAGEPVHIPADVTGLPMPKIEWSKNETVIEKPTDALQITKEEVSRSEAKTELSIPKAVREDKGTYTVTASNRLGSVFRNVHVEVYDRPSPPRNLAVTDIKAESCYLTWDAPLDNGGSEITHYVIDKRDASRKKAEWEEVTNTAVEKRYGIWKLIPNGQYEFRVRAVNKYGISDECKSDKVVIQDPYRLPGPPGKPKVLARTKGSMLVSWTPPLDNGGSPITGYWLEKREEGSPYWSRVSRAPITKVGLKGVEFNVPRLLEGVKYQFRAMAINAAGIGPPSEPSDPEVAGDPIFPPGPPSCPEVKDKTKSSISLGWKPPAKDGGSPIKGYIVEMQEEGTTDWKRVNEPDKLITTCECVVPNLKELRKYRFRVKAVNEAGESEPSDTTGEIPATDIQEEPEVFIDIGAQDCLVCKAGSQIRIPAVIKGRPTPKSSWEFDGKAKKAMKDGVHDIPEDAQLETAENSSVIIIPECKRSHTGKYSITAKNKAGQKTANCRVKVMDVPGPPKDLKVSDITRGSCRLSWKMPDDDGGDRIKGYVIEKRTIDGKAWTKVNPDCGSTTFVVPDLLSEQQYFFRVRAENRFGIGPPVETIQRTTARDPIYPPDPPIKLKIGLITKNTVHLSWKPPKNDGGSPVTHYIVECLAWDPTGTKKEAWRQCNKRDVEELQFTVEDLVEGGEYEFRVKAVNAAGVSKPSATVGPVTVKDQTCPPSIDLKEFMEVEEGTNVNIVAKIKGVPFPTLTWFKAPPKKPDNKEPVLYDTHVNKLVVDDTCTLVIPQSRRSDTGLYTITAVNNLGTASKEMRLNVLGRPGPPVGPIKFESVSADQMTLSWFPPKDDGGSKITNYVIEKREANRKTWVHVSSEPKECTYTIPKLLEGHEYVFRIMAQNKYGIGEPLDSEPETARNLFSVPGAPDKPTVSSVTRNSMTVNWEEPEYDGGSPVTGYWLEMKDTTSKRWKRVNRDPIKAMTLGVSYKVTGLIEGSDYQFRVYAINAAGVGPASLPSDPATARDPIAPPGPPFPKVTDWTKSSADLEWSPPLKDGGSKVTGYIVEYKEEGKEEWEKGKDKEVRGTKLVVTGLKEGAFYKFRVRAVNIAGIGEPGEVTDVIEMKDRLVSPDLQLDASVRDRIVVHAGGVIRIIAYVSGKPPPTVTWNMNERTLPQEATIETTAISSSMVIKNCQRSHQGVYSLLAKNEAGERKKTIIVDVLDVPGPVGTPFLAHNLTNESCKLTWFSPEDDGGSPITNYVIEKRESDRRAWTPVTYTVTRQNATVQGLIQGKAYFFRIAAENSIGMGPFVETSEALVIREPITVPERPEDLEVKEVTKNTVTLTWNPPKYDGGSEIINYVLESRLIGTEKFHKVTNDNLLSRKYTVKGLKEGDTYEYRVSAVNIVGQGKPSFCTKPITCKDELAPPTLHLDFRDKLTIRVGEAFALTGRYSGKPKPKVSWFKDEADVLEDDRTHIKTTPATLALEKIKAKRSDSGKYCVVVENSTGSRKGFCQVNVVDRPGPPVGPVSFDEVTKDYMVISWKPPLDDGGSKITNYIIEKKEVGKDVWMPVTSASAKTTCKVSKLLEGKDYIFRIHAENLYGISDPLVSDSMKAKDRFRVPDAPDQPIVTEVTKDSALVTWNKPHDGGKPITNYILEKRETMSKRWARVTKDPIHPYTKFRVPDLLEGCQYEFRVSAENEIGIGDPSPPSKPVFAKDPIAKPSPPVNPEAIDTTCNSVDLTWQPPRHDGGSKILGYIVEYQKVGDEEWRRANHTPESCPETKYKVTGLRDGQTYKFRVLAVNAAGESDPAHVPEPVLVKDRLEPPELILDANMAREQHIKVGDTLRLSAIIKGVPFPKVTWKKEDRDAPTKARIDVTPVGSKLEIRNAAHEDGGIYSLTVENPAGSKTVSVKVLVLDKPGPPRDLEVSEIRKDSCYLTWKEPLDDGGSVITNYVVERRDVASAQWSPLSATSKKKSHFAKHLNEGNQYLFRVAAENQYGRGPFVETPKPIKALDPLHPPGPPKDLHHVDVDKTEVSLVWNKPDRDGGSPITGYLVEYQEEGTQDWIKFKTVTNLECVVTGLQQGKTYRFRVKAENIVGLGLPDTTIPIECQEKLVPPSVELDVKLIEGLVVKAGTTVRFPAIIRGVPVPTAKWTTDGSEIKTDEHYTVETDNFSSVLTIKNCLRRDTGEYQITVSNAAGSKTVAVHLTVLDVPGPPTGPINILDVTPEHMTISWQPPKDDGGSPVINYIVEKQDTRKDTWGVVSSGSSKTKLKIPHLQKGCEYVFRVRAENKIGVGPPLDSTPTVAKHKFSPPSPPGKPVVTDITENAATVSWTLPKSDGGSPITGYYMERREVTGKWVRVNKTPIADLKFRVTGLYEGNTYEFRVFAENLAGLSKPSPSSDPIKACRPIKPPGPPINPKLKDKSRETADLVWTKPLSDGGSPILGYVVECQKPGTAQWNRINKDELIRQCAFRVPGLIEGNEYRFRIKAANIVGEGEPRELAESVIAKDILHPPEVELDVTCRDVITVRVGQTIRILARVKGRPEPDITWTKEGKVLVREKRVDLIQDLPRVELQIKEAVRADHGKYIISAKNSSGHAQGSAIVNVLDRPGPCQNLKVTNVTKENCTISWENPLDNGGSEITNFIVEYRKPNQKGWSIVASDVTKRLIKANLLANNEYYFRVCAENKVGVGPTIETKTPILAINPIDRPGEPENLHIADKGKTFVYLKWRRPDYDGGSPNLSYHVERRLKGSDDWERVHKGSIKETHYMVDRCVENQIYEFRVQTKNEGGESDWVKTEEVVVKEDLQKPVLDLKLSGVLTVKAGDTIRLEAGVRGKPFPEVAWTKDKDATDLTRSPRVKIDTRADSSKFSLTKAKRSDGGKYVVTATNTAGSFVAYATVNVLDKPGPVRNLKIVDVSSDRCTVCWDPPEDDGGCEIQNYILEKCETKRMVWSTYSATVLTPGTTVTRLIEGNEYIFRVRAENKIGTGPPTESKPVIAKTKYDKPGRPDPPEVTKVSKEEMTVVWNPPEYDGGKSITGYFLEKKEKHSTRWVPVNKSAIPERRMKVQNLLPDHEYQFRVKAENEIGIGEPSLPSRPVVAKDPIEPPGPPTNFRVVDTTKHSITLGWGKPVYDGGAPIIGYVVEMRPKIADASPDEGWKRCNAAAQLVRKEFTVTSLDENQEYEFRVCAQNQVGIGRPAELKEAIKPKEILEPPEIDLDASMRKLVIVRAGCPIRLFAIVRGRPAPKVTWRKVGIDNVVRKGQVDLVDTMAFLVIPNSTRDDSGKYSLTLVNPAGEKAVFVNVRVLDTPGPVSDLKVSDVTKTSCHVSWAPPENDGGSQVTHYIVEKREADRKTWSTVTPEVKKTSFHVTNLVPGNEYYFRVTAVNEYGPGVPTDVPKPVLASDPLSEPDPPRKLEVTEMTKNSATLAWLPPLRDGGAKIDGYITSYREEEQPADRWTEYSVVKDLSLVVTGLKEGKKYKFRVAARNAVGVSLPREAEGVYEAKEQLLPPKILMPEQITIKAGKKLRIEAHVYGKPHPTCKWKKGEDEVVTSSHLAVHKADSSSILIIKDVTRKDSGYYSLTAENSSGTDTQKIKVVVMDAPGPPQPPFDISDIDADACSLSWHIPLEDGGSNITNYIVEKCDVSRGDWVTALASVTKTSCRVGKLIPGQEYIFRVRAENRFGISEPLTSPKMVAQFPFGVPSEPKNARVTKVNKDCIFVAWDRPDSDGGSPIIGYLIERKERNSLLWVKANDTLVRSTEYPCAGLVEGLEYSFRIYALNKAGSSPPSKPTEYVTARMPVDPPGKPEVIDVTKSTVSLIWARPKHDGGSKIIGYFVEACKLPGDKWVRCNTAPHQIPQEEYTATGLEEKAQYQFRAIARTAVNISPPSEPSDPVTILAENVPPRIDLSVAMKSLLTVKAGTNVCLDATVFGKPMPTVSWKKDGTLLKPAEGIKMAMQRNLCTLELFSVNRKDSGDYTITAENSSGSKSATIKLKVLDKPGPPASVKINKMYSDRAMLSWEPPLEDGGSEITNYIVDKRETSRPNWAQVSATVPITSCSVEKLIEGHEYQFRICAENKYGVGDPVFTEPAIAKNPYDPPGRCDPPVISNITKDHMTVSWKPPADDGGSPITGYLLEKRETQAVNWTKVNRKPIIERTLKATGLQEGTEYEFRVTAINKAGPGKPSDASKAAYARDPQYPPGPPAFPKVYDTTRSSVSLSWGKPAYDGGSPIIGYLVEVKRADSDNWVRCNLPQNLQKTRFEVTGLMEDTQYQFRVYAVNKIGYSDPSDVPDKHYPKDILIPPEGELDADLRKTLILRAGVTMRLYVPVKGRPPPKITWSKPNVNLRDRIGLDIKSTDFDTFLRCENVNKYDAGKYILTLENSCGKKEYTIVVKVLDTPGPPVNVTVKEISKDSAYVTWEPPIIDGGSPIINYVVQKRDAERKSWSTVTTECSKTSFRVANLEEGKSYFFRVFAENEYGIGDPGETRDAVKASQTPGPVVDLKVRSVSKSSCSIGWKKPHSDGGSRIIGYVVDFLTEENKWQRVMKSLSLQYSAKDLTEGKEYTFRVSAENENGEGTPSEITVVARDDVVAPDLDLKGLPDLCYLAKENSNFRLKIPIKGKPAPSVSWKKGEDPLATDTRVSVESSAVNTTLIVYDCQKSDAGKYTITLKNVAGTKEGTISIKVVGKPGIPTGPIKFDEVTAEAMTLKWAPPKDDGGSEITNYILEKRDSVNNKWVTCASAVQKTTFRVTRLHEGMEYTFRVSAENKYGVGEGLKSEPIVARHPFDVPDAPPPPNIVDVRHDSVSLTWTDPKKTGGSPITGYHLEFKERNSLLWKRANKTPIRMRDFKVTGLTEGLEYEFRVMAINLAGVGKPSLPSEPVVALDPIDPPGKPEVINITRNSVTLIWTEPKYDGGHKLTGYIVEKRDLPSKSWMKANHVNVPECAFTVTDLVEGGKYEFRIRAKNTAGAISAPSESTETIICKDEYEAPTIVLDPTIKDGLTIKAGDTIVLNAISILGKPLPKSSWSKAGKDIRPSDITQITSTPTSSMLTIKYATRKDAGEYTITATNPFGTKVEHVKVTVLDVPGPPGPVEISNVSAEKATLTWTPPLEDGGSPIKSYILEKRETSRLLWTVVSEDIQSCRHVATKLIQGNEYIFRVSAVNHYGKGEPVQSEPVKMVDRFGPPGPPEKPEVSNVTKNTATVSWKRPVDDGGSEITGYHVERREKKSLRWVRAIKTPVSDLRCKVTGLQEGSTYEFRVSAENRAGIGPPSEASDSVLMKDAAYPPGPPSNPHVTDTTKKSASLAWGKPHYDGGLEITGYVVEHQKVGDEAWIKDTTGTALRITQFVVPDLQTKEKYNFRISAINDAGVGEPAVIPDVEIVEREMAPDFELDAELRRTLVVRAGLSIRIFVPIKGRPAPEVTWTKDNINLKNRANIENTESFTLLIIPECNRYDTGKFVMTIENPAGKKSGFVNVRVLDTPGPVLNLRPTDITKDSVTLHWDLPLIDGGSRITNYIVEKREATRKSYSTATTKCHKCTYKVTGLSEGCEYFFRVMAENEYGIGEPTETTEPVKASEAPSPPDSLNIMDITKSTVSLAWPKPKHDGGSKITGYVIEAQRKGSDQWTHITTVKGLECVVRNLTEGEEYTFQVMAVNSAGRSAPRESRPVIVKEQTMLPELDLRGIYQKLVIAKAGDNIKVEIPVLGRPKPTVTWKKGDQILKQTQRVNFETTATSTILNINECVRSDSGPYPLTARNIVGEVGDVITIQVHDIPGPPTGPIKFDEVSSDFVTFSWDPPENDGGVPISNYVVEMRQTDSTTWVELATTVIRTTYKATRLTTGLEYQFRVKAQNRYGVGPGITSACIVANYPFKVPGPPGTPQVTAVTKDSMTISWHEPLSDGGSPILGYHVERKERNGILWQTVSKALVPGNIFKSSGLTDGIAYEFRVIAENMAGKSKPSKPSEPMLALDPIDPPGKPVPLNITRHTVTLKWAKPEYTGGFKITSYIVEKRDLPNGRWLKANFSNILENEFTVSGLTEDAAYEFRVIAKNAAGAISPPSEPSDAITCRDDVEAPKIKVDVKFKDTVILKAGEAFRLEADVSGRPPPTMEWSKDGKELEGTAKLEIKIADFSTNLVNKDSTRRDSGAYTLTATNPGGFAKHIFNVKVLDRPGPPEGPLAVTEVTSEKCVLSWFPPLDDGGAKIDHYIVQKRETSRLAWTNVASEVQVTKLKVTKLLKGNEYIFRVMAVNKYGVGEPLESEPVLAVNPYGPPDPPKNPEVTTITKDSMVVCWGHPDSDGGSEIINYIVERRDKAGQRWIKCNKKTLTDLRYKVSGLTEGHEYEFRIMAENAAGISAPSPTSPFYKACDTVFKPGPPGNPRVLDTSRSSISIAWNKPIYDGGSEITGYMVEIALPEEDEWQIVTPPAGLKATSYTITGLTENQEYKIRIYAMNSEGLGEPALVPGTPKAEDRMLPPEIELDADLRKVVTIRACCTLRLFVPIKGRPAPEVKWARDHGESLDKASIESTSSYTLLIVGNVNRFDSGKYILTVENSSGSKSAFVNVRVLDTPGPPQDLKVKEVTKTSVTLTWDPPLLDGGSKIKNYIVEKRESTRKAYSTVATNCHKTSWKVDQLQEGCSYYFRVLAENEYGIGLPAETAESVKASERPLPPGKITLMDVTRNSVSLSWEKPEHDGGSRILGYIVEMQTKGSDKWATCATVKVTEATITGLIQGEEYSFRVSAQNEKGISDPRQLSVPVIAKDLVIPPAFKLLFNTFTVLAGEDLKVDVPFIGRPTPAVTWHKDNVPLKQTTRVNAESTENNSLLTIKDACREDVGHYVVKLTNSAGEAIETLNVIVLDKPGPPTGPVKMDEVTADSITLSWGPPKYDGGSSINNYIVEKRDTSTTTWQIVSATVARTTIKACRLKTGCEYQFRIAAENRYGKSTYLNSEPTVAQYPFKVPGPPGTPVVTLSSRDSMEVQWNEPISDGGSRVIGYHLERKERNSILWVKLNKTPIPQTKFKTTGLEEGVEYEFRVSAENIVGIGKPSKVSECYVARDPCDPPGRPEAIIVTRNSVTLQWKKPTYDGGSKITGYIVEKKELPEGRWMKASFTNIIDTHFEVTGLVEDHRYEFRVIARNAAGVFSEPSESTGAITARDEVDPPRISMDPKYKDTIVVHAGESFKVDADIYGKPIPTIQWIKGDQELSNTARLEIKSTDFATSLSVKDAVRVDSGNYILKAKNVAGERSVTVNVKVLDRPGPPEGPVVISGVTAEKCTLAWKPPLQDGGSDIINYIVERRETSRLVWTVVDANVQTLSCKVTKLLEGNEYTFRIMAVNKYGVGEPLESEPVVAKNPFVVPDAPKAPEVTTVTKDSMIVVWERPASDGGSEILGYVLEKRDKEGIRWTRCHKRLIGELRLRVTGLIENHDYEFRVSAENAAGLSEPSPPSAYQKACDPIYKPGPPNNPKVIDITRSSVFLSWSKPIYDGGCEIQGYIVEKCDVSVGEWTMCTPPTGINKTNIEVEKLLEKHEYNFRICAINKAGVGEHADVPGPIIVEEKLEAPDIDLDLELRKIINIRAGGSLRLFVPIKGRPTPEVKWGKVDGEIRDAAIIDVTSSFTSLVLDNVNRYDSGKYTLTLENSSGTKSAFVTVRVLDTPSPPVNLKVTEITKDSVSITWEPPLLDGGSKIKNYIVEKREATRKSYAAVVTNCHKNSWKIDQLQEGCSYYFRVTAENEYGIGLPAQTADPIKVAEVPQPPGKITVDDVTRNSVSLSWTKPEHDGGSKIIQYIVEMQAKHSEKWSECARVKSLQAVITNLTQGEEYLFRVVAVNEKGRSDPRSLAVPIVAKDLVIEPDVKPAFSSYSVQVGQDLKIEVPISGRPKPTITWTKDGLPLKQTTRINVTDSLDLTTLSIKETHKDDGGQYGITVANVVGQKTASIEIVTLDKPDPPKGPVKFDDVSAESITLSWNPPLYTGGCQITNYIVQKRDTTTTVWDVVSATVARTTLKVTKLKTGTEYQFRIFAENRYGQSFALESDPIVAQYPYKEPGPPGTPFATAISKDSMVIQWHEPVNNGGSPVIGYHLERKERNSILWTKVNKTIIHDTQFKAQNLEEGIEYEFRVYAENIVGVGKASKNSECYVARDPCDPPGTPEPIMVKRNEITLQWTKPVYDGGSMITGYIVEKRDLPDGRWMKASFTNVIETQFTVSGLTEDQRYEFRVIAKNAAGAISKPSDSTGPITAKDEVELPRISMDPKFRDTIVVNAGETFRLEADVHGKPLPTIEWLRGDKEIEESARCEIKNTDFKALLIVKDAIRIDGGQYILRASNVAGSKSFPVNVKVLDRPGPPEGPVQVTGVTSEKCSLTWSPPLQDGGSDISHYVVEKRETSRLAWTVVASEVVTNSLKVTKLLEGNEYVFRIMAVNKYGVGEPLESAPVLMKNPFVLPGPPKSLEVTNIAKDSMTVCWNRPDSDGGSEIIGYIVEKRDRSGIRWIKCNKRRITDLRLRVTGLTEDHEYEFRVSAENAAGVGEPSPATVYYKACDPVFKPGPPTNAHIVDTTKNSITLAWGKPIYDGGSEILGYVVEICKADEEEWQIVTPQTGLRVTRFEISKLTEHQEYKIRVCALNKVGLGEATSVPGTVKPEDKLEAPELDLDSELRKGIVVRAGGSARIHIPFKGRPTPEITWSREEGEFTDKVQIEKGVNYTQLSIDNCDRNDAGKYILKLENSSGSKSAFVTVKVLDTPGPPQNLAVKEVRKDSAFLVWEPPIIDGGAKVKNYVIDKRESTRKAYANVSSKCSKTSFKVENLTEGAIYYFRVMAENEFGVGVPVETVDAVKAAEPPSPPGKVTLTDVSQTSASLMWEKPEHDGGSRVLGYVVEMQPKGTEKWSIVAESKVCNAVVTGLSSGQEYQFRVKAYNEKGKSDPRVLGVPVIAKDLTIQPSLKLPFNTYSIQAGEDLKIEIPVIGRPRPNISWVKDGEPLKQTTRVNVEETATSTVLHIKEGNKDDFGKYTVTATNSAGTATENLSVIVLEKPGPPVGPVRFDEVSADFVVISWEPPAYTGGCQISNYIVEKRDTTTTTWHMVSATVARTTIKITKLKTGTEYQFRIFAENRYGKSAPLDSKAVIVQYPFKEPGPPGTPFVTSISKDQMLVQWHEPVNDGGTKIIGYHLEQKEKNSILWVKLNKTPIQDTKFKTTGLDEGLEYEFKVSAENIVGIGKPSKVSECFVARDPCDPPGRPEAIVITRNNVTLKWKKPAYDGGSKITGYIVEKKDLPDGRWMKASFTNVLETEFTVSGLVEDQRYEFRVIARNAAGNFSEPSDSSGAITARDEIDAPNASLDPKYKDVIVVHAGETFVLEADIRGKPIPDVVWSKDGKELEETAARMEIKSTIQKTTLVVKDCIRTDGGQYILKLSNVGGTKSIPITVKVLDRPGPPEGPLKVTGVTAEKCYLAWNPPLQDGGANISHYIIEKRETSRLSWTQVSTEVQALNYKVTKLLPGNEYIFRVMAVNKYGIGEPLESGPVTACNPYKPPGPPSTPEVSAITKDSMVVTWARPVDDGGTEIEGYILEKRDKEGVRWTKCNKKTLTDLRLRVTGLTEGHSYEFRVAAENAAGVGEPSEPSVFYRACDALYPPGPPSNPKVTDTSRSSVSLAWSKPIYDGGAPVKGYVVEVKEAAADEWTTCTPPTGLQGKQFTVTKLKENTEYNFRICAINSEGVGEPATLPGSVVAQERIEPPEIELDADLRKVVVLRASATLRLFVTIKGRPEPEVKWEKAEGILTDRAQIEVTSSFTMLVIDNVTRFDSGRYNLTLENNSGSKTAFVNVRVLDSPSAPVNLTIREVKKDSVTLSWEPPLIDGGAKITNYIVEKRETTRKAYATITNNCTKTTFRIENLQEGCSYYFRVLASNEYGIGLPAETTEPVKVSEPPLPPGRVTLVDVTRNTATIKWEKPESDGGSKITGYVVEMQTKGSEKWSTCTQVKTLEATISGLTAGEEYVFRVAAVNEKGRSDPRQLGVPVIARDIEIKPSVELPFHTFNVKAREQLKIDVPFKGRPQATVNWRKDGQTLKETTRVNVSSSKTVTSLSIKEASKEDVGTYELCVSNSAGSITVPITIIVLDRPGPPGPIRIDEVSCDSITISWNPPEYDGGCQISNYIVEKKETTSTTWHIVSQAVARTSIKIVRLTTGSEYQFRVCAENRYGKSSYSESSAVVAEYPFSPPGPPGTPKVVHATKSTMLVTWQVPVNDGGSRVIGYHLEYKERSSILWSKANKILIADTQMKVSGLDEGLMYEYRVYAENIAGIGKCSKSCEPVPARDPCDPPGQPEVTNITRKSVSLKWSKPHYDGGAKITGYIVERRELPDGRWLKCNYTNIQETYFEVTELTEDQRYEFRVFARNAADSVSEPSESTGPIIVKDDVEPPRVMMDVKFRDVIVVKAGEVLKINADIAGRPLPVISWAKDGIEIEERARTEIISTDNHTLLTVKDCIRRDTGQYVLTLKNVAGTRSVAVNCKVLDKPGPPAGPLEINGLTAEKCSLSWGRPQEDGGADIDYYIVEKRETSHLAWTICEGELQMTSCKVTKLLKGNEYIFRVTGVNKYGVGEPLESVAIKALDPFTVPSPPTSLEITSVTKESMTLCWSRPESDGGSEISGYIIERREKNSLRWVRVNKKPVYDLRVKSTGLREGCEYEYRVYAENAAGLSLPSETSPLIRAEDPVFLPSPPSKPKIVDSGKTTITIAWVKPLFDGGAPITGYTVEYKKSDDTDWKTSIQSLRGTEYTISGLTTGAEYVFRVKSVNKVGASDPSDSSDPQIAKEREEEPLFDIDSEMRKTLIVKAGASFTMTVPFRGRPVPNVLWSKPDTDLRTRAYVDTTDSRTSLTIENANRNDSGKYTLTIQNVLSAASLTLVVKVLDTPGPPTNITVQDVTKESAVLSWDVPENDGGAPVKNYHIEKREASKKAWVSVTNNCNRLSYKVTNLQEGAIYYFRVSGENEFGVGIPAETKEGVKITEKPSPPEKLGVTSISKDSVSLTWLKPEHDGGSRIVHYVVEALEKGQKNWVKCAVAKSTHHVVSGLRENSEYFFRVFAENQAGLSDPRELLLPVLIKEQLEPPEIDMKNFPSHTVYVRAGSNLKVDIPISGKPLPKVTLSRDGVPLKATMRFNTEITAENLTINLKESVTADAGRYEITAANSSGTTKAFINIVVLDRPGPPTGPVVISDITEESVTLKWEPPKYDGGSQVTNYILLKRETSTAVWTEVSATVARTMMKVMKLTTGEEYQFRIKAENRFGISDHIDSACVTVKLPYTTPGPPSTPWVTNVTRESITVGWHEPVSNGGSAVVGYHLEMKDRNSILWQKANKLVIRTTHFKVTTISAGLIYEFRVYAENAAGVGKPSHPSEPVLAIDACEPPRNVRITDISKNSVSLSWQQPAFDGGSKITGYIVERRDLPDGRWTKASFTNVTETQFIISGLTQNSQYEFRVFARNAVGSISNPSEVVGPITCIDSYGGPVIDLPLEYTEVVKYRAGTSVKLRAGISGKPAPTIEWYKDDKELQTNALVCVENTTDLASILIKDADRLNSGCYELKLRNAMGSASATIRVQILDKPGPPGGPIEFKTVTAEKITLLWRPPADDGGAKITHYIVEKRETSRVVWSMVSEHLEECIITTTKIIKGNEYIFRVRAVNKYGIGEPLESDSVVAKNAFVTPGPPGIPEVTKITKNSMTVVWSRPIADGGSDISGYFLEKRDKKSLGWFKVLKETIRDTRQKVTGLTENSDYQYRVCAVNAAGQGPFSEPSEFYKAADPIDPPGPPAKIRIADSTKSSITLGWSKPVYDGGSAVTGYVVEIRQGEEEEWTTVSTKGEVRTTEYVVSNLKPGVNYYFRVSAVNCAGQGEPIEMNEPVQAKDILEAPEIDLDVALRTSVIAKAGEDVQVLIPFKGRPPPTVTWRKDEKNLGSDARYSIENTDSSSLLTIPQVTRNDTGKYILTIENGVGEPKSSTVSVKVLDTPAACQKLQVKHVSRGTVTLLWDPPLIDGGSPIINYVIEKRDATKRTWSVVSHKCSSTSFKLIDLSEKTPFFFRVLAENEIGIGEPCETTEPVKAAEVPAPIRDLSMKDSTKTSVILSWTKPDFDGGSVITEYVVERKGKGEQTWSHAGISKTCEIEVSQLKEQSVLEFRVFAKNEKGLSDPVTIGPITVKELIITPEVDLSDIPGAQVTVRIGHNVHLELPYKGKPKPSISWLKDGLPLKESEFVRFSKTENKITLSIKNAKKEHGGKYTVILDNAVCRIAVPITVITLGPPSKPKGPIRFDEIKADSVILSWDVPEDNGGGEITCYSIEKRETSQTNWKMVCSSVARTTFKVPNLVKDAEYQFRVRAENRYGVSQPLVSSIIVAKHQFRIPGPPGKPVIYNVTSDGMSLTWDAPVYDGGSEVTGFHVEKKERNSILWQKVNTSPISGREYRATGLVEGLDYQFRVYAENSAGLSSPSDPSKFTLAVSPVDPPGTPDYIDVTRETITLKWNPPLRDGGSKIVGYSIEKRQGNERWVRCNFTDVSECQYTVTGLSPGDRYEFRIIARNAVGTISPPSQSSGIIMTRDENVPPIVEFGPEYFDGLIIKSGESLRIKALVQGRPVPRVTWFKDGVEIEKRMNMEITDVLGSTSLFVRDATRDHRGVYTVEAKNASGSAKAEIKVKVQDTPGKVVGPIRFTNITGEKMTLWWDAPLNDGCAPITHYIIEKRETSRLAWALIEDKCEAQSYTAIKLINGNEYQFRVSAVNKFGVGRPLDSDPVVAQIQYTVPDAPGIPEPSNITGNSITLTWARPESDGGSEIQQYILERREKKSTRWVKVISKRPISETRFKVTGLTEGNEYEFHVMAENAAGVGPASGISRLIKCREPVNPPGPPTVVKVTDTSKTTVSLEWSKPVFDGGMEIIGYIIEMCKADLGDWHKVNAEACVKTRYTVTDLQAGEEYKFRVSAINGAGKGDSCEVTGTIKAVDRLTAPELDIDANFKQTHVVRAGASIRLFIAYQGRPTPTAVWSKPDSNLSLRADIHTTDSFSTLTVENCNRNDAGKYTLTVENNSGSKSITFTVKVLDTPGPPGPITFKDVTRGSATLMWDAPLLDGGARIHHYVVEKREASRRSWQVISEKCTRQIFKVNDLAEGVPYYFRVSAVNEYGVGEPYEMPEPIVATEQPAPPRRLDVVDTSKSSAVLAWLKPDHDGGSRITGYLLEMRQKGSDFWVEAGHTKQLTFTVERLVEKTEYEFRVKAKNDAGYSEPREAFSSVIIKEPQIEPTADLTGITNQLITCKAGSPFTIDVPISGRPAPKVTWKLEEMRLKETDRVSITTTKDRTTLTVKDSMRGDSGRYFLTLENTAGVKTFSVTVVVIGRPGPVTGPIEVSSVSAESCVLSWGEPKDGGGTEITNYIVEKRESGTTAWQLVNSSVKRTQIKVTHLTKYMEYSFRVSSENRFGVSKPLESAPIIAEHPFVPPSAPTRPEVYHVSANAMSIRWEEPYHDGGSKIIGYWVEKKERNTILWVKENKVPCLECNYKVTGLVEGLEYQFRTYALNAAGVSKASEASRPIMAQNPVDAPGRPEVTDVTRSTVSLIWSAPAYDGGSKVVGYIIERKPVSEVGDGRWLKCNYTIVSDNFFTVTALSEGDTYEFRVLAKNAAGVISKGSESTGPVTCRDEYAPPKAELDARLHGDLVTIRAGSDLVLDAAVGGKPEPKIIWTKGDKELDLCEKVSLQYTGKRATAVIKFCDRSDSGKYTLTVKNASGTKAVSVMVKVLDSPGPCGKLTVSRVTQEKCTLAWSLPQEDGGAEITHYIVERRETSRLNWVIVEGECPTLSYVVTRLIKNNEYIFRVRAVNKYGPGVPVESEPIVARNSFTIPSPPGIPEEVGTGKEHIIIQWTKPESDGGNEISNYLVDKREKKSLRWTRVNKDYVVYDTRLKVTSLMEGCDYQFRVTAVNAAGNSEPSEASNFISCREPSYTPGPPSAPRVVDTTKHSISLAWTKPMYDGGTDIVGYVLEMQEKDTDQWYRVHTNATIRNTEFTVPDLKMGQKYSFRVAAVNVKGMSEYSESIAEIEPVERIEIPDLELADDLKKTVTIRAGASLRLMVSVSGRPPPVITWSKQGIDLASRAIIDTTESYSLLIVDKVNRYDAGKYTIEAENQSGKKSATVLVKVYDTPGPCPSVKVKEVSRDSVTITWEIPTIDGGAPVNNYIVEKREAAMRAFKTVTTKCSKTLYRISGLVEGTMYYFRVLPENIYGIGEPCETSDAVLVSEVPLVPAKLEVVDVTKSTVTLAWEKPLYDGGSRLTGYVLEACKAGTERWMKVVTLKPTVLEHTVTSLNEGEQYLFRIRAQNEKGVSEPRETVTAVTVQDLRVLPTIDLSTMPQKTIHVPAGRPVELVIPIAGRPPPAASWFFAGSKLRESERVTVETHTKVAKLTIRETTIRDTGEYTLELKNVTGTTSETIKVIILDKPGPPTGPIKIDEIDATSITISWEPPELDGGAPLSGYVVEQRDAHRPGWLPVSESVTRSTFKFTRLTEGNEYVFRVAATNRFGIGSYLQSEVIECRSSIRIPGPPETLQIFDVSRDGMTLTWYPPEDDGGSQVTGYIVERKEVRADRWVRVNKVPVTMTRYRSTGLTEGLEYEHRVTAINARGSGKPSRPSKPIVAMDPIAPPGKPQNPRVTDTTRTSVSLAWSVPEDEGGSKVTGYLIEMQKVDQHEWTKCNTTPTKIREYTLTHLPQGAEYRFRVLACNAGGPGEPAEVPGTVKVTEMLEYPDYELDERYQEGIFVRQGGVIRLTIPIKGKPFPICKWTKEGQDISKRAMIATSETHTELVIKEADRGDSGTYDLVLENKCGKKAVYIKVRVIGSPNSPEGPLEYDDIQVRSVRVSWRPPADDGGADILGYILERREVPKAAWYTIDSRVRGTSLVVKGLKENVEYHFRVSAENQFGISKPLKSEEPVTPKTPLNPPEPPSNPPEVLDVTKSSVSLSWSRPKDDGGSRVTGYYIERKETSTDKWVRHNKTQITTTMYTVTGLVPDAEYQFRIIAQNDVGLSETSPASEPVVCKDPFDKPSQPGELEILSISKDSVTLQWEKPECDGGKEILGYWVEYRQSGDSAWKKSNKERIKDKQFTIGGLLEATEYEFRVFAENETGLSRPRRTAMSIKTKLTSGEAPGIRKEMKDVTTKLGEAAQLSCQIVGRPLPDIKWYRFGKELIQSRKYKMSSDGRTHTLTVMTEEQEDEGVYTCIATNEVGEVETSSKLLLQATPQFHPGYPLKEKYYGAVGSTLRLHVMYIGRPVPAMTWFHGQKLLQNSENITIENTEHYTHLVMKNVQRKTHAGKYKVQLSNVFGTVDAILDVEIQDKPDKPTGPIVIEALLKNSAVISWKPPADDGGSWITNYVVEKCEAKEGAEWQLVSSAISVTTCRIVNLTENAGYYFRVSAQNTFGISDPLEVSSVVIIKSPFEKPGAPGKPTITAVTKDSCVVAWKPPASDGGAKIRNYYLEKREKKQNKWISVTTEEIRETVFSVKNLIEGLEYEFRVKCENLGGESEWSEISEPITPKSDVPIQAPHFKEELRNLNVRYQSNATLVCKVTGHPKPIVKWYRQGKEIIADGLKYRIQEFKGGYHQLIIASVTDDDATVYQVRATNQGGSVSGTASLEVEVPAKIHLPKTLEGMGAVHALRGEVVSIKIPFSGKPDPVITWQKGQDLIDNNGHYQVIVTRSFTSLVFPNGVERKDAGFYVVCAKNRFGIDQKTVELDVADVPDPPRGVKVSDVSRDSVNLTWTEPASDGGSKITNYIVEKCATTAERWLRVGQARETRYTVINLFGKTSYQFRVIAENKFGLSKPSEPSEPTITKEDKTRAMNYDEEVDETREVSMTKASHSSTKELYEKYMIAEDLGRGEFGIVHRCVETSSKKTYMAKFVKVKGTDQVLVKKEISILNIARHRNILHLHESFESMEELVMIFEFISGLDIFERINTSAFELNEREIVSYVHQVCEALQFLHSHNIGHFDIRPENIIYQTRRSSTIKIIEFGQARQLKPGDNFRLLFTAPEYYAPEVHQHDVVSTATDMWSLGTLVYVLLSGINPFLAETNQQIIENIMNAEYTFDEEAFKEISIEAMDFVDRLLVKERKSRMTASEALQHPWLKQKIERVSTKVIRTLKHRRYYHTLIKKDLNMVVSAARISCGGAIRSQKGVSVAKVKVASIEIGPVSGQIMHAVGEEGGHVKYVCKIENYDQSTQVTWYFGVRQLENSEKYEITYEDGVAILYVKDITKLDDGTYRCKVVNDYGEDSSYAELFVKGVREVYDYYCRRTMKKIKRRTDTMRLLERPPEFTLPLYNKTAYVGENVRFGVTITVHPEPHVTWYKSGQKIKPGDNDKKYTFESDKGLYQLTINSVTTDDDAEYTVVARNKYGEDSCKAKLTVTLHPPPTDSTLRPMFKRLLANAECQEGQSVCFEIRVSGIPPPTLKWEKDGQPLSLGPNIEIIHEGLDYYALHIRDTLPEDTGYYRVTATNTAGSTSCQAHLQVERLRYKKQEFKSKEEHERHVQKQIDKTLRMAEILSGTESVPLTQVAKEALREAAVLYKPAVSTKTVKGEFRLEIEEKKEERKLRMPYDVPEPRKYKQTTIEEDQRIKQFVPMSDMKWYKKIRDQYEMPGKLDRVVQKRPKRIRLSRWEQFYVMPLPRITDQYRPKWRIPKLSQDDLEIVRPARRRTPSPDYDFYYRPRRRSLGDISDEELLLPIDDYLAMKRTEEERLRLEEELELGFSASPPSRSPPHFELSSLRYSSPQAHVKVEETRKDFRYSTYHIPTKAEASTSYAELRERHAQAAYRQPKQRQRIMAEREDEELLRPVTTTQHLSEYKSELDFMSKEEKSRKKSRRQREVTEITEIEEEYEISKHAQRESSSSASRLLRRRRSLSPTYIELMRPVSELIRSRPQPAEEYEDDTERRSPTPERTRPRSPSPVSSERSLSRFERSARFDIFSRYESMKAALKTQKTSERKYEVLSQQPFTLDHAPRITLRMRSHRVPCGQNTRFILNVQSKPTAEVKWYHNGVELQESSKIHYTNTSGVLTLEILDCHTDDSGTYRAVCTNYKGEASDYATLDVTGGDYTTYASQRRDEEVPRSVFPELTRTEAYAVSSFKKTSEMEASSSVREVKSQMTETRESLSSYEHSASAEMKSAALEEKSLEEKSTTRKIKTTLAARILTKPRSMTVYEGESARFSCDTDGEPVPTVTWLRKGQVLSTSARHQVTTTKYKSTFEISSVQASDEGNYSVVVENSEGKQEAEFTLTIQKARVTEKAVTSPPRVKSPEPRVKSPEAVKSPKRVKSPEPSHPKAVSPTETKPTPTEKVQHLPVSAPPKITQFLKAEASKEIAKLTCVVESSVLRAKEVTWYKDGKKLK

SEQ ID NO: 993 - skipped

SEQ ID NO: 994 - protein, 269 aa, Homo sapiens
MAAALFVLLGFALLGTHGASGAAGTVFTTVEDLGSKILLTCSLNDSATEVTGHRWLKGGVVLKEDALPGQKTEFKVDSDDQWGEYSCVFLPEPMGTANIQLHGPPRVKAVKSSEHINEGETAMLVCKSESVPPVTDWAWYKITDSEDKALMNGSESRFFVSSSQGRSELHIENLNMEADPGQYRCNGTSSKGSDQAIITLRVRSHLAALWPFLGIVAEVLVLVTIIFIYEKRRKPEDVLDDDDAGSAPLKSSGQHQNDKGKNVRQRNSS

SEQ ID NO: 995 - protein, 1588 aa, Homo sapiens
MVQKKKFCPRLLDYLVIVGARHPSSDSVAQTPELLRRYPLEDHTEFPLPPDVVFFCQPEGCLSVRQRRMSLRDDTSFVFTLTDKDTGVTRYGICVNFYRSFQKRISKEKGEGGAGSRGKEGTHATCASEEGGTESSESGSSLQPLSADSTPDVNQSPRGKRRAKAGSRSRNSTLTSLCVLSHYPFFSTFRECLYTLKRLVDCCSERLLGKKLGIPRGVQRDTMWRIFTGSLLVEEKSSALLHDLREIEAWIYRLLRSPVPVSGQKRVDIEVLPQELQPALTFALPDPSRFTLVDFPLHLPLELLGVDACLQVLTCILLEHKVVLQSRDYNALSMSVMAFVAMIYPLEYMFPVIPLLPTCMASAEQLLLAPTPYIIGVPASFFLYKLDFKMPDDVWLVDLDSNRVIAPTNAEVLPILPEPESLELKKHLKQALASMSLNTQPILNLEKFHEGQEIPLLLGRPSNDLQSTPSTEFNPLIYGNDVDSVDVATRVAMVRFFNSANVLQGFQMHTRTLRLFPRPVVAFQAGSFLASRPRQTPFAEKLARTQAVEYFGEWILNPTNYAFQRIHNNMFDPALIGDKPKWYAHQLQPIHYRVYDSNSQLAEALSVPPERDSDSEPTDDSGSDSMDYDDSSSSYSSLGDFVSEMMKCDINGDTPNVDPLTHAALGDASEVEIDELQNQKEAEEPGPDSENSQENPPLRSSSSTTASSSPSTVIHGANSEPADSTEMDDKAAVGVSKPLPSVPPSIGKSNVDRRQAEIGEGSVRRRIYDNPYFEPQYGFPPEEDEDEQGESYTPRFSQHVSGNRAQKLLRPNSLRLASDSDAESDSRASSPNSTVSNTSTEGFGGIMSFASSLYRNHSTSFSLSNLTLPTKGAREKATPFPSLKGNRRALVDQKSSVIKHSPTVKREPPSPQGRSSNSSENQQFLKEVVHSVLDGQGVGWLNMKKVRRLLESEQLRVFVLSKLNRMVQSEDDARQDIIPDVEISRKVYKGMLDLLKCTVLSLEQSYAHAGLGGMASIFGLLEIAQTHYYSKEPDKRKRSPTESVNTPVGKDPGLAGRGDPKAMAQLRVPQLGPRAPSATGKGPKELDTRSLKEENFIASIGPEVIKPVFDLGETEEKKSQISADSGVSLTSSSQRTDQDSVIGVSPAVMIRSSSQDSEVSTVVSNSSGETLGADSDLSSNAGDGPGGEGSVHLASSRGTLSDSEIETNSATSTIFGKAHSLKPSIKEKLAGSPIRTSEDVSQRVYLYEGLLGKERSTLWDQMQFWEDAFLDAVMLEREGMGMDQGPQEMIDRYLSLGEHDRKRLEDDEDRLLATLLHNLISYMLLMKVNKNDIRKKVRRLMGKSHIGLVYSQQINEVLDQLANLNGRDLSIWSSGSRHMKKQTFVVHAGTDTNGDIFFMEVCDDCVVLRSNIGTVYERWWYEKLINMTYCPKTKVLCLWRRNGSETQLNKFYTKKCRELYYCVKDSMERAAARQQSIKPGPELGGEFPVQDLKTGEGGLLQVTLEGINLKFMHNQVFIELNHIKKCNTVRGVFVLEEFVPEIKEVVSHKYKTPMAHEICYSVLCLFSYVAAVHSSEEDLRTPPRPVSS

SEQ ID NO: 996 - protein, 642 aa, Homo sapiens
MQPRSERPAGRTQSPEHGSPGPGPEAPPPPPPQPPAPEAERTRPRQARPAAPMEGAVQLLSREGHSVAHNSKRHYHDAFVAMSRMRQRGLLCDIVLHVAAKEIRAHKVVLASCSPYFHAMFTNEMSESRQTHVTLHDIDPQALDQLVQFAYTAEIVVGEGNVQTLLPAASLLQLNGVRDACCKFLLSQLDPSNCLGIRGFADAHSCSDLLKAAHRYVLQHFVDVAKTEEFMLLPLKQVLELVSSDSLNVPSEEEVYRAVLSWVKHDVDARRQHVPRLMKCVRLPLLSRDFLLGHVDAESLVRHHPDCKDLLIEALKFHLLPEQRGVLGTSRTRPRRCEGAGPVLFAVGGGSLFAIHGDCEAYDTRTDRWHVVASMSTRRARVGVAAVGNRLYAVGGYDGTSDLATVESYDPVTNTWQPEVSMGTRRSCLGVAALHGLLYSAGGYDGASCLNSAERYDPLTGTWTSVAAMSTRRRYVRVATLDGNLYAVGGYDSSSHLATVEKYEPQVNVWSPVASMLSRRSSAGVAVLEGALYVAGGNDGTSCLNSVERYSPKAGAWESVAPMNIRRSTHDLVAMDGWLYAVGGNDGSSSLNSIEKYNPRTNKWVAASCMFTRRSSVGVAVLELLNFPPPSSPTLSVSSTSL

SEQ ID NO: 997 - protein, 2692 aa, Homo sapiens
MMNNSGYSDAGLGLGDETDEMPSTEKDLAEDAPWKKIQQNTFTRWCNEHLKCVGKRLTDLQRDLSDGLRLIALLEVLSQKRMYRKFHPRPNFRQMKLENVSVALEFLEREHIKLVSIDSKAIVDGNLKLILGLIWTLILHYSISMPMWEDEDDEDARKQTPKQRLLGWIQNKVPQLPITNFNRDWQDGKALGALVDNCAPGLCPDWEAWDPNQPVENAREAMQQADDWLGVPQVIAPEEIVDPNVDEHSVMTYLSQFPKAKLKPGAPVRSKQLNPKKAIAYGPGIEPQGNTVLQPAHFTVQTVDAGVGEVLVYIEDPEGHTEEAKVVPNNDKDRTYAVSYVPKVAGLHKVTVLFAGQNIERSPFEVNVGMALGDANKVSARGPGLEPVGNVANKPTYFDIYTAGAGTGDVAVVIVDPQGRRDTVEVALEDKGDSTFRCTYRPAMEGPHTVHVAFAGAPITRSPFPVHVSEACNPNACRASGRGLQPKGVRVKEVADFKVFTKGAGSGELKVTVKGPKGTEEPVKVREAGDGVFECEYYPVVPGKYVVTITWGGYAIPRSPFEVQVSPEAGVQKVRAWGPGLETGQVGKSADFVVEAIGTEVGTLGFSIEGPSQAKIECDDKGDGSCDVRYWPTEPGEYAVHVICDDEDIRDSPFIAHILPAPPDCFPDKVKAFGPGLEPTGCIVDKPAEFTIDARAAGKGDLKLYAQDADGCPIDIKVIPNGDGTFRCSYVPTKPIKHTIIISWGGVNVPKSPFRVNVGEGSHPERVKVYGPGVEKTGLKANEPTYFTVDCSEAGQGDVSIGIKCAPGVVGPAEADIDFDIIKNDNDTFTVKYTPPGAGRYTIMVLFANQEIPASPFHIKVDPSHDASKVKAEGPGLNRTGVEVGKPTHFTVLTKGAGKAKLDVQFAGTAKGEVVRDFEIIDNHDYSYTVKYTAVQQGNMAVTVTYGGDPVPKSPFVVNVAPPLDLSKIKVQGLNSKVAVGQEQAFSVNTRGAGGQGQLDVRMTSPSRRPIPCKLEPGGGAEAQAVRYMPPEEGPYKVDITYDGHPVPGSPFAVEGVLPPDPSKVCAYGPGLKGGLVGTPAPFSIDTKGAGTGGLGLTVEGPCEAKIECQDNGDGSCAVSYLPTEPGEYTINILFAEAHIPGSPFKATIRPVFDPSKVRASGPGLERGKVGEAATFTVDCSEAGEAELTIEILSDAGVKAEVLIHNNADGTYHITYSPAFPGTYTITIKYGGHPVPKFPTRVHVQPAVDTSGVKVSGPGVEPHGVLREVTTEFTVDARSLTATGGNHVTARVLNPSGAKTDTYVTDNGDGTYRVQYTAYEEGVHLVEVLYDEVAVPKSPFRVGVTEGCDPTRVRAFGPGLEGGLVNKANRFTVETRGAGTGGLGLAIEGPSEAKMSCKDNKDGSCTVEYIPFTPGDYDVNITFGGRPIPGSPFRVPVKDVVDPGKVKCSGPGLGAGVRARVPQTFTVDCSQAGRAPLQVAVLGPTGVAEPVEVRDNGDGTHTVHYTPATDGPYTVAVKYADQEVPRSPFKIKVLPAHDASKVRASGPGLNASGIPASLPVEFTIDARDAGEGLLTVQILDPEGKPKKANIRDNGDGTYTVSYLPDMSGRYTITIKYGGDEIPYSPFRIHALPTGDASKCLVTVSIGGHGLGACLGPRIQIGQETVITVDAKAAGEGKVTCTVSTPDGAELDVDVVENHDGTFDIYYTAPEPGKYVITIRFGGEHIPNSPFHVLATEEPVVPVEPMESMLRPFNLVIPFAVQKGELTGEVRMPSGKTARPNITDNKDGTITVRYAPTEKGLHQMGIKYDGNHIPGSPLQFYVDAINSRHVSAYGPGLSHGMVNKPATFTIVTKDAGEGGLSLAVEGPSKAEITCKDNKDGTCTVSYLPTAPGDYSIIVRFDDKHIPGSPFTAKITGDDSMRTSQLNVGTSTDVSLKITESDLSQLTASIRAPSGNEEPCLLKRLPNRHIGISFTPKEVGEHVVSVRKSGKHVTNSPFKILVGPSEIGDASKVRVWGKGLSEGHTFQVAEFIVDTRNAGYGGLGLSIEGPSKVDINCEDMEDGTCKVTYCPTEPGTYIINIKFADKHVPGSPFTVKVTGEGRMKESITRRRQAPSIATIGSTCDLNLKIPGNWFQMVSAQERLTRTFTRSSHTYTRTERTEISKTRGGETKREVRVEESTQVGGDPFPAVFGDFLGRERLGSFGSITRQQEGEASSQDMTAQVTSPSGKVEAAEIVEGEDSAYSVRFVPQEMGPHTVAVKYRGQHVPGSPFQFTVGPLGEGGAHKVRAGGTGLERGVAGVPAEFSIWTREAGAGGLSIAVEGPSKAEIAFEDRKDGSCGVSYVVQEPGDYEVSIKFNDEHIPDSPFVVPVASLSDDARRLTVTSLQETGLKVNQPASFAVQLNGARGVIDARVHTPSGAVEECYVSELDSDKHTIRFIPHENGVHSIDVKFNGAHIPGSPFKIRVGEQSQAGDPGLVSAYGPGLEGGTTGVSSEFIVNTLNAGSGALSVTIDGPSKVQLDCRECPEGHVVTYTPMAPGNYLIAIKYGGPQHIVGSPFKAKVTGPRLSGGHSLHETSTVLVETVTKSSSSRGSSYSSIPKFSSDASKVVTRGPGLSQAFVGQKNSFTVDCSKAGTNMMMVGVHGPKTPCEEVYVKHMGNRVYNVTYTVKEKGDYILIVKWGDESVPGSPFKVKVP

SEQ ID NO: 998 - protein, 1153 aa, Homo sapiens
MALKMVKGSIDRMFDKNLQDLVRGIRNHKEDEAKYISQCIDEIKQELKQDNIAVKANAVCKLTYLQMLGYDISWAAFNIIEVMSASKFTFKRIGYLAASQSFHEGTDVIMLTTNQIRKDLSSPSQYDTGVALTGLSCFVTPDLARDLANDIMTLMSHTKPYIRKKAVLIMYKVFLKYPESLRPAFPRLKEKLEDPDPGVQSAAVNVICELARRNPKNYLSLAPLFFKLMTSSTNNWVLIKIIKLFGALTPLEPRLGKKLIEPLTNLIHSTSAMSLLYECVNTVIAVLISLSSGMPNHSASIQLCVQKLRILIEDSDQNLKYLGLLAMSKILKTHPKSVQSHKDLILQCLDDKDESIRLRALDLLYGMVSKKNLMEIVKKLMTHVDKAEGTTYRDELLTKIIDICSQSNYQYITNFEWYISILVELTRLEGTRHGHLIAAQMLDVAIRVKAIRKFAVSQMSALLDSAHLLASSTQRNGICEVLYAAAWICGEFSEHLQEPHHTLEAMLRPRVTTLPGHIQAVYVQNVVKLYASILQQKEQAGEAEGAQAVTQLMVDRLPQFVQSADLEVQERASCILQLVKHIQKLQAKDVPVAEEVSALFAGELNPVAPKAQKKVPVPEGLDLDAWINEPLSDSESEDERPRAVFHEEEQRRPKHRPSEADEEELARRREARKQEQANNPFYIKSSPSPQKRYQDTPGVEHIPVVQIDLSVPLKVPGLPMSDQYVKLEEERRHRQKLEKDKRRKKRKEKEKKGKRRHSSLPTESDEDIAPAQQVDIVTEEMPENALPSDEDDKDPNDPYRALDIDLDKPLADSEKLPIQKHRNTETSKSPEKDVPMVEKKSKKPKKKEKKHKEKERDKEKKKEKEKKKSPKPKKKKHRKEKEERTKGKKKSKKQPPGSEEAAGEPVQNGAPEEEQLPPESSYSLLAENSYVKMTCDIRGSLQEDSQVTVAIVLENRSSSILKGMELSVLDSLNARMARPQGSSVHDGVPVPFQLPPGVSNEAQYVFTIQSIVMAQKLKGTLSFIAKNDEGATHEKLDFRLHFSCSSYLITTPCYSDAFAKLLESGDLSMSSIKVDGIRMSFQNLLAKICFHHHFSVVERVDSCASMYSRSIQGHHVCLLVKKGENSVSVDGKCSDSTLLSNLLEEMKATLAKC

SEQ ID NO: 999 - protein, 515 aa, Homo sapiens
MESLGLHTVTLSDGTTAYVQQAVKGEKLLEGQVIQLEDGTTAYIHQVTVQKEALSFEDGQPVQLEDGSMAYIHRTPREGYDPSTLEAVQLEDGSTAYIHHPVAVPSESTILAVQTEVGLEDLAAEDDEGFSADAVVALEQYASKVLHDSQIPRNGKGQQVGDRAFRCGYKGCGRLYTTAHHLKVHERAHTGDRPYRCDFPSCGKAFATGYGLKSHVRTHTGEKPYKCPEELCSKAFKTSGDLQKHVRTHTGERPFQCPFEGCGRSFTTSNIRKVHVRTHTGERPYTCPEPHCGRGFTSATNYKNHVRIHTGEKPYVCTVPGCGKRFTEYSSLYKHHVVHTHCKPYTCSTCGKTYRQTSTLAMHKRSAHGELEATEESEQALYEQQQLEAASAAEESPPPKRPRIAYLSEVKEERDDIPAQVAMVTEEDGAPQVALITQDGAQQVTIITSGAVVAEDSSVASLRHQQVALLATANGTHIAVQLEEQQTLEEAINVATAAMQQGAVTLETTVSESGC

SEQ ID NO: 1000 - protein, 1035 aa, Homo sapiens
MSTENVEGKPSNLGERGRARSSTFLRVVQPMFNHSIFTSAVSPAAERIRFILGEEDDSPAPPQLFTELDELLAVDGQEMEWKETARWIKFEEKVEQGGERWSKPHVATLSLHSLFELRTCMEKGSIMLDREASSLPQLVEMIVDHQIETGLLKPELKDKVTYTLLRKHRHQTKKSNLRSLADIGKTVSSASRMFTNPDNGSPAMTHRNLTSSSLNDISDKPEKDQLKNKFMKKLPRDAEASNVLVGEVDFLDTPFIAFVRLQQAVMLGALTEVPVPTRFLFILLGPKGKAKSYHEIGRAIATLMSDEVFHDIAYKAKDRHDLIAGIDEFLDEVIVLPPGEWDPAIRIEPPKSLPSSDKRKNMYSGGENVQMNGDTPHDGGHGGGGHGDCEELQRTGRFCGGLIKDIKRKAPFFASDFYDALNIQALSAILFIYLATVTNAITFGGLLGDATDNMQGVLESFLGTAVSGAIFCLFAGQPLTILSSTGPVLVFERLLFNFSKDNNFDYLEFRLWIGLWSAFLCLILVATDASFLVQYFTRFTEEGFSSLISFIFIYDAFKKMIKLADYYPINSNFKVGYNTLFSCTCVPPDPANISISNDTTLAPEYLPTMSSTDMYHNTTFDWAFLSKKECSKYGGNLVGNNCNFVPDITLMSFILFLGTYTSSMALKKFKTSPYFPTTARKLISDFAIILSILIFCVIDALVGVDTPKLIVPSEFKPTSPNRGWFVPPFGENPWWVCLAAAIPALLVTILIFMDQQITAVIVNRKEHKLKKGAGYHLDLFWVAILMVICSLMALPWYVAATVISIAHIDSLKMETETSAPGEQPKFLGVREQRVTGTLVFILTGLSVFMAPILKFIPMPVLYGVFLYMGVASLNGVQFMDRLKLLLMPLKHQPDFIYLRHVPLRRVHLFTFLQVLCLALLWILKSTVAAIIFPVMILALVAVRKGMDYLFSQHDLSFLDDVIPEKDKKKKEDEKKKKKKKGSLDSDNDDSDCPYSEKVPSIKIPMDIMEQQPFLSDSKPSDRERSPTFLERHTSC

SEQ ID NO: 1001 - protein, 349 aa, Homo sapiens
MHQDGISSMNQLGGLFVNGRPLPLDTRQQIVRLAVSGMRPCDISRILKVSNGCVSKILGRYYRTGVLEPKGIGGSKPRLATPPVVARIAQLKGECPALFAWEIQRQLCAEGLCTQDKTPSVSSINRVLRALQEDQGLPCTRLRSPAVLAPAVLTPHSGSETPRGTHPGTGHRNRTIFSPSQAEALEKEFQRGQYPDSVARGKLATATSLPEDTVRVWFSNRRAKWRRQEKLKWEMQLPGASQGLTVPRVAPGIISAQQSPGSVPTAALPALEPLGPSCYQLCWATAPERCLSDTPPKACLKPCWDCGSFLLPVIAPSCVDVAWPCLDASLAHHLIGGAGKATPTHFSHP

SEQ ID NO: 1002 - protein, 2269 aa, Homo sapiens
MAEPSSARRPVPLIESELYFLIARYLSAGPCRRAAQVLVQELEQYQLLPKRLDWEGNEHNRSYEELVLSNKHVAPDHLLQICQRIGPMLDKEIPPSISRVTSLLGAGRQSLLRTAKDCRHTVWKGSAFAALHRGRPPEMPVNYGSPPNLVEIHRGKQLTGCSTFSTAFPGTMYQHIKMHRRILGHLSAVYCVAFDRTGHRIFTGSDDCLVKIWSTHNGRLLSTLRGHSAEISDMAVNYENTMIAAGSCDKIIRVWCLRTCAPVAVLQGHTGSITSLQFSPMAKGSQRYMVSTGADGTVCFWQWDLESLKFSPRPLKFTEKPRPGVQMLCSSFSVGGMFLATGSTDHVIRMYFLGFEAPEKIAELESHTDKVDSIQFCNNGDRFLSGSRDGTARIWRFEQLEWRSILLDMATRISGDLSSEEERFMKPKVTMIAWNQNDSIVVTAVNDHVLKVWNSYTGQLLHNLMGHADEVFVLETHPFDSRIMLSAGHDGSIFIWDITKGTKMKHYFNMIEGQGHGAVFDCKFSQDGQHFACTDSHGHLLIFGFGCSKPYEKIPDQMFFHTDYRPLIRDSNNYVLDEQTQQAPHLMPPPFLVDVDGNPHPTKYQRLVPGRENSADEHLIPQLGYVATSDGEVIEQIISLQTNDNDERSPESSILDGMIRQLQQQQDQRMGADQDTIPRGLSNGEETPRRGFRRLSLDIQSPPNIGLRRSGQVEGVRQMHQNAPRSQIATERDLQAWKRRVVVPEVPLGIFRKLEDFRLEKGEEERNLYIIGRKRKTLQLSHKSDSVVLVSQSRQRTCRRKYPNYGRRNRSWRELSSGNESSSSVRHETSCDQSEGSGSSEEDEWRSDRKSESYSESSSDSSSRYSDWTADAGINLQPPLRTSCRRRITRFCSSSEDEISTENLSPPKRRRKRKKENKPKKENLRRMTPAELANMEHLYEFHPPVWITDTTLRKSPFVPQMGDEVIYFRQGHEAYIEAVRRNNIYELNPNKEPWRKMDLRDQELVKIVGIRYEVGPPTLCCLKLAFIDPATGKLMDKSFSIRYHDMPDVIDFLVLRQFYDEARQRNWQSCDRFRSIIDDAWWFGTVLSQEPYQPQYPDSHFQCYIVRWDNTEIEKLSPWDMEPIPDNVDPPEELGASISVTTDELEKLLYKPQAGEWGQKSRDEECDRIISGIDQLLNLDIAAAFAGPVDLCTYPKYCTVVAYPTDLYTIRMRLVNRFYRRLSALVWEVRYIEHNARTFNEPESVIARSAKKITDQLLKFIKNQHCTNISELSNTSENDEQNAEDLDDSDLPKTSSGRRRVHDGKKSIRATNYVESNWKKQCKELVNLIFQCEDSEPFRQPVDLVEYPDYRDIIDTPMDFGTVRETLDAGNYDSPLEFCKDIRLIFSNAKAYTPNKRSKIYSMTLRLSALFEEKMKKISSDFKIGQKFNEKLRRSQRFKQRQNCKGDSQPNKSIRNLKPKRLKSQTKIIPELVGSPTQSTSSRTAYLGTHKTSAGISSGVTSGDSSDSAESSERRKRNRPITNGSTLSESEVEDSLATSLSSSASSSSEESKESSRARESSSRSGLSRSSNLRVTRTRAAQRKTGPVSLANGCGRKATRKRVYLSDSDNNSLETGEILKARAGNNRKVLRKCAAVAANKIKLMSDVEENSSSESVCSGRKLPHRNASAVARKKLLHNSEDEQSLKSEIEEEELKDENQLLPVSSSHTAQSNVDESENRDSESESDLRVARKNWHANGYKSHTPAPSKTKFLKIESSEEDSKSHDSDHACNRTAGPSTSVQKLKAESISEEADSEPGRSGGRKYNTFHKNASFFKKTKILSDSEDSESEEQDREDGKCHKMEMNPISGNLNCDPIAMSQCSSDHGCETDLDSDDDKIEKPNNFMKDSASQDNGLSRKISRKRVCSSDSDSSLQVVKKSSKARTGLLRITRRCAATAANKIKLMSDVEDVSLENVHTRSKNGRKKPLHLACTTAKKKLSDCEGSVHCEVPSEQYACEGKPPDPDSEGSTKVLSQALNGDSDSEDMLNSEHKHRHTNIHKIDAPSKRKSSSVTSSGEDSKSHIPGSETDRTFSSESTLAQKATAENNFEVELNYGLRRWNGRRLRTYGKAPFSKTKVIHDSQETAEKEVKRKRSHPELENVKISETTGNSKFRPDTSSKSSDLGSVTESDIDCTDNTKTKRRKTKGKAKVVRKGKTFTANISKTVRRQRQSKRPRLSVDDNDWEDLDYAKSKRVLRRSKIKTRNQGRRTVRYHDGDDDRSLENVLDFNGCTL

SEQ ID NO: 1003 - protein, 432 aa, Homo sapiens
MSFRDLRNFTEMMRALGYPRHISMENFRTPNFGLVSEVLLWLVKRYEPQTDIPPDVDTEQDRVFFIKAIAQFMATKAHIKLNTKKLYQADGYAVKELLKITSVLYNAMKTKGMEGSEIVEEDVNKFKFDLGSKIADLKAARQLASEITSKGASLYDLLGMEVELREMRTEAIARPLEINETEKVMRIAIKEILTQVQKTKDLLNNVASDEANLEAKIEKRKLELERNRKRLETLQSVRPCFMDEYEKTEEELQKQYDTYLEKFQNLTYLEQQLEDHHRMEQERFEEAKNTLCLIQNKLKEEEKRLLKSGSNDDSDIDIQEDDESDSELEERRLPKPQTAMEMLMQGRPGKRIVGTMQGGDSDDNMEAAPALLGKCKTSSSKKQEDSEESEIDMEDDDDEDDDLEDESISLSPTKPNRRVRKSEPLDESDNDF

SEQ ID NO: 1004 - protein, 1430 aa, Homo sapiens
MTSAAEIKKPPVAPKPKFVVANNKPAPPPIAPKPDIVISSVPQSTKKMKPAIAPKPKVLKTSPVREIGQSPSRKIMLNLEGHKQELAESTDNFNCKYEGNQSNDYISPMCSCSSECIHKLGHRENLCVKQLVLEPLEMNENLENSKIDETLTIKTRSKCDLYGEKAKNQGGVVLKASVLEEELKDALIHQMPPFISAQKHRPTDSPEMNGGCNSNGQFRIEFADLSPSPSSFEKVPDHHSCHLQLPSDECEHFETCQDDSEKSNNCFQSSELEALENGKRSTLISSDGVSKKSEVKDLGPLEIHLVPYTPKFPTPKPRKTRTARLLRQKCVDTPSESTEEPGNSDSSSSCLTENSLKINKISVLHQNVLCKQEQVDKMKLGNKSELNMESNSDAQDLVNSQKAMCNETTSFEKMAPSFDKDSNLSSDSTTVDGSSMSLAVDEGTGFIRCTVSMSLPKQLKLTCNEHLQSGRNLGVSAPQMQKESVIKEENSLRIVPKKPQRHSLPATGVLKKAASEELLEKSSYPSSEEKSSEKSLERNHLQHLCAQNRGVSSSFDMPKRASEKPVWKLPHPILPFSGNPEFLKSVTVSSNSEPSTALTKPRAKSLSAMDVEKCTKPCKDSTKKNSFKKLLSMKLSICFMKSDFQKFWSKSSQLGDTTTGHLSSGEQKGIESDWQGLLVGEEKRSKPIKAYSTENYSLESQKKRKKSRGQTSAANGLRAESLDDQMLSRESSSQAPYKSVTSLCAPEYENIRHYEEIPEYENLPFIMAIRKTQELEWQNSSSMEDADANVYEVEEPYEAPDGQLQLGPRHQHSSSGASQEEQNDLGLGDLPSDEEEIINSSDEDDVSSESSKGEPDPLEDKQDEDNGMKSKVHHIAKEIMSSEKVFVDVLKLLHIDFRDAVAHASRQLGKPVIEDRILNQILYYLPQLYELNRDLLKELEERMLHWTEQQRIADIFVKKGPYLKMYSTYIKEFDKNIALLDEQCKKNPGFAAVVREFEMSPRCANLALKHYLLKPVQRIPQYRLLLTDYLKNLIEDAGDYRDTQDALAVVIEVANHANDTMKQGDNFQKLMQIQYSLNGHHEIVQPGRVFLKEGILMKLSRKVMQPRMFFLFNDALLYTTPVQSGMYKLNNMLSLAGMKVRKPTQEAYQNELKIESVERSFILSASSATERDEWLEAISRAIEEYAKKRITFCPSRSLDEADSENKEEVSPLGSKAPIWIPDTRATMCMICTSEFTLTWRRHHCRACGKIVCQACSSNKYGLDYLKNQPARVCEHCFQELQKLDHQHSPRIGSPGNHKSPSSALSSVLHSIPSGRKQKKIPAALKEVSANTEDSSMSGYLYRSKGNKKPWKHFWFVIKNKVLYTYAASEDVAALESQPLLGFTVIQVKDENSESKVFQLLHKNMLFYVFKAEDAHSAQKWIEAFQEGTIL

SEQ ID NO: 1005 - protein, 266 aa, Homo sapiens
MSSKYPRSVRRCLPLCALTLEAALILLFYFFTHYDASLEDQKGLVASYQVGQDLTVMAALGLGFLTSNFRRHSWSSVAFNLFMLALGVQWAILLDGFLSQFPPGKVVITLFSIRLATMSAMSVLISAGAVLGKVNLAQLVVMVLVEVTALGTLRMVISNIFNVCCNRVLGIHHISVMHSIFSLLGLLGEITYIVLLVLHTVWNGNGMIGFQVLLSIGELSLAIVIALTSGLLTGLLLNLKIWKAPHVAKYFDDQVFWKFPHLAVGF

SEQ ID NO: 1006 - protein, 1004 aa, Homo sapiens
MGELCRRDSALTALDEETLWEMMESHRHRIVRCICPSRLTPYLRQAKVLCQLDEEEVLHSPRLTNSAMRAGHLLDLLKTRGKNGAIAFLESLKFHNPDVYTLVTGLQPDVDFSNFSGLMETSKLTECLAGAIGSLQEELNQEKGQKEVLLRRCQQLQEHLGLAETRAEGLHQLEADHSRMKREVSAHFHEVLRLKDEMLSLSLHYSNALQEKELAASRCRSLQEELYLLKQELQRANMVSSCELELQEQSLRTASDQESGDEELNRLKEENEKLRSLTFSLAEKDILEQSLDEARGSRQELVERIHSLRERAVAAERQREQYWEEKEQTLLQFQKSKMACQLYREKVNALQAQVCELQKERDQAYSARDSAQREISQSLVEKDSLRRQVFELTDQVCELRTQLRQLQAEPPGVLKQEARTREPCPREKQRLVRMHAICPRDDSDCSLVSSTESQLLSDLSATSSRELVDSFRSSSPAPPSQQSLYKRVAEDFGEEPWSFSSCLEIPEGDPGALPGAKAGDPHLDYELLDTADLPQLESSLQPVSPGRLDVSESGVLMRRRPARRILSQVTMLAFQGDALLEQISVIGGNLTGIFIHRVTPGSAADQMALRPGTQIVMVDYEASEPLFKAVLEDTTLEEAVGLLRRVDGFCCLSVKVNTDGYKRLLQDLEAKVATSGDSFYIRVNLAMEGRAKGELQVHCNEVLHVTDTMFQGCGCWHAHRVNSYTMKDTAAHGTIPNYSRAQQQLIALIQDMTQQCTVTRKPSSGGPQKLVRIVSMDKAKASPLRLSFDRGQLDPSRMEGSSTCFWAESCLTLVPYTLVRPHRPARPRPVLLVPRAVGKILSEKLCLLQGFKKCLAEYLSQEEYEAWSQRGDIIQEGEVSGGRCWVTRHAVESLMEKNTHALLDVQLDSVCTLHRMDIFPIVIHVSVNEKMAKKLKKGLQRLGTSEEQLLEAARQEEGDLDRAPCLYSSLAPDGWSDLDGLLSCVRQAIADEQKKVVWTEQSPR

SEQ ID NO: 1007 - protein, 79 aa, Homo sapiens
MNGFGRLEHFSGAVYEGQFKDNMFHGLGTYTFPNGAKYTGNFNENRVEGEGEYTDIQGLEWSGNFHFTAAPDLKLKLHM

SEQ ID NO: 1008 - protein, 256 aa, Homo sapiens
MKLTRKMVLTRAKASELHSVRKLNCWGSRLTDISICQEMPSLEVITLSVNSISTLEPVSRCQRLSELYLRRNRIPSLAELFYLKGLPRLRVLWLAENPCCGTSPHRYRMTVLRTLPRLQKLDNQAVTEEELSRALSEGEEITAAPEREGTGHGGPKLCCTLSSLSSAAETGRDPLDSEEEATSGAQDERGLKPPSRGQFPSLSARDASSSHRGRNVLTAILLLLRELDAEGLEAVQQTVGSRLQALRGEEVQEHAE

SEQ ID NO: 1009 - protein, 894 aa, Homo sapiens
RSQVLQTYVAFLKSSEEVEMQFQSLKEFYETEIPQKEQDDAKAKHCSDSAEKQWQLFLKKSFITQDLGLEFLNLINMAKENEILDVKNEVYLMKNTMENQKAEREELSLLRLAWQLKATESKPGKQQWAAFKEQLKKTSHNLKLLQEALMPVSALDLGGSLQFILDLRQKWNDMKPQFQQLNDEVQYIMKESEELTGRGAPVKEKSQQLKDLIHFHQKQKERIQDYEDILYKVVQFHQVKEELGRLIKSRELEFVEQPKELGDAHDVQIHLRCSQEKQARVDHLHRLALSLGVDIISSVQRPHCSNVSAKNLQQQLELLEEDSMKWRAKAEEYGRTLSRSVEYCAMRDEINELKDSFKDIKKKFNNLKFNYTKKNEKSRNLKALKYQIQQVDMYAEKMQALKRKMEKVSNKTSDSFLNYPSDKVNVLLEVMKDLQKHVDDFDKVVTDYKKNLDLTEHFQEVIEECHFWYEDASATVVRVGKYSTECKTKEAVKILHQQFNKFIAPSVPQQEERIQEATDLAQHLYGLEEGQKYIEKIVTKHKEVLESVTELCESLTELEEKLKQGDVLKMNPNLEDFHYDYIDLLKEPAKNKQTIFNEERNKGQVQVADLLGINGTGEERLPQDLKVSTDKEGGVQDLLLPEDMLSGEEYECVSPDDISLPPLPGSPESPLAPSDMEVEEPVSSSLSLHISSYGVQAGTSSPGDAQESVLPPPVAFADACNDKRETFSSHFERPYLQFKAEPPLTSRGFVEKSTALHRISAEHPESMMSEVHERALQQHPQAQGGLLETREKMHADNNFTKTQDRLHASSDAFSGLRFQSGTSRGYQRQMVPREEIKSTSAKSSVVSLADQAPNFSRLLSNVTVMEGSPVTLEVEVTGFPEPTLTWWVAYNDKP

SEQ ID NO: 1010 - protein, 172 aa, Homo sapiens
MPRRAENWDEAEVGAEEAGVEEYGPEEDGGEESGAEESGPEESGPEELGAEEEMEAGRPRPVLRSVNSREPSQVIFCNRSPRVVLPVWLNFDGEPQPYPTLPPGTGRRIHSYRVYTLKERCLQVVRSLVKPENYRRLDIVRSLYEDLEDHPNVQKDLERLTQERIAHQRMGD

SEQ ID NO: 1011 - protein, 315 aa, Homo sapiens
MQRRSRGINTGLILLLSQIFHVGINNIPPVTLATLALNIWFFLNPQKPLYSSCLSVEKCYQQKDWQRLLLSPLHHADDWHLYFNMASMLWKGINLERRLGSRWFAYVITAFSVLTGVVYLLLQFAVAEFMDEPDFKRSCAVGFSGVLFALKVLNNHYCPGGFVNILGFPVPNRFACWVELVAIHLFSPGTSFAGHLAGILVGLMYTQGPLKKIMEACAGGFSSSVGYPGRQYYFNSSGSSGYQDYYPHGRPDHYEEAPRNYDTYTAGLSEEEQLERALQASLWDRGNTRNSPPPYGFHLSPEEMRRQRLHRFDSQ

SEQ ID NO: 1012 - protein, 1072 aa, Homo sapiens
MAKATSGAAGLRLLLLLLLPLLGKVALGLYFSRDAYWEKLYVDQAAGTPLLYVHALRDAPEEVPSFRLGQHLYGTYRTRLHENNWICIQEDTGLLYLNRSLDHSSWEKLSVRNRGFPLLTVYLKVFLSPTSLREGECQWPGCARVYFSFFNTSFPACSSLKPRELCFPETRPSFRIRENRPPGTFHQFRLLPVQFLCPNISVAYRLLEGEGLPFRCAPDSLEVSTRWALDREQREKYELVAVCTVHAGAREEVVMVPFPVTVYDEDDSAPTFPAGVDTASAVVEFKRKEDTVVATLRVFDADVVPASGELVRRYTSTLLPGDTWAQQTFRVEHWPNETSVQANGSFVRATVHDYRLVLNRNLSISENRTMQLAVLVNDSDFQGPGAGVLLLHFNVSVLPVSLHLPSTYSLSVSRRARRFAQIGKVCVENCQAFSGINVQYKLHSSGANCSTLGVVTSAEDTSGILFVNDTKALRRPKCAELHYMVVATDQQTSRQAQAQLLVTVEGSYVAEEAGCPLSCAVSKRRLECEECGGLGSPTGRCEWRQGDGKGITRNFSTCSPSTKTCPDGHCDVVETQDINICPQDCLRGSIVGGHEPGEPRGIKAGYGTCNCFPEEEKCFCEPEDIQDPLCDELCRTVIAAAVLFSFIVSVLLSAFCIHCYHKFAHKPPISSAEMTFRRPAQAFPVSYSSSGARRPSLDSMENQVSVDAFKILEDPKWEFPRKNLVLGKTLGEGEFGKVVKATAFHLKGRAGYTTVAVKMLKENASPSELRDLLSEFNVLKQVNHPHVIKLYGACSQDGPLLLIVEYAKYGSLRGFLRESRKVGPGYLGSGGSRNSSSLDHPDERALTMGDLISFAWQISQGMQYLAEMKLVHRDLAARNILVAEGRKMKISDFGLSRDVYEEDSYVKRSQGRIPVKWMAIESLFDHIYTTQSDVWSFGVLLWEIVTLGGNPYPGIPPERLFNLLKTGHRMERPDNCSEEMYRLMLQCWKQEPDKRPVFADISKDLEKMMVKRRDYLDLAASTPSDSLIYDDGLSEEETPLVDCNNAPLPRALPSTWIENKLYGRISHAFTRF

SEQ ID NO: 1013 - protein, 4547 aa, Homo sapiens
MSQHQLRVPQPEGLGRKRTSSEDNLYLAVLRASEGKKDERDRVQKKTFTKWVNKHLIKAQRHISDLYEDLRDGHNLISLLEVLSGDSLPREKGRMRFHKLQNVQIALDYLRHRQVKLVNIRNDDIADGNPKLTLGLIWTIILHFQISDIQVSGQSEDMTAKEKLLLWSQRMVEGYQGLRCDNFTSSWRDGRLFNAIIHRHKPLLIDMNKVYRQTNLENLDQAFSVAERDLGVTRLLDPEDVDVPQPDEKSIITYVSSLYDAMPRVPDVQDGVRANELQLRWQEYRELVLLLLQWMRHHTAAFEERRFPSSFEEIEILWSQFLKFKEMELPAKEADKNRSKGIYQSLEGAVQAGQLKVPPGYHPLDVEKEWGKLHVAILEREKQLRSEFERLECLQRIVTKLQMEAGLCEEQLNQADALLQSDVRLLAAGKVPQRAGEVERDLDKADSMIRLLFNDVQTLKDGRHPQGEQMYRRVYRLHERLVAIRTEYNLRLKAGVAAPATQVAQVTLQSVQRRPELEDSTLRYLQDLLAWVEENQHRVDGAEWGVDLPSVEAQLGSHRGLHQSIEEFRAKIERARSDEGQLSPATRGAYRDCLGRLDLQYAKLLNSSKARLRSLESLHSFVAAATKELMWLNEKEEEEVGFDWSDRNTNMTAKKESYSALMRELELKEKKIKELQNAGDRLLREDHPARPTVESFQAALQTQWSWMLQLCCCIEAHLKENAAYFQFFSDVREAEGQLQKLQEALRRKYSCDRSATVTRLEDLLQDAQDEKEQLNEYKGHLSGLAKRAKAVVQLKPRHPAHPMRGRLPLLAVCDYKQVEVTVHKGDECQLVGPAQPSHWKVLSSSGSEAAVPSVCFLVPPPNQEAQEAVTRLEAQHQALVTLWHQLHVDMKSLLAWQSLRRDVQLIRSWSLATFRTLKPEEQRQALHSLELHYQAFLRDSQDAGGFGPEDRLMAEREYGSCSHHYQQLLQSLEQGAQEESRCQRCISELKDIRLQLEACETRTVHRLRLPLDKEPARECAQRIAEQQKAQAEVEGLGKGVARLSAEAEKVLALPEPSPAAPTLRSELELTLGKLEQVRSLSAIYLEKLKTISLVIRGTQGAEEVLRAHEEQLKEAQAVPATLPELEATKASLKKLRAQAEAQQPTFDALRDELRGAQEVGERLQQRHGERDVEVERWRERVAQLLERWQAVLAQTDVRQRELEQLGRQLRYYRESADPLGAWLQDARRRQEQIQAMPLADSQAVREQLRQEQALLEEIERHGEKVEECQRFAKQYINAIKDYELQLVTYKAQLEPVASPAKKPKVQSGSESVIQEYVDLRTHYSELTTLTSQYIKFISETLRRMEEEERLAEQQRAEERERLAEVEAALEKQRQLAEAHAQAKAQAEREAKELQQRMQEEVVRREEAAVDAQQQKRSIQEELQQLRQSSEAEIQAKARQAEAAERSRLRIEEEIRVVRLQLEATERQRGGAEGELQALRARAEEAEAQKRQAQEEAERLRRQVQDESQRKRQAEVELASRVKAEAEAAREKQRALQALEELRLQAEEAERRLRQAEVERARQVQVALETAQRSAEAELQSKRASFAEKTAQLERSLQEEHVAVAQLREEAERRAQQQAEAERAREEAERELERWQLKANEALRLRLQAEEVAQQKSLAQAEAEKQKEEAEREARRRGKAEEQAVRQRELAEQELEKQRQLAEGTAQQRLAAEQELIRLRAETEQGEQQRQLLEEELARLQREAAAATQKRQELEAELAKVRAEMEVLLASKARAEEESRSTSEKSKQRLEAEAGRFRELAEEAARLRALAEEAKRQRQLAEEDAARQRAEAERVLAEKLAAIGEATRLKTEAEIALKEKEAENERLRRLAEDEAFQRRRLEEQAAQHKADIEERLAQLRKASDSELERQKGLVEDTLRQRRQVEEEILALKASFEKAAAGKAELELELGRIRSNAEDTLRSKEQAELEAARQRQLAAEEERRRREAEERVQKSLAAEEEAARQRKAALEEVERLKAKVEEARRLRERAEQESARQLQLAQEAAQKRLQAEEKAHAFAVQQKEQELQQTLQQEQSVLDQLRGEAEAARRAAEEAEEARVQAEREAAQSRRQVEEAERLKQSAEEQAQARAQAQAAAEKLRKEAEQEAARRAQAEQAALRQKQAADAEMEKHKKFAEQTLRQKAQVEQELTTLRLQLEETDHQKNLLDEELQRLKAEATEAARQRSQVEEELFSVRVQMEELSKLKARIEAENRALILRDKDNTQRFLQEEAEKMKQVAEEAARLSVAAQEAARLRQLAEEDLAQQRALAEKMLKEKMQAVQEATRLKAEAELLQQQKELAQEQARRLQEDKEQMAQQLAEETQGFQRTLEAERQRQLEMSAEAERLKLRVAEMSRAQARAEEDAQRFRKQAEEIGEKLHRTELATQEKVTLVQTLEIQRQQSDHDAERLREAIAELEREKEKLQQEAKLLQLKSEEMQTVQQEQLLQETQALQQSFLSEKDSLLQRERFIEQEKAKLEQLFQDEVAKAQQLREEQQRQQQQMEQERQRLVASMEEARRRQHEAEEGVRRKQEELQQLEQQRRQQEELLAEENQRLREQLQLLEEQHRAALAHSEEVTASQVAATKTLPNGRDALDGPAAEAEPEHSFDGLRRKVSAQRLQEAGILSAEELQRLAQGHTTVDELARREDVRHYLQGRSSIAGLLLKATNEKLSVYAALQRQLLSPGTALILLEAQAASGFLLDPVRNRRLTVNEAVKEGVVGPELHHKLLSAERAVTGYKDPYTGQQISLFQAMQKGLIVREHGIRLLEAQIATGGVIDPVHSHRVPVDVAYRRGYFDEEMNRVLADPSDDTKGFFDPNTHENLTYLQLLERCVEDPETGLCLLPLTDKAAKGGELVYTDSEARDVFEKATVSAPFGKFQGKTVTIWEIINSEYFTAEQRRDLLRQFRTGRITVEKIIKIIITVVEEQEQKGRLCFEGLRSLVPAAELLESRVIDRELYQQLQRGERSVRDVAEVDTVRRALRGANVIAGVWLEEAGQKLSIYNALKKDLLPSDMAVALLEAQAGTGHIIDPATSARLTVDEAVRAGLVGPEFHEKLLSAEKAVTGYRDPYTGQSVSLFQALKKGLIPREQGLRLLDAQLSTGGIVDPSKSHRVPLDVACARGCLDEETSRALSAPRADAKAYSDPSTGEPATYGELQQRCRPDQLTGLSLLPLSEKAARARQEELYSELQARETFEKTPVEVPVGGFKGRTVTVWELISSEYFTAEQRQELLRQFRTGKVTVEKVIKILITIVEEVETLRQERLSFSGLRAPVPASELLASGVLSRAQFEQLKDGKTTVKDLSELGSVRTLLQGSGCLAGIYLEDTKEKVSIYEAMRRGLLRATTAALLLEAQAATGFLVDPVRNQRLYVHEAVKAGVVGPELHEQLLSAEKAVTGYRDPYSGSTISLFQAMQKGLVLRQHGIRLLEAQIATGGIIDPVHSHRVPVDVAYQRGYFSEEMNRVLADPSDDTKGFFDPNTHENLTYRQLLERCVEDPETGLRLLPLKGAEKAEVVETTQVYTEEETRRAFEETQIDIPGGGSHGGSTMSLWEVMQSDLIPEEQRAQLMADFQAGRVTKERMIIIIIEIIEKTEIIRQQGLASYDYVRRRLTAEDLFEARIISLETYNLLREGTRSLREALEAESAWCYLYGTGSVAGVYLPGSRQTLSIYQALKKGLLSAEVARLLLEAQAATGFLLDPVKGERLTVDEAVRKGLVGPELHDRLLSAERAVTGYRDPYTEQTISLFQAMKKELIPTEEALRLLDAQLATGGIVDPRLGFHLPLEVAYQRGYLNKDTHDQLSEPSEVRSYVDPSTDERLSYTQLLRRCRRDDGTGQLLLPLSDARKLTFRGLRKQITMEELVRSQVMDEATALQLREGLTSIEEVTKNLQKFLEGTSCIAGVFVDATKERLSVYQAMKKGIIRPGTAFELLEAQAATGYVIDPIKGLKLTVEEAVRMGIVGPEFKDKLLSAERAVTGYKDPYSGKLISLFQAMKKGLILKDHGIRLLEAQIATGGIIDPEESHRLPVEVAYKRGLFDEEMNEILTDPSDDTKGFFDPNTEENLTYLQLMERCITDPQTGLCLLPLKEKKRERKTSSKSSVRKRRVVIVDPETGKEMSVYEAYRKGLIDHQTYLELSEQECEWEEITISSSDGVVKSMIIDRRSGRQYDIDDAIAKNLIDRSALDQYRAGTLSITEFADMLSGNAGGFRSRSSSVGSSSSYPISPAVSRTQLASWSDPTEETGPVAGILDTETLEKVSITEAMHRNLVDNITGQRLLEAQACTGGIIDPSTGERFPVTDAVNKGLVDKIMVDRINLAQKAFCGFEDPRTKTKMSAAQALKKGWLYYEAGQRFLEVQYLTGGLIEPDTPGRVPLDEALQRGTVDARTAQKLRDVGAYSKYLTCPKTKLKISYKDALDRSMVEEGTGLRLLEAAAQSTKGYYSPYSVSGSGSTAGSRTGSRTGSRAGSRRGSFDATGSGFSMTFSSSSYSSSGYGRRYASGSSASLGGPESAVA

SEQ ID NO: 1014 - protein, 245 aa, Homo sapiens
MEGNKLEEQDSSPPQSTPGLMKGNKREEQGLGPEPAAPQQPTAEEEALIEFHRSYRELFEFFCNNTTIHGAIRLVCSQHNRMKTAFWAVLWLCTFGMMYWQFGLLFGEYFSYPVSLNINLNSDKLVFPAVTICTLNPYRYPEIKEELEELDRITEQTLFDLYKYSSFTTLVAGSRSRRDLRGTLPHPLQRLRVPPPPHGARRARSVASSLRDNNPQVDWKDWKIGFQLELLSLPPPDVWKLLYFQ

SEQ ID NO: 1015 - protein, 267 aa, Homo sapiens
MSSKYPRSVRRCLPLCALTLEAALILLFYFFTHYDASLEDQKGLVASYQVGQDLTVMAALGLGFLTSNFRRHSWSSVAFNLFMLALGVQWAILLDGFLSQFPPGKVVITLFSIRLATMSAMSVLISAGAVLGKVNLAQLVVMVLVEVTALGTLRMVISNIFNTYVHSAVLAGGVAVGTSCHLIPSPWLAMVLGLVAGLISIGGAKCLPVCCNRVLGIHHISVMHSIFSLLGLLGEITYIVLLVLHTVWNGNGMFAPKSQNMESTSCG

SEQ ID NO: 1016 - protein, 505 aa, Homo sapiens
MWPSLLLLLLLPGPPPVAGLEDAAFPHLGESLQPLPRACPLRCSCPRVDTVDCDGLDLRVFPDNITRAAQHLSLQNNQLQELPYNELSRLSGLRTLNLHNNLISSEGLPDEAFESLTQLQHLCVAHNKLSVAPQFLPRSLRVADLAANQVMEIFPLTFGEKPALRSVYLHNNQLSNAGLPPDAFRGSEAIATLSLSNNQLSYLPPSLPPSLERLHLQNNLISKVPRGALSRQTQLRELYLQHNQLTDSGLDATTFSKLHSLEYLDLSHNQLTTVPAGLPRTLAILHLGRNRIRQVEAARLHGARGLRYLLLQHNQLGSSGLPAGALRPLRGLHTLHLYGNGLDRVPPALPRRLRALVLPHNHVAALGARDLVATPGLTELNLAYNRLASARVHHRAFRRLRALRSLDLAGNQLTRLPMGLPTGLRTLQLQRNQLRMLEPEPLAGLDQLRELSLAHNRLRVGDIGPGTWHELQALQVRHRLVSHTVPRAPPSPCLPCHVPNILVSW

SEQ ID NO: 1017 - protein, 325 aa, Homo sapiens
MNKSRWQSRRRHGRRSHQQNPWFRLRDSEDRSDSRAAQPAHDSGHGDDESPSTSSGTAGTSSVPELPGFYFDPEKKRYFRLLPGHNNCNPLTKESIRQKEMESKRLRLLQEEDRRKKADTNSDRLFTVNDVKVGGSKYGIINLQSLKTPTLKVFMHENLYFTNRKAPLLFNGCRSGEIFAIDLRCGNQGKGWKATRLFHDSAVTSVRILQDEQYLMASDMAGKIKLWDLRTTKCVRQYEGHVNEYAYLPLHVHEEEGILVAVGQDCYTRIWSLHDARLLRTIPSPYPASKADIPSVAFSSRLGGSRGAPGLLMAVGQDLYCYSYS

SEQ ID NO: 1018 - protein, 4097 aa, Homo sapiens
MAGSGAGVRCSLLRLQETLSAADRCGAALAGHQLIRGLGQECVLSSSPAVLALQTSLVFSRDFGLLVFVRKSLNSIEFRECREEILKFLCIFLEKMGQKIAPYSVEIKNTCTSVYTKDRAAKCKIPALDLLIKLLQTFRSSRLMDEFKIGELFSKFYGELALKKKIPDTVLEKVYELLGLLGEVHPSEMINNAENLFRAFLGELKTQMTSAVREPKLPVLAGCLKGLSSLLCNFTKSMEEDPQTSREIFNFVLKAIRPQIDLKRYAVPSAGLRLFALHASQFSTCLLDNYVSLFEVLLKWCAHTNVELKKAALSALESFLKQVSNMVAKNAEMHKNKLQYFMEQFYGIIRNVDSNNKELSIAIRGYGLFAGPCKVINAKDVDFMYVELIQRCKQMFLTQTDTGDDRVYQMPSFLQSVASVLLYLDTVPEVYTPVLEHLVVMQIDSFPQYSPKMQLVCCRAIVKVFLALAAKGPVLRNCISTVVHQGLIRICSKPVVLPKGPESESEDHRASGEVRTGKWKVPTYKDYVDLFRHLLSSDQMMDSILADEAFFSVNSSSESLNHLLYDEFVKSVLKIVEKLDLTLEIQTVGEQENGDEAPGVWMIPTSDPAANLHPAKPKDFSAFINLVEFCREILPEKQAEFFEPWVYSFSYELILQSTRLPLISGFYKLLSITVRNAKKIKYFEGVSPKSLKHSPEDPEKYSCFALFVKFGKEVAVKMKQYKDELLASCLTFLLSLPHNIIELDVRAYVPALQMAFKLGLSYTPLAEVGLNALEEWSIYIDRHVMQPYYKDILPCLDGYLKTSALSDETKNNWEVSALSRAAQKGFNKVVLKHLKKTKNLSSNEAISLEEIRIRVVQMLGSLGGQINKNLLTVTSSDEMMKSYVAWDREKRLSFAVPFREMKPVIFLDVFLPRVTELALTASDRQTKVAACELLHSMVMFMLGKATQMPEGGQGAPPMYQLYKRTFPVLLRLACDVDQVTRQLYEPLVMQLIHWFTNNKKFESQDTVALLEAILDGIVDPVDSTLRDFCGRCIREFLKWSIKQITPQQQEKSPVNTKSLFKRLYSLALHPNAFKRLGASLAFNNIYREFREEESLVEQFVFEALVIYMESLALAHADEKSLGTIQQCCDAIDHLCRIIEKKHVSLNKAKKRRLPRGFPPSASLCLLDLVKWLLAHCGRPQTECRHKSIELFYKFVPLLPGNRSPNLWLKDVLKEEGVSFLINTFEGGGCGQPSGILAQPTLLYLRGPFSLQATLCWLDLLLAALECYNTFIGERTVGALQVLGTEAQSSLLKAVAFFLESIAMHDIIAAEKCFGTGAAGNRTSPQEGERYNYSKCTVVVRIMEFTTTLLNTSPEGWKLLKKDLCNTHLMRVLVQTLCEPASIGFNIGDVQVMAHLPDVCVNLMKALKMSPYKDILETHLREKITAQSIEELCAVNLYGPDAQVDRSRLAAVVSACKQLHRAGLLHNILPSQSTDLHHSVGTELLSLVYKGIAPGDERQCLPSLDLSCKQLASGLLELAFAFGGLCERLVSLLLNPAVLSTASLGSSQGSVIHFSHGEYFYSLFSETINTELLKNLDLAVLELMQSSVDNTKMVSAVLNGMLDQSFRERANQKHQGLKLATTILQHWKKCDSWWAKDSPLETKMAVLALLAKILQIDSSVSFNTSHGSFPEVFTTYISLLADTKLDLHLKGQAVTLLPFFTSLTGGSLEELRRVLEQLIVAHFPMQSREFPPGTPRFNNYVDCMKKFLDALELSQSPMLLELMTEVLCREQQHVMEELFQSSFRRIARRGSCVTQVGLLESVYEMFRKDDPRLSFTRQSFVDRSLLTLLWHCSLDALREFFSTIVVDAIDVLKSRFTKLNESTFDTQITKKMGYYKILDVMYSRLPKDDVHAKESKINQVFHGSCITEGNELTKTLIKLCYDAFTENMAGENQLLERRRLYHCAAYNCAISVICCVFNELKFYQGFLFSEKPEKNLLIFENLIDLKRRYNFPVEVEVPMERKKKYIEIRKEAREAANGDSDGPSYMSSLSYLADSTLSEEMSQFDFSTGVQSYSYSSQDPRPATGRFRRREQRDPTVHDDVLELEMDELNRHECMAPLTALVKHMHRSLGPPQGEEDSVPRDLPSWMKFLHGKLGNPIVPLNIRLFLAKLVINTEEVFRPYAKHWLSPLLQLAASENNGGEGIHYMVVEIVATILSWTGLATPTGVPKDEVLANRLLNFLMKHVFHPKRAVFRHNLEIIKTLVECWKDCLSIPYRLIFEKFSGKDPNSKDNSVGIQLLGIVMANDLPPYDPQCGIQSSEYFQALVNNMSFVRYKEVYAAAAEVLGLILRYVMERKNILEESLCELVAKQLKQHQNTMEDKFIVCLNKVTKSFPPLADRFMNAVFFLLPKFHGVLKTLCLEVVLCRVEGMTELYFQLKSKDFVQVMRHRDDERQKVCLDIIYKMMPKLKPVELRELLNPVVEFVSHPSTTCREQMYNILMWIHDNYRDPESETDNDSQEIFKLAKDVLIQGLIDENPGLQLIIRNFWSHETRLPSNTLDRLLALNSLYSPKIEVHFLSLATNFLLEMTSMSPDYPNPMFEHPLSECEFQEYTIDSDWRFRSTVLTPMFVETQASQGTLQTRTQEGSLSARWPVAGQIRATQQQHDFTLTQTADGRSSFDWLTGSSTDPLVDHTSPSSDSLLFAHKRSERLQRAPLKSVGPDFGKKRLGLPGDEVDNKVKGAAGRTDLLRLRRRFMRDQEKLSLMYARKGVAEQKREKEIKSELKMKQDAQVVLYRSYRHGDLPDIQIKHSSLITPLQAVAQRDPIIAKQLFSSLFSGILKEMDKFKTLSEKNNITQKLLQDFNRFLNTTFSFFPPFVSCIQDISCQHAALLSLDPAAVSAGCLASLQQPVGIRLLEEALLRLLPAELPAKRVRGKARLPPDVLRWVELAKLYRSIGEYDVLRGIFTSEIGTKQITQSALLAEARSDYSEAAKQYDEALNKQDWVDGEPTEAEKDFWELASLDCYNHLAEWKSLEYCSTASIDSENPPDLNKIWSEPFYQETYLPYMIRSKLKLLLQGEADQSLLTFIDKAMHGELQKAILELHYSQELSLLYLLQDDVDRAKYYIQNGIQSFMQNYSSIDVLLHQSRLTKLQSVQALTEIQEFISFISKQGNLSSQVPLKRLLNTWTNRYPDAKMDPMNIWDDIITNRCFFLSKIEEKLTPLPEDNSMNVDQDGDPSDRMEVQEQEEDISSLIRSCKFSMKMKMIDSARKQNNFSLAMKLLKELHKESKTRDDWLVSWVQSYCRLSHCRSRSQGCSEQVLTVLKTVSLLDENNVSSYLSKNILAFRDQNILLGTTYRIIANALSSEPACLAEIEEDKARRILELSGSSSEDSEKVIAGLYQRAFQHLSEAVQAAEEEAQPPSWSCGPAAGVIDAYMTLADFCDQQLRKEEENASVIDSAELQAYPALVVEKMLKALKLNSNEARLKFPRLLQIIERYPEETLSLMTKEISSVPCWQFISWISHMVALLDKDQAVAVQHSVEEITDNYPQAIVYPFIISSESYSFKDTSTGHKNKEFVARIKSKLDQGGVIQDFINALDQLSNPELLFKDWSNDVRAELAKTPVNKKNIEKMYERMYAALGDPKAPGLGAFRRKFIQTFGKEFDKHFGKGGSKLLRMKLSDFNDITNMLLLKMNKDSKPPGNLKECSPWMSDFKVEFLRNELEIPGQYDGRGKPLPEYHVRIAGFDERVTVMASLRRPKRIIIRGHDEREHPFLVKGGEDLRQDQRVEQLFQVMNGILAQDSACSQRALQLRTYSVVPMTSSDPRAPPCEYKDWLTKMSGKHDVGAYMLMYKGANRTETVTSFRKRESKVPADLLKRAFVRMSTSPEAFLALRSHFASSHALICISHWILGIGDRHLNNFMVAMETGGVIGIDFGHAFGSATQFLPVPELMPFRLTRQFINLMLPMKETGLMYSIMVHALRAFRSDPGLLTNTMDVFVKEPSFDWKNFEQKMLKKGGSWIQEINVAEKNWYPRQKICYAKRKLAGANPAVITCDELLLGHEKAPAFRDYVAVARGSKDHNIRAQEPESGLSEETQVKCLMDQATDPNILGRTWEGWEPWM

SEQ ID NO: 1019 - protein, 775 aa, Homo sapiens
MLPPLIDPWDPGLTARDLLFRGGCRYRKRPRVVLDVTEQISRFLLDHGDVAFAPLGKLMLENFKLEGAGSRTKKKTVVSVKKLLQDLGGHQPWGCPWAYLSNRQRRFSILGGPILGTSVASHLAELLHEELVLRWEQLLLDEACTGGALAWVPGRTPQFGQLVYPAGGAQDRLHFQEVVLTPGDNPQFLGKPGRIQLQGPVRQVVTCTVQGETLLAVRSDYHCAVWKFGKQWQPTLLQAMQVEKGATGISLSPHLPGELAICSRSGAVCLWSPEDGLRQIYRDPETLVFRDSSSWRWADFTAHPRVLTVGDRTGVKMLDTQGPPGCGLLLFRLGAEASCQKGERVLLTQYLGHSSPKCLPPTLHLVCTQFSLYLVDERLPLVPMLKWNHGLPSPLLLARLLPPPRPSCVQPLLLGGQGGQLQLLHLAEGASVPRLAGPPQSLPSRIDSLPAFPLLEPKIQWRLQERLKAPTIGLAAVVPPLPSAPTPGLVLFQLSAAGDVFYQQLRPQVDSSLRRDAGPPGDTQPDCHAPTASWTSQDTAGCSQWLKALLKVPLAPPVWTAPTFTHRQMLGSTELRREEEEGQRLGVLRKAMARGQLLLQRDLGSLPAAEPPPAPESGLEDKLSERLGEAWAGRGAAWWERQQGRTSEPGRQTRRPKRRTQLSSSFSLSGHVDPSEDTSSPHSPEWPPADALPLPPTTPPSQELTPDACAQGVPSEQRQMLRDYMAKLPPQRDTPGCATTPPHSQASSVRATRSQQHTPVLSSSQPLRKKPRMGF

SEQ ID NO: 1020 - protein, 1251 aa, Homo sapiens
MRLLLLVPLLLAPAPGSSAPKVRRQSDTWGPWSQWSPCSRTCGGGVSFRERPCYSQRRDGGSSCVGPARSHRSCRTESCPDGARDFRAEQCAEFDGAEFQGRRYRWLPYYSAPNKCELNCIPKGENFYYKHREAVVDGTPCEPGKRDVCVDGSCRVVGCDHELDSSKQEDKCLRCGGDGTTCYPVAGTFDANDLSRAVKNVRGEYYLNGHWTIEAARALPAASTILHYERGAEGDLAPERLHARGPTSEPLVIELISQEPNPGVHYEYHLPLRRPSPGFSWSHGSWSDCSAECGGGHQSRLVFCTIDHEAYPDHMCQRQPRPADRRSCNLHPCPETKRWKAGPWAPCSASCGGGSQSRSVYCISSDGAGIQEAVEEAECAGLPGKPPAIQACNLQRCAAWSPEPWGECSVSCGVGVRKRSVTCRGERGSLLHTAACSLEDRPPLTEPCVHEDCPLLSDQAWHVGTWGLCSKSCSSGTRRRQVICAIGPPSHCGSLQHSKPVDVEPCNTQPCHLPQEVPSMQDVHTPASNPWMPLGPQESPASDSRGQWWAAQEHPSARGDHRGERGDPRGDQGTHLSALGPAPSLQQPPYQQPLRSGSGPHDCRHSPHGCCPDGHTASLGPQWQGCPGAPCQQSRYGCCPDRVSVAEGPHHAGCTKSYGGDSTGGMPRSRAVASTVHNTHQPQAQQNEPSECRGSQFGCCYDNVATAAGPLGEGCVGQPSHAYPVRCLLPSAHGSCADWAARWYFVASVGQCNRFWYGGCHGNANNFASEQECMSSCQGSLHGPRRPQPGASGRSTHTDGGGSSPAGEQEPSQHRTGAAVQRKPWPSGGLWRQDQQPGPGEAPHTQAFGEWPWGQELGSRAPGLGGDAGSPAPPFHSSSYRISLAGVEPSLVQAALGQLVRLSCSDDTAPESQAAWQKDGQPISSDRHRLQFDGSLIIHPLQAEDAGTYSCGSTRPGRDSQKIQLRIIGGDMAVLSEAELSRFPQPRDPAQDFGQAGAAGPLGAIPSSHPQPANRLRLDQNQPRVVDASPGQRIRMTCRAEGFPPPAIEWQRDGQPVSSPRHQLQPDGSLVISRVAVEDGGFYTCVAFNGQDRDQRWVQLRVLGELTISGLPPTVTVPEGDTARLLCVVAGESVNIRWSRNGLPVQADGHRVHQSPDGTLLIYNLRARDEGSYTCSAYQGSQAVSRSTEVKVVSPAPTAQPRDPGRDCVDQPELANCDLILQAQLCGNEYYSSFCCASCSRFQPHAQPIWQ

SEQ ID NO: 1021 - protein, 695 aa, Homo sapiens
MLPGLALLLLAAWTARALEVPTDGNAGLLAEPQIAMFCGRLNMHMNVQNGKWDSDPSGTKTCIDTKEGILQYCQEVYPELQITNVVEANQPVTIQNWCKRGRKQCKTHPHFVIPYRCLVGEFVSDALLVPDKCKFLHQERMDVCETHLHWHTVAKETCSEKSTNLHDYGMLLPCGIDKFRGVEFVCCPLAEESDNVDSADAEEDDSDVWWGGADTDYADGSEDKVVEVAEEEEVAEVEEEEADDDEDDEDGDEVEEEAEEPYEEATERTTSIATTTTTTTESVEEVVRVPTTAASTPDAVDKYLETPGDENEHAHFQKAKERLEAKHRERMSQVMREWEEAERQAKNLPKADKKAVIQHFQEKVESLEQEAANERQQLVETHMARVEAMLNDRRRLALENYITALQAVPPRPRHVFNMLKKYVRAEQKDRQHTLKHFEHVRMVDPKKAAQIRSQVMTHLRVIYERMNQSLSLLYNVPAVAEEIQDEVDELLQKEQNYSDDVLANMISEPRISYGNDALMPSLTETKTTVELLPVNGEFSLDDLQPWHSFGADSVPANTENEVEPVDARPAADRGLTTRPGSGLTNIKTEEISEVKMDAEFRHDSGYEVHHQKLVFFAEDVGSNKGAIIGLMVGGVVIATVIVITLVMLKKKQYTSIHHGVVEVDAAVTPEERHLSKMQQNGYENPTYKFFEQMQN

SEQ ID NO: 1022 - protein, 395 aa, Homo sapiens
MAAEASESGPALHELMREAEISLLECKVCFEKFGHRQQRRPRNLSCGHVVCLACVAALAHPRTLALECPFCRRACRGCDTSDCLPVLHLIELLGSALRQSPAAHRAAPSAPGALTCHHTFGGWGTLVNPTGLALCPKTGRVVVVHDGRRRVKIFDSGGGCAHQFGEKGDAAQDIRYPVDVTITNDCHVVVTDAGDRSIKVFDFFGQIKLVIGGQFSLPWGVETTPQNGIVVTDAEAGSLHLLDVDFAEGVLRRTERLQAHLCNPRGVAVSWLTGAIAVLEHPLALGTGVCSTRVKVFSSSMQLVGQVDTFGLSLYFPSKITASAVTFDHQGNVIVADTSGPAILCLGKPEEFPVPKPMVTHGLSHPVALTFTKENSLLVLDTASHSIKVYKVDWG

SEQ ID NO: 1023 - protein, 575 aa, Homo sapiens
MNGPALQPSSPSSAPSASPAAAPRGWSEFCELHAVAAARELARQYWLFAREHPQHAPLRAELVSLQFTDLFQRYFCREVRDGRAPGRDYRDTGRGPPAKAEASPEPGPGPAAPGLPKARSSEELAPPRPPGPCSFQHFRRSLRHIFRRRSAGELPAAHTAAAPGTPGEAAETPARPGLAKKFLPWSLAREPPPEALKEAVLRYSLADEASMDSGARWQRGRLALRRAPGPDGPDRVLELFDPPKSSRPKLQAACSSIQEVRWCTRLEMPDNLYTFVLKVKDRTDIIFEVGDEQQLNSWMAELSECTGRGLESTEAEMHIPSALEPSTSSSPRGSTDSLNQGASPGGLLDPACQKTDHFLSCYPWFHGPISRVKAAQLVQLQGPDAHGVFLVRQSETRRGEYVLTFNFQGIAKHLRLSLTERGQCRVQHLHFPSVVDMLHHFQRSPIPLECGAACDVRLSSYVVVVSQPPGSCNTVLFPFSLPHWDSESLPHWGSELGLPHLSSSGCPRGLSPEGLPGRSSPPEQIFHLVPSPEELANSLQHLEHEPVNRARDSDYEMDSSSRSHLRAIDNQYTPL

SEQ ID NO: 1024 - protein, 1313 aa, Homo sapiens
MESGGGNAPAGALGAASESPQCPPPPGVEGAAGPAEPDGAAEGAAGGSGEGESGGGPRRALRAVYVRSESSQGGAAGGPEAGARQCLLRACEAEGAHLTSVPFGELDFGETAVLDAFYDADVAVVDMSDVSRQPSLFYHLGVRESFDMANNVILYHDTDADTALSLKDMVTQKNTASSGNYYFIPYIVTPCADYFCCESDAQRRASEYMQPNWDNILGPLCMPLVDRFISLLKDIHVTSCVYYKETLLNDIRKAREKYQGEELAKELARIKLRMDNTEVLTSDIIINLLLSYRDIQDYDAMVKLVETLEMLPTCDLADQHNIKFHYAFALNRRNSTGDREKALQIMLQVLQSCDHPGPDMFCLCGRIYKDIFLDSDCKDDTSRDSAIEWYRKGFELQSSLYSGINLAVLLIVAGQQFETSLELRKIGVRLNSLLGRKGSLEKMNNYWDVGQFFSVSMLAHDVGKAVQAAERLFKLKPPVWYLRSLVQNLLLIRRFKKTIIEHSPRQERLNFWLDIIFEATNEVTNGLRFPVLVIEPTKVYQPSYVSINNEAEERTVSLWHVSPTEMKQMHEWNFTASSIKGISLSKFDERCCFLYVHDNSDDFQIYFSTEEQCSRFFSLVKEMITNTAGSTVELEGETDGDTLEYEYDHDANGERVVLGKGTYGIVYAGRDLSNQVRIAIKEIPERDSRYSQPLHEEIALHKYLKHRNIVQYLGSVSENGYIKIFMEQVPGGSLSALLRSKWGPMKEPTIKFYTKQILEGLKYLHENQIVHRDIKGDNVLVNTYSGVVKISDFGTSKRLAGVNPCTETFTGTLQYMAPEIIDQGPRGYGAPADIWSLGCTIIEMATSKPPFHELGEPQAAMFKVGMFKIHPEIPEALSAEARAFILSCFEPDPHKRATTAELLREGFLRQVNKGKKNRIAFKPSEGPRGVVLALPTQGEPMATSSSEHGSVSPDSDAQPDALFERTRAPRHHLGHLLSVPDESSALEDRGLASSPEDRDQGLFLLRKDSERRAILYKILWEEQNQVASNLQECVAQSSEELHLSVGHIKQIIGILRDFIRSPEHRVMATTISKLKVDLDFDSSSISQIHLVLFGFQDAVNKILRNHLIRPHWMFAMDNIIRRAVQAAVTILIPELRAHFEPTCETEGVDKDMDEAEEGYPPATGPGQEAQPHQQHLSLQLGELRQETNRLLEHLVEKEREYQNLLRQTLEQKTQELYHLQLKLKSNCITENPAGPYGQRTDKELIDWLRLQGADAKTIEKIVEEGYTLSDILNEITKEDLRYLRLRGGLLCRLWSAVSQYRRAQEASETKDKA

SEQ ID NO: 1025 - protein, 112 aa, Homo sapiens
MGLETEKADVQLFMDDDSYSHHSGLEYADPEKFADSDQDRDPHRLNSHLKDFNAFCKDLPNGSAFSADNMEECDRCYHCSIVYERRTMLLFCQPATEPGLNTWTPGLEIGIL

SEQ ID NO: 1026 - protein, 390 aa, Homo sapiens
MLSRKGIIPEEYVLTRLAEDPAKPRYRARQRRARFVSKKGNCNVAHKNIREQGRFLQDVFTTLVDLKWPHTLLIFTMSFLCSWLLFAMAWWLIAFAHGDLAPSEGTAEPCVTSIHSFSSAFLFSIEVQVTIGFGGRMVTEECPLAILILIVQNIVGLMINAIMLGCIFMKTAQAHRRAETLIFSKHAVIALRHGRLCFMLRVGDLRKSMIISATIHMQVVRKTTSPEGEVVPLHQVDIPMENGVGGNSIFLVAPLIIYHVIDANSPLYDLAPSDLHHHQDLEIIVILEGVVETTGITTQARTSYLADEILWGQRFVPIVAEEDGRYSVDYSKFGNTVKVPTPLCTARQLDEDHSLLEALTLASARGPLRKRSVPMAKAKPKFSISPDSLS

SEQ ID NO: 1027 - protein, 402 aa, Homo sapiens
MPPVSRSSYSEDIVGSRRRRRSSSGSPPSPQSRCSSWDGCSRSHSRGREGLRPPWSELDVGALYPFSRSGSRGRLPRFRNYAFASSWSTSYSGYRYHRHCYAEERQSAEDYEKEESHRQRRLKERERIGELGAPEVWGPSPKFPQLDSDEHTPVEDEEEVTHQKSSSSDSNSEEHRKKKTSRSRNKKKRKNKSSKRKHRKYSDSDSNSESDTNSDSDDDKKRVKAKKKKKKKKHKTKKKKNKKTKKESSDSSCKDSEEDLSEATWMEQPNVADTMDLIGPEAPIIHTSQDEKPLKYGHALLPGEGAAMAEYVKAGKRIPRRGEIGLTSEEIGSFECSGYVMSGSRHRRMEAVRLRKENQIYSADEKRALASFNQEERRKRESKILASFREMVHKKTKEKDDK

SEQ ID NO: 1028 - protein, 1857 aa, Homo sapiens
MEQLTTLPRPGDPGAMEPWALPTWHSWTPGRGGEPSSAAPSIADTPPAALQLQELRSEESSKPKGDGSSRPVGGTDPEGAEACLPSLGQQASSSGPACQRPEDEEVEAFLKAKLNMSFGDRPNLELLRALGELRQRCAILKEENQMLRKSSFPETEEKVRRLKRKNAELAVIAKRLEERARKLQETNLRVVSAPLPRPGTSLELCRKALARQRARDLSETASALLAKDKQIAALQRECRELQARLTLVGKEGPQWLHVRDFDRLLRESQREVLRLQRQIALRNQRETLPLPPSWPPGPALQARAGAPAPGAPGEATPQEDADNLPVILGEPEKEQRVQQLESELSKKRKKCESLEQEARKKQRRCEELELQLRQAQNENARLVEENSRLSGRATEKEQVEWENAELRGQLLGVTQERDSALRKSQGLQSKLESLEQVLKHMREVAQRRQQLEVEHEQARLSLREKQEEVRRLQQAQAEAQREHEGAVQLLESTLDSMQARVRELEEQCRSQTEQFSLLAQELQAFRLHPGPLDLLTSALDCGSLGDCPPPPCCCSIPQPCRGSGPKDLDLPPGSPGRCTPKSSEPAPATLTGVPRRTAKKAESLSNSSHSESIHNSPKSCPTPEVDTASEVEELEADSVSLLPAAPEGSRGGARIQVFLARYSYNPFEGPNENPEAELPLTAGEYIYIYGNMDEDGFFEGELMDGRRGLVPSNFVERVSDDDLLTSLPPELADLSHSSGPELSFLSVGGGGSSSGGQSSVGRSQPRPEEEDAGDELSLSPSPEGLGEPPAVPYPRRLVVLKQLAHSVVLAWEPPPEQVELHGFHICVNGELRQALGPGAPPKAVLENLDLWAGPLHISVQALTSRGSSDPLRCCLAVGARAGVVPSQLRVHRLTATSAEITWVPGNSNLAHAIYLNGEECPPASPSTYWATFCHLRPGTPYQAQVEAQLPPQGPWEPGWERLEQRAATLQFTTLPAGPPDAPLDVQIEPGPSPGILIISWLPVTIDAAGTSNGVRVTGYAIYADGQKIMEVASPTAGSVLVELSQLQLLQVCREVVVRTMSPHGESADSIPAPITPALAPASLPARVSCPSPHPSPEARAPLASASPGPGDPSSPLQHPAPLGTQEPPGAPPASPSREMAKGSHEDPPAPCSQEEAGAAVLGTSEERTASTSTLGEKDPGPAAPSLAKQEAEWTAGEACPASSSTQGARAQQAPNTEMCQGGDPGSGLRPRAEKEDTAELGVHLVNSLVDHGRNSDLSDIQEEEEEEEEEEEEELGSRTCSFQKQVAGNSIRENGAKSQPDPFCETDSDEEILEQILELPLQQFCSKKLFSIPEEEEEEEEDEEEEKSGAGCSSRDPGPPEPALLGLGCDSGQPRRPGQCPLSPESSRAGDCLEDMPGLVGGSSRRRGGGSPEKPPSRRRPPDPREHCSRLLSNNGPQASGRLGPTRERGGLPVIEGPRTGLEASGRGRLGPSRRCSRGRALEPGLASCLSPKCLEISIEYDSEDEQEAGSGGISITSSCYPGDGEAWGTATVGRPRGPPKANSGPKPYPRLPAWEKGEPERRGRSATGRAKEPLSRATETGEARGQDGSGRRGPQKRGVRVLRPSTAELVPARSPSETLAYQHLPVRIFVALFDYDPVSMSPNPDAGEEELPFREGQILKVFGDKDADGFYQGEGGGRTGYIPCNMVAEVAVDSPAGRQQLLQRGYLSPDILLEGSGNGPFVYSTAHTTGPPPKPRRSKKAESEGPAQPCPGPPKLVPSADLKAPHSMVAAFDYNPQESSPNMDVEAELPFRAGDVITVFGGMDDDGFYYGELNGQRGLVPSNFLEGPGPEAGGLDREPRTPQAESQRTRRRRVQC

SEQ ID NO: 1029 - protein, 574 aa, Homo sapiens
MPPQLQETRMNRSIPVEVDESEPYPSQLLKPIPEYSPEEESEPPAPNIRNMAPNSLSAPTMLHNSSGDFSQAHSTLKLANHQRPVSRQVTCLRTQVLEDSEDSFCRRHPGLGKAFPSGCSAVSEPASESVVGALPAEHQFSFMEKRNQWLVSQLSAASPDTGHDSDKSDQSLPNASADSLGGSQEMVQRPQPHRNRAGLDLPTIDTGYDSQPQDVLGIRQLERPLPLTSVCYPQDLPRPLRSREFPQFEPQRYPACAQMLPPNLSPHAPWNYHYHCPGSPDHQVPYGHDYPRAAYQQVIQPALPGQPLPGASVRGLHPVQKVILNYPSPWDHEERPAQRDCSFPGLPRHQDQPHHQPPNRAGAPGESLECPAELRPQVPQPPSPAAVPRPPSNPPARGTLKTSNLPEELRKVFITYSMDTAMEVVKFVNFLLVNGFQTAIDIFEDRIRGIDIIKWMERYLRDKTVMIIVAISPKYKQDVEGAESQLDEDEHGLHTKYIHRMMQIEFIKQGSMNFRFIPVLFPNAKKEHVPTWLQNTHVYSWPKNKKNILLRLLREEEYVAPPRGPLPTLQVVPL

SEQ ID NO: 1030 - protein, 654 aa, Homo sapiens
MAFRDVAVDFTQDEWRLLSPAQRTLYREVMLENYSNLVSLGISFSKPELITQLEQGKETWREEKKCSPATCPADPEPELYLDPFCPPGFSSQKFPMQHVLCNHPPWIFTCLCAEGNIQPGDPGPGDQEKQQQASEGRPWSDQAEGPEGEGAMPLFGRTKKRTLGAFSRPPQRQPVSSRNGLRGVELEASPAQSGNPEETDKLLKRIEVLGFGTVNCGECGLSFSKMTNLLSHQRIHSGEKPYVCGVCEKGFSLKKSLARHQKAHSGEKPIVCRECGRGFNRKSTLIIHERTHSGEKPYMCSECGRGFSQKSNLIIHQRTHSGEKPYVCRECGKGFSQKSAVVRHQRTHLEEKTIVCSDCGLGFSDRSNLISHQRTHSGEKPYACKECGRCFRQRTTLVNHQRTHSKEKPYVCGVCGHSFSQNSTLISHRRTHTGEKPYVCGVCGRGFSLKSHLNRHQNIHSGEKPIVCKDCGRGFSQQSNLIRHQRTHSGEKPMVCGECGRGFSQKSNLVAHQRTHSGERPYVCRECGRGFSHQAGLIRHKRKHSREKPYMCRQCGLGFGNKSALITHKRAHSEEKPCVCRECGQGFLQKSHLTLHQMTHTGEKPYVCKTCGRGFSLKSHLSRHRKTTSVHHRLPVQPDPEPCAGQPSDSLYSL

SEQ ID NO: 1031 - protein, 639 aa, Homo sapiens
MLPGLALLLLAAWTARALEVYPELQITNVVEANQPVTIQNWCKRGRKQCKTHPHFVIPYRCLVGEFVSDALLVPDKCKFLHQERMDVCETHLHWHTVAKETCSEKSTNLHDYGMLLPCGIDKFRGVEFVCCPLAEESDNVDSADAEEDDSDVWWGGADTDYADGSEDKVVEVAEEEEVAEVEEEEADDDEDDEDGDEVEEEAEEPYEEATERTTSIATTTTTTTESVEEVVRVPTTAASTPDAVDKYLETPGDENEHAHFQKAKERLEAKHRERMSQVMREWEEAERQAKNLPKADKKAVIQHFQEKVESLEQEAANERQQLVETHMARVEAMLNDRRRLALENYITALQAVPPRPRHVFNMLKKYVRAEQKDRQHTLKHFEHVRMVDPKKAAQIRSQVMTHLRVIYERMNQSLSLLYNVPAVAEEIQDEVDELLQKEQNYSDDVLANMISEPRISYGNDALMPSLTETKTTVELLPVNGEFSLDDLQPWHSFGADSVPANTENEVEPVDARPAADRGLTTRPGSGLTNIKTEEISEVKMDAEFRHDSGYEVHHQKLVFFAEDVGSNKGAIIGLMVGGVVIATVIVITLVMLKKKQYTSIHHGVVEVDAAVTPEERHLSKMQQNGYENPTYKFFEQMQN

SEQ ID NO: 1032 - protein, 115 aa, Homo sapiens
MLGLLGSTALVGWITGAAVAVLLLLLLLATCLFHGRQDCDVERNRTAAGGNRVRRAQPWPFRRRGHLGIFHHHRHPGHVSHVPNVGLHHHHHPRHTPHHLHHHHHPHRHHPRHAR

SEQ ID NO: 1033 - protein, 592 aa, Homo sapiens
MEKARPLWANSLQFVFACISYAVGLGNVWRFPYLCQMYGGGSFLVPYIIMLIVEGMPLLYLELAVGQRMRQGSIGAWRTISPYLSGVGVASVVVSFFLSMYYNVINAWAFWYLFHSFQDPLPWSVCPLNGNHTGYDEECEKASSTQYFWYRKTLNISPSLQENGGVQWEPALCLLLAWLVVYLCILRGTESTGKVVYFTASLPYCVLIIYLIRGLTLHGATNGLMYMFTPKIEQLANPKAWINAATQIFFSLGLGFGSLIAFASYNEPSNNCQKHAIIVSLINSFTSIFASIVTFSIYGFKATFNYENCLKKVSLLLTNTFDLEDGFLTASNLEQVKGYLASAYPSKYSEMFPQIKNCSLESELDTAVQGTGLAFIVYTEAIKNMEVSQLWSVLYFFMLLMLGIGSMLGNTAAILTPLTDSKIISSHLPKEAISGLVCLVNCAIGMVFTMEAGNYWFDIFNDYAATLSLLLIVLVETIAVCYVYGLRRFESDLKAMTGRAVSWYWKVMWAGVSPLLIVSLFVFYLSDYILTGTLKYQAWDASQGQLVTKDYPAYALAVIGLLVASSTMCIPLAALGTFVQRRLKRGDADPVA

SEQ ID NO: 1034 - protein, 746 aa, Homo sapiens
MDHAEENEILAATQRYYVERPIFSHPVLQERLHTKDKVPDSIADKLKQAFTCTPKKIRNIIYMFLPITKWLPAYKFKEYVLGDLVSGISTGVLQLPQGLAFAMLAAVPPIFGLYSSFYPVIMYCFLGTSRHISIGPFAVISLMIGGVAVRLVPDDIVIPGGVNATNGTEARDALRVKVAMSVTLLSGIIQFCLGVCRFGFVAIYLTEPLVRGFTTAAAVHVFTSMLKYLFGVKTKRYSGIFSVVYSTVAVLQNVKNLNVCSLGVGLMVFGLLLGGKEFNERFKEKLPAPIPLEFFAVVMGTGISAGFNLKESYNVDVVGTLPLGLLPPANPDTSLFHLVYVDAIAIAIVGFSVTISMAKTLANKHGYQVDGNQELIALGLCNSIGSLFQTFSISCSLSRSLVQEGTGGKTQLAGCLASLMILLVILATGFLFESLPQAVLSAIVIVNLKGMFMQFSDLPFFWRTSKIELTIWLTTFVSSLFLGLDYGLITAVIIALLTVIYRTQSPSYKVLGKLPETDVYIDIDAYEEVKEIPGIKIFQINAPIYYANSDLYSNALKRKTGVNPAVIMGARRKAMRKYAKEVGNANMANATVVKATQDAEVDGEDATKPEEEDGEVKYPPIVIKSTFPEEMQRFMPPGDNVHTVILDFTQVNFIDSVGVKTLAGIVKEYGDVGIYVYLAGCSAQVVNDLTRNRFFENPALWELLFHSIHDAVLGSQLREALAEQEASAPPSQEDLEPNATPATPEA

SEQ ID NO: 1035 - protein, 1644 aa, Homo sapiens
MFWCGTCFVTNNMKGSEVSLEKKKKIKMPVKRLREVVSQNHGDHLVLLKDELPCVPPALSANKRLPVGTGTSLNGTSRGSSDLTSARNCYQPLLENPMVSESDFSKDVAVQVLPLDKIEENNKQKANDIFISQYTMGQKDALRTVLKQNVSLCLTGWSDHSGVITTHCSLYLLRLMRSSHLSLPSSWDYRAQSMPVFKEVKVHLLEDAGIEKDAVTQETRISPSGIDSATTVAAATAAAIATAAPLIKVQSDLEAKVNSVTELLSKLQETDKHLQRVTEQQTSIQRKQEKLHCHDHEKQMNVFMEQHIRHLEKLQQQQIDIQTHFISAALKTSSFQPVSMPSSRAVEKYSVKPEHPNLGSCNPSLYNTFASKQAPLKEVEDTSFDKQKSPLETPAPRRFAPVPVSRDDELSKRENLLEEKENMEVSCHRGNVRLLEQILNNNDSLTRKSESSNTTSLTRSKIGWTPEKTNRFPSCEELETTKVTMQKSDDVLHDLGQKEKETNSMVQPKESLSMLKLPDLPQNSVKLQTTNTTRSVLKDAEKILRGVQNNKKVLEENLEAIIRAKDGAAMYSLINALSTNREMSEKIRIRKTVDEWIKTISAEIQDELSRTDYEQKRFDQKNQRTKKGQNMTKDIRTNTQDKTVNKSVIPRKHSQKQIEEHFRNLPMRGMPASSLQKERKEGLLKATTVIQDEDYMLQVYGKPVYQGHRSTLKKGPYLRFNSPSPKSRPQRPKVIERVKGTKVKSIRTQTDFYATKPKKMDSKMKHSVPVLPHGDQQYLFSPSREMPTFSGTLEGHLIPMAILLGQTQSNSDTMPPAGVIVSKPHPVTVTTSIPPSSRKVETGVKKPNIAIVEMKSEKKDPPQLTVQVLPSVDIDSISNSSADVLSPLSSPKEASLPPVQTWIKTPEIMKVDEEEVKFPGTNFDEIIDVIQEEEKCDEIPDSEPILEFNRSVKADSTKYNGPPFPPVASTFQPTADILDKVIERKETLENSLIQWVEQEIMSRIISGLFPVQQQIAPSISVSVSETSEPLTSDIVEGTSSGALQLFVDAGVPVNSNVIKHFVNEALAETIAVMLGDREAKKQGPVATGVSGDASTNETYLPARVCTPLPTPQPTPPCSPSSPAKECVLVKTPDSSPCDSDHDMAFPVKEICAEKGDDMPAIMLVNTPTVTPTTTPPPAAAVFTPTLSDISIDKLKVSSPELPKPWGDGDLPLEEENPNSPQEELHPRAIVMSVAKDEEPESMDFPAQPPPPEPVPFMPFPAGTKAPSPSQMPGSDSSTLESTLSVTVTETETLDKPISEGEILFSCGQKLAPKILEDIGLYLTNLNDSLSSTLHDAVEMEDDPPSEGQVIRMSHKKFHADAILSFAKQNQESAVSQQAVYHSEDLENSVGELSEGQRPQLTAAAENILMGHSLYMQPPVTNTQSLDQQCDPKPLSRQFDTVSGSIYEDSCASHGPMSLGELELEPNSKLVLPTTLLTAQENDVNLPVAAEDFSQYQLKQNQDVKQVEHKPSQSYLRVRNKSDIAPSQQQVSPGDMDRTQIELNPYLTCVFSGLGVHVKKVSCIGKLGLWRFVIQIISSPRWESSATLRFTDAPCQDVSDAAVSEPRGLLSVSESQHNAGGHGVFGGRYLLNGKRQPAQCLCHWF

SEQ ID NO: 1036 - protein, 384 aa, Homo sapiens
MTWTSGQLQREKQARPGSGAVLAFPDDKDLRVYGPAESQSAVFGDVCPLLTSLLDGYNVCVMAYGQTGSGKSYTMLGRHSDDGPVLPLDPQSDLGIIPRVAEELFRLILENTSRSPKVEVSIVEVYNNDIFDLLAKDSIAAVSGVKREVVTAKDGRTEVALLASEAVGSASKLMELVHGGLQLRAKHPTLVHADSSRSHLIITVTLTTASCSDSTADQACSATLPREQTEAGRAGRSRRASQGALAPQLVPGNPAGHAEQVQARLQLVDSAGSECVGVSGVTGLALREMACISRSLAALAGVLGALLEHRGHAPYRNSRLTHLLQDCLGGDAKLLVILCISPSQRHLAQTLQGLGFGIRARQVQRGPARKKPPSSQTEGKRRPD

SEQ ID NO: 1037 - protein, 540 aa, Homo sapiens
AAPRPSPAISVSVSAPAFYAPQKKFGPVVAPKPKVNPFRPGDSEPPPAPGAQRAQMGRVGEIPPPPPEDFPLPPPPLAGDGDDAEGALGGAFPPPPPPIEESFPPAPLEEEIFPSPPPPPEEEGGPEAPIPPPPQVSSGYVPPPVATPFSSKSSTKPAAGGTAPLPPWKSPSSSQPLPQVPAPAQSQTQFHVQPQPQPKPQVQLHVQSQTQPVSLANTQPRGPPASSPAPAPKFSPVTPKFTPVASKFSPGAPGGSGSQPNQKLGHPEALSAGTGSPQPPSFTYAQQREKPRVQEKQHPVPPPAQNQNQVRSPGAPGPLTLKEVEELEQLTQQLMQDMEHPQRQNVAVNELCGRCHQPLARAQPAVRALGQLFHIACFTCHQCAQQLQGQQFYSLEGAPYCEGCYTDTLEKCNTCGEPITDRMLRATGKAYHPHCFTCVVCARPLEGTSFIVDQANRPHCVPDYHKQYAPRCSVCSEPIMPEPGRDETVRVVALDKNFHMKCYKCEDCGKPLSIEADDNGCFPLDGHVLCRKCHTARAQT

SEQ ID NO: 1038 - protein, 1531 aa, Homo sapiens
MPSDFISLLSADLDLESPKSLYSRESVYDLLPKELQLPPSRETSVASMSQTSGGEAGSPPPAVVAADASSAPSSSSMGGACSSFTTSSSPTIYSTSVTDSKAMQVESCSSAVGVSNRGVSEKQLTSNTVQQHPSTPKRHTVLYISPPPEDLLDNSRMSCQDEGCGLESEQSCSMWMEDSPSNFSNMSTSSYNDNTEVPRKSRKRNPKQRPGVKRRDCEESNMDIFDADSAKAPHYVLSQLTTDNKGNSKAGNGTLENQKGTGVKKSPMLCGQYPVKSEGKELKIVVQPETQHRARYLTEGSRGSVKDRTQQGFPTVKLEGHNEPVVLQVFVGNDSGRVKPHGFYQACRVTGRNTTPCKEVDIEGTTVIEVGLDPSNNMTLAVDCVGILKLRNADVEARIGIAGSKKKSTRARLVFRVNIMRKDGSTLTLQTPSSPILCTQPAGVPEILKKSLHSCSVKGEEEVFLIGKNFLKGTKVIFQENVSDENSWKSEAEIDMELFHQNHLIVKVPPYHDQHITLPVSVGIYVVTNAGRSHDVQPFTYTPDPAAAGALNVNVKKEISSPARPCSFEEAMKAMKTTGCNLDKVNIIPNALMTPLIPSSMIKSEDVTPMEVTAEKRSSTIFKTTKSVGSTQQTLENISNIAGNGSFSSPSSSHLPSENEKQQQIQPKAYNPETLTTIQTQDISQPGTFPAVSASSQLPNSDALLQQATQFQTRETQSREILQSDGTVVNLSQLTEASQQQQQSPLQEQAQTLQQQISSNIFPSPNSVSQLQNTIQQLQAGSFTGSTASGSSGSVDLVQQVLEAQQQLSSVLFSAPDGNENVQEQLSADIFQQVSQIQSGVSPGMFSSTEPTVHTRPDNLLPGRAESVHPQSENTLSNQQQQQQQQQQVMESSAAMVMEMQQSICQAAAQIQSELFPSTASANGNLQQSPVYQQTSHMMSALSTNEDMQMQCELFSSPPAVSGNETSTTTTQQVATPGTTMFQTSSSGDGEETGTQAKQIQNSVFQTMVQMQHSGDNQPQVNLFSSTKSMMSVQNSGTQQQGNGLFQQGNEMMSLQSGNFLQQSSHSQAQLFHPQNPIADAQNLSQETQGSLFHSPNPIVHSQTSTTSSEQMQPPMFHSQSTIAVLQGSSVPQDQQSTNIFLSQSPMNNLQTNTVAQEAFFAAPNSISPLQSTSNSEQQAAFQQQAPISHIQTPMLSQEQAQPPQQGLFQPQVALGSLPPNPMPQSQQGTMFQSQHSIVAMQSNSPSQEQQQQQQQQQQQQQQQQQSILFSNQNTMATMASPKQPPPNMIFNPNQNPMANQEQQNQSIFHQQSNMAPMNQEQQPMQFQSQSTVSSLQNPGPTQSESSQTPLFHSSPQIQLVQGSPSSQEQQVTLFLSPASMSALQTSINQQDMQQSPLYSPQNNMPGIQGATSSPQPQATLFHNTAGGTMNQLQNSPGSSQQTSGMFLFGIQNNCSQLLTSGPATLPDQLMAISQPGQPQNEGQPPVTTLLSQQMPENSPLASSINTNQNIEKIDLLVSLQNQGNNLTGSF

SEQ ID NO: 1039 - protein, 314 aa, Homo sapiens
MVAPVWYLVAAALLVGFILFLTRSRGRAASAGQEPLHNEELAGAGRVAQPGPLEPEEPRAGGRPRRRRDLGSRLQAQRRAQRVAWAEADENEEEAVILAQEEEGVEKPAETHLSGKIGAKKLRKLEEKQARKAQREAEEAEREERKRLESQREAEWKKEEERLRLEEEQKEEEERKAREEQAQREHEEYLKLKEAFVVEEEGVGETMTEEQSQSFLTEFINYIKQSKVVLLEDLASQVGLRTQDTINRIQDLLAEGTITGVIDDRGKFIYITPEELAAVANFIRQRGRVSIAELAQASNSLIAWGRESPAQAPA

SEQ ID NO: 1040 - protein, 4547 aa, Homo sapiens
MEPSGSLFPSLVVVGHVVTLAAVWHWRRGRRWAQDEQDERDRVQKKTFTKWVNKHLIKAQRHISDLYEDLRDGHNLISLLEVLSGDSLPREKGRMRFHKLQNVQIALDYLRHRQVKLVNIRNDDIADGNPKLTLGLIWTIILHFQISDIQVSGQSEDMTAKEKLLLWSQRMVEGYQGLRCDNFTSSWRDGRLFNAIIHRHKPLLIDMNKVYRQTNLENLDQAFSVAERDLGVTRLLDPEDVDVPQPDEKSIITYVSSLYDAMPRVPDVQDGVRANELQLRWQEYRELVLLLLQWMRHHTAAFEERRFPSSFEEIEILWSQFLKFKEMELPAKEADKNRSKGIYQSLEGAVQAGQLKVPPGYHPLDVEKEWGKLHVAILEREKQLRSEFERLECLQRIVTKLQMEAGLCEEQLNQADALLQSDVRLLAAGKVPQRAGEVERDLDKADSMIRLLFNDVQTLKDGRHPQGEQMYRRVYRLHERLVAIRTEYNLRLKAGVAAPATQVAQVTLQSVQRRPELEDSTLRYLQDLLAWVEENQHRVDGAEWGVDLPSVEAQLGSHRGLHQSIEEFRAKIERARSDEGQLSPATRGAYRDCLGRLDLQYAKLLNSSKARLRSLESLHSFVAAATKELMWLNEKEEEEVGFDWSDRNTNMTAKKESYSALMRELELKEKKIKELQNAGDRLLREDHPARPTVESFQAALQTQWSWMLQLCCCIEAHLKENAAYFQFFSDVREAEGQLQKLQEALRRKYSCDRSATVTRLEDLLQDAQDEKEQLNEYKGHLSGLAKRAKAVVQLKPRHPAHPMRGRLPLLAVCDYKQVEVTVHKGDECQLVGPAQPSHWKVLSSSGSEAAVPSVCFLVPPPNQEAQEAVTRLEAQHQALVTLWHQLHVDMKSLLAWQSLRRDVQLIRSWSLATFRTLKPEEQRQALHSLELHYQAFLRDSQDAGGFGPEDRLMAEREYGSCSHHYQQLLQSLEQGAQEESRCQRCISELKDIRLQLEACETRTVHRLRLPLDKEPARECAQRIAEQQKAQAEVEGLGKGVARLSAEAEKVLALPEPSPAAPTLRSELELTLGKLEQVRSLSAIYLEKLKTISLVIRGTQGAEEVLRAHEEQLKEAQAVPATLPELEATKASLKKLRAQAEAQQPTFDALRDELRGAQEVGERLQQRHGERDVEVERWRERVAQLLERWQAVLAQTDVRQRELEQLGRQLRYYRESADPLGAWLQDARRRQEQIQAMPLADSQAVREQLRQEQALLEEIERHGEKVEECQRFAKQYINAIKDYELQLVTYKAQLEPVASPAKKPKVQSGSESVIQEYVDLRTHYSELTTLTSQYIKFISETLRRMEEEERLAEQQRAEERERLAEVEAALEKQRQLAEAHAQAKAQAEREAKELQQRMQEEVVRREEAAVDAQQQKRSIQEELQQLRQSSEAEIQAKARQAEAAERSRLRIEEEIRVVRLQLEATERQRGGAEGELQALRARAEEAEAQKRQAQEEAERLRRQVQDESQRKRQAEVELASRVKAEAEAAREKQRALQALEELRLQAEEAERRLRQAEVERARQVQVALETAQRSAEAELQSKRASFAEKTAQLERSLQEEHVAVAQLREEAERRAQQQAEAERAREEAERELERWQLKANEALRLRLQAEEVAQQKSLAQAEAEKQKEEAEREARRRGKAEEQAVRQRELAEQELEKQRQLAEGTAQQRLAAEQELIRLRAETEQGEQQRQLLEEELARLQREAAAATQKRQELEAELAKVRAEMEVLLASKARAEEESRSTSEKSKQRLEAEAGRFRELAEEAARLRALAEEAKRQRQLAEEDAARQRAEAERVLAEKLAAIGEATRLKTEAEIALKEKEAENERLRRLAEDEAFQRRRLEEQAAQHKADIEERLAQLRKASDSELERQKGLVEDTLRQRRQVEEEILALKASFEKAAAGKAELELELGRIRSNAEDTLRSKEQAELEAARQRQLAAEEERRRREAEERVQKSLAAEEEAARQRKAALEEVERLKAKVEEARRLRERAEQESARQLQLAQEAAQKRLQAEEKAHAFAVQQKEQELQQTLQQEQSVLDQLRGEAEAARRAAEEAEEARVQAEREAAQSRRQVEEAERLKQSAEEQAQARAQAQAAAEKLRKEAEQEAARRAQAEQAALRQKQAADAEMEKHKKFAEQTLRQKAQVEQELTTLRLQLEETDHQKNLLDEELQRLKAEATEAARQRSQVEEELFSVRVQMEELSKLKARIEAENRALILRDKDNTQRFLQEEAEKMKQVAEEAARLSVAAQEAARLRQLAEEDLAQQRALAEKMLKEKMQAVQEATRLKAEAELLQQQKELAQEQARRLQEDKEQMAQQLAEETQGFQRTLEAERQRQLEMSAEAERLKLRVAEMSRAQARAEEDAQRFRKQAEEIGEKLHRTELATQEKVTLVQTLEIQRQQSDHDAERLREAIAELEREKEKLQQEAKLLQLKSEEMQTVQQEQLLQETQALQQSFLSEKDSLLQRERFIEQEKAKLEQLFQDEVAKAQQLREEQQRQQQQMEQERQRLVASMEEARRRQHEAEEGVRRKQEELQQLEQQRRQQEELLAEENQRLREQLQLLEEQHRAALAHSEEVTASQVAATKTLPNGRDALDGPAAEAEPEHSFDGLRRKVSAQRLQEAGILSAEELQRLAQGHTTVDELARREDVRHYLQGRSSIAGLLLKATNEKLSVYAALQRQLLSPGTALILLEAQAASGFLLDPVRNRRLTVNEAVKEGVVGPELHHKLLSAERAVTGYKDPYTGQQISLFQAMQKGLIVREHGIRLLEAQIATGGVIDPVHSHRVPVDVAYRRGYFDEEMNRVLADPSDDTKGFFDPNTHENLTYLQLLERCVEDPETGLCLLPLTDKAAKGGELVYTDSEARDVFEKATVSAPFGKFQGKTVTIWEIINSEYFTAEQRRDLLRQFRTGRITVEKIIKIIITVVEEQEQKGRLCFEGLRSLVPAAELLESRVIDRELYQQLQRGERSVRDVAEVDTVRRALRGANVIAGVWLEEAGQKLSIYNALKKDLLPSDMAVALLEAQAGTGHIIDPATSARLTVDEAVRAGLVGPEFHEKLLSAEKAVTGYRDPYTGQSVSLFQALKKGLIPREQGLRLLDAQLSTGGIVDPSKSHRVPLDVACARGCLDEETSRALSAPRADAKAYSDPSTGEPATYGELQQRCRPDQLTGLSLLPLSEKAARARQEELYSELQARETFEKTPVEVPVGGFKGRTVTVWELISSEYFTAEQRQELLRQFRTGKVTVEKVIKILITIVEEVETLRQERLSFSGLRAPVPASELLASGVLSRAQFEQLKDGKTTVKDLSELGSVRTLLQGSGCLAGIYLEDTKEKVSIYEAMRRGLLRATTAALLLEAQAATGFLVDPVRNQRLYVHEAVKAGVVGPELHEQLLSAEKAVTGYRDPYSGSTISLFQAMQKGLVLRQHGIRLLEAQIATGGIIDPVHSHRVPVDVAYQRGYFSEEMNRVLADPSDDTKGFFDPNTHENLTYRQLLERCVEDPETGLRLLPLKGAEKAEVVETTQVYTEEETRRAFEETQIDIPGGGSHGGSTMSLWEVMQSDLIPEEQRAQLMADFQAGRVTKERMIIIIIEIIEKTEIIRQQGLASYDYVRRRLTAEDLFEARIISLETYNLLREGTRSLREALEAESAWCYLYGTGSVAGVYLPGSRQTLSIYQALKKGLLSAEVARLLLEAQAATGFLLDPVKGERLTVDEAVRKGLVGPELHDRLLSAERAVTGYRDPYTEQTISLFQAMKKELIPTEEALRLLDAQLATGGIVDPRLGFHLPLEVAYQRGYLNKDTHDQLSEPSEVRSYVDPSTDERLSYTQLLRRCRRDDGTGQLLLPLSDARKLTFRGLRKQITMEELVRSQVMDEATALQLREGLTSIEEVTKNLQKFLEGTSCIAGVFVDATKERLSVYQAMKKGIIRPGTAFELLEAQAATGYVIDPIKGLKLTVEEAVRMGIVGPEFKDKLLSAERAVTGYKDPYSGKLISLFQAMKKGLILKDHGIRLLEAQIATGGIIDPEESHRLPVEVAYKRGLFDEEMNEILTDPSDDTKGFFDPNTEENLTYLQLMERCITDPQTGLCLLPLKEKKRERKTSSKSSVRKRRVVIVDPETGKEMSVYEAYRKGLIDHQTYLELSEQECEWEEITISSSDGVVKSMIIDRRSGRQYDIDDAIAKNLIDRSALDQYRAGTLSITEFADMLSGNAGGFRSRSSSVGSSSSYPISPAVSRTQLASWSDPTEETGPVAGILDTETLEKVSITEAMHRNLVDNITGQRLLEAQACTGGIIDPSTGERFPVTDAVNKGLVDKIMVDRINLAQKAFCGFEDPRTKTKMSAAQALKKGWLYYEAGQRFLEVQYLTGGLIEPDTPGRVPLDEALQRGTVDARTAQKLRDVGAYSKYLTCPKTKLKISYKDALDRSMVEEGTGLRLLEAAAQSTKGYYSPYSVSGSGSTAGSRTGSRTGSRAGSRRGSFDATGSGFSMTFSSSSYSSSGYGRRYASGSSASLGGPESAVA

SEQ ID NO: 1041 - protein, 838 aa, Homo sapiens
MHLEGRDGRRYPGAPAVELLQTSVPSGLAELVAGKRRLPRGAGGADPSHSCPRGAAGQSSWAPAGQEFASFLTKGRSHSSLPQMSSSRSKDSCFTENTPLLRNSLQEKGSRCIPVYHPEFITAEESWEDSSADWERRYLLSREVSGLSASASSEKGDLLDSPHIRLRLSKLRRCVQWLKVMGLFAFVVLCSILFSLYPDQGKLWQLLALSPLENYSVNLSSHVDSTLLQVDLAGALVASGPSRPGREEHIVVELTQADALGSRWRRPQQVTHNWTVYLNPRRSEHSVMSRTFEVLTRETVSISIRASLQQTQAVPLLMAHQYLRGSVETQVTIATAILAGVYALIIFEIVHRTLAAMLGSLAALAALAVIGDRPSLTHVVEWIDFETLALLFGMMILVAIFSETGFFDYCAVKAYRLSRGRVWAMIIMLCLIAAVLSAFLDNVTTMLLFTPVTIRLCEVLNLDPRQVLIAEVIFTNIGGAATAIGDPPNVIIVSNQELRKMGLDFAGFTAHMFIGICLVLLVCFPLLRLLYWNRKLYNKEPSEIVELKHEIHVWRLTAQRISPASREETAVRRLLLGKVLALEHLLARRLHTFHRQISQEDKNWETNIQELQKKHRISDGILLAKCLTVLGFVIFMFFLNSFVPGIHLDLGWIAILGAIWLLILADIHDFEIILHRVEWATLLFFAALFVLMEALAHLHLIEYVGEQTALLIKMVPEEQRLIAAIVLVVWVSALASSLIDNIPFTATMIPVLLNLSHDPEVGLPAPPLMYALAFGACLGGNGTLIGASANVVCAGIAEQHGYGFSFMEFFRLGFPMMVVSCTVGMCYLLVAHVVVGWN

SEQ ID NO: 1042 - protein, 707 aa, Homo sapiens
MPSPAGEGPPLALSLAEKAVCKVVYGAPRPRPLLLPVGLELWLYVQKMRNLQRKRMEASCLELALEGERLCKAGDFKTGVAFFEAAVQVGTEDLKTLSAIYSQLGNAYFYLKEHGRALEYHKHDLLLARTIGDRMGEAKASGNLGNTLKVLGRFDEAAVCCQRHLSIAQEQGDKVGEARALYNIGNVYHAKGKQLSWNAANATQDPGHLPPDVRETLCKASEFYERNLSLVKELGDRAAQGRAYGNLGNTHYLLGNFTEATTFHKERLAIAKEFGDKAAERRAYSNLGNAHVFLGRFDVAAEYYKKTLQLSRQLRDQAVEAQACYSLGNTYTLLQDYERAAEYHLRHLLIAQELADRVGEGRACWSLGNAYVSMGRPAQALTFAKKHLQISQEIGDRHGELTARMNVAQLQLVLGRLTSPAASEKPDLAGYEAQGARPKRTQRLSAETWDLLRLPLEREQNGDSHHSGDWRGPSRDSLPLPVRSRKYQEGPDAERRPREGSHSPLDSADVRVHVPRTSIPRAPSSDEECFFDLLTKFQSSRMDDQRCPLDDGQAGAAEATAAPTLEDRIAQPSMTASPQTEEFFDLIASSQSRRLDDQRASVGSLPGLRITHSNAGHLRGHGEPQEPGDDFFNMLIKYQSSRIDDQRCPPPDVLPRGPTMPDEDFFSLIQRVQAKRMDEQRVDLAGGPEQGAGGPPEPQQQCQPGAS

SEQ ID NO: 1043 - protein, 2477 aa, Homo sapiens
MLRGPGPGLLLLAVQCLGTAVPSTGASKSKRQAQQMVQPQSPVAVSQSKPGCYDNGKHYQINQQWERTYLGNALVCTCYGGSRGFNCESKPEAEETCFDKYTGNTYRVGDTYERPKDSMIWDCTCIGAGRGRISCTIANRCHEGGQSYKIGDTWRRPHETGGYMLECVCLGNGKGEWTCKPIAEKCFDHAAGTSYVVGETWEKPYQGWMMVDCTCLGEGSGRITCTSRNRCNDQDTRTSYRIGDTWSKKDNRGNLLQCICTGNGRGEWKCERHTSVQTTSSGSGPFTDVRAAVYQPQPHPQPPPYGHCVTDSGVVYSVGMQWLKTQGNKQMLCTCLGNGVSCQETAVTQTYGGNSNGEPCVLPFTYNGRTFYSCTTEGRQDGHLWCSTTSNYEQDQKYSFCTDHTVLVQTRGGNSNGALCHFPFLYNNHNYTDCTSEGRRDNMKWCGTTQNYDADQKFGFCPMAAHEEICTTNEGVMYRIGDQWDKQHDMGHMMRCTCVGNGRGEWTCIAYSQLRDQCIVDDITYNVNDTFHKRHEEGHMLNCTCFGQGRGRWKCDPVDQCQDSETGTFYQIGDSWEKYVHGVRYQCYCYGRGIGEWHCQPLQTYPSSSGPVEVFITETPSQPNSHPIQWNAPQPSHISKYILRWRPKNSVGRWKEATIPGHLNSYTIKGLKPGVVYEGQLISIQQYGHQEVTRFDFTTTSTSTPVTSNTVTGETTPFSPLVATSESVTEITASSFVVSWVSASDTVSGFRVEYELSEEGDEPQYLDLPSTATSVNIPDLLPGRKYIVNVYQISEDGEQSLILSTSQTTAPDAPPDTTVDQVDDTSIVVRWSRPQAPITGYRIVYSPSVEGSSTELNLPETANSVTLSDLQPGVQYNITIYAVEENQESTPVVIQQETTGTPRSDTVPSPRDLQFVEVTDVKVTIMWTPPESAVTGYRVDVIPVNLPGEHGQRLPISRNTFAEVTGLSPGVTYYFKVFAVSHGRESKPLTAQQTTKLDAPTNLQFVNETDSTVLVRWTPPRAQITGYRLTVGLTRRGQPRQYNVGPSVSKYPLRNLQPASEYTVSLVAIKGNQESPKATGVFTTLQPGSSIPPYNTEVTETTIVITWTPAPRIGFKLGVRPSQGGEAPREVTSDSGSIVVSGLTPGVEYVYTIQVLRDGQERDAPIVNKVVTPLSPPTNLHLEANPDTGVLTVSWERSTTPDITGYRITTTPTNGQQGNSLEEVVHADQSSCTFDNLSPGLEYNVSVYTVKDDKESVPISDTIIPEVPQLTDLSFVDITDSSIGLRWTPLNSSTIIGYRITVVAAGEGIPIFEDFVDSSVGYYTVTGLEPGIDYDISVITLINGGESAPTTLTQQTAVPPPTDLRFTNIGPDTMRVTWAPPPSIDLTNFLVRYSPVKNEEDVAELSISPSDNAVVLTNLLPGTEYVVSVSSVYEQHESTPLRGRQKTGLDSPTGIDFSDITANSFTVHWIAPRATITGYRIRHHPEHFSGRPREDRVPHSRNSITLTNLTPGTEYVVSIVALNGREESPLLIGQQSTVSDVPRDLEVVAATPTSLLISWDAPAVTVRYYRITYGETGGNSPVQEFTVPGSKSTATISGLKPGVDYTITVYAVTGRGDSPASSKPISINYRTEIDKPSQMQVTDVQDNSISVKWLPSSSPVTGYRVTTTPKNGPGPTKTKTAGPDQTEMTIEGLQPTVEYVVSVYAQNPSGESQPLVQTAVTNIDRPKGLAFTDVDVDSIKIAWESPQGQVSRYRVTYSSPEDGIHELFPAPDGEEDTAELQGLRPGSEYTVSVVALHDDMESQPLIGTQSTAIPAPTDLKFTQVTPTSLSAQWTPPNVQLTGYRVRVTPKEKTGPMKEINLAPDSSSVVVSGLMVATKYEVSVYALKDTLTSRPAQGVVTTLENVSPPRRARVTDATETTITISWRTKTETITGFQVDAVPANGQTPIQRTIKPDVRSYTITGLQPGTDYKIYLYTLNDNARSSPVVIDASTAIDAPSNLRFLATTPNSLLVSWQPPRARITGYIIKYEKPGSPPREVVPRPRPGVTEATITGLEPGTEYTIYVIALKNNQKSEPLIGRKKTDELPQLVTLPHPNLHGPEILDVPSTVQKTPFVTHPGYDTGNGIQLPGTSGQQPSVGQQMIFEEHGFRRTTPPTTATPIRHRPRPYPPNVGEEIQIGHIPREDVDYHLYPHGPGLNPNASTGQEALSQTTISWAPFQDTSEYIISCHPVGTDEEPLQFRVPGTSTSATLTGLTRGATYNVIVEALKDQQRHKVREEVVTVGNSVNEGLNQPTDDSCFDPYTVSHYAVGDEWERMSESGFKLLCQCLGFGSGHFRCDSSRWCHDNGVNYKIGEKWDRQGENGQMMSCTCLGNGKGEFKCDPHEATCYDDGKTYHVGEQWQKEYLGAICSCTCFGGQRGWRCDNCRRPGGEPSPEGTTGQSYNQYSQRYHQRTNTNVNCPIECFMPLDVQADREDSRE

SEQ ID NO: 1044 - protein, 826 aa, Homo sapiens
MNIQEQGFPLDLGASFTEDAPRPPVPGEEGELVSTDPRPASYSFCSGKGVGIKGETSTATPRRSDLDLGYEPEGSASPTPPYLKWAESLHSLLDDQDGISLFRTFLKQEGCADLLDFWFACTGFRKLEPCDSNEEKRLKLARAIYRKYILDNNGIVSRQTKPATKSFIKGCIMKQLIDPAMFDQAQTEIQATMEENTYPSFLKSDIYLEYTRTGSESPKVCSDQSSGSGTGKGISGYLPTLNEDEEWKCDQDMDEDDGRDAAPPGRLPQKLLLETAAPRVSSSRRYSEGREFRYGSWREPVNPYYVNAGYALAPATSANDSEQQSLSSDADTLSLTDSSVDGIPPYRIRKQHRREMQESVQVNGRVPLPHIPRTYRVPKEVRVEPQKFAEELIHRLEAVQRTREAEEKLEERLKRVRMEEEGEDGDPSSGPPGPCHKLPPAPAWHHFPPRCVDMGCAGLRDAHEENPESILDEHVQRVLRTPGRQSPGPGHRSPDSGHVAKMPVALGGAASGHGKHVPKSGAKLDAAGLHHHRHVHHHVHHSTARPKEQVEAEATRRAQSSFAWGLEPHSHGARSRGYSESVGAAPNASDGLAHSGKVGVACKRNAKKAESGKSASTEVPGASEDAEKNQKIMQWIIEGEKEISRHRRTGHGSSGTRKPQPHENSRPLSLEHPWAGPQLRTSVQPSHLFIQDPTMPPHPAPNPLTQLEEARRRLEEEEKRASRAPSKQRTRSQRKVGGGSAQPCDSIVVAYYFCGEPIPYRTLVRGRAVTLGQFKELLTKKGSYRYYFKKVSDEFDCGVVFEEVREDEAVLPVFEEKIIGKVEKVD

SEQ ID NO: 1045 - protein, 4525 aa, Homo sapiens
MDPSRAIQNEISSLKDERDRVQKKTFTKWVNKHLIKAQRHISDLYEDLRDGHNLISLLEVLSGDSLPREKGRMRFHKLQNVQIALDYLRHRQVKLVNIRNDDIADGNPKLTLGLIWTIILHFQISDIQVSGQSEDMTAKEKLLLWSQRMVEGYQGLRCDNFTSSWRDGRLFNAIIHRHKPLLIDMNKVYRQTNLENLDQAFSVAERDLGVTRLLDPEDVDVPQPDEKSIITYVSSLYDAMPRVPDVQDGVRANELQLRWQEYRELVLLLLQWMRHHTAAFEERRFPSSFEEIEILWSQFLKFKEMELPAKEADKNRSKGIYQSLEGAVQAGQLKVPPGYHPLDVEKEWGKLHVAILEREKQLRSEFERLECLQRIVTKLQMEAGLCEEQLNQADALLQSDVRLLAAGKVPQRAGEVERDLDKADSMIRLLFNDVQTLKDGRHPQGEQMYRRVYRLHERLVAIRTEYNLRLKAGVAAPATQVAQVTLQSVQRRPELEDSTLRYLQDLLAWVEENQHRVDGAEWGVDLPSVEAQLGSHRGLHQSIEEFRAKIERARSDEGQLSPATRGAYRDCLGRLDLQYAKLLNSSKARLRSLESLHSFVAAATKELMWLNEKEEEEVGFDWSDRNTNMTAKKESYSALMRELELKEKKIKELQNAGDRLLREDHPARPTVESFQAALQTQWSWMLQLCCCIEAHLKENAAYFQFFSDVREAEGQLQKLQEALRRKYSCDRSATVTRLEDLLQDAQDEKEQLNEYKGHLSGLAKRAKAVVQLKPRHPAHPMRGRLPLLAVCDYKQVEVTVHKGDECQLVGPAQPSHWKVLSSSGSEAAVPSVCFLVPPPNQEAQEAVTRLEAQHQALVTLWHQLHVDMKSLLAWQSLRRDVQLIRSWSLATFRTLKPEEQRQALHSLELHYQAFLRDSQDAGGFGPEDRLMAEREYGSCSHHYQQLLQSLEQGAQEESRCQRCISELKDIRLQLEACETRTVHRLRLPLDKEPARECAQRIAEQQKAQAEVEGLGKGVARLSAEAEKVLALPEPSPAAPTLRSELELTLGKLEQVRSLSAIYLEKLKTISLVIRGTQGAEEVLRAHEEQLKEAQAVPATLPELEATKASLKKLRAQAEAQQPTFDALRDELRGAQEVGERLQQRHGERDVEVERWRERVAQLLERWQAVLAQTDVRQRELEQLGRQLRYYRESADPLGAWLQDARRRQEQIQAMPLADSQAVREQLRQEQALLEEIERHGEKVEECQRFAKQYINAIKDYELQLVTYKAQLEPVASPAKKPKVQSGSESVIQEYVDLRTHYSELTTLTSQYIKFISETLRRMEEEERLAEQQRAEERERLAEVEAALEKQRQLAEAHAQAKAQAEREAKELQQRMQEEVVRREEAAVDAQQQKRSIQEELQQLRQSSEAEIQAKARQAEAAERSRLRIEEEIRVVRLQLEATERQRGGAEGELQALRARAEEAEAQKRQAQEEAERLRRQVQDESQRKRQAEVELASRVKAEAEAAREKQRALQALEELRLQAEEAERRLRQAEVERARQVQVALETAQRSAEAELQSKRASFAEKTAQLERSLQEEHVAVAQLREEAERRAQQQAEAERAREEAERELERWQLKANEALRLRLQAEEVAQQKSLAQAEAEKQKEEAEREARRRGKAEEQAVRQRELAEQELEKQRQLAEGTAQQRLAAEQELIRLRAETEQGEQQRQLLEEELARLQREAAAATQKRQELEAELAKVRAEMEVLLASKARAEEESRSTSEKSKQRLEAEAGRFRELAEEAARLRALAEEAKRQRQLAEEDAARQRAEAERVLAEKLAAIGEATRLKTEAEIALKEKEAENERLRRLAEDEAFQRRRLEEQAAQHKADIEERLAQLRKASDSELERQKGLVEDTLRQRRQVEEEILALKASFEKAAAGKAELELELGRIRSNAEDTLRSKEQAELEAARQRQLAAEEERRRREAEERVQKSLAAEEEAARQRKAALEEVERLKAKVEEARRLRERAEQESARQLQLAQEAAQKRLQAEEKAHAFAVQQKEQELQQTLQQEQSVLDQLRGEAEAARRAAEEAEEARVQAEREAAQSRRQVEEAERLKQSAEEQAQARAQAQAAAEKLRKEAEQEAARRAQAEQAALRQKQAADAEMEKHKKFAEQTLRQKAQVEQELTTLRLQLEETDHQKNLLDEELQRLKAEATEAARQRSQVEEELFSVRVQMEELSKLKARIEAENRALILRDKDNTQRFLQEEAEKMKQVAEEAARLSVAAQEAARLRQLAEEDLAQQRALAEKMLKEKMQAVQEATRLKAEAELLQQQKELAQEQARRLQEDKEQMAQQLAEETQGFQRTLEAERQRQLEMSAEAERLKLRVAEMSRAQARAEEDAQRFRKQAEEIGEKLHRTELATQEKVTLVQTLEIQRQQSDHDAERLREAIAELEREKEKLQQEAKLLQLKSEEMQTVQQEQLLQETQALQQSFLSEKDSLLQRERFIEQEKAKLEQLFQDEVAKAQQLREEQQRQQQQMEQERQRLVASMEEARRRQHEAEEGVRRKQEELQQLEQQRRQQEELLAEENQRLREQLQLLEEQHRAALAHSEEVTASQVAATKTLPNGRDALDGPAAEAEPEHSFDGLRRKVSAQRLQEAGILSAEELQRLAQGHTTVDELARREDVRHYLQGRSSIAGLLLKATNEKLSVYAALQRQLLSPGTALILLEAQAASGFLLDPVRNRRLTVNEAVKEGVVGPELHHKLLSAERAVTGYKDPYTGQQISLFQAMQKGLIVREHGIRLLEAQIATGGVIDPVHSHRVPVDVAYRRGYFDEEMNRVLADPSDDTKGFFDPNTHENLTYLQLLERCVEDPETGLCLLPLTDKAAKGGELVYTDSEARDVFEKATVSAPFGKFQGKTVTIWEIINSEYFTAEQRRDLLRQFRTGRITVEKIIKIIITVVEEQEQKGRLCFEGLRSLVPAAELLESRVIDRELYQQLQRGERSVRDVAEVDTVRRALRGANVIAGVWLEEAGQKLSIYNALKKDLLPSDMAVALLEAQAGTGHIIDPATSARLTVDEAVRAGLVGPEFHEKLLSAEKAVTGYRDPYTGQSVSLFQALKKGLIPREQGLRLLDAQLSTGGIVDPSKSHRVPLDVACARGCLDEETSRALSAPRADAKAYSDPSTGEPATYGELQQRCRPDQLTGLSLLPLSEKAARARQEELYSELQARETFEKTPVEVPVGGFKGRTVTVWELISSEYFTAEQRQELLRQFRTGKVTVEKVIKILITIVEEVETLRQERLSFSGLRAPVPASELLASGVLSRAQFEQLKDGKTTVKDLSELGSVRTLLQGSGCLAGIYLEDTKEKVSIYEAMRRGLLRATTAALLLEAQAATGFLVDPVRNQRLYVHEAVKAGVVGPELHEQLLSAEKAVTGYRDPYSGSTISLFQAMQKGLVLRQHGIRLLEAQIATGGIIDPVHSHRVPVDVAYQRGYFSEEMNRVLADPSDDTKGFFDPNTHENLTYRQLLERCVEDPETGLRLLPLKGAEKAEVVETTQVYTEEETRRAFEETQIDIPGGGSHGGSTMSLWEVMQSDLIPEEQRAQLMADFQAGRVTKERMIIIIIEIIEKTEIIRQQGLASYDYVRRRLTAEDLFEARIISLETYNLLREGTRSLREALEAESAWCYLYGTGSVAGVYLPGSRQTLSIYQALKKGLLSAEVARLLLEAQAATGFLLDPVKGERLTVDEAVRKGLVGPELHDRLLSAERAVTGYRDPYTEQTISLFQAMKKELIPTEEALRLLDAQLATGGIVDPRLGFHLPLEVAYQRGYLNKDTHDQLSEPSEVRSYVDPSTDERLSYTQLLRRCRRDDGTGQLLLPLSDARKLTFRGLRKQITMEELVRSQVMDEATALQLREGLTSIEEVTKNLQKFLEGTSCIAGVFVDATKERLSVYQAMKKGIIRPGTAFELLEAQAATGYVIDPIKGLKLTVEEAVRMGIVGPEFKDKLLSAERAVTGYKDPYSGKLISLFQAMKKGLILKDHGIRLLEAQIATGGIIDPEESHRLPVEVAYKRGLFDEEMNEILTDPSDDTKGFFDPNTEENLTYLQLMERCITDPQTGLCLLPLKEKKRERKTSSKSSVRKRRVVIVDPETGKEMSVYEAYRKGLIDHQTYLELSEQECEWEEITISSSDGVVKSMIIDRRSGRQYDIDDAIAKNLIDRSALDQYRAGTLSITEFADMLSGNAGGFRSRSSSVGSSSSYPISPAVSRTQLASWSDPTEETGPVAGILDTETLEKVSITEAMHRNLVDNITGQRLLEAQACTGGIIDPSTGERFPVTDAVNKGLVDKIMVDRINLAQKAFCGFEDPRTKTKMSAAQALKKGWLYYEAGQRFLEVQYLTGGLIEPDTPGRVPLDEALQRGTVDARTAQKLRDVGAYSKYLTCPKTKLKISYKDALDRSMVEEGTGLRLLEAAAQSTKGYYSPYSVSGSGSTAGSRTGSRTGSRAGSRRGSFDATGSGFSMTFSSSSYSSSGYGRRYASGSSASLGGPESAVA

SEQ ID NO: 1046 - protein, 1317 aa, Homo sapiens
MASVKVAVRVRPMNRREKDLEAKFIIQMEKSKTTITNLKIPEGGTGDSGRERTKTFTYDFSFYSADTKSPDYVSQEMVFKTLGTDVVKSAFEGYNACVFAYGQTGSGKSYTMMGNSGDSGLIPRICEGLFSRINETTRWDEASFRTEVSYLEIYNERVRDLLRRKSSKTFNLRVREHPKEGPYVEDLSKHLVQNYGDVEELMDAGNINRTTAATGMNDVSSRSHAIFTIKFTQAKFDSEMPCETVSKIHLVDLAGSERADATGATGVRLKEGGNINKSLVTLGNVISALADLSQDAANTLAKKKQVFVPYRDSVLTWLLKDSLGGNSKTIMIATISPADVNYGETLSTLRYANRAKNIINKPTINEDANVKLIRELRAEIARLKTLLAQGNQIALLDSPTALSMEEKLQQNEARVQELTKEWTNKWNETQNILKEQTLALRKEGIGVVLDSELPHLIGIDDDLLSTGIILYHLKEGQTYVGRDDASTEQDIVLHGLDLESEHCIFENIGGTVTLIPLSGSQCSVNGVQIVEATHLNQGAVILLGRTNMFRFNHPKEAAKLREKRKSGLLSSFSLSMTDLSKSRENLSAVMLYNPGLEFERQQREELEKLESKRKLIEEMEEKQKSDKAELERMQQEVETQRKETEIVQLQIRKQEESLKRRSFHIENKLKDLLAEKEKFEEERLREQQEIELQKKRQEEETFLRVQEELQRLKELNNNEKAEKFQIFQELDQLQKEKDEQYAKLELEKKRLEEQEKEQVMLVAHLEEQLREKQEMIQLLRRGEVQWVEEEKRDLEGIRESLLRVKEARAGGDEDGEELEKAQLRFFEFKRRQLVKLVNLEKDLVQQKDILKKEVQEEQEILECLKCEHDKESRLLEKHDESVTDVTEVPQDFEKIKPVEYRLQYKERQLQYLLQNHLPTLLEEKQRAFEILDRGPLSLDNTLYQVEKEMEEKEEQLAQYQANANQLQKLQATFEFTANIARQEEKVRKKEKEILESREKQQREALERALARLERRHSALQRHSTLGMEIEEQRQKLASLNSGSREQSGLQASLEAEQEALEKDQERLEYEIQQLKQKIYEVDGVQKDHHGTLEGKVASSSLPVSAEKSHLVPLMDARINAYIEEEVQRRLQDLHRVISEGCSTSADTMKDNEKLHNGTIQRKLKYERMVSRSLGANPDDLKDPIKISIPRYVLCGQGKDAHFEFEVKITVLDETWTVFRRYSRFREMHKTLKLKYAELAALEFPPKKLFGNKDERVIAERRSHLEKYLRDFFSVMLQSATSPLHINKVGLTLSKHTICEFSPFFKKGVFDYSSHGTG

SEQ ID NO: 1047 - protein, 467 aa, Homo sapiens
MQPQHGPWQTRMRKISNHGSLRVAKVAYPLGLCVGVFIYVAYIKWHRATATQAFFSITRAAPGARWGQQAHSPLGTAADGHEVFYGIMFDAGSTGTRVHVFQFTRPPRETPTLTHETFKALKPGLSAYADDVEKSAQGIRELLDVAKQDIPFDFWKATPLVLKATAGLRLLPGEKAQKLLQKVKKVFKASPFLVGDDCVSIMNGTDEGVSAWITINFLTGSLKTPGGSSVGMLDLGGGSTQIAFLPRVEGTLQASPPGYLTALRMFNRTYKLYSYSYLGLGLMSARLAILGGVEGQPAKDGKELVSPCLSPSFKGEWEHAEVTYRVSGQKAAASLHELCAARVSEVLQNRVHRTEEVKHVDFYAFSYYYDLAAGVGLIDAEKGGSLVVGDFEIAAKYVCRTLETQPQSSPFSCMDLTYVSLLLQEFGFPRSKVLKLTRKIDNVETSWALGAIFHYIDSLNRQKSPAS

SEQ ID NO: 1048 - protein, 171 aa, Homo sapiens
MASSSTVPLGFHYETKYVVLSYLGLLSQEKLQEQHLSSPQGVQLDIASQSLDQEILLKVKTEIEEELKSLDKEISEAFTSTGFDRHTSPVFSPANPESSMEDCLAHLGEKVSQELKEPLHKALQMLLSQALCLVLSQRRRNTLESLQKIAMTFTSCPATTLDKSVPQSLQL

SEQ ID NO: 1049 - protein, 639 aa, Homo sapiens
MEDSQDLNEQSVKKTCTESDVSQSQNSRSMEMQDLASPHTLVGGGDTPGSSKLEKSNLSSTSVTTNGTGGENMTVLNTADWLLSCNTPSSATMSLLAVKTEPLNSSETTATTGDGALDTFTGSVITSSGYSPRSAHQYSPQLYPSKPYPHILSTPAAQTMSAYAGQTQYSGMQQPAVYTAYSQTGQPYSLPTYDLGVMLPAIKTESGLSQTQSPLQSGCLSYSPGFSTPQPGQTPYSYQMPGSSFAPSSTIYANNSVSNSTNFSGSQQDYPSYTAFGQNQYAQYYSASTYGAYMTSNNTADGTPSSTSTYQLQESLPGLTNQPGEFDTMQSPSTPIKDLDERTCRSSGSKSRGRGRKNNPSPPPDSDLERVFVWDLDETIIVFHSLLTGSYAQKYGKDPPMAVTLGLRMEEMIFNLADTHLFFNDLEECDQVHIDDVSSDDNGQDLSTYSFATDGFHAAASSANLCLPTGVRGGVDWMRKLAFRYRRVKELYNTYKNNVGGLLGPAKRDAWLQLRAEIEGLTDSWLTNALKSLSIISTRSNCINVLVTTTQLIPALAKVLLYSLGGAFPIENIYSATKIGKESCFERIVSRFGTNITYVVIGDGRDEEHAANQHNMPFWRISSHSDLLALHQALELEYL

SEQ ID NO: 1050 - protein, 639 aa, Homo sapiens
MEDSQDLNEQSVKKTCTESDVSQSQNSRSMEMQDLASPHTLVGGGDTPGSSKLEKSNLSSTSVTTNGTGGENMTVLNTADWLLSCNTPSSATMSLLAVKTEPLNSSETTATTGDGALDTFTGSVITSSGYSPRSAHQYSPQLYPSKPYPHILSTPAAQTMSAYAGQTQYSGMQQPAVYTAYSQTGQPYSLPTYDLGVMLPAIKTESGLSQTQSPLQSGCLSYSPGFSTPQPGQTPYSYQMPGSSFAPSSTIYANNSVSNSTNFSGSQQDYPSYTAFGQNQYAQYYSASTYGAYMTSNNTADGTPSSTSTYQLQESLPGLTNQPGEFDTMQSPSTPIKDLDERTCRSSGSKSRGRGRKNNPSPPPDSDLERVFVWDLDETIIVFHSLLTGSYAQKYGKDPPMAVTLGLRMEEMIFNLADTHLFFNDLEECDQVHIDDVSSDDNGQDLSTYSFATDGFHAAASSANLCLPTGVRGGVDWMRKLAFRYRRVKELYNTYKNNVGGLLGPAKRDAWLQLRAEIEGLTDSWLTNALKSLSIISTRSNCINVLVTTTQLIPALAKVLLYSLGGAFPIENIYSATKIGKESCFERIMQRFGRKVVYVVIGDGVEEEQAAKKHNMPFWRISSHSDLLALHQALELEYL

SEQ ID NO: 1051 - protein, 348 aa, Homo sapiens
MPHIDNDVKLDFKDVLLRPKRSTLKSRSEVDLTRSFSFRNSKQTYSGVPIIAANMDTVGTFEMAKVLCKFSLFTAVHKHYSLVQWQEFAGQNPDCLEHLAASSGTGSSDFEQLEQILEAIPQVKYICLDVANGYSEHFVEFVKDVRKRFPQHTIMAGNVVTGEMVEELILSGADIIKVGIGPGSVCTTRKKTGVGYPQLSAVMECADAAHGLKGHIISDGGCSCPGDVAKAFGAGADFVMLGGMLAGHSESGGELIERDGKKYKLFYGMSSEMAMKKYAGGVAEYRASEGKTVEVPFKGDVEHTIRDILGGIRSTCTYVGAAKLKELSRRTTFIRVTQQVNPIFSEAC

SEQ ID NO: 1052 - protein, 986 aa, Homo sapiens
MRVNEKYSTLPAEDRSVHIINICAIEDIGYLPSEGTLLNSLSVDPDAECKYGLYFRDGRRKVDYILVYHHKRPSGNRTLVRRVQHSDTPSGARSVKQDHPLPGKGASLDAGSGEPPMDYHEDDKRFRREEYEGNLLEAGLELERDEDTKIHGVGFVKIHAPWNVLCREAEFLKLKMPTKKMYHINETRGLLKKINSVLQKITDPIQPKVAEHRPQTMKRLSYPFSREKQHLFDLSDKDSFFDSKTRSTIVYEILKRTTCTKAKYSMGITSLLANGVYAAAYPLHDGDYNGENVEFNDRKLLYEEWARYGVFYKYQPIDLVRKYFGEKIGLYFAWLGVYTQMLIPASIVGIIVFLYGCATMDENIPSMEMCDQRHNITMCPLCDKTCSYWKMSSACATARASHLFDNPATVFFSVFMALWAATFMEHWKRKQMRLNYRWDLTGFEEEEEAVKDHPRAEYEARVLEKSLKKESRNKEKRRHIPEESTNKWKQRVKTAMAGVKLTDKVKLTWRDRFPAYLTNLVSIIFMIAVTFAIVLGVIIYRISMAAALAMNSSPSVRSNIRVTVTATAVIINLVVIILLDEVYGCIARWLTKIEVPKTEKSFEERLIFKAFLLKFVNSYTPIFYVAFFKGRFVGRPGDYVYIFRSFRMEECAPGGCLMELCIQLSIIMLGKQLIQNNLFEIGIPKMKKLIRYLKLKQQSPPDHEECVKRKQRYEVDYNLEPFAGLTPEYMEMIIQFGFVTLFVASFPLAPLFALLNNIIEIRLDAKKFVTELRRPVAVRAKDIGIWYNILRGIGKLAVIINAFVISFTSDFIPRLVYLYMYSKNGTMHGFVNHTLSSFNVSDFQNGTAPNDPLDLGYEVQICRYKDYREPPWSENKYDISKDFWAVLAARLAFVIVFQNLVMFMSDFVDWVIPDIPKDISQQIHKEKVLMVELFMREEQDKQQLLETWMEKERQKDEPPCNHHNTKACPDSLGSPAPSHAYHGGVL

SEQ ID NO: 1053 - protein, 1018 aa, Homo sapiens
MVSHFMGSLSVLCFLLLLGFQFVCPQPSTQHRKVPQRMAAEGAPEDDGGGGAPGVWGAWGPWSACSRSCSGGVMEQTRPCLPRSYRLRGGQRPGAPARAFADHVVSAVRTSVPLHRSRDETPALAGTDASRQGPTVLRGSRHPQPQGLEVTGDRRSRTRGTIGPGKYGYGKAPYILPLQTDTAHTPQRLRRQKLSSRHSRSQGASSARHGYSSPAHQVPQHGPLYQSDSGPRSGLQAAEAPIYQLPLTHDQGYPAASSLFHSPETSNNHGVGTHGATQSFSQPARSTAISCIGAYRQYKLCNTNVCPESSRSIREVQCASYNNKPFMGRFYEWEPFAEVKGNRKCELNCQAMGYRFYVRQAEKVIDGTPCDQNGTAICVSGQCKSIGCDDYLGSDKVVDKCGVCGGDNTGCQVVSGVFKHALTSLGYHRVVEIPEGATKINITEMYKSNNYLALRSRSGRSIINGNWAIDRPGKYEGGGTMFTYKRPNEISSTAGESFLAEGPTNEILDVYMIHQQPNPGVHYEYVIMGTNAISPQVPPHRRPGEPFNGQMVTEGRSQEEGEQKGRNEEKEDLRGEAPEMFTSESAQTFPVRHPDRFSPHRPDNLVPPAPQPPRRSRDHNWKQLGTTECSTTCGKGSQYPIFRCVHRSTHEEAPESYCDSSMKPTPEEEPCNIFPCPAFWDIGEWSECSKTCGLGMQHRQVLCRQVYANRSLTVQPYRCQHLEKPETTSTCQLKICSEWQIRTDWTSCSVPCGVGQRTRDVKCVSNIGDVVDDEECNMKLRPNDIENCDMGPCAKSWFLTEWSERCSAECGAGVRTRSVVCMTNHVSSLPLEGCGNNRPAEATPCDNGPCTGKVEWFAGSWSQCSIECGSGTQQREVICVRKNADTFEVLDPSECSFLEKPPSQQSCHLKPCGAKWFSTEWSMCSKSCQGGFRVREVRCLSDDMTLSNLCDPQLKPEERESCNPQDCVPEVDENCKDKYYNCNVVVQARLCVYNYYKTACCASCTRVANRQTGFLGSR

SEQ ID NO: 1054 - protein, 361 aa, Homo sapiens
METGAAELYDQALLGILQHVGNVQDFLRVLFGFLYRKTDFYRLLRHPSDRMGFPPGAAQALVLQVFKTFDHMARQDDEKRRQELEEKIRRKEEEEAKTVSAAAAEKEPVPVPVQEIEIDSTTELDGHQEVEKVQPPGPVKEMAHGSQEAEAPGAVAGAAEVPREPPILPRIQEQFQKNPDSYNGAVRENYTWSQDYTDLEVRVPVPKHVVKGKQVSVALSSSSIRVAMLEENGERVLMEGKLTHKINTESSLWSLEPGKCVLVNLSKVGEYWWNAILEGEEPIDIDKINKERSMATVDEEEQAVLDRLTFDYHQKLQGKPQSHELKVHEMLKKGWDAEGSPFRGQRFDPAMFNISPGAVQF

SEQ ID NO: 1055 - protein, 475 aa, Homo sapiens
MAAKSQPNIPKAKSLDGVTNDRTASQGQWGRAWEVDWFSLASVIFLLLFAPFIVYYFIMACDQYSCALTGPVVDIVTGHARLSDIWAKTPPITRKAAQLYTLWVTFQVLLYTSLPDFCHKFLPGYVGGIQEGAVTPAGVVNKYQINGLQAWLLTHLLWFANAHLLSWFSPTIIFDNWIPLLWCANILGYAVSTFAMVKGYFFPTSARDCKFTGNFFYNYMMGIEFNPRIGKWFDFKLFFNGRPGIVAWTLINLSFAAKQRELHSHVTNAMVLVNVLQAIYVIDFFWNETWYLKTIDICHDHFGWYLGWGDCVWLPYLYTLQGLYLVYHPVQLSTPHAVGVLLLGLVGYYIFRVANHQKDLFRRTDGRCLIWGRKPKVIECSYTSADGQRHHSKLLVSGFWGVARHFNYVGDLMGSLAYCLACGGGHLLPYFYIIYMAILLTHRCLRDEHRCASKYGRDWERYTAAVPYRLLPGIF

SEQ ID NO: 1056 - protein, 1496 aa, Homo sapiens
MALSKGLRLLGRLGAEGDCSVLLEARGRDDCLLFEAGTVATLAPEEKEVIKGQYGKLTDAYGCLGELRLKSGGTSLSFLVLVTGCTSVGRIPDAEIYKITATDFYPLQEEAKEEERLIALKKILSSGVFYFSWPNDGSRFDLTVRTQKQGDDSSEWGNSFFWNQLLHVPLRQHQVSCCDWLLKIICGVVTIRTVYASHKQAKACLVSRVSCERTGTRFHTRGVNDDGHVSNFVETEQMIYMDDGVSSFVQIRGSVPLFWEQPGLQVGSHHLRLHRGLEANAPAFDRHMVLLKEQYGQQVVVNLLGSRGGEEVLNRAFKKLLWASCHAGDTPMINFDFHQFAKGGKLEKLETLLRPQLKLHWEDFDVFTKGENVSPRFQKGTLRMNCLDCLDRTNTVQSFIALEVLHLQLKTLGLSSKPIVDRFVESFKAMWSLNGHSLSKVFTGSRALEGKAKVGKLKDGARSMSRTIQSNFFDGVKQEAIKLLLVGDVYGEEVADKGGMLLDSTALLVTPRILKAMTERQSEFTNFKRIRIAMGTWNVNGGKQFRSNVLRTAELTDWLLDSPQLSGATDSQDDSSPADIFAVGFEEMVELSAGNIVNASTTNKKMWGEQLQKAISRSHRYILLTSAQLVGVCLYIFVRPYHVPFIRDVAIDTVKTGMGGKAGNKGAVGIRFQFHSTSFCFICSHLTAGQSQVKERNEDYKEITQKLCFPMGRNVFSHDYVFWCGDFNYRIDLTYEEVFYFVKRQDWKKLLEFDQLQLQKSSGKIFKDFHEGAINFGPTYKYDVGSAAYDTSDKCRTPAWTDRVLWWRKKHPFDKTAGELNLLDSDLDVDTKVRHTWSPGALQYYGRAELQASDHRPVLAIVEVEVQEVDVGARERVFQEVSSFQGPLDATVVVNLQSPTLEEKNEFPEDLRTELMQTLGSYGTIVLVRINQGQMLVTFADSHSALSVLDVDGMKVKGRAVKIRPKTKDWLKGLREEIIRKRDSMAPVSPTANSCLLEENFDFTSLDYESEGDILEDDEDYLVDEFNQPGVSDSELGGDDLSDVPGPTALAPPSKSPALTKKKQHPTYKDDADLVELKRELEAVGEFRHRSPSRSLSVPNRPRPPQPPQRPPPPTGLMVKKSASDASISSGTHGQYSILQTARLLPGAPQQPPKARTGISKPYNVKQIKTTNAQEAEAAIRCLLEARGGASEEALSAVAPRDLEASSEPEPTPGAAKPETPQAPPLLPRRPPPRVPAIKKPTLRRTGKPLSPEEQFEQQTVHFTIGPPETSVEAPPVVTAPRVPPVPKPRTFQPGKAAERPSHRKPASDEAPPGAGASVPPPLEAPPLVPKVPPRRKKSAPAAFHLQVLQSNSQLLQGLTYNSSDSPSGHPPAAGTVFPQGDFLSTSSATSPDSDGTKAMKPEAAPLLGDYQDPFWNLLHHPKLLNNTWLSKSSDPLDSGTRSPKRDPIDPVSAGASAAKAELPPDHEHKTLGHWVTISDQEKRTALQVFDPLAKT

SEQ ID NO: 1057 - protein, 937 aa, Homo sapiens
MLLYRGAPAGPGAPGCGLARPGGGPQAFGIRLSTMSPRYLQSNSSSHTRPFSAIAELLDNAVDPDVSARTVFIDVEEVKNKSCLTFTDDGCGMTPHKLHRMLSFGFTDKVIKKSQCPIGVFGNGFKSGSMRLGKDALVFTKNGGTLTVGLLSQTYLECVQAQAVIVPIVPFNQQNKKMIITEDSLPSLEAILNYSIFNRENDLLAQFDAIPGKKGTRVLIWNIRRNKNGKSELDFDTDQYDILVSDFDTEEKMTGGVTSELPETEYSLRAFCGILYMKPRMKIFLRQKKVTTQMIAKSLANVEYDTYKPTFTNKQVRITFGFSCKNSNQFGIMMYHNNRLIKSFEKVGCQVKPTRGEGVGVIGVIECNFLKPAYNKQDFEYTKEYRLTINALAQKLNAYWKEKTSQDNFETSTVARPIPKVPDQTWVQCDECLKWRKLPGKIDPSMLPARWFCYYNSHPKYRRCSVPEEQELTDEDLCLSKAKKQEQTVEEKKKMPMENENHQVFSNPPKILTVQEMAGLNNKTIGYEGIHSPSVLPSGGEESRSPSLQLKPLDSSVLQFSSKYKWILGEEPVEKRRRLQNEMTTPSLDYSMPAPYRRVEAPVAYPEGENSHDKSSSERSTPPYLFPEYPEASKNTGQNREVSILYPGAKDQRQGSLLPEELEDQMPRLVAEESNRGSTTINKEEVNKGPFVAVVGVAKGVRDSGAPIQLIPFNREELAERRKAVESWNPVPYSVASAAIPAAAIGEKARGYEESEGHNTPKLKNQRELEELKRTTEKLERVLAERNLFQQKVEELEQERNHWQSEFKKVQHELVIYSTQEAEGLYWSKKHMGYRQAEFQILKAELERTKEEKQELKEKLKETETHLEMLQKAQVSYRTPEGDDLERALAKLTRLRIHVSYLLTSVLPHLELREIGYDSEQVDGILYTVLEANHILD

SEQ ID NO: 1058 - protein, 491 aa, Homo sapiens
MDTKGCTTTNSPSTPCQNCSRITNVSTISSNNGCHPGGLTVNNCQPAGHVLRIPWDQGCQPTPRFCRKPIYLMNNFNARFSLDDCSWYGEGINSNEKETMQILNERLANYLQKVRMLERENAELESKIQEESNKELPVLCPDYLSYYTTIEELQQKILCTKAENSRLVSQIDNTKLTADDLRAKYEAEVSLRQLVESDANGLKQILNVLTLGKADLEAQVQSLKEELLCLKNNHKEEINSLQCQLGERLDIEVTAAPSADLNQVLQEMRCQYEPIMETNRKDVEQWFNTQIEELNQQVVTSSQQQQCCQKEIIELRRSVNTLEVELQAQHRMRDSQECILTETEARYTALLTQIQSLIDNLEAQLAEIRCALERQNQEYEILLDVKSRLECEITTYRSLLESSDGKRPCYPRATKCEPSPWTSCKSGAIESTAPACTSSSPCSLKEHCSACGPLSRILVKICTITKEIKDGKVISSYEHVQPCFIIRPAKV

SEQ ID NO: 1059 - protein, 137 aa, Homo sapiens
MDNARMNSFLEYPILSSGDSGTCSARAYPSDHRITTFQSCAVSANSCGGDDRFLVGRGVQIGSPHHHHHHHHRHPQPATYQTSGNLGVSYSHSSCGPSYGSQNFSAPYSPYALNQEADPPRSLSLPRIGDIFSSADF

SEQ ID NO: 1060 - protein, 882 aa, Homo sapiens
MGNHNENTGEKLHLAQEQLALAGDKIASLERSLNLYRDKYQSSLSNIELLECQVKMLQGELGGIMGQEPENKGDHSKVRIYTSPCMIQEHQETQKRLSEVWQKVSQQDDLIQELRNKLACSNALVLEREKALIKLQADFASCTATHRYPPSSSEECEDIKKILKHLQEQKDSQCLHVEEYQNLVKDLRVELEAVSEQKRNIMKDMMKLELDLHGLREETSAHIERKDKDITILQCRLQELQLEFTETQKLTLKKDKFLQEKDEMLQELEKKLTQVQNSLLKKEKELEKQQCMATELEMTVKEAKQDKSKEAECKALQAEVQKLKNSLEEAKQQERLAAQQAAQCKEEAALAGCHLEDTQRKLQKGLLLDKQKADTIQELQRELQMLQKESSMAEKEQTSNRKRVEELSLELSEALRKLENSDKEKRQLQKTVAEQDMKMNDMLDRIKHQHREQGSIKCKLEEDLQEATKLLEDKREQLKKSKEHEKLMEGELEALRQEFKKKDKTLKENSRKLEEENENLRAELQCCSTQLESSLNKYNTSQQVIQDLNKEIALQKESLMSLQAQLDKALQKEKHYLQTTITKEAYDALSRKSAACQDDLTQALEKLNHVTSETKSLQQSLTQTQEKKAQLEEEIIAYEERMKKLNTELRKLRGFHQESELEVHAFDKKLEEMSCQVLQWQKQHQNDLKMLAAKEEQLREFQEEMAALKENLLEDDKEPCCLPQWSVPKDTCRLYRGNDQIMTNLEQWAKQQKVANEKLGNQLREQVKYIAKLSGEKDREPTRASSPNTTRPSSPSHSHLHSVMVHLQQENKKLKKEIEEKKMKAENTRLCTKALGPSRTESTQREKVCGTLGWKGLPQDMGQRMDLTKYIGMPHCPGSSYC

SEQ ID NO: 1061 - protein, 1114 aa, Homo sapiens
MAKATSGAAGLRLLLLLLLPLLGKVALGLYFSRDAYWEKLYVDQAAGTPLLYVHALRDAPEEVPSFRLGQHLYGTYRTRLHENNWICIQEDTGLLYLNRSLDHSSWEKLSVRNRGFPLLTVYLKVFLSPTSLREGECQWPGCARVYFSFFNTSFPACSSLKPRELCFPETRPSFRIRENRPPGTFHQFRLLPVQFLCPNISVAYRLLEGEGLPFRCAPDSLEVSTRWALDREQREKYELVAVCTVHAGAREEVVMVPFPVTVYDEDDSAPTFPAGVDTASAVVEFKRKEDTVVATLRVFDADVVPASGELVRRYTSTLLPGDTWAQQTFRVEHWPNETSVQANGSFVRATVHDYRLVLNRNLSISENRTMQLAVLVNDSDFQGPGAGVLLLHFNVSVLPVSLHLPSTYSLSVSRRARRFAQIGKVCVENCQAFSGINVQYKLHSSGANCSTLGVVTSAEDTSGILFVNDTKALRRPKCAELHYMVVATDQQTSRQAQAQLLVTVEGSYVAEEAGCPLSCAVSKRRLECEECGGLGSPTGRCEWRQGDGKGITRNFSTCSPSTKTCPDGHCDVVETQDINICPQDCLRGSIVGGHEPGEPRGIKAGYGTCNCFPEEEKCFCEPEDIQDPLCDELCRTVIAAAVLFSFIVSVLLSAFCIHCYHKFAHKPPISSAEMTFRRPAQAFPVSYSSSGARRPSLDSMENQVSVDAFKILEDPKWEFPRKNLVLGKTLGEGEFGKVVKATAFHLKGRAGYTTVAVKMLKENASPSELRDLLSEFNVLKQVNHPHVIKLYGACSQDGPLLLIVEYAKYGSLRGFLRESRKVGPGYLGSGGSRNSSSLDHPDERALTMGDLISFAWQISQGMQYLAEMKLVHRDLAARNILVAEGRKMKISDFGLSRDVYEEDSYVKRSQGRIPVKWMAIESLFDHIYTTQSDVWSFGVLLWEIVTLGGNPYPGIPPERLFNLLKTGHRMERPDNCSEEMYRLMLQCWKQEPDKRPVFADISKDLEKMMVKRRDYLDLAASTPSDSLIYDDGLSEEETPLVDCNNAPLPRALPSTWIENKLYGMSDPNWPGESPVPLTRADGTNTGFPRYPNDSVYANWMLSPSAAKLMDTFDS

SEQ ID NO: 1062 - protein, 283 aa, Homo sapiens
MEPPGDWGPPPWRSTPKTDVLRLVLYLTFLGAPCYAPALPSCKEDEYPVGSECCPKCSPGYRVKEACGELTGTVCEPCPPGTYIAHLNGLSKCLQCQMCDPAMGLRASRNCSRTENAVCGCSPGHFCIVQDGDHCAACRAYATSSPGQRVQKGGTESQDTLCQNCPPGTFSPNGTLEECQHQTKCSWLVTKAGAGTSSSHWVWWFLSGSLVIVIVCSTVGLIICVKRRKPRGDVVKVIVSVQRKRQEAEGEATVIEALQAPPDVTTVAVEETIPSFTGRSPNH

SEQ ID NO: 1063 - protein, 619 aa, Homo sapiens
MRPDGQQALDAVVRSFDCHSEAALRQRNDVIYCSLPRTAQGIVQREDQLEVLVSLREVWGRRRGRDGTCTGAMPDGALDTAVCADEVGSEEDLYDDLHSSSHHYSHPGGGGEQLAINELISDGSVVCAEALWDHVTMDDQELGFKAGDVIEVMDATNREWWWGRVADGEGWFPASFVRLRVNQDEPADDDAPLAGNSGAEDGGAEAQSSKDQMRTNVINEILSTERDYIKHLRDICEGYVRQCRKRADMFSEEQLRTIFGNIEDIYRCQKAFVKALEQRFNRERPHLSELGACFLEHQADFQIYSEYCNNHPNACVELSRLTKLSKYVYFFEACRLLQKMIDISLDGFLLTPVQKICKYPLQLAELLKYTHPQHRDFKDVEAALHAMKNVAQLINERKRRLENIDKIAQWQSSIEDWEGEDLLVRSSELIYSGELTRVTQPQAKSQQRMFFLFDHQLIYCKKDLLRRDVLYYKGRLDMDGLEVVDLEDGKDRDLHVSIKNAFRLHRGATGDSHLLCTRKPEQKQRWLKAFAREREQVQLDQETGFSITELQRKQAMLNASKQQVTGKPKAVGRPCYLTRQKHPALPSNRPQQQVLVLAEPRRKPSTFWHSISRLAPFRK

SEQ ID NO: 1064 - protein, 418 aa, Homo sapiens
MPSSVSWGILLLAGLCCLVPVSLAEDPQGDAAQKTDTSHHDQDHPTFNKITPNLAEFAFSLYRQLAHQSNSTNIFFSPVSIATAFAMLSLGTKADTHDEILEGLNFNLTEIPEAQIHEGFQELLRTLNQPDSQLQLTTGNGLFLSEGLKLVDKFLEDVKKLYHSEAFTVNFGDTEEAKKQINDYVEKGTQGKIVDLVKELDRDTVFALVNYIFFKGKWERPFEVKDTEEEDFHVDQVTTVKVPMMKRLGMFNIQHCKKLSSWVLLMKYLGNATAIFFLPDEGKLQHLENELTHDIITKFLENEDRRSASLHLPKLSITGTYDLKSVLGQLGITKVFSNGADLSGVTEEAPLKLSKAVHKAVLTIDEKGTEAAGAMFLEAIPMSIPPEVKFNKPFVFLMIEQNTKSPLFMGKVVNPTQK

SEQ ID NO: 1065 - protein, 839 aa, Homo sapiens
MRLALLWALGLLGAGSPLPSWPLPNIGGTEEQQAESEKAPREPLEPQVLQDDLPISLKKVLQTSLPEPLRIKLELDGDSHILELLQNRELVPGRPTLVWYQPDGTRVVSEGHTLENCCYQGRVRGYAGSWVSICTCSGLRGLVVLTPERSYTLEQGPGDLQGPPIISRIQDLHLPGHTCALSWRESVHTQKPPEHPLGQRHIRRRRDVVTETKTVELVIVADHSEAQKYRDFQHLLNRTLEVALLLDTFFRPLNVRVALVGLEAWTQRDLVEISPNPAVTLENFLHWRRAHLLPRLPHDSAQLVTGTSFSGPTVGMAIQNSICSPDFSGGVNMDHSTSILGVASSIAHELGHSLGLDHDLPGNSCPCPGPAPAKTCIMEASTDFLPGLNFSNCSRRALEKALLDGMGSCLFERLPSLPPMAAFCGNMFVEPGEQCDCGFLDDCVDPCCDSLTCQLRPGAQCASDGPCCQNCQLRPSGWQCRPTRGDCDLPEFCPGDSSQCPPDVSLGDGEPCAGGQAVCMHGRCASYAQQCQSLWGPGAQPAAPLCLQTANTRGNAFGSCGRNPSGSYVSCTPRDAICGQLQCQTGRTQPLLGSIRDLLWETIDVNGTELNCSWVHLDLGSDVAQPLLTLPGTACGPGLVCIDHRCQRVDLLGAQECRSKCHGHGVCDSNRHCYCEEGWAPPDCTTQLKATSSLTTGLLLSLLVLLVLVMLGASYWYRARLHQRLCQLKGPTCQYRAAQSGPSERPGPPQRALLARGTKQASALSFPAPPSRPLPPDPVSKRLQSQGPAKPPPPRKPLPADPQGRCPSGDLPGPGAGIPPLVVPSRPAPPPPTVSSLYL

SEQ ID NO: 1066 - protein, 2296 aa, Homo sapiens
MLRGPGPGLLLLAVQCLGTAVPSTGASKSKRQAQQMVQPQSPVAVSQSKPGCYDNGKHYQINQQWERTYLGNALVCTCYGGSRGFNCESKPEAEETCFDKYTGNTYRVGDTYERPKDSMIWDCTCIGAGRGRISCTIANRCHEGGQSYKIGDTWRRPHETGGYMLECVCLGNGKGEWTCKPIAEKCFDHAAGTSYVVGETWEKPYQGWMMVDCTCLGEGSGRITCTSRNRCNDQDTRTSYRIGDTWSKKDNRGNLLQCICTGNGRGEWKCERHTSVQTTSSGSGPFTDVRAAVYQPQPHPQPPPYGHCVTDSGVVYSVGMQWLKTQGNKQMLCTCLGNGVSCQETAVTQTYGGNSNGEPCVLPFTYNGRTFYSCTTEGRQDGHLWCSTTSNYEQDQKYSFCTDHTVLVQTRGGNSNGALCHFPFLYNNHNYTDCTSEGRRDNMKWCGTTQNYDADQKFGFCPMAAHEEICTTNEGVMYRIGDQWDKQHDMGHMMRCTCVGNGRGEWTCIAYSQLRDQCIVDDITYNVNDTFHKRHEEGHMLNCTCFGQGRGRWKCDPVDQCQDSETGTFYQIGDSWEKYVHGVRYQCYCYGRGIGEWHCQPLQTYPSSSGPVEVFITETPSQPNSHPIQWNAPQPSHISKYILRWRPKNSVGRWKEATIPGHLNSYTIKGLKPGVVYEGQLISIQQYGHQEVTRFDFTTTSTSTPVTSNTVTGETTPFSPLVATSESVTEITASSFVVSWVSASDTVSGFRVEYELSEEGDEPQYLDLPSTATSVNIPDLLPGRKYIVNVYQISEDGEQSLILSTSQTTAPDAPPDTTVDQVDDTSIVVRWSRPQAPITGYRIVYSPSVEGSSTELNLPETANSVTLSDLQPGVQYNITIYAVEENQESTPVVIQQETTGTPRSDTVPSPRDLQFVEVTDVKVTIMWTPPESAVTGYRVDVIPVNLPGEHGQRLPISRNTFAEVTGLSPGVTYYFKVFAVSHGRESKPLTAQQTTKLDAPTNLQFVNETDSTVLVRWTPPRAQITGYRLTVGLTRRGQPRQYNVGPSVSKYPLRNLQPASEYTVSLVAIKGNQESPKATGVFTTLQPGSSIPPYNTEVTETTIVITWTPAPRIGFKLGVRPSQGGEAPREVTSDSGSIVVSGLTPGVEYVYTIQVLRDGQERDAPIVNKVVTPLSPPTNLHLEANPDTGVLTVSWERSTTPDITGYRITTTPTNGQQGNSLEEVVHADQSSCTFDNLSPGLEYNVSVYTVKDDKESVPISDTIIPAVPPPTDLRFTNIGPDTMRVTWAPPPSIDLTNFLVRYSPVKNEEDVAELSISPSDNAVVLTNLLPGTEYVVSVSSVYEQHESTPLRGRQKTGLDSPTGIDFSDITANSFTVHWIAPRATITGYRIRHHPEHFSGRPREDRVPHSRNSITLTNLTPGTEYVVSIVALNGREESPLLIGQQSTVSDVPRDLEVVAATPTSLLISWDAPAVTVRYYRITYGETGGNSPVQEFTVPGSKSTATISGLKPGVDYTITVYAVTGRGDSPASSKPISINYRTEIDKPSQMQVTDVQDNSISVKWLPSSSPVTGYRVTTTPKNGPGPTKTKTAGPDQTEMTIEGLQPTVEYVVSVYAQNPSGESQPLVQTAVTTIPAPTDLKFTQVTPTSLSAQWTPPNVQLTGYRVRVTPKEKTGPMKEINLAPDSSSVVVSGLMVATKYEVSVYALKDTLTSRPAQGVVTTLENVSPPRRARVTDATETTITISWRTKTETITGFQVDAVPANGQTPIQRTIKPDVRSYTITGLQPGTDYKIYLYTLNDNARSSPVVIDASTAIDAPSNLRFLATTPNSLLVSWQPPRARITGYIIKYEKPGSPPREVVPRPRPGVTEATITGLEPGTEYTIYVIALKNNQKSEPLIGRKKTDELPQLVTLPHPNLHGPEILDVPSTVQKTPFVTHPGYDTGNGIQLPGTSGQQPSVGQQMIFEEHGFRRTTPPTTATPIRHRPRPYPPNVGEEIQIGHIPREDVDYHLYPHGPGLNPNASTGQEALSQTTISWAPFQDTSEYIISCHPVGTDEEPLQFRVPGTSTSATLTGLTRGATYNVIVEALKDQQRHKVREEVVTVGNSVNEGLNQPTDDSCFDPYTVSHYAVGDEWERMSESGFKLLCQCLGFGSGHFRCDSSRWCHDNGVNYKIGEKWDRQGENGQMMSCTCLGNGKGEFKCDPHEATCYDDGKTYHVGEQWQKEYLGAICSCTCFGGQRGWRCDNCRRPGGEPSPEGTTGQSYNQYSQRYHQRTNTNVNCPIECFMPLDVQADREDSRE

SEQ ID NO: 1067 - protein, 556 aa, Homo sapiens
MMRVNGDDDSVAALSFLYDYYMGPKEKRILSSSTGGRNDQGKRYYHGMEYETDLTPLESPTHLMKFLTENVSGTPEYPDLLKKNNLMSLEGALPTPGKAAPLPAGPSKLEAGSVDSYLLPTTDMYDNGSLNSLFESIHGVPPTQRWQPDSTFKDDPQESMLFPDILKTSPEPPCPEDYPSLKSDFEYTLGSPKAIHIKSGESPMAYLNKGQFYPVTLRTPAGGKGLALSSNKVKSVVMVVFDNEKVPVEQLRFWKHWHSRQPTAKQRVIDVADCKENFNTVEHIEEVAYNALSFVWNVNEEAKVFIGVNCLSTDFSSQKGVKGVPLNLQIDTYDCGLGTERLVHRAVCQIKIFCDKGAERKMRDDERKQFRRKVKCPDSSNSGVKGCLLSGFRGNETTYLRPETDLETPPVLFIPNVHFSSLQRSGGAAPSAGPSSSNRLPLKRTCSPFTEEFEPLPSKQAKEGDLQRVLLYVRRETEEVFDALMLKTPDLKGLRNAISEKYGFPEENIYKVYKKCKRGILVNMDNNIIQHYSNHVAFLLDMGELDGKIQIILKEL

SEQ ID NO: 1068 - protein, 433 aa, Homo sapiens
MAGQDPALSTSHPFYDVARHGILQVAGDDRFGRRVVTFSCCRMPPSHELDHQRLLEYLKYTLDQYVENDYTIVYFHYGLNSRNKPSLGWLQSAYKEFDRKYKKNLKALYVVHPTSFIKVLWNILKPLISHKFGKKVIYFNYLSELHEHLKYDQLVIPPEVLRYDEKLQSLHEGRTPPPTKTPPPRPPLPTQQFGVSLQYLKDKNQGELIPPVLRFTVTYLREKGLRTEGLFRRSASVQTVREIQRLYNQGKPVNFDDYGDIHIPAVILKTFLRELPQPLLTFQAYEQILGITCVESSLRVTGCRQILRSLPEHNYVVLRYLMGFLHAVSRESIFNKMNSSNLACVFGLNLIWPSQGVSSLSALVPLNMFTELLIEYYEKIFSTPEAPGEHGLAPWEQGSRAAPLQEAVPRTQATGLTKPTLPPSPLMAARRRL

SEQ ID NO: 1069 - protein, 578 aa, Homo sapiens
MAFMEKPPAGKVLLDDTVPLTAAIEASQSLQSHTEYIIRVQRGISVENSWQIVRRYSDFDLLNNSLQIAGLSLPLPPKKLIGNMDREFIAERQKGLQNYLNVITTNHILSNCELVKKFLDPNNYSANYTEIALQQVSMFFRSEPKWEVVEPLKDIGWRIRKKYFLMKIKNQPKERLVLSWADLGPDKYLSDKDFQCLIKLLPSCLHPYIYRVTFATANESSALLIRMFNEKGTLKDLIYKAKPKDPFLKKYCNPKKIQGLELQQIKTYGRQILEVLKFLHDKGFPYGHLHASNVMLDGDTCRLLDLENSLLGLPSFYRSYFSQFRKINTLESVDVHCFGHLLYEMTYGRPPDSVPVDSFPPAPSMAVVAVLESTLSCEACKNGMPTISRLLQMPLFSDVLLTTSEKPQFKIPTKLKEALRIAKECIEKRLIEEQKQIHQHRRLTRAQSHHGSEEERKKRKILARKKSKRSALENSEEHSAKYSNSNNSAGSGASSPLTSPSSPTPPSTSGISALPPPPPPPPPPAAPLPPASTEAPAQLSSQAVNGMSRGALLSSIQNFQKGTLRKAKTCDHSAPKIG

SEQ ID NO: 1070 - protein, 379 aa, Homo sapiens
MPRSSRSPGDPGALLEDVAHNPRPRRIAQRGRNTSRMAEDTSPNMNDNILLPVRNNDQALGLTQCMLGCVSWFTCFACSLRTQAQQVLFNTCRCKLLCQKLMEKTGILLLCAFGFWMFSIHLPSKMKVWQDDSINGPLQSLRLYQEKVRHHSGEIQDLRGSMNQLIAKLQEMEAMSDEQKMAQKIMKMIHGDYIEKPDFALKSIGASIDFEHTSVTYNHEKAHSYWNWIQLWNYAQPPDVILEPNVTPGNCWAFEGDRGQVTIQLAQKVYLSNLTLQHIPKTISLSGSLDTAPKDFVIYGMEGSPKEEVFLGAFQFQPENIIQMFPLQNQPARAFSAVKVKISSNWGNPGFTCLYRVRVHGSVAPPREQPHQNPYPKRD

SEQ ID NO: 1071 - protein, 2109 aa, Homo sapiens
MDALESLLDEVALEGLDGLCLPALWSRLETRVPPFPLPLEPCTQEFLWRALATHPGISFYEEPRERPDLQLQDRYEEIDLETGILESRRDPVALEDVYPIHMILENKDGIQGSCRYFKERKNITNDIRTKSLQPRCTMVEAFDRWGKKLIIVASQAMRYRALIGQEGDPDLKLPDFSYCILERLGRSRWQGELQRDLHTTAFKVDAGKLHYHRKILNKNGLITMQSHVIRLPTGAQQHSILLLLNRFHVDRRSKYDILMEKLSVMLSTRTNHIETLGKLREELGLCERTFKRLYQYMLNAGLAKVVSLRLQEIHPECGPCKTKKGTDVMVRCLKLLKEFKRNDHDDDEDEEVISKTVPPVDIVFERDMLTQTYDLIERRGTKGISQAEIRVAMNVGKLEARMLCRLLQRFKVVKGFMEDEGRQRTTKYISCVFAEESDLSRQYQREKARSELLTTVSLASMQEESLLPEGEDTFLSESDSEEERSSSKRRGRGSQKDTRASANLRPKTQPHHSTPTKGGWKVVNLHPLKKQPPSFPGAAEERACQSLASRDSLLDTSSVSEPNVSFVSHCADSNSGDIAVIEEVRMENPKESSSSLKTGRHSSGQDKPHETYRLLKRRNLIIEAVTNLRLIESLFTIQKMIMDQEKQEGVSTKCCKKSIVRLVRNLSEEGLLRLYRTTVIQDGIKKKVDLVVHPSMDQNDPLVRSAIEQVRFRISNSSTANRVKTSQPPVPQGEAEEDSQGKEGPSGSGDSQLSASSRSESGRMKKSDNKMGITPLRNYHPIVVPGLGRSLGFLPKMPRLRVVHMFLWYLIYGHPASNTVEKPSFISERRTIKQESGRAGVRPSSSGSAWEACSEAPSKGSQDGVTWEAEVELATETVYVDDASWMRYIPPIPVHRDFGFGWALVSDILLCLPLSIFIQIVQVSYKVDNLEEFLNDPLKKHTLIRFLPRPIRQQLLYKRRYIFSVVENLQRLCYMGLLQFGPTEKFQDKDQVFIFLKKNAVIVDTTICDPHYNLARSSRPFERRLYVLNSMQDVENYWFDLQCVCLNTPLGVVRCPRVRKNSSTDQGSDEEGSLQKEQESAMDKHNLERKCAMLEYTTGSREVVDEGLIPGDGLGAAGLDSSFYGHLKRNWIWTSYIINQAKKENTAAENGLTVRLQTFLSKRPMPLSARGNSRLNIWGEARVGSELCAGWEEQFEVDREPSLDRNRRVRGGKSQKRKRLKKDPGKKIKRKKKGEFPGEKSKRLRYHDEADQSALQRMTRLRVTWSMQEDGLLVLCRIASNVLNTKVKGPFVTWQVVRDILHATFEESLDKTSHSVGRRARYIVKNPQAYLNYKVCLAEVYQDKALVGDFMNRRGDYDDPKVCANEFKEFVEKLKEKFSSALRNSNLEIPDTLQELFARYRVLAIGDEKDQTRKEDELNSVDDIHFLVLQNLIQSTLALSDSQMKSYQSFQTFRLYREYKDHVLVKAFMECQKRSLVNRRRVNHTLGPKKNRALPFVPMSYQLSQTYYRIFTWRFPSTICTESFQFLDRMRAAGKLDQPDRFSFKDQDNNEPTNDMVAFSLDGPGGNCVAVLTLFSLGLISVDVRIPEQIIVVDSSMVENEVIKSLGKDGSLEDDEDEEDDLDEGVGGKRRSMEVKPAQASHTNYLLMRGYYSPGIVSTRNLNPNDSIVVNSCQMKFQLRCTPVPARLRPAAAPLEELTMGTSCLPDTFTKLINPQENTCSLEEFVLQLELSGYSPEDLTAALEILEAIIATGCFGIDKEELRRRFSALEKAGGGRTRTFADCIQALLEQHQVLEVGGNTARLVAMGSAWPWLLHSVRLKDREDADIQREDPQARPLEGSSSEDSPPEGQAPPSHSPRGTKRRASWASENGETDAEGTQMTPAKRPALQDSNLAPSLGPGAEDGAEAQAPSPPPALEDTAAAGAAQEDQEGVGEFSSPGQEQLSGQAQPPEGSEDPRGFTESFGAANISQAARERDCESVCFIGRPWRVVDGHLNLPVCKGMMEAMLYHIMTRPGIPESSLLRHYQGVLQPVAVLELLQGLESLGCIRKRWLRKPRPVSLFSTPVVEEVEVPSSLDESPMAFYEPTLDCTLRLGRVFPHEVNWNKWIHL

SEQ ID NO: 1072 - protein, 2079 aa, Homo sapiens
FMQHPKNFGLIASFLERKTVAECVLYYYLTKKNENYKSLVRRSYRRRGKSQQQQQQQQQQQQQQQQQPMPRSSQEEKDEKEKEKEAEKEEEKPEVENDKEDLLKEKTDDTSGEDNDEKEAVASKGRKTANSQGRRKGRITRSMANEANSEEAITPQQSAELASMELNESSRWTEEEMETAKKGLLEHGRNWSAIARMVGSKTVSQCKNFYFNYKKRQNLDEILQQHKLKMEKERNARRKKKKAPAAASEEAAFPPVVEDEEMEASGVSGNEEEMVEEAEALHASGNEVPRGECSGPATVNNSSDTESIPSPHTEAAKDTGQNGPKPPATLGADGPPPGPPTPPPEDIPAPTEPTPASEATGAPTPPPAPPSPSAPPPVVPKEEKEEETAAAPPVEEGEEQKPPAAEELAVDTGKAEEPVKSECTEEAEEGPAKGKDAEAAEATAEGALKAEKKEGGSGRATTAKSSGAPQDSDSSATCSADEVDEAEGGDKNRLLSPRPSLLTPTGDPRANASPQKPLDLKQLKQRAAAIPPIQVTKVHEPPREDAAPTKPAPPAPPPPQNLQPESDAPQQPGSSPRGKSRSPAPPADKEAEKPVFFPAFAAEAQKLPGDPPCWTSGLPFPVPPREVIKASPHAPDPSAFSYAPPGHPLPLGLHDTARPVLPRPPTISNPPPLISSAKHPSVLERQIGAISQGMSVQLHVPYSEHAKAPVGPVTMGLPLPMDPKKLAPFSGVKQEQLSPRGQAGPPESLGVPTAQEASVLRGTALGSVPGGSITKGIPSTRVPSDSAITYRGSITHGTPADVLYKGTITRIIGEDSPSRLDRGREDSLPKGHVIYEGKKGHVLSYEGGMSVTQCSKEDGRSSSGPPHETAAPKRTYDMMEGRVGRAISSASIEGLMGRAIPPERHSPHHLKEQHHIRGSITQGIPRSYVEAQEDYLRREAKLLKREGTPPPPPPSRDLTEAYKTQALGPLKLKPAHEGLVATVKEAGRSIHEIPREELRHTPELPLAPRPLKEGSITQGTPLKYDTGASTTGSKKHDVRSLIGSPGRTFPPVHPLDVMADARALERACYEESLKSRPGTASSSGGSIARGAPVIVPELGKPRQSPLTYEDHGAPFAGHLPRGSPVTTREPTPRLQEGSLSSSKASQDRKLTSTPREIAKSPHSTVPEHHPHPISPYEHLLRGVSGVDLYRSHIPLAFDPTSIPRGIPLDAAAAYYLPRHLAPNPTYPHLYPPYLIRGYPDTAALENRQTIINDYITSQQMHHNAATAMAQRADMLRGLSPRESSLALNYAAGPRGIIDLSQVPHLPVLVPPTPGTPATAMDRLAYLPTAPQPFSSRHSSSPLSPGGPTHLTKPTTTSSSERERDRDRERDRDREREKSILTSTTTVEHAPIWRPGTEQSSGSSGGGGGSSSRPASHSHAHQHSPISPRTQDALQQRPSVLHNTGMKGIITAVEPSTPTVLRSTSTSSPVRPAATFPPATHCPLGGTLDGVYPTLMEPVLLPKEAPRVARPERPRADTGHAFLAKPPARSGLEPASSPSKGSEPRPLVPPVSGHATIARTPAKNLAPHHASPDPPAPPASASDPHREKTQSKPFSIQELELRSLGYHGSSYSPEGVEPVSPVSSPSLTHDKGLPKHLEELDKSHLEGELRPKQPGPVKLGGEAAHLPHLRPLPESQPSSSPLLQTAPGVKGHQRVVTLAQHISEVITQDYTRHHPQQLSAPLPAPLYSFPGASCPVLDLRRPPSDLYLPPPDHGAPARGSPHSEGGKRSPEPNKTSVLGGGEDGIEPVSPPEGMTEPGHSRSAVYPLLYRDGEQTEPSRMGSKSPGNTSQPPAFFSKLTESNSAMVKSKKQEINKKLNTHNRNEPEYNISQPGTEIFNMPAITGTGLMTYRSQAVQEHASTNMGLEAIIRKALMGKYDQWEESPPLSANAFNPLNASASLPAAMPITAADGRSDHTLTSPGGGGKAKVSGRPSSRKAKSPAPGLASGDRPPSVSSVHSEGDCNRRTPLTNRVWEDRPSSAGSTPFPYNPLIMRLQAGVMASPPPPGLPAGSGPLAGPHHAWDEEPKPLLCSQYETLSDSE

SEQ ID NO: 1073 - protein, 3907 aa, Homo sapiens
MEDEERQKKLEAGKAKLAQFRQRKAQSDGQSPSKKQKKKRKTSSSKHDVSAHHDLNIDQSQCNEMYINSSQRVESTVIPESTIMRTLHSGEITSHEQGFSVELESEISTTADDCSSEVNGCSFVMRTGKPTNLLREEEFGVDDSYSEQGAQDSPTHLEMMESELAGKQHEIEELNRELEEMRVTYGTEGLQQLQEFEAAIKQRDGIITQLTANLQQARREKDETMREFLELTEQSQKLQIQFQQLQASETLRNSTHSSTAADLLQAKQQILTHQQQLEEQDHLLEDYQKKKEDFTMQISFLQEKIKVYEMEQDKKVENSNKEEIQEKETIIEELNTKIIEEEKKTLELKDKLTTADKLLGELQEQIVQKNQEIKNMKLELTNSKQKERQSSEEIKQLMGTVEELQKRNHKDSQFETDIVQRMEQETQRKLEQLRAELDEMYGQQIVQMKQELIRQHMAQMEEMKTRHKGEMENALRSYSNITVNEDQIKLMNVAINELNIKLQDTNSQKEKLKEELGLILEEKCALQRQLEDLVEELSFSREQIQRARQTIAEQESKLNEAHKSLSTVEDLKAEIVSASESRKELELKHEAEVTNYKIKLEMLEKEKNAVLDRMAESQEAELERLRTQLLFSHEEELSKLKEDLEIEHRINIEKLKDNLGIHYKQQIDGLQNEMSQKIETMQFEKDNLITKQNQLILEISKLKDLQQSLVNSKSEEMTLQINELQKEIEILRQEEKEKGTLEQEVQELQLKTELLEKQMKEKENDLQEKFAQLEAENSILKDEKKTLEDMLKIHTPVSQEERLIFLDSIKSKSKDSVWEKEIEILIEENEDLKQQCIQLNEEIEKQRNTFSFAEKNFEVNYQELQEEYACLLKVKDDLEDSKNKQELEYKSKLKALNEELHLQRINPTTVKMKSSVFDEDKTFVAETLEMGEVVEKDTTELMEKLEVTKREKLELSQRLSDLSEQLKQKHGEISFLNEEVKSLKQEKEQVSLRCRELEIIINHNRAENVQSCDTQVSSLLDGVVTMTSRGAEGSVSKVNKSFGEESKIMVEDKVSFENMTVGEESKQEQLILDHLPSVTKESSLRATQPSENDKLQKELNVLKSEQNDLRLQMEAQRICLSLVYSTHVDQVREYMENEKDKALCSLKEELIFAQEEKIKELQKIHQLELQTMKTQETGDEGKPLHLLIGKLQKAVSEECSYFLQTLCSVLGEYYTPALKCEVNAEDKENSGDYISENEDPELQDYRYEVQDFQENMHTLLNKVTEEYNKLLVLQTRLSKIWGQQTDGMKLEFGEENLPKEETEFLSIHSQMTNLEDIDVNHKSKLSSLQDLEKTKLEEQVQELESLISSLQQQLKETEQNYEAEIHCLQKRLQAVSESTVPPSLPVDSVVITESDAQRTMYPGSCVKKNIDGTIEFSGEFGVKEETNIVKLLEKQYQEQLEEEVAKVIVSMSIAFAQQTELSRISGGKENTASSKQAHAVCQQEQHYFNEMKLSQDQIGFQTFETVDVKFKEEFKPLSKELGEHGKEILLSNSDPHDIPESKDCVLTISEEMFSKDKTFIVRQSIHDEISVSSMDASRQLMLNEEQLEDMRQELVRQYQEHQQATELLRQAHMRQMERQREDQEQLQEEIKRLNRQLAQRSSIDNENLVSERERVLLEELEALKQLSLAGREKLCCELRNSSTQTQNGNENQGEVEEQTFKEKELDRKPEDVPPEILSNERYALQKANNRLLKILLEVVKTTAAVEETIGRHVLGILDRSSKSQSSASLIWRSEAEASVKSCVHEEHTRVTDESIPSYSGSDMPRNDINMWSKVTEEGTELSQRLVRSGFAGTEIDPENEELMLNISSRLQAAVEKLLEAISETSSQLEHAKVTQTELMRESFRQKQEATESLKCQEELRERLHEESRAREQLAVELSKAEGVIDGYADEKTLFERQIQEKTDIIDRLEQELLCASNRLQELEAEQQQIQEERELLSRQKEAMKAEAGPVEQQLLQETEKLMKEKLEVQCQAEKVRDDLQKQVKALEIDVEEQVSRFIELEQEKNTELMDLRQQNQALEKQLEKMRKFLDEQAIDREHERDVFQQEIQKLEQQLKVVPRFQPISEHQTREVEQLANHLKEKTDKCSELLLSKEQLQRDIQERNEEIEKLEFRVRELEQALLVSADTFQKVEDRKHFGAVEAKPELSLEVQLQAERDAIDRKEKEITNLEEQLEQFREELENKNEEVQQLHMQLEIQKKESTTRLQELEQENKLFKDDMEKLGLAIKESDAMSTQDQHVLFGKFAQIIQEKEVEIDQLNEQVTKLQQQLKITTDNKVIEEKNELIRDLETQIECLMSDQECVKRNREEEIEQLNEVIEKLQQELANIGQKTSMNAHSLSEEADSLKHQLDVVIAEKLALEQQVETANEEMTFMKNVLKETNFKMNQLTQELFSLKRERESVEKIQSIPENSVNVAIDHLSKDKPELEVVLTEDALKSLENQTYFKSFEENGKGSIINLETRLLQLESTVSAKDLELTQCYKQIKDMQEQGQFETEMLQKKIVNLQKIVEEKVAAALVSQIQLEAVQEYAKFCQDNQTISSEPERTNIQNLNQLREDELGSDISALTLRISELESQVVEMHTSLILEKEQVEIAEKNVLEKEKKLLELQKLLEGNEKKQREKEKKRSPQDVEVLKTTTELFHSNEESGFFNELEALRAESVATKAELASYKEKAEKLQEELLVKETNMTSLQKDLSQVRDHLAEAKEKLSILEKEDETEVQESKKACMFEPLPIKLSKSIASQTDGTLKISSSNQTPQILVKNAGIQINLQSECSSEEVTEIISQFTEKIEKMQELHAAEILDMESRHISETETLKREHYVAVQLLKEECGTLKAVIQCLRSKEGSSIPELAHSDAYQTREICSSDSGSDWGQGIYLTHSQGFDIASEGRGEESESATDSFPKKIKGLLRAVHNEGMQVLSLTESPYSDGEDHSIQQVSEPWLEERKAYINTISSLKDLITKMQLQREAEVYDSSQSHESFSDWRGELLLALQQVFLEERSVLLAAFRTELTALGTTDAVGLLNCLEQRIQEQGVEYQAAMECLQKADRRSLLSEIQALHAQMNGRKITLKREQESEKPSQELLEYNIQQKQSQMLEMQVELSSMKDRATELQEQLSSEKMVVAELKSELAQTKLELETTLKAQHKHLKELEAFRLEVKDKTDEVHLLNDTLASEQKKSRELQWALEKEKAKLGRSEERDKEELEDLKFSLESQKQRNLQLNLLLEQQKQLLNESQQKIESQRMLYDAQLSEEQGRNLELQVLLESEKVRIREMSSTLDRERELHAQLQSSDGTGQSRPPLPSEDLLKELQKQLEEKHSRIVELLNETEKYKLDSLQTRQQMEKDRQVHRKTLQTEQEANTEGQKKMHELQSKVEDLQRQLEEKRQQVYKLDLEGQRLQGIMQEFQKQELEREEKRESRRILYQNLNEPTTWSLTSDRTRNWVLQQKIEGETKESNYAKLIEMNGGGTGCNHELEMIRQKLQCVASKLQVLPQKASERLQFETADDEDFIWVQENIDEIILQLQKLTGQQGEEPSLVSPSTSCGSLTERLLRQNAELTGHISQLTEEKNDLRNMVMKLEEQIRWYRQTGAGRDNSSRFSLNGGANIEAIIASEKEVWNREKLTLQKSLKRAEAEVYKLKAELRNDSLLQTLSPDSEHVTLKRIYGKYLRAESFRKALIYQKKYLLLLLGGFQECEDATLALLARMGGQPAFTDLEVITNRPKGFTRFRSAVRVSIAISRMKFLVRRWHRVTGSVSININRDGFGLNQGAEKTDSFYHSSGGLELYGEPRHTTYRSRSDLDYIRSPLPFQNRYPGTPADFNPGSLACSQLQNYDPDRALTDYITRLEALQRRLGTIQSGSTTQFHAGMRR

SEQ ID NO: 1074 - protein, 687 aa, Homo sapiens
MSNRNNNKLPSNLPQLQNLIKRDPPAYIEEFLQQYNHYKSNVEIFKLQPNKPSKELAELVMFMAQISHCYPEYLSNFPQEVKDLLSCNHTVLDPDLRMTFCKALILLRNKNLINPSSLLELFFELFRCHDKLLRKTLYTHIVTDIKNINAKHKNNKVNVVLQNFMYTMLRDSNATAAKMSLDVMIELYRRNIWNDAKTVNVITTACFSKVTKILVAALTFFLGKDEDEKQDSDSESEDDGPTARDLLVQYATGKKSSKNKKKLEKAMKVLKKQKKKKKPEVFNFSAIHLIHDPQDFAEKLLKQLECCKERFEVKMMLMNLISRLVGIHELFLFNFYPFLQRFLQPHQREVTKILLFAAQASHHLVPPEIIQSLLMTVANNFVTDKNSGEVMTVGINAIKEITARCPLAMTEELLQDLAQYKTHKDKNVMMSARTLIHLFRTLNPQMLQKKFRGKPTEASIEARVQEYGELDAKDYIPGAEVLEVEKEENAENDEDGWESTSLSEEEDADGEWIDVQHSSDEEQQEISKKLNSMPMEERKAKAAAISTSRVLTQEDFQKIRMAQMRKELDAAPGKSQKRKYIEIDSDEEPRGELLSLRDIERLHKKPKSDKETRLATAMAGKTDRKEFVRKKTKTNPFSSSTNKEKKKQKNFMMMRYSQNVRSKNKRSFREKQLALRDALLKKRKRMK

SEQ ID NO: 1075 - protein, 976 aa, Homo sapiens
MKVVNLKQAILQAWKERWSDYQWAINMKKFFPKGATWDILNLADALLEQAMIGPSPNPLILSYLKYAISSQFDDFSRDLCVQALLDIMDMFCDRLSCHGKAEECIGLCRALLSALHWLLRCTAASAERLREGLEAGTPAAGEKQLAMCLQRLEKTLSSTKNRALLHIAKLEEASSWTAIEHSLLKLGEILANLSNPQLRSQAEQCGTLIRSIPTMLSVHAEQMHKTGFPTVHAVILLEGTMNLTGETQSLVEQLTMVKRMQHIPTPLFVLEIWKACFVGLIESPEGTEELKWTAFTFLKIPQVLVKLKKYSHGDKDFTEDVNCAFEFLLKLTPLLDKADQRCNCDCTNFLLQECGKQGLLSEASVNNLMAKRKADREHAPQQKSGENANIQPNIQLILRAEPTVTNILKTMDADHSKSPEGLLGVLGHMLSGKSLDLLLAAAAATGKLKSFARKFINLNEFTTYGSEESTKPASVRALLFDISFLMLCHVAQTYGSEVILSESRTGAEVPFFETWMQTCMPEEGKILNPDHPCFRPDSTKVESLVALLNNSSEMKLVQMKWHEACLSISAAILEILNAWENGVLAFESIQKITDNIKGKVCSLAVCAVAWLVAHVRMLGLDEREKSLQMIRQLAGPLFSENTLQFYNERVVIMNSILERMCADVLQQTATQIKFPSTGVDTMPYWNLLPPKRPIKEVLTDIFAKVLEKGWVDSRSIHIFDTLLHMGGVYWFCNNLIKELLKETRKEHTLRAVELLYSIFCLDMQQVTLVLLGHILPGLLTDSSKWHSLMDPPGTALAKLAVWCALSSYSSHKGQASTRQKKRHREDIEDYISLFPLDDVQPSKLMRLLSSNEDDANILSSPTDRSMSSSLSASQLHTVNMRDPLNRVLANLFLLISSILGSRTAGPHTQFVQWFMEECVDCLEQGGRGSVLQFMPFTTVSELVKVSAMSSPKVVLAITDLSLPLGRQVAAKAIAAL

SEQ ID NO: 1076 - protein, 561 aa, Homo sapiens
MAAEEMHWPVPMKAIGAQNLLTMPGGVAKAGYLHKKGGTQLQLLKWPLRFVIIHKRCVYYFKSSTSASPQGAFSLSGYNRVMRAAEETTSNNVFPFKIIHISKKHRTWFFSASSEEERKSWMALLRREIGHFHEKKDLPLDTSDSSSDTDSFYGAVERPVDISLSPYPTDNEDYEHDDEDDSYLEPDSPEPGRLEDALMHPPAYPPPPVPTPRKPAFSDMPRAHSFTSKGPGPLLPPPPPKHGLPDVGLAAEDSKRDPLCPRRAEPCPRVPATPRRMSDPPLSTMPTAPGLRKPPCFRESASPSPEPWTPGHGACSTSSAAIMATATSRNCDKLKSFHLSPRGPPTSEPPPVPANKPKFLKIAEEDPPREAAMPGLFVPPVAPRPPALKLPVPEAMARPAVLPRPEKPQLPHLQRSPPDGQSFRSFSFEKPRQPSQADTGGDDSDEDYEKVPLPNSVFVNTTESCEVERLFKATSPRGEPQDGLYCIRNSSTKSGKVLVVWDETSNKVRNYRIFEKDSKFYLEGEVLFVSVGSMVEHYHTHVLPSHQSLLLRHPYGYTGPR

SEQ ID NO: 1077 - protein, 4533 aa, Homo sapiens
MAGPLPDEQDFIQAYEEVREKYKDERDRVQKKTFTKWVNKHLIKAQRHISDLYEDLRDGHNLISLLEVLSGDSLPREKGRMRFHKLQNVQIALDYLRHRQVKLVNIRNDDIADGNPKLTLGLIWTIILHFQISDIQVSGQSEDMTAKEKLLLWSQRMVEGYQGLRCDNFTSSWRDGRLFNAIIHRHKPLLIDMNKVYRQTNLENLDQAFSVAERDLGVTRLLDPEDVDVPQPDEKSIITYVSSLYDAMPRVPDVQDGVRANELQLRWQEYRELVLLLLQWMRHHTAAFEERRFPSSFEEIEILWSQFLKFKEMELPAKEADKNRSKGIYQSLEGAVQAGQLKVPPGYHPLDVEKEWGKLHVAILEREKQLRSEFERLECLQRIVTKLQMEAGLCEEQLNQADALLQSDVRLLAAGKVPQRAGEVERDLDKADSMIRLLFNDVQTLKDGRHPQGEQMYRRVYRLHERLVAIRTEYNLRLKAGVAAPATQVAQVTLQSVQRRPELEDSTLRYLQDLLAWVEENQHRVDGAEWGVDLPSVEAQLGSHRGLHQSIEEFRAKIERARSDEGQLSPATRGAYRDCLGRLDLQYAKLLNSSKARLRSLESLHSFVAAATKELMWLNEKEEEEVGFDWSDRNTNMTAKKESYSALMRELELKEKKIKELQNAGDRLLREDHPARPTVESFQAALQTQWSWMLQLCCCIEAHLKENAAYFQFFSDVREAEGQLQKLQEALRRKYSCDRSATVTRLEDLLQDAQDEKEQLNEYKGHLSGLAKRAKAVVQLKPRHPAHPMRGRLPLLAVCDYKQVEVTVHKGDECQLVGPAQPSHWKVLSSSGSEAAVPSVCFLVPPPNQEAQEAVTRLEAQHQALVTLWHQLHVDMKSLLAWQSLRRDVQLIRSWSLATFRTLKPEEQRQALHSLELHYQAFLRDSQDAGGFGPEDRLMAEREYGSCSHHYQQLLQSLEQGAQEESRCQRCISELKDIRLQLEACETRTVHRLRLPLDKEPARECAQRIAEQQKAQAEVEGLGKGVARLSAEAEKVLALPEPSPAAPTLRSELELTLGKLEQVRSLSAIYLEKLKTISLVIRGTQGAEEVLRAHEEQLKEAQAVPATLPELEATKASLKKLRAQAEAQQPTFDALRDELRGAQEVGERLQQRHGERDVEVERWRERVAQLLERWQAVLAQTDVRQRELEQLGRQLRYYRESADPLGAWLQDARRRQEQIQAMPLADSQAVREQLRQEQALLEEIERHGEKVEECQRFAKQYINAIKDYELQLVTYKAQLEPVASPAKKPKVQSGSESVIQEYVDLRTHYSELTTLTSQYIKFISETLRRMEEEERLAEQQRAEERERLAEVEAALEKQRQLAEAHAQAKAQAEREAKELQQRMQEEVVRREEAAVDAQQQKRSIQEELQQLRQSSEAEIQAKARQAEAAERSRLRIEEEIRVVRLQLEATERQRGGAEGELQALRARAEEAEAQKRQAQEEAERLRRQVQDESQRKRQAEVELASRVKAEAEAAREKQRALQALEELRLQAEEAERRLRQAEVERARQVQVALETAQRSAEAELQSKRASFAEKTAQLERSLQEEHVAVAQLREEAERRAQQQAEAERAREEAERELERWQLKANEALRLRLQAEEVAQQKSLAQAEAEKQKEEAEREARRRGKAEEQAVRQRELAEQELEKQRQLAEGTAQQRLAAEQELIRLRAETEQGEQQRQLLEEELARLQREAAAATQKRQELEAELAKVRAEMEVLLASKARAEEESRSTSEKSKQRLEAEAGRFRELAEEAARLRALAEEAKRQRQLAEEDAARQRAEAERVLAEKLAAIGEATRLKTEAEIALKEKEAENERLRRLAEDEAFQRRRLEEQAAQHKADIEERLAQLRKASDSELERQKGLVEDTLRQRRQVEEEILALKASFEKAAAGKAELELELGRIRSNAEDTLRSKEQAELEAARQRQLAAEEERRRREAEERVQKSLAAEEEAARQRKAALEEVERLKAKVEEARRLRERAEQESARQLQLAQEAAQKRLQAEEKAHAFAVQQKEQELQQTLQQEQSVLDQLRGEAEAARRAAEEAEEARVQAEREAAQSRRQVEEAERLKQSAEEQAQARAQAQAAAEKLRKEAEQEAARRAQAEQAALRQKQAADAEMEKHKKFAEQTLRQKAQVEQELTTLRLQLEETDHQKNLLDEELQRLKAEATEAARQRSQVEEELFSVRVQMEELSKLKARIEAENRALILRDKDNTQRFLQEEAEKMKQVAEEAARLSVAAQEAARLRQLAEEDLAQQRALAEKMLKEKMQAVQEATRLKAEAELLQQQKELAQEQARRLQEDKEQMAQQLAEETQGFQRTLEAERQRQLEMSAEAERLKLRVAEMSRAQARAEEDAQRFRKQAEEIGEKLHRTELATQEKVTLVQTLEIQRQQSDHDAERLREAIAELEREKEKLQQEAKLLQLKSEEMQTVQQEQLLQETQALQQSFLSEKDSLLQRERFIEQEKAKLEQLFQDEVAKAQQLREEQQRQQQQMEQERQRLVASMEEARRRQHEAEEGVRRKQEELQQLEQQRRQQEELLAEENQRLREQLQLLEEQHRAALAHSEEVTASQVAATKTLPNGRDALDGPAAEAEPEHSFDGLRRKVSAQRLQEAGILSAEELQRLAQGHTTVDELARREDVRHYLQGRSSIAGLLLKATNEKLSVYAALQRQLLSPGTALILLEAQAASGFLLDPVRNRRLTVNEAVKEGVVGPELHHKLLSAERAVTGYKDPYTGQQISLFQAMQKGLIVREHGIRLLEAQIATGGVIDPVHSHRVPVDVAYRRGYFDEEMNRVLADPSDDTKGFFDPNTHENLTYLQLLERCVEDPETGLCLLPLTDKAAKGGELVYTDSEARDVFEKATVSAPFGKFQGKTVTIWEIINSEYFTAEQRRDLLRQFRTGRITVEKIIKIIITVVEEQEQKGRLCFEGLRSLVPAAELLESRVIDRELYQQLQRGERSVRDVAEVDTVRRALRGANVIAGVWLEEAGQKLSIYNALKKDLLPSDMAVALLEAQAGTGHIIDPATSARLTVDEAVRAGLVGPEFHEKLLSAEKAVTGYRDPYTGQSVSLFQALKKGLIPREQGLRLLDAQLSTGGIVDPSKSHRVPLDVACARGCLDEETSRALSAPRADAKAYSDPSTGEPATYGELQQRCRPDQLTGLSLLPLSEKAARARQEELYSELQARETFEKTPVEVPVGGFKGRTVTVWELISSEYFTAEQRQELLRQFRTGKVTVEKVIKILITIVEEVETLRQERLSFSGLRAPVPASELLASGVLSRAQFEQLKDGKTTVKDLSELGSVRTLLQGSGCLAGIYLEDTKEKVSIYEAMRRGLLRATTAALLLEAQAATGFLVDPVRNQRLYVHEAVKAGVVGPELHEQLLSAEKAVTGYRDPYSGSTISLFQAMQKGLVLRQHGIRLLEAQIATGGIIDPVHSHRVPVDVAYQRGYFSEEMNRVLADPSDDTKGFFDPNTHENLTYRQLLERCVEDPETGLRLLPLKGAEKAEVVETTQVYTEEETRRAFEETQIDIPGGGSHGGSTMSLWEVMQSDLIPEEQRAQLMADFQAGRVTKERMIIIIIEIIEKTEIIRQQGLASYDYVRRRLTAEDLFEARIISLETYNLLREGTRSLREALEAESAWCYLYGTGSVAGVYLPGSRQTLSIYQALKKGLLSAEVARLLLEAQAATGFLLDPVKGERLTVDEAVRKGLVGPELHDRLLSAERAVTGYRDPYTEQTISLFQAMKKELIPTEEALRLLDAQLATGGIVDPRLGFHLPLEVAYQRGYLNKDTHDQLSEPSEVRSYVDPSTDERLSYTQLLRRCRRDDGTGQLLLPLSDARKLTFRGLRKQITMEELVRSQVMDEATALQLREGLTSIEEVTKNLQKFLEGTSCIAGVFVDATKERLSVYQAMKKGIIRPGTAFELLEAQAATGYVIDPIKGLKLTVEEAVRMGIVGPEFKDKLLSAERAVTGYKDPYSGKLISLFQAMKKGLILKDHGIRLLEAQIATGGIIDPEESHRLPVEVAYKRGLFDEEMNEILTDPSDDTKGFFDPNTEENLTYLQLMERCITDPQTGLCLLPLKEKKRERKTSSKSSVRKRRVVIVDPETGKEMSVYEAYRKGLIDHQTYLELSEQECEWEEITISSSDGVVKSMIIDRRSGRQYDIDDAIAKNLIDRSALDQYRAGTLSITEFADMLSGNAGGFRSRSSSVGSSSSYPISPAVSRTQLASWSDPTEETGPVAGILDTETLEKVSITEAMHRNLVDNITGQRLLEAQACTGGIIDPSTGERFPVTDAVNKGLVDKIMVDRINLAQKAFCGFEDPRTKTKMSAAQALKKGWLYYEAGQRFLEVQYLTGGLIEPDTPGRVPLDEALQRGTVDARTAQKLRDVGAYSKYLTCPKTKLKISYKDALDRSMVEEGTGLRLLEAAAQSTKGYYSPYSVSGSGSTAGSRTGSRTGSRAGSRRGSFDATGSGFSMTFSSSSYSSSGYGRRYASGSSASLGGPESAVA

SEQ ID NO: 1078 - protein, 773 aa, Homo sapiens
MKAAVLDLGSLLAKLFETSTAPPAGPSSRPSGGAAAAGSGGSRAGTPLGTAPTLLRALAPDSPSASRRSPAPLLSSPYSRGSAASRAAGAVGTLLSWPSSPRAGKAPPQPPTPSGGGCSPARLVVPARPPSGPGGVWAALPRNPLQPGPGERELGACVAPGAGPRTLFLTLPDIGEEGASDGDSGDGEARGLSEGRRRHGFTVRSKDSLPTHFTRNVQKAIDKYTCKSLSSFSSSGSHTPTGAHTSWSGSATQSSTTGSSTERGSVYSWRDDEFDEASSQSVQRLLWEVEEMLFEGKVNPQTQSLLAECGEWTRRSLHLRVLGRQLILPTDKGVQHFQGSTPASAVHRPPLSACGHSSNIRELCISGSQIVPAALSASALPGPDDTGVADLTARSSLEEEVYHVDGKIEEYFAFDRKEDDDECLEQKPAQPGRKWRKLGLPPVSPRDCVKDAVAAEVFDHVWTNMVELLEELIRKHWETTLTEGKKQRETLKVAGNRFPHVLVPHAHADGASGPPSGHAEAHGISLASRLNPPQIHHFSSSFYSDMNGVMTIQAKPLQRRPAYFADRTQNEKEDKASGGGAGALSSAPHRLGRASDTHGLSPSAKKTPVPWRLPSLASDSQRLKTPNIYSDEVLRGTKLPTGVDHMASPLVQTSRSRFPPLVTETRGQNTAVPGCRLVSYRGRHLQNRVLSAMPDGTERSRLRERTATLERLSRPSTTHTFRQSDTPRKSSLTQMEFAAHTWTGQSILTGSQYVPKSFQRTTLTFKRRFQVTS

SEQ ID NO: 1079 - protein, 871 aa, Homo sapiens
MDGESEVDFSSNSITPLWRRRSIPQPHQVLGRSKPRPQSYQSPNGLLITDFPVEDGGTLLAAQIPAQVPTASDSRTVHRSPLLLGAQRRAVANGGTASPEYRAASPRLRRPKSPKLPKAVPGGSPKSPANGAVTLPAPPPPPVLRPPRTPNAPAPCTPEEDLTGLTASPVPSPTANGLAANNDSPGSGSQSGRKAKDPERGLFPGPQKSSSEQKLPLQRLPSQENELLENPSVVLSTNSPAALKVGKQQIIPKSLASEIKISKSNNQNVEPHKRLLKVRSMVEGLGGPLGHAGEESEVDNDVDSPGSLRRGLRSTSYRRAVVSGFDFDSPTSSKKKNRMSQPVLKVVMEDKEKFSSLGRIKKKMLKGQGTFDGEENAVLYQNYKEKALDIDSDEESEPKEQKSDEKIVIHHKPLRSTWSQLSAVKRKGLSQTVSQEERKRQEAIFEVISSEHSYLLSLEILIRMFKNSKELSDTMTKTERHHLFSNITDVCEASKKFFIELEARHQNNIFIDDISDIVEKHTASTFDPYVKYCTNEVYQQRTLQKLLATNPSFKEVLSRIESHEDCRNLPMISFLILPMQRVTRLPLLMDTICQKTPKDSPKYEVCKRALKEVSKLVRLCNEGARKMERTEMMYTINSQLEFKIKPFPLVSSSRWLVKRGELTAYVEDTVLFSRRTSKQQVYFFLFNDVLIITKKKSEESYNVNDYSLRDQLLVESCDNEELNSSPGKNSSTMLYSRQSSASHLFTLTVLSNHANEKVEMLLGAETQSERARWITALGHSSGKPPADRTSLTQVEIVRSFTAKQPDELSLQVADVVLIYQRVSDGWYEGERLRDGERGWFPMECAKEITCQATIDKNVERMGRLLGLETNV

SEQ ID NO: 1080 - protein, 272 aa, Homo sapiens
MVRCYVEIVEKLPERRPDPATIEGCAQLKPNNYLLAWHTPFNEKGSGFGAATKAMCIGLRYWKPERLETLIEVSVECGRMTHNHPTGFLGSLCTALFVSFAAQGKPLVQWGRDMLRAVPLAEEYCRKTIRHTAEYQEHWFYFEAKWQFYLEERKISKDSENKAIFPDNYDAEEREKTYRKWSSEGRGGRRGHDAPMIAYDALLAAGNSWTELCHRAMFHGGESAATGTIAGCLFGLLYGLDLVPKGLYQDLEDKEKLEDLGAALYRLSTEEK

SEQ ID NO: 1081 - protein, 2426 aa, Homo sapiens
MATNIEQIFRSFVVSKFREIQQELSSGRNEGQLNGETNTPIEGNQAGDAAASARSLPNEEIVQKIEEVLSGVLDTELRYKPDLKEGSRKSRCVSVQTDPTDEIPTKKSKKHKKHKNKKKKKKKEKEKKYKRQPEESESKTKSHDDGNIDLESDSFLKFDSEPSAVALELPTRAFGPSETNESPAVVLEPPVVSMEVSEPHILETLKPATKTAELSVVSTSVISEQSEQSVAVMPEPSMTKILDSFAAAPVPTTTLVLKSSEPVVTMSVEYQMKSVLKSVESTSPEPSKIMLVEPPVAKVLEPSETLVVSSETPTEVYPEPSTSTTMDFPESSAIEALRLPEQPVDVPSEIADSSMTRPQELPELPKTTALELQESSVASAMELPGPPATSMPELQGPPVTPVLELPGPSATPVPELPGPLSTPVPELPGPPATAVPELPGPSVTPVPQLSQELPGLPAPSMGLEPPQEVPEPPVMAQELPGLPLVTAAVELPEQPAVTVAMELTEQPVTTTELEQPVGMTTVEHPGHPEVTTATGLLGQPEATMVLELPGQPVATTALELPGQPSVTGVPELPGLPSATRALELSGQPVATGALELPGPLMAAGALEFSGQSGAAGALELLGQPLATGVLELPGQPGAPELPGQPVATVALEISVQSVVTTSELSTMTVSQSLEVPSTTALESYNTVAQELPTTLVGETSVTVGVDPLMAPESHILASNTMETHILASNTMDSQMLASNTMDSQMLASNTMDSQMLASSTMDSQMLATSSMDSQMLATSSMDSQMLATSTMDSQMLATSSMDSQMLATSSMDSQMLATSSMDSQMLATSSMDSQMLATSTMDSQMLATSTMDSQMLATSSMDSQMLASGTMDSQMLASGTMDAQMLASGTMDAQMLASSTQDSAMLGSKSPDPYRLAQDPYRLAQDPYRLGHDPYRLGHDAYRLGQDPYRLGHDPYRLTPDPYRMSPRPYRIAPRSYRIAPRPYRLAPRPLMLASRRSMMMSYAAERSMMSSYERSMMSYERSMMSPMAERSMMSAYERSMMSAYERSMMSPMAERSMMSAYERSMMSAYERSMMSPMADRSMMSMGADRSMMSSYSAADRSMMSSYSAADRSMMSSYTADRSMMSMAADSYTDSYTDTYTEAYMVPPLPPEEPPTMPPLPPEEPPMTPPLPPEEPPEGPALPTEQSALTAENTWPTEVPSSPSEESVSQPEPPVSQSEISEPSAVPTDYSVSASDPSVLVSEAAVTVPEPPPEPESSITLTPVESAVVAEEHEVVPERPVTCMVSETPAMSAEPTVLASEPPVMSETAETFDSMRASGHVASEVSTSLLVPAVTTPVLAESILEPPAMAAPESSAMAVLESSAVTVLESSTVTVLESSTVTVLEPSVVTVPEPPVVAEPDYVTIPVPVVSALEPSVPVLEPAVSVLQPSMIVSEPSVSVQESTVTVSEPAVTVSEQTQVIPTEVAIESTPMILESSIMSSHVMKGINLSSGDQNLAPEIGMQEIALHSGEEPHAEEHLKGDFYESEHGINIDLNINNHLIAKEMEHNTVCAAGTSPVGEIGEEKILPTSETKQRTVLDTYPGVSEADAGETLSSTGPFALEPDATGTSKGIEFTTASTLSLVNKYDVDLSLTTQDTEHDMVISTSPSGGSEADIEGPLPAKDIHLDLPSNNNLVSKDTEEPLPVKESDQTLAALLSPKESSGGEKEVPPPPKETLPDSGFSANIEDINEADLVRPLLPKDMERLTSLRAGIEGPLLASDVGRDRSAASPVVSSMPERASESSSEEKDDYEIFVKVKDTHEKSKKNKNRDKGEKEKKRDSSLRSRSKRSKSSEHKSRKRTSESRSRARKRSSKSKSHRSQTRSRSRSRRRRRSSRSRSKSRGRRSVSKEKRKRSPKHRSKSRERKRKRSSSRDNRKTVRARSRTPSRRSRSHTPSRRRRSRSVGRRRSFSISPSRRSRTPSRRSRTPSRRSRTPSRRSRTPSRRSRTPSRRSRTPSRRRRSRSVVRRRSFSISPVRLRRSRTPLRRRFSRSPIRRKRSRSSERGRSPKRLTDLDKAQLLEIAKANAAAMCAKAGVPLPPNLKPAPPPTIEEKVAKKSGGATIEELTEKCKQIAQSKEDDDVIVNKPHVSDEEEEEPPFYHHPFKLSEPKPIFFNLNIAAAKPTPPKSQVTLTKEFPVSSGSQHRKKEADSVYGEWVPVEKNGEENKDDDNVFSSNLPSEPVDISTAMSERALAQKRLSENAFDLEAMSMLNRAQERIDAWAQLNSIPGQFTGSTGVQVLTQEQLANTGAQAWIKKDQFLRAAPVTGGMGAVLMRKMGWREGEGLGKNKEGNKEPILVDFKTDRKGLVAVGERAQKRSGNFSAAMKDLSGKHPVSALMEICNKRRWQPPEFLLVHDSGPDHRKHFLFRVLRNGALTRPNCMFFLNRY

SEQ ID NO: 1082 - protein, 1382 aa, Homo sapiens
MTRKRTYWVPNSSGGLVNRGIDIGDDMVSGLIYKTYTLQDGPWSQQERNPEAPGRAAVPPWGKYDAALRTMIPFRPKPRFPAPQPLDNAGLFSYLTVSWLTPLMIQSLRSRLDENTIPPLSVHDASDKNVQRLHRLWEEEVSRRGIEKASVLLVMLRFQRTRLIFDALLGICFCIASVLGPILIIPKILEYSEEQLGNVVHGVGLCFALFLSECVKSLSFSSSWIINQRTAIRFRAAVSSFAFEKLIQFKSVIHITSGEAISFFTGDVNYLFEGVCYGPLVLITCASLVICSISSYFIIGYTAFIAILCYLLVFPLAVFMTRMAVKAQHHTSEVSDQRIRVTSEVLTCIKLIKMYTWEKPFAKIIEDLRRKERKLLEKCGLVQSLTSITLFIIPTVATAVWVLIHTSLKLKLTASMAFSMLASLNLLRLSVFFVPIAVKGLTNSKSAVMRFKKFFLQESPVFYVQTLQDPSKALVFEEATLSWQQTCPGIVNGALELERNGHASEGMTRPRDALGPEEEGNSLGPELHKINLVVSKGMMLGVCGNTGSGKSSLLSAILEEMHLLEGSVGVQGSLAYVPQQAWIVSGNIRENILMGGAYDKARYLQVLHCCSLNRDLELLPFGDMTEIGERGLNLSGGQKQRISLARAVYSDRQIYLLDDPLSAVDAHVGKHIFEECIKKTLRGKTVVLVTHQLQYLEFCGQIILLENGKICENGTHSELMQKKGKYAQLIQKMHKEATSDMLQDTAKIAEKPKVESQALATSLEESLNGNAVPEHQLTQEEEMEEGSLSWRVYHHYIQAAGGYMVSCIIFFFVVLIVFLTIFSFWWLSYWLEQGSGTNSSRESNGTMADLGNIADNPQLSFYQLVYGLNALLLICVGVCSSGIFTKVTRKASTALHNKLFNKVFRCPMSFFDTIPIGRLLNCFAGDLEQLDQLLPIFSEQFLVLSLMVIAVLLIVSVLSPYILLMGAIIMVICFIYYMMFKKAIGVFKRLENYSRSPLFSHILNSLQGLSSIHVYGKTEDFISQFKRLTDAQNNYLLLFLSSTRWMALRLEIMTNLVTLAVALFVAFGISSTPYSFKVMAVNIVLQLASSFQATARIGLETEAQFTAVERILQYMKMCVSEAPLHMEGTSCPQGWPQHGEIIFQDYHMKYRDNTPTVLHGINLTIRGHEVVGIVGRTGSGKSSLGMALFRLVEPMAGRILIDGVDICSIGLEDLRSKLSVIPQDPVLLSGTIRFNLDPFDRHTDQQIWDALERTFLTKAISKFPKKLHTDVVENGGNFSVGERQLLCIARAVLRNSKIILIDEATASIDMETDTLIQRTIREAFQGCTVLVIAHRVTTVLNCDHILVMGNGKVVEFDRPEVLRKKPGSLFAALMATATSSLR

SEQ ID NO: 1083 - protein, 223 aa, Homo sapiens
MGRYSGKTCRLLFMLVLTVAFFVAELVSGYLGNSIALLSDSFNMLSDLISLCVGLSAGYIARRPTRGFSATYGYARAEVVGALSNAVFLTALCFTIFVEAVLRLARPERIDDPELVLIVGVLGLLVNVVGLLIFQDCAAWFACCLRGRSRRLQQRQQLAEGCVPGAFGGPQGAEDPRRAADPTAPGSDSAVTLRGTSVERKREKGATVFANVAELIHNTRFLL

SEQ ID NO: 1084 - protein, 1525 aa, Homo sapiens
MSGTQSTITDRFPLKKPIRHGSILNRESPTDKKQKVERIASHDFDPTGLVQRCVIIQKDDNGFGLTVSGDNPVFVQSVKEDGAAMRAGVQTGDRIIKVNGTLVTHSNHLEVVKLIKSGSYVALTVQGRPPGSPQIPLADSEVEPSVIGHMSPIMTSPHSPGASGNMERITSPVLMGEENNVVHNQKVEILRKMLQKEQERLQLLQEDYNRTPAQRLLKEIQEAKKHIPQLQEQLSKATGSAQDGAVVTPSRPLGDTLTVSEAETDPGDVLGRTDCSSGDASRPSSDNADSPKSGPKERIYLEENPEKSETIQDTDTQSLVGSPSTRIAPHIIGAEDDDFGTEHEQINGQCSCFQSIELLKSRPAHLAVFLHHVVSQFDPATLLCYLYSDLYKHTNSKETRRIFLEFHQFFLDRSAHLKVSVPDEMSADLEKRRPELIPEDLHRHYIQTMQERVHPEVQRHLEDFRQKRSMGLTLAESELTKLDAERDKDRLTLEKERTCAEQIVAKIEEVLMTAQAVEEDKSSTMQYVILMYMKHLGVKVKEPRNLEHKRGRIGFLPKIKQSMKKDKEGEEKGKRRGFPSILGPPRRPSRHDNSAIGRAMELQKARHPKHLSTPSSVSPEPQDSAKLRQSGLANEGTDAGYLPANSMSSVASGASFSQEGGKENDTGSKQVGETSAPGDTLDGTPRTLNTVFDFPPPPLDQVQEEECEVERVTEHGTPKPFRKFDSVAFGESQSEDEQFENDLETDPPNWQQLVSREVLLGLKPCEIKRQEVINELFYTERAHVRTLKVLDQVFYQRVSREGILSPSELRKIFSNLEDILQLHIGLNEQMKAVRKRNETSVIDQIGEDLLTWFSGPGEEKLKHAAATFCSNQPFALEMIKSRQKKDSRFQTFVQDAESNPLCRRLQLKDIIPTQMQRLTKYPLLLDNIAKYTEWPTEREKVKKAADHCRQILNYVNQAVKEAENKQRLEDYQRRLDTSSLKLSEYPNVEELRNLDLTKRKMIHEGPLVWKVNRDKTIDLYTLLLEDILVLLQKQDDRLVLRCHSKILASTADSKHTFSPVIKLSTVLVRQVATDNKALFVISMSDNGAQIYELVAQTVSEKTVWQDLICRMAASVKEQSTKPIPLPQSTPGEGDNDEEDPSKLKEEQHGISVTGLQSPDRDLGLESTLISSKPQSHSLSTSGKSEVRDLFVAERQFAKEQHTDGTLKEVGEDYQIAIPDSHLPVSEERWALDALRNLGLLKQLLVQQLGLTEKSVQEDWQHFPRYRTASQGPQTDSVIQNSENIKAYHSGEGHMPFRTGTGDIATCYSPRTSTESFAPRDSVGLAPQDSQASNILVMDHMIMTPEMPTMEPEGGLDDSGEHFFDAREAHSDENPSEGDGAVNKEEKDVNLRISGNYLILDGYDPVQESSTDEEVASSLTLQPMTGIPAVESTHQQQHSPQNTHSDGAISPFTPEFLVQQRWGAMEYSCFEIQSPSSCADSQSQIMEYIHKIEADLEHLKKVEESYTILCQRLAGSALTDKHSDKS

SEQ ID NO: 1085 - protein, 247 aa, Homo sapiens
MTILFLTMVISYFGCMKAAPMKEANIRGQGGLAYPGVRTHGTLESVNGPKAGSRGLTSLADTFEHVIEELLDEDQKVRPNEENNKDADLYTSRVMLSSQVPLEPPLLFLLEEYKNYLDAANMSMRVRRHSDPARRGELSVCDSISEWVTAADKKTAVDMSGGTVTVLEKVPVSKGQLKQYFYETKCNPMGYTKEGCRGIDKRHWNSQCRTTQSYVRALTMDSKKRIGWRFIRIDTSCVCTLTIKRGR

SEQ ID NO: 1086 - protein, 620 aa, Homo sapiens
MSEHVEPAAPGPGPNGGGGGPAPARGPRTPNLNPNPLINVRDRLFHALFFKMAVTYSRLFPPAFRRLFEFFVLLKALFVLFVLAYIHIVFSRSPINCLEHVRDKWPREGILRVEVRHNSSRAPVFLQFCDSGGRGSFPGLAVEPGSNLDMEDEEEEELTMEMFGNSSIKFELDIEPKVFKPPSSTEALNDSQEFPFPETPTKVWPQDEYIVEYSLEYGFLRLSQATRQRLSIPVMVVTLDPTRDQCFGDRFSRLLLDEFLGYDDILMSSVKGLAENEENKGFLRNVVSGEHYRFVSMWMARTSYLAAFAIMVIFTLSVSMLLRYSHHQIFVFIVDLLQMLEMNMAIAFPAAPLLTVILALVGMEAIMSEFFNDTTTAFYIILIVWLADQYDAICCHTSTSKRHWLRFFYLYHFAFYAYHYRFNGQYSSLALVTSWLFIQHSMIYFFHHYELPAILQQVRIQEMLLQAPPLGPGTPTALPDDMNNNSGAPATAPDSAGQPPALGPVSPGASGSPGPVAAAPSSLVAAAASVAAAAGGDLGWMAETAAIITDASFLSGLSASLLERRPASPLGPAGGLPHAPQDSVPPSDSAASDTTPLGAAVGGPSPASMAPTEAPSEVGS

SEQ ID NO: 1087 - protein, 298 aa, Homo sapiens
MFSRAGVAGLSAWTLQPQWIQVRNMATLKDITRRLKSIKNIQKITKSMKMVAAAKYARAERELKPARIYGLGSLALYEKADIKGPEDKKKHLLIGVSSDRGLCGAIHSSIAKQMKSEVATLTAAGKEVMLVGIGDKIRGILYRTHSDQFLVAFKEVGRKPPTFGDASVIALELLNSGYEFDEGSIIFNKFRSVISYKTEEKPIFSLNTVASADSMSIYDDIDADVLQNYQEYNLANIIYYSLKESTTSEQSARMTAMDNASKNASEMIDKLTLTFNRTRQAVITKELIEIISGAAALD

SEQ ID NO: 1088 - protein, 460 aa, Homo sapiens
MAPGRAVAGLLLLAAAGLGGVAEGPGLAFSEDVLSVFGANLSLSAAQLQHLLEQMGAASRVGVPEPGQLHFNQCLTAEEIFSLHGFSNATQITSSKFSVICPAVLQQLNFHPCEDRPKHKTRPSHSEVWGYGFLSVTIINLASLLGLILTPLIKKSYFPKILTFFVGLAIGTLFSNAIFQLIPEAFGFDPKVDSYVEKAVAVFGGFYLLFFFERMLKMLLKTYGQNGHTHFGNDNFGPQEKTHQPKALPAINGVTCYANPAVTEANGHIHFDNVSVVSLQDGKKEPSSCTCLKGPKLSEIGTIAWMITLCDALHNFIDGLAIGASCTLSLLQGLSTSIAILCEEFPHELGDFVILLNAGMSTRQALLFNFLSACSCYVGLAFGILVGNNFAPNIIFALAGGMFLYISLADMFPEMNDMLREKVTGRKTDFTFFMIQNAGMLTGFTAILLITLYAGEIELE

SEQ ID NO: 1089 - protein, 335 aa, Homo sapiens
MDHAEENEILAATQRYYVERPIFSHPVLQERLHTKDKVPDSIADKLKQAFTCTPKKIRNIIYMFLPITKWLPAYKFKEYVLGDLVSGISTGVLQLPQGLAFAMLAAVPPIFGLYSSFYPVIMYCFLGTSRHISIGPFAVISLMIGGVAVRLVPDDIVIPGGVNATNGTEARDALRVKVAMSVTLLSGIIQFCLGVCRFGFVAIYLTEPLVRGFTTAAAVHVFTSMLKYLFGVKTKRYSGIFSVVYSTVAVLQNVKNLNVCSLGVGLMVFGLLLGGKEFNERFKEKLPAPIPLEFFAVVMGTGISAGFNLKESYNVDVVGTLPLGFHTEMTRRWRP

SEQ ID NO: 1090 - protein, 1476 aa, Homo sapiens
MEGGKGPRLRDFLSGSLATWALGLAGLVGEAEDSEGEEEEEEEEPPLWLEKRFLRLSDGALLLRVLGIIAPSSRGGPRMLRGLDGPAAWRVWNLNHLWGRLRDFYQEELQLLILSPPPDLQTLGFDPLSEEAVEQLEGVLRLLLGASVQCEHRELFIRHIQGLSLEVQSELAAAIQEVTQPGAGVVLALSGPDPGELAPAELEMLSRSLMGTLSKLARERDLGAQRLAELLLEREPLCLRPEAPSRAPAEGPSHHLALQLANAKAQLRRLRQELEEKAELLLDSQAEVQGLEAEIRRLRQEAQALSGQAKRAELYREEAEALRERAGRLPRLQEELRRCRERLQAAEAYKSQLEEERVLSGVLEASKALLEEQLEAARERCARLHETQRENLLLRTRLGEAHAELDSLRHQVDQLAEENVELELELQRSLEPPPGSPGEAPLAGAAPSLQDEVREAEAGRLRTLERENRELRGLLQVLQGQPGGQHPLLEAPREDPVLPVLEEAPQTPVAFDHSPQGLVQKARDGGPQALDLAPPALDSVLEASAECPQAPDSDPQEAESPLQAAAMDPQASDWSPQESGSPVETQESPEKAGRRSSLQSPASVAPPQGPGTKIQAPQLLGGETEGREAPQGELVPEAWGLRQEGPEHKPGPSEPSSVQLEEQEGPNQGLDLATGQAEAREHDQRLEGTVRDPAWQKPQQKSEGALEVQVWEGPIPGESLASGVAEQEALREEVAQLRRKAEALGDELEAQARKLEAQNTEAARLSKELAQARRAEAEAHREAEAQAWEQARLREAVEAAGQELESASQEREALVEALAAAGRERRQWEREGSRLRAQSEAAEERMQVLESEGRQHLEEAERERREKEALQAELEKAVVRGKELGDRLEHLQRELEQAALERQEFLREKESQHQRYQGLEQRLEAELQAAATSKEEALMELKTRALQLEEELFQLRQGPAGLGPKKRAEPQLVETQNVRLIEVERSNAMLVAEKAALQGQLQHLEGQLGSLQGRAQELLLQSQRAQEHSSRLQAEKSVLEIQGQELHRKLEVLEEEVRAARQSQEETRGQQQALLRDHKALAQLQRRQEAELEGLLVRHRDLKANMRALELAHRELQGRHEQLQAQRASVEAQEVALLAERERLMQDGHRQRGLEEELRRLQSEHDRAQMLLAELSRERGELQGERGELRGRLARLELERAQLEMQSQQLRESNQQLDLSACRLTTQCELLTQLRSAQEEENRQLLAEVQALSRENRELLERSLESRDHLHREQREYLDQLNALRREKQKLVEKIMDQYRVLEPVPLPRTKKGSWLADKVKRLMRPRREGGPPGGLRLGADGAGSTESLGGPPETELPEGREADGTGSPSPAPMRRAQSSLCLRDETLAGGQRRKLSSRFPVGRSSESFSPGDTPRQRFRQRHPGPLGAPVSHSKGPGVGWENSAETLQEHETDANREGPEVQEPEKRPLTPSLSQ

SEQ ID NO: 1091 - protein, 1170 aa, Homo sapiens
MKDSCITVMAMALLSGFFFFAPASSYNLDVRGARSFSPPRAGRHFGYRVLQVGNGVIVGAPGEGNSTGSLYQCQSGTGHCLPVTLRGSNYTSKYLGMTLATDPTDGSILACDPGLSRTCDQNTYLSGLCYLFRQNLQGPMLQGRPGFQECIKGNVDLVFLFDGSMSLQPDEFQKILDFMKDVMKKLSNTSYQFAAVQFSTSYKTEFDFSDYVKRKDPDALLKHVKHMLLLTNTFGAINYVATEVFREELGARPDATKVLIIITDGEATDSGNIDAAKDIIRYIIGIGKHFQTKESQETLHKFASKPASEFVKILDTFEKLKDLFTELQKKIYVIEGTSKQDLTSFNMELSSSGISADLSRGHAVVGAVGAKDWAGGFLDLKADLQDDTFIGNEPLTPEVRAGYLGYTVTWLPSRQKTSLLASGAPRYQHMGRVLLFQEPQGGGHWSQVQTIHGTQIGSYFGGELCGVDVDQDGETELLLIGAPLFYGEQRGGRVFIYQRRQLGFEEVSELQGDPGYPLGRFGEAITALTDINGDGLVDVAVGAPLEEQGAVYIFNGRHGGLSPQPSQRIEGTQVLSGIQWFGRSIHGVKDLEGDGLADVAVGAESQMIVLSSRPVVDMVTLMSFSPAEIPVHEVECSYSTSNKMKEGVNITICFQIKSLIPQFQGRLVANLTYTLQLDGHRTRRRGLFPGGRHELRRNIAVTTSMSCTDFSFHFPVCVQDLISPINVSLNFSLWEEEGTPRDQRAQGKDIPPILRPSLHSETWEIPFEKNCGEDKKCEANLRVSFSPARSRALRLTAFASLSVELSLSNLEEDAYWVQLDLHFPPGLSFRKVEMLKPHSQIPVSCEELPEESRLLSRALSCNVSSPIFKAGHSVALQMMFNTLVNSSWGDSVELHANVTCNNEDSDLLEDNSATTIIPILYPINILIQDQEDSTLYVSFTPKGPKIHQVKHMYQVRIQPSIHDHNIPTLEAVVGVPQPPSEGPITHQWSVQMEPPVPCHYEDLERLPDAAEPCLPGALFRCPVVFRQEILVQVIGTLELVGEIEASSMFSLCSSLSISFNSSKHFHLYGSNASLAQVVMKVDVVYEKQMLYLYVLSGIGGLLLLLLIFIVLYKVGFFKRNLKEKMEAGRGVPNGIPAEDSEQLASGQEAGDPGCLKPLHEKDSESGGGKD

SEQ ID NO: 1092 - protein, 660 aa, Homo sapiens
MISSIVISQMIDENKSRENRASLPLPCAIAQSRAHHAKQSLANRSGVNIHRAFALLPGRLGIPAPSDERGPEAELPPKEERPCGGPRRGFASITITARRVGPPARALVWGTAGDSLCPKCRAEDTLFQAPPALANGAHPGRHQRSFACTEFSRNSSVVRLKVPEAHTGLCERRKYWVTHADDKETSFSPDTPLSGKSPLVFSSCVHLRVSQQCPDSIYYVDKSLSVPIEPPQIASPKMHRSVLSLNLNCSSHRLTADGVDGLVNREPISEALKQELLEGDQDLVGQRWNPGLQESHLKETPSLRRVHLGTGACPWSGSFPLENTELANVGANQVTVRKGEKDHTTHCHASDHANQLSIHIPGWSYRAVHTKVFSGSSKRQQGEVCMTVSAPPVEQKPTRHFLPIGDSSPSDDCLSRDLSEPTERRHQSFLKPRILFPGFLCPLQDVCASLQEDNGVQIESKFPKGDYTCCDLVVKIKECKKSEDPTTPEPSPAAPSPAPRDGAGSPGLSEDCSESQQTPARSLTLQEALEVRKPQFISRSQERLKKLEHMVQQRKAQRKEDLRQKQSLLPIRTSKKQFTIPHPLSDNLFKPKERCISEKEMHMRSKRIYDNLPEVKKKKEEQRKRVILQSNRLRAEVFKKVMASSPAGVMCVVHRCRIST

SEQ ID NO: 1093 - protein, 887 aa, Homo sapiens
MDWQPDEQGLQQVLQLLKDSQSPNTATQRIVQDKLKQLNQFPDFNNYLIFVLTRLKSEDEPTRSLSGLILKNNVKAHYQSFPPPVADFIKQECLNNIGDASSLIRATIGILITTIASKGELQMWPELLPQLCNLLNSEDYNTCEGAFGALQKICEDSSELLDSDALNRPLNIMIPKFLQFFKHCSPKIRSHAIACVNQFIMDRAQALMDNIDTFIEHLFALAVDDDPEVRKNVCRALVMLLEVRIDRLIPHMHSIIQYMLQRTQDHDENVALEACEFWLTLAEQPICKEVLASHLVQLIPILVNGMKYSEIDIILLKGDVEEDEAVPDSEQDIKPRFHKSRTVTLPHEAERPDGSEDAEDDDDDDALSDWNLRKCSAAALDVLANVFREELLPHLLPLLKGLLFHPEWVVKESGILVLGAIAEGCMQGMVPYLPELIPHLIQCLSDKKALVRSIACWTLSRYAHWVVSQPPDMHLKPLMTELLKRILDGNKRVQEAACSAFATLEEEACTELVPYLSYILDTLVFAFGKYQHKNLLILYDAIGTLADSVGHHLNQPEYIQKLMPPLIQKWNELKDEDKDLFPLLECLSSVATALQSGFLPYCEPVYQRCVTLVQKTLAQAMMYTQHPEQYEAPDKDFMIVALDLLSGLAEGLGGHVEQLVARSNIMTLLFQCMQDSMPEVRQSSFALLGDLTKACFIHVKPCIAEFMPILGTNLNPEFISVCNNATWAIGEICMQMGAEMQPYVQMVLNNLVEIINRPNTPKTLLENTAITIGRLGYVCPQEVAPMLQQFIRPWCTSLRNIRDNEEKDSAFRGICMMIGVNPGGVVQDFIFFCDAVASWVSPKDDLRDMFYKILHGFKDQVGEDNWQQFSEQFPPLLKERLAAFYGV

SEQ ID NO: 1094 - protein, 863 aa, Homo sapiens
MRLALLWALGLLGAGSPLPSWPLPNIGGTEEQQAESEKAPREPLEPQVLQDDLPISLKKVLQTSLPEPLRIKLELDGDSHILELLQNRELVPGRPTLVWYQPDGTRVVSEGHTLENCCYQGRVRGYAGSWVSICTCSGLRGLVVLTPERSYTLEQGPGDLQGPPIISRIQDLHLPGHTCALSWRESVHTQKPPEHPLGQRHIRRRRDVVTETKTVELVIVADHSEAQKYRDFQHLLNRTLEVALLLDTFFRPLNVRVALVGLEAWTQRDLVEISPNPAVTLENFLHWRRAHLLPRLPHDSAQLVTGTSFSGPTVGMAIQNSICSPDFSGGVNMDHSTSILGVASSIAHELGHSLGLDHDLPGNSCPCPGPAPAKTCIMEASTDFLPGLNFSNCSRRALEKALLDGMGSCLFERLPSLPPMAAFCGNMFVEPGEQCDCGFLDDCVDPCCDSLTCQLRPGAQCASDGPCCQNCQLRPSGWQCRPTRGDCDLPEFCPGDSSQCPPDVSLGDGEPCAGGQAVCMHGRCASYAQQCQSLWGPGAQPAAPLCLQTANTRGNAFGSCGRNPSGSYVSCTPRDAICGQLQCQTGRTQPLLGSIRDLLWETIDVNGTELNCSWVHLDLGSDVAQPLLTLPGTACGPGLVCIDHRCQRVDLLGAQECRSKCHGHGVCDSNRHCYCEEGWAPPDCTTQLKATSSLTTGLLLSLLVLLVLVMLGASYWYRARLHQRLCQLKGPTCQYRAAQSGPSERPGPPQRALLARGTKQASALSFPAPPSRPLPPDPVSKRLQAELADRPNPPTRPLPADPVVRSPKSQGPAKPPPPRKPLPADPQGRCPSGDLPGPGAGIPPLVVPSRPAPPPPTVSSLYL

SEQ ID NO: 1095 - protein, 2491 aa, Homo sapiens
MGAAAGRSPHLGPAPARRPQRSLLLLQLLLLVAAPGSTQAQAAPFPELCSYTWEAVDTKNNVLYKINICGSVDIVQCGPSSAVCMHDLKTRTYHSVGDSVLRSATRSLLEFNTTVSCDQQGTNHRVQSSIAFLCGKTLGTPEFVTATECVHYFEWRTTAACKKDIFKANKEVPCYVFDEELRKHDLNPLIKLSGAYLVDDSDPDTSLFINVCRDIDTLRDPGSQLRACPPGTAACLVRGHQAFDVGQPRDGLKLVRKDRLVLSYVREEAGKLDFCDGHSPAVTITFVCPSERREGTIPKLTAKSNCRYEIEWITEYACHRDYLESKTCSLSGEQQDVSIDLTPLAQSGGSSYISDGKEYLFYLNVCGETEIQFCNKKQAAVCQVKKSDTSQVKAAGRYHNQTLRYSDGDLTLIYFGGDECSSGFQRMSVINFECNKTAGNDGKGTPVFTGEVDCTYFFTWDTEYACVKEKEDLLCGATDGKKRYDLSALVRHAEPEQNWEAVDGSQTETEKKHFFINICHRVLQEGKARGCPEDAAVCAVDKNGSKNLGKFISSPMKEKGNIQLSYSDGDDCGHGKKIKTNITLVCKPGDLESAPVLRTSGEGGCFYEFEWHTAAACVLSKTEGENCTVFDSQAGFSFDLSPLTKKNGAYKVETKKYDFYINVCGPVSVSPCQPDSGACQVAKSDEKTWNLGLSNAKLSYYDGMIQLNYRGGTPYNNERHTPRATLITFLCDRDAGVGFPEYQEEDNSTYNFRWYTSYACPEEPLECVVTDPSTLEQYDLSSLAKSEGGLGGNWYAMDNSGEHVTWRKYYINVCRPLNPVPGCNRYASACQMKYEKDQGSFTEVVSISNLGMAKTGPVVEDSGSLLLEYVNGSACTTSDGRQTTYTTRIHLVCSRGRLNSHPIFSLNWECVVSFLWNTEAACPIQTTTDTDQACSIRDPNSGFVFNLNPLNSSQGYNVSGIGKIFMFNVCGTMPVCGTILGKPASGCEAETQTEELKNWKPARPVGIEKSLQLSTEGFITLTYKGPLSAKGTADAFIVRFVCNDDVYSGPLKFLHQDIDSGQGIRNTYFEFETALACVPSPVDCQVTDLAGNEYDLTGLSTVRKPWTAVDTSVDGRKRTFYLSVCNPLPYIPGCQGSAVGSCLVSEGNSWNLGVVQMSPQAAANGSLSIMYVNGDKCGNQRFSTRITFECAQISGSPAFQLQDGCEYVFIWRTVEACPVVRVEGDNCEVKDPRHGNLYDLKPLGLNDTIVSAGEYTYYFRVCGKLSSDVCPTSDKSKVVSSCQEKREPQGFHKVAGLLTQKLTYENGLLKMNFTGGDTCHKVYQRSTAIFFYCDRGTQRPVFLKETSDCSYLFEWRTQYACPPFDLTECSFKDGAGNSFDLSSLSRYSDNWEAITGTGDPEHYLINVCKSLAPQAGTEPCPPEAAACLLGGSKPVNLGRVRDGPQWRDGIIVLKYVDGDLCPDGIRKKSTTIRFTCSESQVNSRPMFISAVEDCEYTFAWPTATACPMKSNEHDDCQVTNPSTGHLFDLSSLSGRAGFTAAYSEKGLVYMSICGENENCPPGVGACFGQTRISVGKANKRLRYVDQVLQLVYKDGSPCPSKSGLSYKSVISFVCRPEARPTNRPMLISLDKQTCTLFFSWHTPLACEQATECSVRNGSSIVDLSPLIHRTGGYEAYDESEDDASDTNPDFYINICQPLNPMHGVPCPAGAAVCKVPIDGPPIDIGRVAGPPILNPIANEIYLNFESSTPCLADKHFNYTSLIAFHCKRGVSMGTPKLLRTSECDFVFEWETPVVCPDEVRMDGCTLTDEQLLYSFNLSSLSTSTFKVTRDSRTYSVGVCTFAVGPEQGGCKDGGVCLLSGTKGASFGRLQSMKLDYRHQDEAVVLSYVNGDRCPPETDDGVPCVFPFIFNGKSYEECIIESRAKLWCSTTADYDRDHEWGFCRHSNSYRTSSIIFKCDEDEDIGRPQVFSEVRGCDVTFEWKTKVVCPPKKLECKFVQKHKTYDLRLLSSLTGSWSLVHNGVSYYINLCQKIYKGPLGCSERASICRRTTTGDVQVLGLVHTQKLGVIGDKVVVTYSKGYPCGGNKTASSVIELTCTKTVGRPAFKRFDIDSCTYYFSWDSRAACAVKPQEVQMVNGTITNPINGKSFSLGDIYFKLFRASGDMRTNGDNYLYEIQLSSITSSRNPACSGANICQVKPNDQHFSRKVGTSDKTKYYLQDGDLDVVFASSSKCGKDKTKSVSSTIFFHCDPLVEDGIPEFSHETADCQYLFSWYTSAVCPLGVGFDSENPGDDGQMHKGLSERSQAVGAVLSLLLVALTCCLLALLLYKKERRETVISKLTTCCRRSSNVSYKYSKVNKEEETDENETEWLMEEIQLPPPRQGKEGQENGHITTKSVKALSSLHGDDQDSEDEVLTIPEVKVHSGRGAGAESSHPVRNAQSNALQEREDDRVGLVRGEKARKGKSSSAQQKTVSSTKLVSFHDDSDEDLLHI

SEQ ID NO: 1096 - protein, 1902 aa, Homo sapiens
MASGLGSPSPCSAGSEEEDMDALLNNSLPPPHPENEEDPEEDLSETETPKLKKKKKPKKPRDPKIPKSKRQKKERMLLCRQLGDSSGEGPEFVEEEEEVALRSDSEGSDYTPGKKKKKKLGPKKEKKSKSKRKEEEEEEDDDDDSKEPKSSAQLLEDWGMEDIDHVFSEEDYRTLTNYKAFSQFVRPLIAAKNPKIAVSKMMMVLGAKWREFSTNNPFKGSSGASVAAAAAAAVAVVESMVTATEVAPPPPPVEVPIRKAKTKEGKGPNARRKPKGSPRVPDAKKPKPKKVAPLKIKLGGFGSKRKRSSSEDDDLDVESDFDDASINSYSVSDGSTSRSSRSRKKLRTTKKKKKDHQDYCEVCQQGGEIILCDTCPRAYHMVCLDPDMEKAPEGKWSCPHCEKEGIQWEAKEDNSEGEEILEEVGGDLEEEDDHHMEFCRVCKDGGELLCCDTCPSSYHIHCLNPPLPEIPNGEWLCPRCTCPALKGKVQKILIWKWGQPPSPTPVPRPPDADPNTPSPKPLEGRPERQFFVKWQGMSYWHCSWVSELQLELHCQVMFRNYQRKNDMDEPPSGDFGGDEEKSRKRKNKDPKFAEMEERFYRYGIKPEWMMIHRILNHSVDKKGHVHYLIKWRDLPYDQASWESEDVEIQDYDLFKQSYWNHRELMRGEEGRPGKKLKKVKLRKLERPPETPTVDPTVKYERQPEYLDATGGTLHPYQMEGLNWLRFSWAQGTDTILADEMGLGKTVQTAVFLYSLYKEGHSKGPFLVSAPLSTIINWEREFEMWAPDMYVVTYVGDKDSRAIIRENEFSFEDNAIRGGKKASRMKKEASVKFHVLLTSYELITIDMAILGSIDWACLIVDEAHRLKNNQSKFFRVLNGYSLQHKLLLTGTPLQNNLEELFHLLNFLTPERFHNLEGFLEEFADIAKEDQIKKLHDMLGPHMLRRLKADVFKNMPSKTELIVRVELSPMQKKYYKYILTRNFEALNARGGGNQVSLLNVVMDLKKCCNHPYLFPVAAMEAPKMPNGMYDGSALIRASGKLLLLQKMLKNLKEGGHRVLIFSQMTKMLDLLEDFLEHEGYKYERIDGGITGNMRQEAIDRFNAPGAQQFCFLLSTRAGGLGINLATADTVIIYDSDWNPHNDIQAFSRAHRIGQNKKVMIYRFVTRASVEERITQVAKKKMMLTHLVVRPGLGSKTGSMSKQELDDILKFGTEELFKDEATDGGGDNKEGEDSSVIHYDDKAIERLLDRNQDETEDTELQGMNEYLSSFKVAQYVVREEEMGEEEEVEREIIKQEESVDPDYWEKLLRHHYEQQQEDLARNLGKGKRIRKQVNYNDGSQEDRDWQDDQSDNQSDYSVASEEGDEDFDERSEAPRRPSRKGLRNDKDKPLPPLLARVGGNIEVLGFNARQRKAFLNAIMRYGMPPQDAFTTQWLVRDLRGKSEKEFKAYVSLFMRHLCEPGADGAETFADGVPREGLSRQHVLTRIGVMSLIRKKVQEFEHVNGRWSMPELAEVEENKKMSQPGSPSPKTPTPSTPGDTQPNTPAPVPPAEDGIKIEENSLKEEESIEGEKEVKSTAPETAIECTQAPAPASEDEKVVVEPPEGEEKVEKAEVKERTEEPMETEPKGKGAADVEKVEEKSAIDLTPIVVEDKEEKKEEEEKKEVMLQNGETPKDLNDEKQKKNIKQRFMFNIADGGFTELHSLWQNEERAATVTKKTYEIWHRRHDYWLLAGIINHGYARWQDIQNDPRYAILNEPFKGEMNRGNFLEIKNKFLARRFKLLEQALVIEEQLRRAAYLNMSEDPSHPSMALNTRFAEVECLAESHQHLSKESMAGNKPANAVLHKGILKQLEELLSDMKADVTRLPATIARIPPVAVRLQMSERNILSRLANRAPEPTPQQVAQQQ

SEQ ID NO: 1097 - protein, 711 aa, Homo sapiens
MAGLTAAAPRPGVLLLLLSILHPSRPGGVPGAIPGGVPGGVFYPGAGLGALGGGALGPGGKPLKPVPGGLAGAGLGAGLGAFPAVTFPGALVPGGVADAAAAYKAAKAGAGLGGVPGVGGLGVSAAPSVPGAVVPQPGAGVKPGKVPGVGLPGVYPGGVLPGARFPGVGVLPGVPTGAGVKPKAPGVGGAFAGIPGVGPFGGPQPGVPLGYPIKAPKLPGGYGLPYTTGKLPYGYGPGGVAGAAGKAGYPTGTGVGPQAAAAAAAKAAAKFGAGAAGVLPGVGGAGVPGVPGAIPGIGGIAGVGTPAAAAAAAAAAKAAKYGAAAGLVPGGPGFGPGVVGVPGAGVPGVGVPGAGIPVVPGAGIPGAAVPGVVSPEAAAKAAAKAAKYGARPGVGVGGIPTYGVGAGGFPGFGVGVGGIPGVAGVPGVGGVPGVGGVPGVGISPEAQAAAAAKAAKYGVGTPAAAAAKAAAKAAQFGLVPGVGVAPGVGVAPGVGVAPGVGLAPGVGVAPGVGVAPGVGVAPGIGPGGVAAAAKSAAKVAAKAQLRAAAGLGAGIPGLGVGVGVPGLGVGAGVPGLGVGAGVPGFGAVPGALAAAKAAKYGAAVPGVLGGLGALGGVGIPGGVVGAGPAAAAAAAKAAAKAAQFGLVGAAGLGGLGVGGLGVPGVGGLGGIPPAAAAKAAKYGVAARPGFGLSPIFPGGACLGKACGRKRK

SEQ ID NO: 1098 - protein, 344 aa, Homo sapiens
MSGEPELIELRELAPAGRAGKGRTRLERANALRIARGTACNPTRQLVPGRGHRFQPAGPATHTWCDLCGDFIWGVVRKGLQCARLSADCKFTCHYRCRALVCLDCCGPRDLGWEPAVERDTNVDEPVEWETPDLSQAEIEQKIKEYNAQINSNLFMSLNKDGSYTGFIKVQLKLVRPVSVPSSKKPPSLQDARRGPGRGTSVRRRTSFYLPKDAVKHLHVLSRTRAREVIEALLRKFLVVDDPRKFALFERAERHGQVYLRKLLDDEQPLRLRLLAGPSDKALSFVLKENDSGEVNWDAFSMPELHNFLRILQREEEEHLRQILQKYSYCRQKIQEALHACPLG

SEQ ID NO: 1099 - protein, 487 aa, Homo sapiens
MSSPLASLSKTRKVPLPSEPMNPGRRGIRIYGDVPASHDSELMAFMTRKLWDLEQQVKAQTDEILSKDQKIAALEDLVQTLRPHPAEATLQRQEELETMCVQLQRQVREMERFLSDYGLQWVGEPMDQEDSESKTVSEHGERDWMTAKKFWKPGDSLAPPEVDFDRLLASLQDLSELVVEGDTQVTPVPGGARLRTLEPIPLKLYRNGIMMFDGPFQPFYDPSTQRCLRDILDGFFPSELQRLYPNGVPFKVSDLRNQVYLEDGLDPFPGEGRVVGRQLMHKALDRVEEHPGSRMTAEKFLNRLPKFVIRQGEVIDIRGPIRDTLQNCCPLPARIQEIVVETPTLAAERERSQESPNTPAPPLSMLRIKSENGEQAFLLMMQPDNTIGDVRALLAQARVMDASAFEIFSTFPPTLYQDDTLTLQAAGLVPKAALLLRARRAPKSSLKFSPGPCPGPGPGPSPGPGPGPSPGPGPGPSPCPGPSPSPQ

SEQ ID NO: 1100 - protein, 2863 aa, Homo sapiens
MASEDNRVPSPPPTGDDGGGGGREETPTEGGALSLKPGLPIRGIRMKFAVLTGLVEVGEVSNRDIVETVFNLLVGGQFDLEMNFIIQEGESINCMVDLLEKCDITCQAEVWSMFTAILKKSIRNLQVCTEVGLVEKVLGKIEKVDNMIADLLVDMLGVLASYNLTVRELKLFFSKLQGDKGRWPPHAGKLLSVLKHMPQKYGPDAFFNFPGKSAAAIALPPIAKWPYQNGFTFHTWLRMDPVNNINVDKDKPYLYCFRTSKGLGYSAHFVGGCLIVTSIKSKGKGFQHCVKFDFKPQKWYMVTIVHIYNRWKNSELRCYVNGELASYGEITWFVNTSDTFDKCFLGSSETADANRVFCGQMTAVYLFSEALNAAQIFAIYQLGLGYKGTFKFKAESDLFLAEHHKLLLYDGKLSSAIAFTYNPRATDAQLCLESSPKDNPSIFVHSPHALMLQDVKAVLTHSIQSAMHSIGGVQVLFPLFAQLDYRQYLSDEIDLTICSTLLAFIMELLKNSIAMQEQMLACKGFLVIGYSLEKSSKSHVSRAVLELCLAFSKYLSNLQNGMPLLKQLCDHVLLNPAIWIHTPAKVQLMLYTYLSTEFIGTVNIYNTIRRVGTVLLIMHTLKYYYWAVNPQDRSGITPKGLDGPRPNQKEMLSLRAFLLMFIKQLVMKDSGVKEDELQAILNYLLTMHEDDNLMDVLQLLVALMSEHPNSMIPAFDQRNGLRVIYKLLASKSEGIRVQALKAMGYFLKHLAPKRKAEVMLGHGLFSLLAERLMLQTNLITMTTYNVLFEILIEQIGTQVIHKQHPDPDSSVKIQNPQILKVIATLLRNSPQCPESMEVRRAFLSDMIKLFNNSRENRRSLLQCSVWQEWMLSLCYFNPKNSDEQKITEMVYAIFRILLYHAVKYEWGGWRVWVDTLSITHSKVTFEIHKENLANIFREQQGKVDEEIGLCSSTSVQAASGIRRDINVSVGSQQPDTKDSPVCPHFTTNGNENSSIEKTSSLESASNIELQTTNTSYEEMKAEQENQELPDEGTLEETLTNETRNADDLEVSSDIIEAVAISSNSFITTGKDSMTVSEVTASISSPSEEDASEMPEFLDKSIVEEEEDDDYVELKVEGSPTEEANLPTELQDNSLSPAASEAGEKLDMFGNDDKLIFQEGKPVTEKQTDTETQDSKDSGIQTMTASGSSAMSPETTVSQIAVESDLGQMLEEGKKATNLTRETKLINDCHGSVSEASSEQKIAKLDVSNVATDTERLELKASPNVEAPQPHRHVLEISRQHEQPGQGIAPDAVNGQRRDSRSTVFRIPEFNWSQMHQRLLTDLLFSIETDIQMWRSHSTKTVMDFVNSSDNVIFVHNTIHLISQVMDNMVMACGGILPLLSAATSATHELENIEPTQGLSIEASVTFLQRLISLVDVLIFASSLGFTEIEAEKSMSSGGILRQCLRLVCAVAVRNCLECQQHSQLKTRGDKALKPMHSLIPLGKSAAKSPVDIVTGGISPVRDLDRLLQDMDINRLRAVVFRDIEDSKQAQFLALAVVYFISVLMVSKYRDILEPQNERHSQSCTETGSENENVSLSEITPAAFSTLTTASVEESESTSSARRRDSGIGEETATGLGSHVEVTPHTAPPGVSAGPDAISEVLSTLSLEVNKSPETKNDRGNDLDTKATPSVSVSKNVNVKDILRSLVNIPADGVTVDPALLPPACLGALGDLSVEQPVQFRSFDRSVIVAAKKSAVSPSTFNTSIPTNAVSVVSSVDSAQASDMGGESPGSRSSNAKLPSVPTVDSVSQDPVSNMSITERLEHALEKAAPLLREIFVDFAPFLSRTLLGSHGQELLIEGTSLVCMKSSSSVVELVMLLCSQEWQNSIQKNAGLAFIELVNEGRLLSQTMKDHLVRVANEAEFILSRQRAEDIHRHAEFESLCAQYSADKREDEKMCDHLIRAAKYRDHVTATQLIQKIINILTDKHGAWGNSAVSRPLEFWRLDYWEDDLRRRRRFVRNPLGSTHPEATLKTAVEHVCIFKLRENSKATDEDILAKGKQSIRSQALGNQNSENEILLEGDDDTLSSVDEKDLENLAGPVSLSTPAQLVAPSVVVKGTLSVTSSELYFEVDEEDPNFKKIDPKILAYTEGLHGKWLFTEIRSIFSRRYLLQNTALEIFMANRVAVMFNFPDPATVKKVVNYLPRVGVGTSFGLPQTRRISLASPRQLFKASNMTQRWQHREISNFEYLMFLNTIAGRSYNDLNQYPVFPWVITNYESEELDLTLPTNFRDLSKPIGALNPKRAAFFAERYESWEDDQVPKFHYGTHYSTASFVLAWLLRIEPFTTYFLNLQGGKFDHADRTFSSISRAWRNSQRDTSDIKELIPEFYYLPEMFVNFNNYNLGVMDDGTVVSDVELPPWAKTSEEFVHINRLALESEFVSCQLHQWIDLIFGYKQQGPEAVRALNVFYYLTYEGAVNLNSITDPVLREAVEAQIRSFGQTPSQLLIEPHPPRGSAMQVSPLMFTDKAQQDVIMVLKFPSNSPVTHVAANTQPGLATPAVITVTANRLFAVNKWHNLPAHQGAVQDQPYQLPVEIDPLIASNTGMHRRQITDLLDQSIQVHSQCFVITSDNRYILVCGFWDKSFRVYSTDTGRLIQVVFGHWDVVTCLARSESYIGGNCYILSGSRDATLLLWYWNGKCSGIGDNPGSETAAPRAILTGHDYEVTCAAVCAELGLVLSGSQEGPCLIHSMNGDLLRTLEGPENCLKPKLIQASREGHCVIFYENGLFCTFSVNGKLQATMETDDNIRAIQLSRDGQYLLTGGDRGVVVVRQVSDLKQLFAYPGCDAGIRAMALSYDQRCIISGMASGSIVLFYNDFNRWHHEYQTRY

SEQ ID NO: 1101 - protein, 354 aa, Homo sapiens
MEAATAPEVAAGSKLKVKEASPADAEPPQASPGQGAGSPTPQLLPPIEEHPKIWLPRALRQTYIRKVGDTVNLLIPFQGKPKPQAIWTHDGCALDTRRVSVRNGEQDSILFIREAQRADSGRYQLRVQLGGLEATATIDILVIERPGPPQSIKLVDVWGFSATLEWTPPQDTGNTALLGYTVQKADTKSGLWFTVLEHYHRTSCIVSDLIIGNSYAFRVFAENQCGLSETAPITTDLAHIQKAATVYKTKGFAQRDFSEAPKFTQPLADCTTVTGYNTQLFCCVRASPRPKIIWLKNKMDIQGNPKYRALTHLGICSLEIRKPGPFDGGIYTCKAVNPLGEASVDCRVDVKVPN

SEQ ID NO: 1102 - protein, 1086 aa, Homo sapiens
MSPTQWDFPVELCCRPMAFVTLTGLDVVYNAVHRAVWDAFCANRRADRVPISFKVLPGDHEYPKCRPKRTSYEWYIPKGILKTGWMNKHLNLVPALVVVFYELDWDEPQWKEKQSECATRVEIVRQSLQGRNTKVAVVLIQKKTPLPPGEDVIASERAAALCNACELSGKSLFVLPHTDHLVGYIIRLENAFYEHAQTYYYTEIRRVKSHKEFLNKTTHQLLFVRHQFKIAFFSELKQDTQNALKNYRTAYNLVHELRAHETNILEIKTMAGFINYKICRLCFQHNTPLDAIAQFRKHIDLCKKKIGSAELSFEHDAWMSKQFQAFGDLFDEAIKLGLTAIQTQNPGFYYQQAAYYAQERKQLAKTLCNHEASVMYPNPDPLETQTGVLDFYGQRSWRQGILSFDLSDPEKEKVGILAIQLKERNVVHSEIIITLLSNAVAQFKKYKCPRMKSHLMVQMGEEYYYAKDYTKALKLLDYVMCDYRSEGWWTLLTSVLTTALKCSYLMAQLKDYITYSLELLGRASTLKDDQKSRIEKNLINVLMNESPDPEPDCDILAVKTAQKLWADRISLAGSNIFTIGVQDFVPFVQCKAKFHAPSFHVDVPVQFDIYLKADCPHPIRFSKLCVSFNNQEYNQFCVIEEASKANEVLENLTQGKMCLVPGKTRKLLFKFVAKTEDVGKKIEITSVDLALGNETGRCVVLNWQGGGGDAASSQEALQAARSFKRRPKLPDNEVHWDSIIIQASTMIISRVPNISVHLLHEPPALTNEMYCLVVTVQSHEKTQIRDVKLTAGLKPGQDANLTQKTHVTLHGTELCDESYPALLTDIPVGDLHPGEQLEKMLYVRCGTVGSRMFLVYVSYLINTTVEEKEIVCKCHKDETVTIETVFPFDVAVKFVSTKFEHLERVYADIPFLLMTDLLSASPWALTIVSSELQLAPSMTTVDQLESQVDNVILQTGESASECFCLQCPSLGNIEGGVATGHYIISWKRTSAMENIPIITTVITLPHVIVENIPLHVNADLPSFGRVRESLPVKYHLQNKTDLVQDVEISVEPSDAFMFSGLKQIRLPAQAFYTYQYFCQATGSTHG

SEQ ID NO: 1103 - protein, 608 aa, Homo sapiens
MARARAGALLALWVLGAAAHPQCLDFRPPFRPTQPLRLCAQYSDFGCCDEGRDAELTRRFWALASRVDAAEWAACAGYARDLLCQECSPYAAHLYDAEDPFTPLRTVPGLCQDYCLDMWHKCRGLFRHLSTDQELWALEGNLARFCRYLSLDDTDYCFPYLLVNKNLNSNLGHVVADAKGCLQLCLEEVANGLRNPVAMVHARDGTHRFFVAEQVGLVWAYLPDRSRLGKPFLNISRVVLTSPWEGDERGFLGIAFHPSFQHNRRLYVYYSVGIRSSEWIRISEFRVSEDDENAVDHSSERIILEVKEPASNHNGGQLLFGDDGYLYIFTGDGGMAGDPFGTFGNAQNKSALLGKVLRIDVDRKERGLPYGIPPDNPFVGDPAAQPEVYALGVRNMWRCSFDRGDPSSGTGRGRLFCGDVGQNKFEEVDVVERGGNYGWRAREGFECYDRSLCANTSLNDLLPIFAYPHTVGKSVTGGYVYRGCEYPNLNGLYIFGDFMSGRLMSLQENPGTGQWQYSEICMGHGQTCEFPGLINNYYPYIISFGEDEAGELYFMSTGEPSATAPRGVVYKIIDASSCKARSAMPGYVPAPSVCSSLTSQPFILQWWK

SEQ ID NO: 1104 - protein, 3371 aa, Homo sapiens
MSPCGRKMGEGRQQRRAPVGKLLLLPGRRDTPHGRSGSSGARTQRSLLWLLVHVWLWAASGSSAQLFNLTLSVDEGLPPDTLVGDIRAGLPAAQQQEGSGFFLSEDSDDSPLLDDFHVHPDTGIIRTARRLDRERRDHYSFVAATLLGAVVQVEIRVNDVNDHSPRFPLDSLQLDVSELSPPGTAFRLPVAHDPDAGLFSTQGYTLVQPSDLPKDPAGPFFQLRYRTPGPLPSPLLPGSSSPLEPLDLVLLRRLDREEAAAHRLQIEAWDGGRPRRTGLLSVELRVLDENDNPPVFEQDEYRAAVREDAQPGAEVCRVRATDRDLGPNGFVRYSVRARQVPGAGSGGGALGDAAYFAVEELSGVVRVWRPLDREAQAWHQLVVEARDGGAEPEVATVRVSIAVLDVNDNRPAIHVLFLTEGGVARVSEGARPGDYVARVSVSDADGDWEKEDEATGELGVGLGDGSISLSLEGGEGDFALLPGGPPGVFFLCVEGPLDRESRDLYELLLVATDAGSPPLSTEETLLLRVADLNDQPPLFSQQHYKASVSEAAAPGTVVMWVSASDADEAGSDHAWLRYTVVQLSAPCNLGSLQSKMVHTAECGPSFAIDSESGAISTIRTLDREVQEAVELKVVAQDLGEPPLSATCLVSITVDDVNDNEPIFWRQVYNATIAEHAPVGHCFLQVTASDADSGLYGFIEYSLYDGFLSYEAPQAFRIDPHDGQICVSQDIDRERDPATYDLLVEAKDGGGLSAQAFVRVDLEDVNDNHPVFNPSTYVTSISDETQPGTEIINVLATDQDSGIYGTVAYELIPGNVSSLFTIDSTTGIIYLTLPLSHLESTTLSLMVSAQDGGGLTAVINADVTIHIFQTTLAPAEFERPKYTFLVYEDVPEDSPIGTVKAREPLNSSEPIFYRISSGDLGGKFSIHPRLGTIRTRKPLDHETQPVVVLTVQAQLGSAPACSSTEVNITVMDVNDNHPAFLRTSDEIRISQTTPPGTALYLARAEDRDSGRNGLIRYSIASPQPGVFAIDRALGVLFLNGSLGAGEQRELTLTLRAEDQGVHPQAALLVLTVVIEKREHSPSWTFEHLVYQVEVSESLSPMTQMLQTQAHPLGPQRAASPLRYSLEPSVDSAMFGIRPYTGWIYLRRQFDYESTQTYNFRVFAWIPEDGFLQNVSTTVIVRVWDENDNSPTFLHDVLFLKVEESPVPQGVIGKITAIDMDSGKNGQLLYFLLSDGKFFKMNPNTGELINWVALDREHRGHHEMTVLVTDRGSPPRNATMAVYVSVTDINDNRPFFPQCLPGKELHVKVLEGQPVNMLVTTVFAKDPDEGNNAEVTYSVSSEDSSDHFKIDANNGEIRTTTILSYDYRPSYRMSVIATDQGVPPLQGQAVVNIQVIPLSKGRAIMSQNIRHLIIPENLKPTKIMSLIKSSDHLQQHYNGKLHFSIVADDKDGHFEIDSSTGDLFLSKELDYETTSHYLFRVITTDHSKNLSLSSTVFLSIDVEDQNDHSPSFQDELIVISVEENVPIGTLVYVFNAKDDDGSFLNSRIQYYIESHNPGTNPFLIHPSFGTLVTVSRLDRESIPTVILTVTASDQAVNVTDRRLRSLTAQIVILDVNDHNPTFISFPNAHVKEDVTVGSLVHHITAHDPDEGRNGKVTYSILSGNENMTFMLDESSGLLTTTCPLDYEMKTQHILTVLALDDGTPALSSSQTLTVTVLDVNDEAPVFKQHLYEASVKENQNPGEFVTRVEALDRDSGVNSKLQFEIMPGASFELFEINSDTGEVVTTTILDREIQEVFTLRVLVRDGGFPSLSSTTTILCTVEDENDHAPEFIVSSYDIEVLENQEPEVVYTVLASDMDAGNNRAVEYHIIDGNTDECFTINEMSGELSTTRALDREQISNFTLVILCSDLGDPPRSSVIHLQVRVLDANDHSPSFPTLYYQSSVREDAEVGTVVLVLSAVDKDEGLNGQTEYFLTDEASGAFTIDPMSGTLKTSNTLDREARSQHTFSAVARDCSIQGSRSTTVIIKVYVTDVNDNDPVLEQNPFDVFLSPESPTNQTTVIVRADDLDLGPNGTVVFSFAETQSMFSIDKYTGEIQFQQNPSSEYFPIWLQLKVTDQGIPARTTTGLLVIHMEGEDVKISFSHHLYKGLVTENCEAGTSIVTVKAFAPDSIQDSMKYSIFSGNEDGVLSLCSKSGQLTVKEPKFLDFEVRNEVQLIVLAESSGHRAYCKVAVLIQDENDNSPCFEQSIYQASVSESQLYNAHVIQVFATDLDSGLNGLIEYSILSGNQEEAFQIDALSGVITTKAILDYELTSSYSLIVQATDKGMPRLSNTTVIKVQVTDINDNAPAFLPSEAVEITEDSLPGVIVTHVSVHDVDLNSAFIFSFAKESNPGTKFAIDQNTGVVVLVKTLDFEEMTEYELLIQISDSVHYTEGALVVRVLDVNDNPPVFSQDFYQVTVPESIPVGYSVLTLSATDLESNENISYRILSSSKEFSIDPKNGTIFTISPVLLLDTISTTQFLVEASDGGNPDLRALTLVEIGIEDMNNYAPEFTVKSYNLSLSEDALVGSTLVTFSNIDHDWTRENTYVEYSIISGNSQNNFHVETKFFHSEYPYKQVGYLVLLHSLDREASASHELVILASDSGCPPLSSTAVISIQVLDVNDNPPNFSSLSYHTHVKESTPLGSHITVVSANDRDTGSHAEIIYNIISGNEKGHFYLEENTGVLYLIKPLDYEKMTKFTLTVQASDAEKKHFSFAVVFVSVLDDNDHAPQFMFSSFSCIVPENLPISSTICSINALDFDAGPYGELTYSIVSPCFLTHGMSYDHDLFLIDPLTGDIHAKQILDYENGNKYCLTVQAKDKGDATASLVVWVDIEGIDEFEPIFTQDQYFFTLPEKNKDRQLIGRVEASDADAGIDGVILYSLGTSSPFFSVNKTNGNIYLIRALPLIKSQLNKEDTLEMKIIAHSPKSDSKFASCTVFVNVSFSSEGTPLAVFASSFSISLVVSFLVFLILICILIVMILRHKQKDTINNYEEKKTSSLDADLRVTRDASVLKAFQKTDDCSNEVVPVDATPEWLSLISIMEKDIVNLYRHSNSSGHCSVEGETAEDKEIQRINEHPYRKCSDSALSDHESRVPDSGIPRDSDQLSCLSGETDVMVTAETAEASQTFGEGDQGEGCSTTCAQNNVLPQTVQKREAKESILADVRKESVFISGDQEVRCAALSTQTTSDHDGKDNYHWNYLLSWEPKFQPLASVFNDIAKLKDEHLHMPGIPKEKKSFVFPPPLITAVAQPGIKAVPPRMPAVNLGQVPPKHPRSPIPYHLGSLPEGMTPNFSPSLSLLTMQPPALSPLLREGELLGTHISGTCHELKAEDEVQI

SEQ ID NO: 1105 - protein, 2229 aa, Homo sapiens
MSDRLGQITKGKDGKSKYSTLSLFDKYKGKSVDAIRSSVIPRHGLQSLGKVAAARRMPPPANLPSLKSENKGNDPNIVIVPKDGTGWANKQDQQDPKSSSATASQPPESLPQPGLQKSVSNLQKPTQSISQENTNSVPGGPKSWAQLNGKPVGHEGGLRGSSRLLSFSPEEFPTLKAAGGQDKAGKEKGVLDLSYGPGPSLRPQNVTSWREGGGRHIISATSLSTSPTELGSRNSSTGDGAPSSACTSDSKDPSLRPAQPVRKGASQFMGNVYHPPTYHDMLPAFMCSPKSSENQGTVERGSFPLPQLRLEPRVPFRQFQMNDQDGKENRLGLSRPLRPLRQLVERAPRPTIINAENLKGLDDLDADADDGWAGLHEEVDYSEKLKFSDDEEEEEVVKDGRPKWNSWDPRRQRQLSMSSADSADAKRTREEGKDWAEAVGASRVVRKAPDPQPPPRKLHGWAPGPDYQKSSMGSMFRQQSIEDKEDKPPPRQKFIQSEMSEAVERARKRREEEERRAREERLAACAAKLKQLDQKCKQARKAGEARKQAEKEVPWSPSAEKASPQENGPAVHKGSPEFPAQETPTTFPEEAPTVSPAVAQSNSSEEEAREAGSPAQEFKYQKSLPPRFQRQQQQQQQEQLYKMQHWQPVYPPPSHPQRTFYPHHPQMLGFDPRWMMMPSYMDPRITPTRTPVDFYPSALHPSGLMKPMMPQESLNGTGCRSEDQNCVPPLQERKVTPIDSPPVWSPEGYMALQSKGYPLPHPKSSDTLAMDMRVRNESSFSASLGRAGGVSAQRDLFEERGEEYLSAFDKKAQADFDSCISSQRIGQELLFPPQENVQDAGAPGGHTQNLRCSPLEPDFVPDEKKPECGSWDVSHQPETADTAHGVERETPREGTAFNISSWDKNGSPNKQPSSEPEWTPEPRSSSSQHPEQTGRTRRSGPIKKPVLKALKVEDKEKELEKIKQELGEESTRLAKEKEQSPTAEKDEDEENDASLANSSTTTLEDKGPGHATFGREATKFEEEEKPDKAWEARPPRESSDVPPMKRNNWIFIDEEQAFGVRGQARGRGRGFREFTFRGRPAGGNGSGLCGGGVLGARSIYCSSQRSGRGRGLREFARPEDCPRAKPRRRVASETHSEGSEYEELPKRRRQRGSENGNEGSLLEREESTLKKGDCRDSWRSNKGCSEDHSGLDAKSRGPRAFGRALPPRLSNCGYGRRTFVSKESPHWQSKSPGSSWQEYGPSDTCGSRRPTDRDYVPDSYRHPDAFGGRGFEDSRAEDKRSFFQDEHVADSENAENRPFRRRRPPRQDKPPRFRRLRQERESLGLWGPEEEPHLLAGQWPGRPKLCSGDKSGTVGRRSPELSYQNSSDHANEEWETASESSDFSERRERREGPGSEPDSQVDGGLSGASLGEKKELAKRSFSSQRPVVDRQSRKLEPGGFGEKPVRPGGGDTSPRYESQQNGTPLKVKRSPDEALPGGLSGCSSGSGHSPYALERAAHASADLPEASSKKAEKEAKLAAPRAGEQGEAMKQFDLNYGSAIIENCGSSPGEESEVGSMVGEGFIEVLTKKQRRLLEEERRKKEQAVQVPVKGRGLSSRIPPRFAKKQNNLCLEQGDVTVPGSSLGTEIWESSSQALPVQAPANDSWRKAVTAFSSTETGSAEQGFKSSQGDSGVDLSAESRESSATSSQRSSPYGTLKPEEMSGPGLAEPKADSHKEQAPKPSEQKDSEQGSGQSKEHRPGPIGNERSLKNRKGSEGAERLQGAVVPPVNGVEIHVDSVLPVPPIEFGVSPKDSDFSLPPGSASGPTGSPVVKLQDALASNAGLTQSIPILRRDHHIQRAIGLSPMSFPTADLTLKMESARKAWENSPSLPEQSSPGGAGSGIQPPSSVGASSGVNYSSFGGVSMPPMPVASVAPSASMPGSHLPPLYLDGHVFASQPRLVPQTIPQQQSYQQAAAAQQIPISLHTSLQAQAQLGLRGGLPVSQSQEIFSSLQPFRSQVYMHPSLSPPSTMILSGGTALKPPYSAFPGMQPLEMVKPQSGSPYQPMSGNQALVYEGQLSQAAGLGASQMLDSQLPQLTMPLPRYGSGQQPLILPQSIQLPPGQSLSVGAPRRIPPPGSQPPVLNTSREPSQMEMKGFHFADSKQNVPSGGPVPSPQTYRPSSASPSGKPSGSAVNMGSVQGHYVQQAKQRVDEKPSLGAVKLQEAPSAASQMKRTGAIKPRAVKVEESKA

SEQ ID NO: 1106 - protein, 6824 aa, Homo sapiens
MASSPELPTEDEQGSWGIDDLHISLQAEQEDTQKKAFTCWINSQLARHTSPSVISDLFTDIKKGHVLLDLLEVLSGQQLPRDKGSNTFQCRINIEHALTFLRNRSIKLINIHVTDIIDGNPSIILGLIWTIILHFHIEKLAQTLSCNYNQPSLDDVSVVDSSPASSPPAKKCSKVQARWQMSARKALLLWAQEQCATYESVNVTDFKSSWRNGMAFLAIIHALRPDLIDMKSVKHRSNKDNLREAFRIAEQELKIPRLLEPEDVDVVDPDEKSIMTYVAQFLQYSKDAPGTGEEAQGKVKDAMGWLTLQKEKLQKLLKDSENDTYFKKYNSLLSFMESFNEEKKSFLDVLSIKRDLDELDKDHLQLREAWDGLDHQINAWKIKLNYALPPPLHQTEAWLQEVEELMDEDLSASQDHSQAVTLIQEKMTLFKSLMDRFEHHSNILLTFENKDENHLPLVPPNKLEEMKRRINNILEKKFILLLEFHYYKCLVLGLVDEVKSKLDIWNIKYGSRESVELLLEDWHKFIEEKEFLARLDTSFQKCGEIYKNLAGECQNINKQYMMVKSDVCMYRKNIYNVKSTLQKVLACWATYVENLRLLRACFEETKKEEIKEVPFETLAQWNLEHATLNEAGNFLVEVSNDVVGSSISKELRRLNKRWRKLVSKTQLEMNLPLMIKKQDQPTFDNSGNILSKEEKATVEFSTDMSVELPENYNQNIKAGEKHEKENEEFTGQLKVAKDVEKLIGQVEIWEAEAKSVLDQDDVDTSMEESLKHLIAKGSMFDELMARSEDMLQMDIQNISSQESFQHVLTTGLQAKIQEAKEKVQINVVKLIAALKNLTDVSPDLDIRLKMEESQKELESYMMRAQQLLGQRESPGELISKHKEALIISNTKSLAKYLKAVEELKNNVTEDIKMSLEEKSRDVCAKWESLHHELSLYVQQLKIDIEKGKLSDNILKLEKQINKEKKLIRRGRTKGLIKEHEACFSEEGCLYQLNHHMEVLRELCEELPSQKSQQEVKRLLKDYEQKIERLLKCASEIHMTLQPTAGGTSKNEGTITTSENRGGDPHSEAPFAKSDNQPSTEKAMEPTMKFSLASVLRPLQEESIMEKDYSASINSLLERYDTYRDILEHHLQNNKFRITSDFSSEEDRSSSCLQAKLTDLQVIKNETDARWKEFEIISLKLENHVNDIKKPFVIKERDTLKERERELQMTLNTRMESLETALRLVLPVEKASLLLCGSDLPLHKMAIQGFHLIDADRIYQHLRNIQDSIAKQIEICNRLEEPGNFVLKELHPFDLHAMQNIILKYKTQFEGMNHRVQRSEDTLKALEDFLASLRTAKLSAEPVTDLSASDTQVAQENTLTVKNKEGEIHLMKDKAKHLDKCLKMLDMSFKDAERGDDTSCENLLDAFSIKLSETHGYGVQEEFTEENKLLEACIFKNNELLKNIQDVQSQISKIGLKDPTVPAVKHRKKSLIRLDKVLDEYEEEKRHLQEMANSLPHFKDGREKTVNQQCQNTVVLWENTKALVTECLEQCGRVLELLKQYQNFKSILTTLIQKEESVISLQASYMGKENLKKRIAEIEIVKEEFNEHLEVVDKINQVCKNLQFYLNKMKTFEEPPFEKEANIIVDRWLDINEKTEDYYENLGRALALWDKLFNLKNVIDEWTEKALQKMELHQLTEEDRERLKEELQVHEQKTSEFSRRVAEIQFLLQSSEIPLELQVMESSILNKMEHVQKCLTGESNCHALSGSTAELREDLDQAKTQIGMTESLLKALSPSDSLEIFTKLEEIQQQILQQKHSMILLENQIGCLTPELSELKKQYESVSDLFNTKKSVLQDHFSKLLNDQCKNFNDWFSNIKVNLKECFESSETKKSVEQKLQKLSDFLTLEGRNSKIKQVDSVLKHVKKHLPKAHVKELISWLVGQEFELEKMESICQARAKELEDSLQQLLRLQDDHRNLRKWLTNQEEKWKGMEEPGEKTELFCQALARKREQFESVAQLNNSLKEYGFTEEEEIIMEATCLMDRYQTLLRQLSEIEEEDKLLPTEDQSFNDLAHDVIHWIKEIKESLMVLNSSEGKMPLEERIQKIKEIILLKPEGDARIETIMKQAESSEAPLVQKTLTDISNQWDNTLHLASTYLSHQEKLLLEGEKYLQSKEDLRLMLIELKKKQEAGFALQHGLQEKKAQLKIYKKFLKKAQDLTSLLKELKSQGNYLLECTKNPSFSEEPWLEIKHLHESLLQQLQDSVQNLDGHVREHDSYQVCVTDLNTTLDNFSKEFVSFSDKPVDQIAVEEKLQKLQELENRLSLQDGTLKKILALAKSVKQNTSSVGQKIIKDDIKSLQCKQKDLENRLASAKQEMECCLNSILKSKRSTEKKGKFTLPGREKQATSDVQESTQESAAVEKLEEDWEINKNFVENVMAVSKNCHHSMYIFESIVKNFISDEMQDSAVEMAMSKQLSLNAQESMKNTEDERKVNELQNQPLELDTMLRNEQLEEIEKLYTQLEAKKAAIKPLEQTECLNKTETGALVLHNIGYSAQHLDNLLQALITLKKNKESQYCVLRDFQEYLAAVESSMKALLTDKESLKVGPLDSVTYLDKIKKFIASIEKEKDSLGNLKIKWENLSNHVTDMDKKLLESQIKQLEHGWEQVEQQIQKKYSQQVVEYDEFTTLMNKVQDTEISLQQQQQHLQLRLKSPEERAGNQSMIALTTDLQATKHGFSVLKGQAELQMKRIWGEKEKKNLEDGINNLKKQWETLEPLHLEAENQIKKCDIRNKMKETILWAKNLLGELNPSIPLLPDDILSQIRKCKVTHDGILARQQSVESLAEEVKDKVPSLTTYEGSDLNNTLEDLRNQYQMLVLKSTQRSQQLEFKLEERSNFFAIIRKFQLMVQESETLIIPRVETAATEAELKHHHVTLEASQKELQEIDSGISTHLQELTNIYEELNVFERLFLEDQLKNLKIRTNRIQRFIQNTCNEVEHKIKFCRQFHEKTSALQEEADSIQRNELLLNQEVNKGVKEEIYNLKDRLTAIKCCILQVLKLKKVFDYIGLNWDFSQLDQLQTQVFEKEKELEEKIKQLDTFEEEHGKYQALLSKMRAIDLQIKKMTEVVLKAPDSSPESRRLNAQILSQRIEKAKCLCDEIIKKLNENKTFDDSFKEKEILQIKLNAEENDKLYKVLQNMVLELSPKELDEKNCQDKLETSLHVLNQIKSQLQQPLLINLEIKHIQNEKDNCEAFQEQVWAEMCSIKAVTAIEKQREENSSEASDVETKLREFEDLQMQLNTSIDLRTNVLNDAYENLTRYKEAVTRAVESITSLEAIIIPYRVDVGNPEESLEMPLRKQEELESTVAHIQDLTEKLGMISSPEAKLQLQYTLQELVSKNSAMKEAFKAQETEAERYLENYKCYRKMEEDIYTNLSKMETVLGQSMSSLPLSYREALERLEQSKALVSNLISTKEELMKLRQILRLLRLRCTENDGICLLKIVSALWEKWLSLLEAAKEWEMWCEELKQEWKFVSEEIEREAIILDNLQEELPEISKTKEAATTEELSELLDCLCQYGENVEKQQLLLTLLLQRIRSIQNVPESSGAVETVPAFQEITSMKERCNKLLQKVQKNKELVQTEIQERHSFTKEIIALKNFFQQTTTSFQNMAFQDHPEKSEQFEELQSILKKGKLTFENIMEKLRIKYSEMYTIVPAEIESQVEECRKALEDIDEKISNEVLKSSPSYAMRRKIEEINNGLHNVEKMLQQKSKNIEKAQEIQKKMWDELDLWHSKLNELDSEVQDIVEQDPGQAQEWMDNLMIPFQQYQQVSQRAECRTSQLNKATVKMEEYSDLLKSTEAWIENTSHLLANPADYDSLRTLSHHASTVQMALEDSEQKHNLLHSIFMDLEDLSIIFETDELTQSIQELSNQVTALQQKIMESLPQIQRMADDVVAIESEVKSMEKRVSKIKTILLSKEIFDFSPEEHLKHGEVILENIRPMKKTIAEIVSYQVELRLPQTGMKPLPVFQRTNQLLQDIKLLENVTQEQNELLKVVIKQTNEWDEEIENLKQILNNYSAQFSLEHMSPDQADKLPQLQGEIERMEKQILSLNQRKEDLLVDLKATVLNLHQHLKQEQEGVERDRLPAVTSEEGGVAERDASERKLNRRGSMSYLAAVEEEVEESSVKSDHDKDMEEDRASSSSGTIVQEAYGKISTSDNSMAQILTPDSLNTEQGPECSLRPNQTEEGTTPPIEADTLDSSDAQGGLEPRVEKTRPEPTEVLHACKTQVAELELWLQQANVAVEPETLNADMQQVLEQQLVGCQAMLTEIEHKVAFLLETCKDQGLGDNGATQHEAEALSLKLKTVKCNLEKVQMMLQEKHSEDQHPTILKKSSEPEHQEALQPVNLSELESIVTERPQFSRQKDFQQQQVLELKPMEQKDFIKFIEFNAKKMWPQYCQHDNDTTQESSARYPTTEELKTYTTQLEDLRQEASNLQTQENMTEEAYINLDKKLFELFLTLSQCLSSVEEMLEMPRLYREDGSGQQVHYETLALELKKLYLALSDKKGDLLKAMTWPGENTNLLLECFDNLQVCLEHTQAAAVCRSKSLKAGLDYNRSYQKADAYTVELENAESRVAKLRDEGERLHLPYALLQEVYKLEDVLDSMWGMLRARYTELSSPFVTESQQDALLQGMVELVKIGKEKLAHGHLKQTKSKVALQAQIENHKVFFQKLVADMLLIQAYSAKILPSLLQNRETFWAEQVTEVKILEEKSRQCGMKLQSLLQKWEEFDENYASLEKDLEILISTLPSVSLVEETEERLVERISFYQQIKRNIGGKHARLYQTLNEGKQLVASVSCPELEGQIAKLEEQWLSLNKKIDHELHRLQALLKHLLRSAFLGVYNRDSDQLTKWLESSQHTLNYWKEQSLNVSQDLDTIRSNINNFFEFSKEVDEKSSLKTAVISIGNQLLHLKETDTATLRASLAQFEQKWTMLITQLPDIQEKLHQLQMEKLPSRKAITEMISWMNNVEHQTSDEDSVHSPSSASQVKHLLQKHKEFRMEMDYKQWIVDFVNQSLLQLSTCDVESKRYERTEFAEHLGEMNRQWHRVHGMLNRKIQHLEQLLESITESENKIQILNNWLEAQEERLKTLQKPESVISVQKLLLDCQDIENQLAIKSKALDELKQSYLTLESGAVPLLEDTASRIDELFQKRSSVLTQVNQLKTSMQSVLQEWKIYDQLYDEVNMMTIRFWYCMEHSKPVVLSLETLRCQVENLQSLQDEAESSEGSWEKLQEVIGKLKGLCPSVAEIIEEKCQNTHKRWTQVNQAIADQLQKAQSLLQLWKAYSNAHGEAAARLKQQEAKFQQLANISMSGNNLAEILPPALQDIKELQHDVQKTKEAFLQNSSVLDRLPQPAESSTHMLLPGPLHSLQRAAYLEKMLLVKANEFENHVLALTAQSPDIEHLNEVSLKLPLSDVAVKTLQNMNRQWIRATATALERCSELQGIGLNEKFLYCCEKWIQLLEKIEEALKVDVANSLPELLEQQKTYKMLEAEVSINQTIADSYVTQSLQLLDTTEIENRPEFITEFSKLTDRWQNAVQGVRQRKGDVDGLNAHVARCGGASLKKQDLRYSLHTACGAALLCRSSHGANKEIHFQRRRTTCALTLEAGEKLLLTTDLKTKESVGRRISQLQDSWKDMEPQLAEMIKQFQSTVETWDQCEKKIKELKSRLQVLKAQSEDPLPELHEDLHNEKELIKVAIRKQEIEDRLNTWVVFNEKNKELCAWLVQMENKVLQTADISIEEMIEKLQKRTVGREEVPERWECETIVSGHGTEESCFLSIRKFHQGRGLHILTCQLIPQDCMEEINLFSENKLQLKQMGDQLIKASNKSRAAEIDDKLNKINDRWQHLFDVIGSSMADQTNSRWMFFQWPRGIQRTVTWPWDHLCSCASTGHTGPFHSSVLRCFEQHIEFGIYRRTYKVNKELGGDKNGQRCPIIYPHGLVQCIRLGEPLILKRVKKLKETFAFIQQLDKNMSNLRTWLARIESELSKPVVYDVCDDQEIQKRLAEQQDLQRDIEQHSAGVESVFNICDVLLHDSDACANETECDSIQQTTRSLDRRWRNICAMSMERRMKIEETWRLWQKFLDDYSRFEDWLKSAERTAACPNSSEVLYTSAKEELKRFERQIHERLTQLELINKQYRRLARENRTDTASRLKQMVHEGNQRWDNLQRRVTAVLRRLRHFTNQREEFEGTRESILVWLTEMDLQLTNVEHFSESDADDKMRQLNGFQQEITLNTNKIDQLIVFGEQLIQKSEPLDAVLIEDELEELHRYCQEGLEDEKEASENETDMEDPREIQTDSWRKRGESEEPSSPQSLCHLVAPGHERSGCETPVSVDSIPLEWDHTGDVGGSSSHEEDEEGPYYSALSGKSISDGHSWHVPDSPSCPEHHYKQMEGDRNVPPVPPASSTPYKPPYVSLNFTGSTAYVCAFDRWEMIQAQELHNKLKIKQNLQQLNSDISAITTWLKKTEAELEMLKMAKPPSDIQEIELRVKRLQEILKAFDTYKALVVSVNVSSKEFLQTESPESTELQSRLRQLSLLWEAAQGAVDSWRGGLRQSLMQCQDFHQLSQNLLLWLASAKNRRQKAHVTDPKADPRALLECRRELMQLEKELVERQPQVDMLQEISNSLLIKGHGEDCIEAEEKVHVIEKKLKQLREQVSQDLMALQGTQNPASPLPSFDEVDSGDQPPATSVPAPRAKFLYPAVQSSENYRRRGGDREQGPRQHTATALLPLKGGPGSPTPAAAPPAAAAPGLPAALLRRRLQLHSGQQLCPVLLPHAEVHQWATPHIEGIAGHSATPPA

SEQ ID NO: 1107 - protein, 720 aa, Homo sapiens
MNNHVSSKPSTMKLKHTINPILLYFIHFLISLYTILTYIPFYFFSESRQEKSNRIKAKPVNSKPDSAYRSVNSLDGLASVLYPGCDTLDKVFTYAKNKFKNKRLLGTREVLNEEDEVQPNGKIFKKVILGQYNWLSYEDVFVRAFNFGNGLQMLGQKPKTNIAIFCETRAEWMIAAQACFMYNFQLVTLYATLGGPAIVHALNETEVTNIITSKELLQTKLKDIVSLVPRLRHIITVDGKPPTWSEFPKGIIVHTMAAVEALGAKASMENQPHSKPLPSDIAVIMYTSGSTGLPKGVMISHSNIIAGITGMAERIPELGEEDVYIGYLPLAHVLELSAELVCLSHGCRIGYSSPQTLADQSSKIKKGSKGDTSMLKPTLMAAVPEIMDRIYKNVMNKVSEMSSFQRNLFILAYNYKMEQISKGRNTPLCDSFVFRKVRSLLGGNIRLLLCGGAPLSATTQRFMNICFCCPVGQGYGLTESAGAGTISEVWDYNTGRVGAPLVCCEIKLKNWEEGGYFNTDKPHPRGEILIGGQSVTMGYYKNEAKTKADFFEDENGQRWLCTGDIGEFEPDGCLKIIDRKKDLVKLQAGEYVSLGKVEAALKNLPLVDNICAYANSYHSYVIGFVVPNQKELTELARKKGLKGTWEELCNSCEMENEVLKVLSEAAISASLEKFEIPVKIRLSPEPWTPETGLVTDAFKLKRKELKTHYQADIERMYGRK

SEQ ID NO: 1108 - protein, 324 aa, Homo sapiens
MQKPQLLVPIIATSNGNLVHAAYFLLVGIPGLGPTIHFWLAFPLCFMYALATLGNLTIVLIIRVERRLHEPMYLFLAMLSTIDLVLSSITMPKMASLFLMGIQEIEFNICLAQMFLIHALSAVESAVLLAMAFDRFVAICHPLRHASVLTGCTVAKIGLSALTRGFVFFFPLPFILKWLSYCQTHTVTHSFCLHQDIMKLSCTDTRVNVVYGLFIILSVMGVDSLFIGFSYILILWAVLELSSRRAALKAFNTCISHLCAVLVFYVPLIGLSVVHRLGGPTSLLHVVMANTYLLLPPVVNPLVYGAKTKEICSRVLCMFSQGGK

SEQ ID NO: 1109 - protein, 634 aa, Homo sapiens
MSLVPATNYIYTPLNQLKGGTIVNVYGVVKFFKPPYLSKGTDYCSVVTIVDQTNVKLTCLLFSGNYEALPIIYKNGDIVRFHRLKIQVYKKETQGITSSGFASLTFEGTLGAPIIPRTSSKYFNFTTEDHKMVEALRVWASTHMSPSWTLLKLCDVQPMQYFDLTCQLLGKAEVDGASFLLKVWDGTRTPFPSWRVLIQDLVLEGDLSHIHRLQNLTIDILVYDNHVHVARSLKVGSFLRIYSLHTKLQSMNSENQTMLSLEFHLHGGTSYGRGIRVLPESNSDVDQLKKDLESANLTANQHSDVICQSEPDDSFPSSGSVSLYEVERCQQLSATILTDHQYLERTPLCAILKQKAPQQYRIRAKLRSYKPRRLFQSVKLHCPKCHLLQEVPHEGDLDIIFQDGATKTPDVKLQNTSLYDSKIWTTKNQKGRKVAVHFVKNNGILPLSNECLLLIEGGTLSEICKLSNKFNSVIPVRSGHEDLELLDLSAPFLIQGTIHHYGCKQCSSLRSIQNLNSLVDKTSWIPSSVAEALGIVPLQYVFVMTFTLDDGTGVLEAYLMDSDKFFQIPASEVLMDDDLQKSVDMIMDMFCPPGIKIDAYPWLECFIKSYNVTNGTDNQICYQIFDTTVAEDVI

SEQ ID NO: 1110 - protein, 875 aa, Homo sapiens [sequence omitted]

SEQ ID NO: 1111 - protein, 4551 aa, Homo sapiens
MSGAGGAFASPREVLLERPCWLDGGCEPARRGYLYQQLCCVDERDRVQKKTFTKWVNKHLIKAQRHISDLYEDLRDGHNLISLLEVLSGDSLPREKGRMRFHKLQNVQIALDYLRHRQVKLVNIRNDDIADGNPKLTLGLIWTIILHFQISDIQVSGQSEDMTAKEKLLLWSQRMVEGYQGLRCDNFTSSWRDGRLFNAIIHRHKPLLIDMNKVYRQTNLENLDQAFSVAERDLGVTRLLDPEDVDVPQPDEKSIITYVSSLYDAMPRVPDVQDGVRANELQLRWQEYRELVLLLLQWMRHHTAAFEERRFPSSFEEIEILWSQFLKFKEMELPAKEADKNRSKGIYQSLEGAVQAGQLKVPPGYHPLDVEKEWGKLHVAILEREKQLRSEFERLECLQRIVTKLQMEAGLCEEQLNQADALLQSDVRLLAAGKVPQRAGEVERDLDKADSMIRLLFNDVQTLKDGRHPQGEQMYRRVYRLHERLVAIRTEYNLRLKAGVAAPATQVAQVTLQSVQRRPELEDSTLRYLQDLLAWVEENQHRVDGAEWGVDLPSVEAQLGSHRGLHQSIEEFRAKIERARSDEGQLSPATRGAYRDCLGRLDLQYAKLLNSSKARLRSLESLHSFVAAATKELMWLNEKEEEEVGFDWSDRNTNMTAKKESYSALMRELELKEKKIKELQNAGDRLLREDHPARPTVESFQAALQTQWSWMLQLCCCIEAHLKENAAYFQFFSDVREAEGQLQKLQEALRRKYSCDRSATVTRLEDLLQDAQDEKEQLNEYKGHLSGLAKRAKAVVQLKPRHPAHPMRGRLPLLAVCDYKQVEVTVHKGDECQLVGPAQPSHWKVLSSSGSEAAVPSVCFLVPPPNQEAQEAVTRLEAQHQALVTLWHQLHVDMKSLLAWQSLRRDVQLIRSWSLATFRTLKPEEQRQALHSLELHYQAFLRDSQDAGGFGPEDRLMAEREYGSCSHHYQQLLQSLEQGAQEESRCQRCISELKDIRLQLEACETRTVHRLRLPLDKEPARECAQRIAEQQKAQAEVEGLGKGVARLSAEAEKVLALPEPSPAAPTLRSELELTLGKLEQVRSLSAIYLEKLKTISLVIRGTQGAEEVLRAHEEQLKEAQAVPATLPELEATKASLKKLRAQAEAQQPTFDALRDELRGAQEVGERLQQRHGERDVEVERWRERVAQLLERWQAVLAQTDVRQRELEQLGRQLRYYRESADPLGAWLQDARRRQEQIQAMPLADSQAVREQLRQEQALLEEIERHGEKVEECQRFAKQYINAIKDYELQLVTYKAQLEPVASPAKKPKVQSGSESVIQEYVDLRTHYSELTTLTSQYIKFISETLRRMEEEERLAEQQRAEERERLAEVEAALEKQRQLAEAHAQAKAQAEREAKELQQRMQEEVVRREEAAVDAQQQKRSIQEELQQLRQSSEAEIQAKARQAEAAERSRLRIEEEIRVVRLQLEATERQRGGAEGELQALRARAEEAEAQKRQAQEEAERLRRQVQDESQRKRQAEVELASRVKAEAEAAREKQRALQALEELRLQAEEAERRLRQAEVERARQVQVALETAQRSAEAELQSKRASFAEKTAQLERSLQEEHVAVAQLREEAERRAQQQAEAERAREEAERELERWQLKANEALRLRLQAEEVAQQKSLAQAEAEKQKEEAEREARRRGKAEEQAVRQRELAEQELEKQRQLAEGTAQQRLAAEQELIRLRAETEQGEQQRQLLEEELARLQREAAAATQKRQELEAELAKVRAEMEVLLASKARAEEESRSTSEKSKQRLEAEAGRFRELAEEAARLRALAEEAKRQRQLAEEDAARQRAEAERVLAEKLAAIGEATRLKTEAEIALKEKEAENERLRRLAEDEAFQRRRLEEQAAQHKADIEERLAQLRKASDSELERQKGLVEDTLRQRRQVEEEILALKASFEKAAAGKAELELELGRIRSNAEDTLRSKEQAELEAARQRQLAAEEERRRREAEERVQKSLAAEEEAARQRKAALEEVERLKAKVEEARRLRERAEQESARQLQLAQEAAQKRLQAEEKAHAFAVQQKEQELQQTLQQEQSVLDQLRGEAEAARRAAEEAEEARVQAEREAAQSRRQVEEAERLKQSAEEQAQARAQAQAAAEKLRKEAEQEAARRAQAEQAALRQKQAADAEMEKHKKFAEQTLRQKAQVEQELTTLRLQLEETDHQKNLLDEELQRLKAEATEAARQRSQVEEELFSVRVQMEELSKLKARIEAENRALILRDKDNTQRFLQEEAEKMKQVAEEAARLSVAAQEAARLRQLAEEDLAQQRALAEKMLKEKMQAVQEATRLKAEAELLQQQKELAQEQARRLQEDKEQMAQQLAEETQGFQRTLEAERQRQLEMSAEAERLKLRVAEMSRAQARAEEDAQRFRKQAEEIGEKLHRTELATQEKVTLVQTLEIQRQQSDHDAERLREAIAELEREKEKLQQEAKLLQLKSEEMQTVQQEQLLQETQALQQSFLSEKDSLLQRERFIEQEKAKLEQLFQDEVAKAQQLREEQQRQQQQMEQERQRLVASMEEARRRQHEAEEGVRRKQEELQQLEQQRRQQEELLAEENQRLREQLQLLEEQHRAALAHSEEVTASQVAATKTLPNGRDALDGPAAEAEPEHSFDGLRRKVSAQRLQEAGILSAEELQRLAQGHTTVDELARREDVRHYLQGRSSIAGLLLKATNEKLSVYAALQRQLLSPGTALILLEAQAASGFLLDPVRNRRLTVNEAVKEGVVGPELHHKLLSAERAVTGYKDPYTGQQISLFQAMQKGLIVREHGIRLLEAQIATGGVIDPVHSHRVPVDVAYRRGYFDEEMNRVLADPSDDTKGFFDPNTHENLTYLQLLERCVEDPETGLCLLPLTDKAAKGGELVYTDSEARDVFEKATVSAPFGKFQGKTVTIWEIINSEYFTAEQRRDLLRQFRTGRITVEKIIKIIITVVEEQEQKGRLCFEGLRSLVPAAELLESRVIDRELYQQLQRGERSVRDVAEVDTVRRALRGANVIAGVWLEEAGQKLSIYNALKKDLLPSDMAVALLEAQAGTGHIIDPATSARLTVDEAVRAGLVGPEFHEKLLSAEKAVTGYRDPYTGQSVSLFQALKKGLIPREQGLRLLDAQLSTGGIVDPSKSHRVPLDVACARGCLDEETSRALSAPRADAKAYSDPSTGEPATYGELQQRCRPDQLTGLSLLPLSEKAARARQEELYSELQARETFEKTPVEVPVGGFKGRTVTVWELISSEYFTAEQRQELLRQFRTGKVTVEKVIKILITIVEEVETLRQERLSFSGLRAPVPASELLASGVLSRAQFEQLKDGKTTVKDLSELGSVRTLLQGSGCLAGIYLEDTKEKVSIYEAMRRGLLRATTAALLLEAQAATGFLVDPVRNQRLYVHEAVKAGVVGPELHEQLLSAEKAVTGYRDPYSGSTISLFQAMQKGLVLRQHGIRLLEAQIATGGIIDPVHSHRVPVDVAYQRGYFSEEMNRVLADPSDDTKGFFDPNTHENLTYRQLLERCVEDPETGLRLLPLKGAEKAEVVETTQVYTEEETRRAFEETQIDIPGGGSHGGSTMSLWEVMQSDLIPEEQRAQLMADFQAGRVTKERMIIIIIEIIEKTEIIRQQGLASYDYVRRRLTAEDLFEARIISLETYNLLREGTRSLREALEAESAWCYLYGTGSVAGVYLPGSRQTLSIYQALKKGLLSAEVARLLLEAQAATGFLLDPVKGERLTVDEAVRKGLVGPELHDRLLSAERAVTGYRDPYTEQTISLFQAMKKELIPTEEALRLLDAQLATGGIVDPRLGFHLPLEVAYQRGYLNKDTHDQLSEPSEVRSYVDPSTDERLSYTQLLRRCRRDDGTGQLLLPLSDARKLTFRGLRKQITMEELVRSQVMDEATALQLREGLTSIEEVTKNLQKFLEGTSCIAGVFVDATKERLSVYQAMKKGIIRPGTAFELLEAQAATGYVIDPIKGLKLTVEEAVRMGIVGPEFKDKLLSAERAVTGYKDPYSGKLISLFQAMKKGLILKDHGIRLLEAQIATGGIIDPEESHRLPVEVAYKRGLFDEEMNEILTDPSDDTKGFFDPNTEENLTYLQLMERCITDPQTGLCLLPLKEKKRERKTSSKSSVRKRRVVIVDPETGKEMSVYEAYRKGLIDHQTYLELSEQECEWEEITISSSDGVVKSMIIDRRSGRQYDIDDAIAKNLIDRSALDQYRAGTLSITEFADMLSGNAGGFRSRSSSVGSSSSYPISPAVSRTQLASWSDPTEETGPVAGILDTETLEKVSITEAMHRNLVDNITGQRLLEAQACTGGIIDPSTGERFPVTDAVNKGLVDKIMVDRINLAQKAFCGFEDPRTKTKMSAAQALKKGWLYYEAGQRFLEVQYLTGGLIEPDTPGRVPLDEALQRGTVDARTAQKLRDVGAYSKYLTCPKTKLKISYKDALDRSMVEEGTGLRLLEAAAQSTKGYYSPYSVSGSGSTAGSRTGSRTGSRAGSRRGSFDATGSGFSMTFSSSSYSSSGYGRRYASGSSASLGGPESAVA

SEQ ID NO: 1112 - protein, 651 aa, Homo sapiens
MLREEATKKSKEKEPGMALPQGRLTFRDVAIEFSLEEWKCLNPAQRALYRAVMLENYRNLEFVDSSLKSMMEFSSTRHSITGEVIHTGTLQRHKSHHIGDFCFPEMKKDIHHFEFQWQEVERNGHEAPMTKIKKLTGSTDRSDHRHAGNKPIKDQLGLSFHSHLPELHMFQTKGKISNQLDKSIGASSASESQRISCRLKTHISNKYGKNFLHSSFTQIQEICMREKPCQSNECGKAFNYSSLLRRHHITHSREREYKCDVCGKIFNQKQYIVYHHRCHTGEKTYKCNECGKTFTQMSSLVCHRRLHTGEKPYKCNECGKTFSEKSSLRCHRRLHTGEKPYKCNECGKTFGRNSALVIHKAIHTGEKPYKCNECGKTFSQKSSLQCHHILHTGEKPYKCEECDNVYIRRSHLERHRKIHTGEGSYKCKVCDKVFRSDSYLAEHQRVHTGEKPYKCNKCGRSFSRKSSLQYHHTLHTGEKPYTCNECGKVFSRRENLARHHRLHAGEKPYKCEECDKVFSRRSHLERHRRIHTGEKPYKCKVCDKAFRSDSCLANHTRVHTGEKPYKCNKCAKVFNQKGILAQHQRVHTGEKPYKCNECGKVFNQKASLAKHQRVHTAEKPYKCNECGKAFTGQSTLIHHQAIHGCRETLQM

SEQ ID NO: 1113 - protein, 915 aa, Homo sapiens
MVQLRKLLRVLTLMKFPCCVLEVLLCALAAAARGQEMYAPHSIRIEGDVTLGGLFPVHAKGPSGVPCGDIKRENGIHRLEAMLYALDQINSDPNLLPNVTLGARILDTCSRDTYALEQSLTFVQALIQKDTSDVRCTNGEPPVFVKPEKVVGVIGASGSSVSIMVANILRLFQIPQISYASTAPELSDDRRYDFFSRVVPPDSFQAQAMVDIVKALGWNYVSTLASEGSYGEKGVESFTQISKEAGGLCIAQSVRIPQERKDRTIDFDRIIKQLLDTPNSRAVVIFANDEDIKQILAAAKRADQVGHFLWVGSDSWGSKINPLHQHEDIAEGAITIQPKRATVEGFDAYFTSRTLENNRRNVWFAEYWEENFNCKLTISGSKKEDTDRKCTGQERIGKDSNYEQEGKVQFVIDAVYAMAHALHHMNKDLCADYRGVCPEMEQAGGKKLLKYIRNVNFNGSAGTPVMFNKNGDAPGRYDIFQYQTTNTSNPGYRLIGQWTDELQLNIEDMQWGKGVREIPASVCTLPCKPGQRKKTQKGTPCCWTCEPCDGYQYQFDEMTCQHCPYDQRPNENRTGCQDIPIIKLEWHSPWAVIPVFLAMLGIIATIFVMATFIRYNDTPIVRASGRELSYVLLTGIFLCYIITFLMIAKPDVAVCSFRRVFLGLGMCISYAALLTKTNRIYRIFEQGKKSVTAPRLISPTSQLAITSSLISVQLLGVFIWFGVDPPNIIIDYDEHKTMNPEQARGVLKCDITDLQIICSLGYSILLMVTCTVYAIKTRGVPENFNEAKPIGFTMYTTCIVWLAFIPIFFGTAQSAEKLYIQTTTLTISMNLSASVALGMLYMPKVYIIIFHPELNVQKRKRSFKAVVTAATMSSRLSHKPSDRPNGEAKTELCENVDPNSPAAKKKYVSYNNLVI

SEQ ID NO: 1114 - protein, 658 aa, Homo sapiens
MFVSYLILTLLHVQTAVLARPGGESIGCDDYLGSDKVVDKCGVCGGDNTGCQVVSGVFKHALTSLGYHRVVEIPEGATKINITEMYKSNNYLALRSRSGRSIINGNWAIDRPGKYEGGGTMFTYKRPNEISSTAGESFLAEGPTNEILDVYMIHQQPNPGVHYEYVIMGTNAISPQVPPHRRPGEPFNGQMVTEGRSQEEGEQKGRNEEKEDLRGEAPEMFTSESAQTFPVRHPDRFSPHRPDNLVPPAPQPPRRSRDHNWKQLGTTECSTTCGKGSQYPIFRCVHRSTHEEAPESYCDSSMKPTPEEEPCNIFPCPAFWDIGEWSECSKTCGLGMQHRQVLCRQVYANRSLTVQPYRCQHLEKPETTSTCQLKICSEWQIRTDWTSCSVPCGVGQRTRDVKCVSNIGDVVDDEECNMKLRPNDIENCDMGPCAKSWFLTEWSERCSAECGAGVRTRSVVCMTNHVSSLPLEGCGNNRPAEATPCDNGPCTGKVEWFAGSWSQCSIECGSGTQQREVICVRKNADTFEVLDPSECSFLEKPPSQQSCHLKPCGAKWFSTEWSMCSKSCQGGFRVREVRCLSDDMTLSNLCDPQLKPEERESCNPQDCVPEVDENCKDKYYNCNVVVQARLCVYNYYKTACCASCTRVANRQTGFLGSR

SEQ ID NO: 1115 - protein, 396 aa, Homo sapiens
MFLKAVVLTLALVAVAGARAEVSADQVATVMWDYFSQLSNNAKEAVEHLQKSELTQQLNALFQDKLGEVNTYAGDLQKKLVPFATELHERLAKDSEKLKEEIGKELEELRARLLPHANEVSQKIGDNLRELQQRLEPYADQLRTQVSTQAEQLRRQLTPYAQRMERVLRENADSLQASLRPHADELKAKIDQNVEELKGRLTPYADEFKVKIDQTVEELRRSLAPYAQDTQEKLNHQLEGLTFQMKKNAEELKARISASAEELRQRLAPLAEDVRGNLRGNTEGLQKSLAELGGHLDQQVEEFRRRVEPYGENFNKALVQQMEQLRQKLGPHAGDVEGHLSFLEKDLRDKVNSFFSTFKEKESQDKTLSLPELEQQQEQQQEQQQEQVQMLAPLES

SEQ ID NO: 1116 - protein, 420 aa, Homo sapiens
METFDPTELPELLKLYYRRLFPYSQYYRWLNYGGVIKNYFQHREFSFTLKDDIYIRYQSFNNQSDLEKEMQKMNPYKIDIGAVYSHRPNQHNTVKLGAFQAQEKELVFDIDMTDYDDVRRCCSSADICPKCWTLMTMAIRIIDRALKEDFGFKHRLWVYSGRRGVHCWVCDESVRKLSSAVRSGIVEYLSLVKGGQDVKKKVHLSEKIHPFIRKSINIIKKYFEEYALVNQDILENKESWDKILALVPETIHDELQQSFQKSHNSLQRWEHLKKVASRYQNNIKNDKYGPWLEWEIMLQYCFPRLDINVSKGINHLLKSPFSVHPKTGRISVPIDLQKVDQFDPFTVPTISFICRELDAISTNEEEKEENEAESDVKHRTRDYKKTSLAPYVKVFEHFLENLDKSRKGELLKKSDLQKDF

SEQ ID NO: 1117 - protein, 2176 aa, Homo sapiens
MLRGPGPGLLLLAVQCLGTAVPSTGASKSKRQAQQMVQPQSPVAVSQSKPGCYDNGKHYQINQQWERTYLGNALVCTCYGGSRGFNCESKPEAEETCFDKYTGNTYRVGDTYERPKDSMIWDCTCIGAGRGRISCTIANRCHEGGQSYKIGDTWRRPHETGGYMLECVCLGNGKGEWTCKPIAEKCFDHAAGTSYVVGETWEKPYQGWMMVDCTCLGEGSGRITCTSRNRCNDQDTRTSYRIGDTWSKKDNRGNLLQCICTGNGRGEWKCERHTSVQTTSSGSGPFTDVRAAVYQPQPHPQPPPYGHCVTDSGVVYSVGMQWLKTQGNKQMLCTCLGNGVSCQETAVTQTYGGNSNGEPCVLPFTYNGRTFYSCTTEGRQDGHLWCSTTSNYEQDQKYSFCTDHTVLVQTRGGNSNGALCHFPFLYNNHNYTDCTSEGRRDNMKWCGTTQNYDADQKFGFCPMAAHEEICTTNEGVMYRIGDQWDKQHDMGHMMRCTCVGNGRGEWTCIAYSQLRDQCIVDDITYNVNDTFHKRHEEGHMLNCTCFGQGRGRWKCDPVDQCQDSETGTFYQIGDSWEKYVHGVRYQCYCYGRGIGEWHCQPLQTYPSSSGPVEVFITETPSQPNSHPIQWNAPQPSHISKYILRWRPKNSVGRWKEATIPGHLNSYTIKGLKPGVVYEGQLISIQQYGHQEVTRFDFTTTSTSTPVTSNTVTGETTPFSPLVATSESVTEITASSFVVSWVSASDTVSGFRVEYELSEEGDEPQYLDLPSTATSVNIPDLLPGRKYIVNVYQISEDGEQSLILSTSQTTAPDAPPDTTVDQVDDTSIVVRWSRPQAPITGYRIVYSPSVEGSSTELNLPETANSVTLSDLQPGVQYNITIYAVEENQESTPVVIQQETTGTPRSDTVPSPRDLQFVEVTDVKVTIMWTPPESAVTGYRVDVIPVNLPGEHGQRLPISRNTFAEVTGLSPGVTYYFKVFAVSHGRESKPLTAQQTTKLDAPTNLQFVNETDSTVLVRWTPPRAQITGYRLTVGLTRRGQPRQYNVGPSVSKYPLRNLQPASEYTVSLVAIKGNQESPKATGVFTTLQPGSSIPPYNTEVTETTIVITWTPAPRIGFKLGVRPSQGGEAPREVTSDSGSIVVSGLTPGVEYVYTIQVLRDGQERDAPIVNKVVTPLSPPTNLHLEANPDTGVLTVSWERSTTPDITGYRITTTPTNGQQGNSLEEVVHADQSSCTFDNLSPGLEYNVSVYTVKDDKESVPISDTIIPAVPPPTDLRFTNIGPDTMRVTWAPPPSIDLTNFLVRYSPVKNEEDVAELSISPSDNAVVLTNLLPGTEYVVSVSSVYEQHESTPLRGRQKTGLDSPTGIDFSDITANSFTVHWIAPRATITGYRIRHHPEHFSGRPREDRVPHSRNSITLTNLTPGTEYVVSIVALNGREESPLLIGQQSTVSDVPRDLEVVAATPTSLLISWDAPAVTVRYYRITYGETGGNSPVQEFTVPGSKSTATISGLKPGVDYTITVYAVTGRGDSPASSKPISINYRTEIDKPSQMQVTDVQDNSISVKWLPSSSPVTGYRVTTTPKNGPGPTKTKTAGPDQTEMTIEGLQPTVEYVVSVYAQNPSGESQPLVQTAVTTIPAPTDLKFTQVTPTSLSAQWTPPNVQLTGYRVRVTPKEKTGPMKEINLAPDSSSVVVSGLMVATKYEVSVYALKDTLTSRPAQGVVTTLENVSPPRRARVTDATETTITISWRTKTETITGFQVDAVPANGQTPIQRTIKPDVRSYTITGLQPGTDYKIYLYTLNDNARSSPVVIDASTAIDAPSNLRFLATTPNSLLVSWQPPRARITGYIIKYEKPGSPPREVVPRPRPGVTEATITGLEPGTEYTIYVIALKNNQKSEPLIGRKKTGQEALSQTTISWAPFQDTSEYIISCHPVGTDEEPLQFRVPGTSTSATLTGLTRGATYNVIVEALKDQQRHKVREEVVTVGNSVNEGLNQPTDDSCFDPYTVSHYAVGDEWERMSESGFKLLCQCLGFGSGHFRCDSSRWCHDNGVNYKIGEKWDRQGENGQMMSCTCLGNGKGEFKCDPHEATCYDDGKTYHVGEQWQKEYLGAICSCTCFGGQRGWRCDNCRRPGGEPSPEGTTGQSYNQYSQRYHQRTNTNVNCPIECFMPLDVQADREDSRE

SEQ ID NO: 1118 - protein, 751 aa, Homo sapiens
MLPGLALLLLAAWTARALEVPTDGNAGLLAEPQIAMFCGRLNMHMNVQNGKWDSDPSGTKTCIDTKEGILQYCQEVYPELQITNVVEANQPVTIQNWCKRGRKQCKTHPHFVIPYRCLVGEFVSDALLVPDKCKFLHQERMDVCETHLHWHTVAKETCSEKSTNLHDYGMLLPCGIDKFRGVEFVCCPLAEESDNVDSADAEEDDSDVWWGGADTDYADGSEDKVVEVAEEEEVAEVEEEEADDDEDDEDGDEVEEEAEEPYEEATERTTSIATTTTTTTESVEEVVREVCSEQAETGPCRAMISRWYFDVTEGKCAPFFYGGCGGNRNNFDTEEYCMAVCGSAIPTTAASTPDAVDKYLETPGDENEHAHFQKAKERLEAKHRERMSQVMREWEEAERQAKNLPKADKKAVIQHFQEKVESLEQEAANERQQLVETHMARVEAMLNDRRRLALENYITALQAVPPRPRHVFNMLKKYVRAEQKDRQHTLKHFEHVRMVDPKKAAQIRSQVMTHLRVIYERMNQSLSLLYNVPAVAEEIQDEVDELLQKEQNYSDDVLANMISEPRISYGNDALMPSLTETKTTVELLPVNGEFSLDDLQPWHSFGADSVPANTENEVEPVDARPAADRGLTTRPGSGLTNIKTEEISEVKMDAEFRHDSGYEVHHQKLVFFAEDVGSNKGAIIGLMVGGVVIATVIVITLVMLKKKQYTSIHHGVVEVDAAVTPEERHLSKMQQNGYENPTYKFFEQMQN

SEQ ID NO: 1119 - protein, 6907 aa, Homo sapiens
MASSPELPTEDEQGSWGIDDLHISLQAEQEDTQKKAFTCWINSQLARHTSPSVISDLFTDIKKGHVLLDLLEVLSGQQLPRDKGSNTFQCRINIEHALTFLRNRSIKLINIHVTDIIDGNPSIILGLIWTIILHFHIEKLAQTLSCNYNQPSLDDVSVVDSSPASSPPAKKCSKVQARWQMSARKALLLWAQEQCATYESVNVTDFKSSWRNGMAFLAIIHALRPDLIDMKSVKHRSNKDNLREAFRIAEQELKIPRLLEPEDVDVVDPDEKSIMTYVAQFLQYSKDAPGTGEEAQGKVKDAMGWLTLQKEKLQKLLKDSENDTYFKKYNSLLSFMESFNEEKKSFLDVLSIKRDLDELDKDHLQLREAWDGLDHQINAWKIKLNYALPPPLHQTEAWLQEVEELMDEDLSASQDHSQAVTLIQEKMTLFKSLMDRFEHHSNILLTFENKDENHLPLVPPNKLEEMKRRINNILEKKFILLLEFHYYKCLVLGLVDEVKSKLDIWNIKYGSRESVELLLEDWHKFIEEKEFLARLDTSFQKCGEIYKNLAGECQNINKQYMMVKSDVCMYRKNIYNVKSTLQKVLACWATYVENLRLLRACFEETKKEEIKEVPFETLAQWNLEHATLNEAGNFLVEVSNDVVGSSISKELRRLNKRWRKLVSKTQLEMNLPLMIKKQDQPTFDNSGNILSKEEKATVEFSTDMSVELPENYNQNIKAGEKHEKENEEFTGQLKVAKDVEKLIGQVEIWEAEAKSVLDQDDVDTSMEESLKHLIAKGSMFDELMARSEDMLQMDIQNISSQESFQHVLTTGLQAKIQEAKEKVQINVVKLIAALKNLTDVSPDLDIRLKMEESQKELESYMMRAQQLLGQRESPGELISKHKEALIISNTKSLAKYLKAVEELKNNVTEDIKMSLEEKSRDVCAKWESLHHELSLYVQQLKIDIEKGKLSDNILKLEKQINKEKKLIRRGRTKGLIKEHEACFSEEGCLYQLNHHMEVLRELCEELPSQKSQQEVKRLLKDYEQKIERLLKCASEIHMTLQPTAGGTSKNEGTITTSENRGGDPHSEAPFAKSDNQPSTEKAMEPTMKFSLASVLRPLQEESIMEKDYSASINSLLERYDTYRDILEHHLQNNKFRITSDFSSEEDRSSSCLQAKLTDLQVIKNETDARWKEFEIISLKLENHVNDIKKPFVIKERDTLKERERELQMTLNTRMESLETALRLVLPVEKASLLLCGSDLPLHKMAIQGFHLIDADRIYQHLRNIQDSIAKQIEICNRLEEPGNFVLKELHPFDLHAMQNIILKYKTQFEGMNHRVQRSEDTLKALEDFLASLRTAKLSAEPVTDLSASDTQVAQENTLTVKNKEGEIHLMKDKAKHLDKCLKMLDMSFKDAERGDDTSCENLLDAFSIKLSETHGYGVQEEFTEENKLLEACIFKNNELLKNIQDVQSQISKIGLKDPTVPAVKHRKKSLIRLDKVLDEYEEEKRHLQEMANSLPHFKDGREKTVNQQCQNTVVLWENTKALVTECLEQCGRVLELLKQYQNFKSILTTLIQKEESVISLQASYMGKENLKKRIAEIEIVKEEFNEHLEVVDKINQVCKNLQFYLNKMKTFEEPPFEKEANIIVDRWLDINEKTEDYYENLGRALALWDKLFNLKNVIDEWTEKALQKMELHQLTEEDRERLKEELQVHEQKTSEFSRRVAEIQFLLQSSEIPLELQVMESSILNKMEHVQKCLTGESNCHALSGSTAELREDLDQAKTQIGMTESLLKALSPSDSLEIFTKLEEIQQQILQQKHSMILLENQIGCLTPELSELKKQYESVSDLFNTKKSVLQDHFSKLLNDQCKNFNDWFSNIKVNLKECFESSETKKSVEQKLQKLSDFLTLEGRNSKIKQVDSVLKHVKKHLPKAHVKELISWLVGQEFELEKMESICQARAKELEDSLQQLLRLQDDHRNLRKWLTNQEEKWKGMEEPGEKTELFCQALARKREQFESVAQLNNSLKEYGFTEEEEIIMEATCLMDRYQTLLRQLSEIEEEDKLLPTEDQSFNDLAHDVIHWIKEIKESLMVLNSSEGKMPLEERIQKIKEIILLKPEGDARIETIMKQAESSEAPLVQKTLTDISNQWDNTLHLASTYLSHQEKLLLEGEKYLQSKEDLRLMLIELKKKQEAGFALQHGLQEKKAQLKIYKKFLKKAQDLTSLLKELKSQGNYLLECTKNPSFSEEPWLEIKHLHESLLQQLQDSVQNLDGHVREHDSYQVCVTDLNTTLDNFSKEFVSFSDKPVDQIAVEEKLQKLQELENRLSLQDGTLKKILALAKSVKQNTSSVGQKIIKDDIKSLQCKQKDLENRLASAKQEMECCLNSILKSKRSTEKKGKFTLPGREKQATSDVQESTQESAAVEKLEEDWEINKDSAVEMAMSKQLSLNAQESMKNTEDERKVNELQNQPLELDTMLRNEQLEEIEKLYTQLEAKKAAIKPLEQTECLNKTETGALVLHNIGYSAQHLDNLLQALITLKKNKESQYCVLRDFQEYLAAVESSMKALLTDKESLKVGPLDSVTYLDKIKKFIASIEKEKDSLGNLKIKWENLSNHVTDMDKKLLESQIKQLEHGWEQVEQQIQKKYSQQVVEYDEFTTLMNKVQDTEISLQQQQQHLQLRLKSPEERAGNQSMIALTTDLQATKHGFSVLKGQAELQMKRIWGEKEKKNLEDGINNLKKQWETLEPLHLEAENQIKKCDIRNKMKETILWAKNLLGELNPSIPLLPDDILSQIRKCKVTHDGILARQQSVESLAEEVKDKVPSLTTYEGSDLNNTLEDLRNQYQMLVLKSTQRSQQLEFKLEERSNFFAIIRKFQLMVQESETLIIPRVETAATEAELKHHHVTLEASQKELQEIDSGISTHLQELTNIYEELNVFERLFLEDQLKNLKIRTNRIQRFIQNTCNEVEHKIKFCRQFHEKTSALQEEADSIQRNELLLNQEVNKGVKEEIYNLKDRLTAIKCCILQVLKLKKVFDYIGLNWDFSQLDQLQTQVFEKEKELEEKIKQLDTFEEEHGKYQALLSKMRAIDLQIKKMTEVVLKAPDSSPESRRLNAQILSQRIEKAKCLCDEIIKKLNENKTFDDSFKEKEILQIKLNAEENDKLYKVLQNMVLELSPKELDEKNCQDKLETSLHVLNQIKSQLQQPLLINLEIKHIQNEKDNCEAFQEQVWAEMCSIKAVTAIEKQREENSSEASDVETKLREFEDLQMQLNTSIDLRTNVLNDAYENLTRYKEAVTRAVESITSLEAIIIPYRVDVGNPEESLEMPLRKQEELESTVAHIQDLTEKLGMISSPEAKLQLQYTLQELVSKNSAMKEAFKAQETEAERYLENYKCYRKMEEDIYTNLSKMETVLGQSMSSLPLSYREALERLEQSKALVSNLISTKEELMKLRQILRLLRLRCTENDGICLLKIVSALWEKWLSLLEAAKEWEMWCEELKQEWKFVSEEIEREAIILDNLQEELPEISKTKEAATTEELSELLDCLCQYGENVEKQQLLLTLLLQRIRSIQNVPESSGAVETVPAFQEITSMKERCNKLLQKVQKNKELVQTEIQERHSFTKEIIALKNFFQQTTTSFQNMAFQDHPEKSEQFEELQSILKKGKLTFENIMEKLRIKYSEMYTIVPAEIESQVEECRKALEDIDEKISNEVLKSSPSYAMRRKIEEINNGLHNVEKMLQQKSKNIEKAQEIQKKMWDELDLWHSKLNELDSEVQDIVEQDPGQAQEWMDNLMIPFQQYQQVSQRAECRTSQLNKATVKMEEYSDLLKSTEAWIENTSHLLANPADYDSLRTLSHHASTVQMALEDSEQKHNLLHSIFMDLEDLSIIFETDELTQSIQELSNQVTALQQKIMESLPQIQRMADDVVAIESEVKSMEKRVSKIKTILLSKEIFDFSPEEHLKHGEVILENIRPMKKTIAEIVSYQVELRLPQTGMKPLPVFQRTNQLLQDIKLLENVTQEQNELLKVVIKQTNEWDEEIENLKQILNNYSAQFSLEHMSPDQADKLPQLQGEIERMEKQILSLNQRKEDLLVDLKATVLNLHQHLKQEQEGVERDRLPAVTSEEGGVAERDASERKLNRRGSMSYLAAVEEEVEESSVKSDNGDEKAEPSPQSWSSLWKHDKDMEEDRASSSSGTIVQEAYGKISTSDNSMAQILTPDSLNTEQGPECSLRPNQTEEGTTPPIEADTLDSSDAQGGLEPRVEKTRPEPTEVLHACKTQVAELELWLQQANVAVEPETLNADMQQVLEQQLVGCQAMLTEIEHKVAFLLETCKDQGLGDNGATQHEAEALSLKLKTVKCNLEKVQMMLQEKHSEDQHPTILKKSSEPEHQEALQPVNLSELESIVTERPQFSRQKDFQQQQVLELKPMEQKDFIKFIEFNAKKMWPQYCQHDNDTTQESSASNQASSPENDVPDSILSPQGQNGDKWQYLHHELSSKIKLPLPQLVEPQVSTNMGILPSVTMYNFRYPTTEELKTYTTQLEDLRQEASNLQTQENMTEEAYINLDKKLFELFLTLSQCLSSVEEMLEMPRLYREDGSGQQVHYETLALELKKLYLALSDKKGDLLKAMTWPGENTNLLLECFDNLQVCLEHTQAAAVCRSKSLKAGLDYNRSYQNEIKRLYHQLIKSKTSLQQSLNEISGQSVAEQLQKADAYTVELENAESRVAKLRDEGERLHLPYALLQEVYKLEDVLDSMWGMLRARYTELSSPFVTESQQDALLQGMVELVKIGKEKLAHGHLKQTKSKVALQAQIENHKVFFQKLVADMLLIQAYSAKILPSLLQNRETFWAEQVTEVKILEEKSRQCGMKLQSLLQKWEEFDENYASLEKDLEILISTLPSVSLVEETEERLVERISFYQQIKRNIGGKHARLYQTLNEGKQLVASVSCPELEGQIAKLEEQWLSLNKKIDHELHRLQALLKHLLSYNRDSDQLTKWLESSQHTLNYWKEQSLNVSQDLDTIRSNINNFFEFSKEVDEKSSLKTAVISIGNQLLHLKETDTATLRASLAQFEQKWTMLITQLPDIQEKLHQLQMEKLPSRKAITEMISWMNNVEHQTSDEDSVHSPSSASQVKHLLQKHKEFRMEMDYKQWIVDFVNQSLLQLSTCDVESKRYERTEFAEHLGEMNRQWHRVHGMLNRKIQHLEQLLESITESENKIQILNNWLEAQEERLKTLQKPESVISVQKLLLDCQDIENQLAIKSKALDELKQSYLTLESGAVPLLEDTASRIDELFQKRSSVLTQVNQLKTSMQSVLQEWKIYDQLYDEVNMMTIRFWYCMEHSKPVVLSLETLRCQVENLQSLQDEAESSEGSWEKLQEVIGKLKGLCPSVAEIIEEKCQNTHKRWTQVNQAIADQLQKAQSLLQLWKAYSNAHGEAAARLKQQEAKFQQLANISMSGNNLAEILPPALQDIKELQHDVQKTKEAFLQNSSVLDRLPQPAESSTHMLLPGPLHSLQRAAYLEKMLLVKANEFEFVLSQFKDFGVRLESLKGLIMHEEENLDRLHQQEKENPDSFLNHVLALTAQSPDIEHLNEVSLKLPLSDVAVKTLQNMNRQWIRATATALERCSELQGIGLNEKFLYCCEKWIQLLEKIEEALKVDVANSLPELLEQQKTYKMLEAEVSINQTIADSYVTQSLQLLDTTEIENRPEFITEFSKLTDRWQNAVQGVRQRKGDVDGLVRQWQDFTTSVENLFRFLTDTSHLLSAVKGQERFSLYQTRSLIHELKNKEIHFQRRRTTCALTLEAGEKLLLTTDLKTKESVGRRISQLQDSWKDMEPQLAEMIKQFQSTVETWDQCEKKIKELKSRLQVLKAQSEDPLPELHEDLHNEKELIKELEQSLASWTQNLKELQTMKADLTRHVLVEDVMVLKEQIEHLHRQWEDLCLRVAIRKQEIEDRLNTWVVFNEKNKELCAWLVQMENKVLQTADISIEEMIEKLQKDCMEEINLFSENKLQLKQMGDQLIKASNKSRAAEIDDKLNKINDRWQHLFDVIGSRVKKLKETFAFIQQLDKNMSNLRTWLARIESELSKPVVYDVCDDQEIQKRLAEQQDLQRDIEQHSAGVESVFNICDVLLHDSDACANETECDSIQQTTRSLDRRWRNICAMSMERRMKIEETWRLWQKFLDDYSRFEDWLKSAERTAACPNSSEVLYTSAKEELKRFEAFQRQIHERLTQLELINKQYRRLARENRTDTASRLKQMVHEGNQRWDNLQRRVTAVLRRLRHFTNQREEFEGTRESILVWLTEMDLQLTNVEHFSESDADDKMRQLNGFQQEITLNTNKIDQLIVFGEQLIQKSEPLDAVLIEDELEELHRYCQEVFGRVSRFHRRLTSCTPGLEDEKEASENETDMEDPREIQTDSWRKRGESEEPSSPQSLCHLVAPGHERSGCETPVSVDSIPLEWDHTGDVGGSSSHEEDEEGPYYSALSDVEIPENPEAYLKMTTKTLKASSGKSISDGHSWHVPDSPSCPEHHYKQMEGDRNVPPVPPASSTPYKPPYGKLLLPPGTDGGKEGPRVLNGNPQQEDGGLAGITEQQSGAFDRWEMIQAQELHNKLKIKQNLQQLNSDISAITTWLKKTEAELEMLKMAKPPSDIQEIELRVKRLQEILKAFDTYKALVVSVNVSSKEFLQTESPESTELQSRLRQLSLLWEAAQGAVDSWRGGLRQSLMQCQDFHQLSQNLLLWLASAKNRRQKAHVTDPKADPRALLECRRELMQLEKELVERQPQVDMLQEISNSLLIKGHGEDCIEAEEKVHVIEKKLKQLREQVSQDLMALQGTQNPASPLPSFDEVDSGDQPPATSVPAPRAKFRAVRTTEGEEETESRVPGSTRPQRSFLSRVVRAALPLQLLLLLLLLLACLLPSSEEDYSCTQANNFARSFYPMLRYTNGPPPT

SEQ ID NO: 1120 - protein, 3126 aa, Homo sapiens
MEDEERQKKLEAGKAKLAQFRQRKAQSDGQSPSKKQKKKRKTSSSKHDVSAHHDLNIDQSQCNEMYINSSQRVESTVIPESTIMRTLHSGEITSHEQGFSVELESEISTTADDCSSEVNGCSFVMRTGKPTNLLREEEFGVDDSYSEQGAQDSPTHLEMMESELAGKQHEIEELNRELEEMRVTYGTEGLQQLQEFEAAIKQRDGIITQLTANLQQARREKDETMREFLELTEQSQKLQIQFQQLQASETLRNSTHSSTAADLLQAKQQILTHQQQLEEQDHLLEDYQKKKEDFTMQISFLQEKIKVYEMEQDKKVENSNKEEIQEKETIIEELNTKIIEEEKKTLELKDKLTTADKLLGELQEQIVQKNQEIKNMKLELTNSKQKERQSSEEIKQLMGTVEELQKRNHKDSQFETDIVQRMEQETQRKLEQLRAELDEMYGQQIVQMKQELIRQHMAQMEEMKTRHKGEMENALRSYSNITVNEDQIKLMNVAINELNIKLQDTNSQKEKLKEELGLILEEKCALQRQLEDLVEELSFSREQIQRARQTIAEQESKLNEAHKSLSTVEDLKAEIVSASESRKELELKHEAEVTNYKIKLEMLEKEKNAVLDRMAESQEAELERLRTQLLFSHEEELSKLKEDLEIEHRINIEKLKDNLGIHYKQQIDGLQNEMSQKIETMQFEKDNLITKQNQLILEISKLKDLQQSLVNSKSEEMTLQINELQKEIEILRQEEKEKGTLEQEVQELQLKTELLEKQMKEKENDLQEKFAQLEAENSILKDEKKTLEDMLKIHTPVSQEERLIFLDSIKSKSKDSVWEKEIEILIEENEDLKQQCIQLNEEIEKQRNTFSFAEKNFEVNYQELQEEYACLLKVKDDLEDSKNKQELEYKSKLKALNEELHLQRINPTTVKMKSSVFDEDKTFVAETLEMGEVVEKDTTELMEKLEVTKREKLELSQRLSDLSEQLKQKHGEISFLNEEVKSLKQEKEQVSLRCRELEIIINHNRAENVQSCDTQVSSLLDGVVTMTSRGAEGSVSKVNKSFGEESKIMVEDKVSFENMTVGEESKQEQLILDHLPSVTKESSLRATQPSENDKLQKELNVLKSEQNDLRLQMEAQRICLSLVYSTHVDQVREYMENEKDKALCSLKEELIFAQEEKIKELQKIHQLELQTMKTQETGDEGKPLHLLIGKLQKAVSEECSYFLQTLCSVLGEYYTPALKCEVNAEDKENSGDYISENEDPELQDYRYEVQDFQENMHTLLNKVTEEYNKLLVLQTRLSKIWGQQTDGMKLEFGEENLPKEETEFLSIHSQMTNLEDIDVNHKSKLSSLQDLEKTKLEEQVQELESLISSLQQQLKETEQNYEAEIHCLQKRLQAVSESTVPPSLPVDSVVITESDAQRTMYPGSCVKKNIDGTIEFSGEFGVKEETNIVKLLEKQYQEQLEEEVAKVIVSMSIAFAQQTELSRISGGKENTASSKQAHAVCQQEQHYFNEMKLSQDQIGFQTFETVDVKFKEEFKPLSKELGEHGKEILLSNSDPHDIPESKDCVLTISEEMFSKDKTFIVRQSIHDEISVSSMDASRQLMLNEEQLEDMRQELVRQYQEHQQATELLRQAHMRQMERQREDQEQLQEEIKRLNRQLAQNGNENQGEVEEQTFKEKELDRKPEDVPPEILSNERYALQKANNRLLKILLEVVKTTAAVEETIGRHVLGILDRSSKSQSSASLIWRSEAEASVKSCVHEEHTRVTDESIPSYSGSDMPRNDINMWSKVTEEGTELSQRLVRSGFAGTEIDPENEELMLNISSRLQAAVEKLLEAISETSSQLEHAKVTQTELMRESFRQKQEATESLKCQEELRERLHEESRAREQLAVELSKAEGVIDGYADEKTLFERQIQEKTDIIDRLEQELLCASNRLQELEAEQQQIQEERELLSRQKEAMKAEAGPVEQQLLQETEKLMKEKLEVQCQAEKVRDDLQKQVKALEIDVEEQVSRFIELEQEKNTELMDLRQQNQALEKQLEKMRKFLDEQAIDREHERDVFQQEIQKLEQQLKVVPRFQPISEHQTREVEQLANHLKEKTDKCSELLLSKEQLQRDIQERNEEIEKLEFRVRELEQALLVSADTFQKVEDRKHFGAVEAKPELSLEVQLQAERDAIDRKEKEITNLEEQLEQFREELENKNEEVQQLHMQLEIQKKESTTRLQELEQENKLFKDDMEKLGLAIKESDAMSTQDQHVLFGKFAQIIQEKEVEIDQLNEQVTKLQQQLKITTDNKVIEEKNELIRDLETQIECLMSDQECVKRNREEEIEQLNEVIEKLQQELANIGQKTSMNAHSLSEEADSLKHQLDVVIAEKLALEQQVETANEEMTFMKNVLKETNFKMNQLTQELFSLKRERESVEKIQSIPENSVNVAIDHLSKDKPELEVVLTEDALKSLENQTYFKSFEENGKGSIINLETRLLQLESTVSAKDLELTQCYKQIKDMQEQGQFETEMLQKKIVNLQKIVEEKVAAALVSQIQLEAVQEYAKFCQDNQTISSEPERTNIQNLNQLREDELGSDISALTLRISELESQVVEMHTSLILEKEQVEIAEKNVLEKEKKLLELQKLLEGNEKKQREKEKKRSPQDVEVLKTTTELFHSNEESGFFNELEALRAESVATKAELASYKEKAEKLQEELLVKETNMTSLQKDLSQVRDHLAEAKEKLSILEKEDETEVQESKKACMFEPLPIKLSKSIASQTDGTLKISSSNQTPQILVKNAGIQINLQSECSSEEVTEIISQFTEKIEKMQELHAAEILDMESRHISETETLKREHYVAVQLLKEECGTLKAVIQCLRSKEGSSIPELAHSDAYQTREICSSDSGSDWGQGIYLTHSQGFDIASEGRGEESESATDSFPKKIKGLLRAVHNEGMQVLSLTESPYSDGEDHSIQQVSEPWLEERKAYINTISSLKDLITKMQLQREAEVYDSSQSHESFSDWRGELLLALQQVFLEERSVLLAAFRTELTALGTTDAVGLLNCLEQRIQEQGVEYQAAMECLQKADRRSLLSEIQALHAQMNGRKITLKREQESEKPSQGMLYDKLIWLHKQVKRFHFVFFLIIIKLKHIFLVTFSSHSHNVKDTIYINYSRG

SEQ ID NO: 1121 - protein, 1086 aa, Homo sapiens
MKDSCITVMAMALLSGFFFFAPASSYNLDVRGARSFSPPRAGRHFGYRVLQVGNGVIVGAPGEGNSTGSLYQCQSGTGHCLPVTLRGSNYTSKYLGMTLATDPTDGSILFAAVQFSTSYKTEFDFSDYVKRKDPDALLKHVKHMLLLTNTFGAINYVATEVFREELGARPDATKVLIIITDGEATDSGNIDAAKDIIRYIIGIGKHFQTKESQETLHKFASKPASEFVKILDTFEKLKDLFTELQKKIYVIEGTSKQDLTSFNMELSSSGISADLSRGHAVVGAVGAKDWAGGFLDLKADLQDDTFIGNEPLTPEVRAGYLGYTVTWLPSRQKTSLLASGAPRYQHMGRVLLFQEPQGGGHWSQVQTIHGTQIGSYFGGELCGVDVDQDGETELLLIGAPLFYGEQRGGRVFIYQRRQLGFEEVSELQGDPGYPLGRFGEAITALTDINGDGLVDVAVGAPLEEQGAVYIFNGRHGGLSPQPSQRIEGTQVLSGIQWFGRSIHGVKDLEGDGLADVAVGAESQMIVLSSRPVVDMVTLMSFSPAEIPVHEVECSYSTSNKMKEGVNITICFQIKSLIPQFQGRLVANLTYTLQLDGHRTRRRGLFPGGRHELRRNIAVTTSMSCTDFSFHFPVCVQDLISPINVSLNFSLWEEEGTPRDQRAGKDIPPILRPSLHSETWEIPFEKNCGEDKKCEANLRVSFSPARSRALRLTAFASLSVELSLSNLEEDAYWVQLDLHFPPGLSFRKVEMLKPHSQIPVSCEELPEESRLLSRALSCNVSSPIFKAGHSVALQMMFNTLVNSSWGDSVELHANVTCNNEDSDLLEDNSATTIIPILYPINILIQDQEDSTLYVSFTPKGPKIHQVKHMYQVRIQPSIHDHNIPTLEAVVGVPQPPSEGPITHQWSVQMEPPVPCHYEDLERLPDAAEPCLPGALFRCPVVFRQEILVQVIGTLELVGEIEASSMFSLCSSLSISFNSSKHFHLYGSNASLAQVVMKVDVVYEKQMLYLYVLSGIGGLLLLLLIFIVLYKVGFFKRNLKEKMEAGRGVPNGIPAEDSEQLASGQEAGDPGCLKPLHEKDSESGGGKD

SEQ ID NO: 1122 - protein, 663 aa, Homo sapiens
MESTLTLATEQPVKKNTLKKYKIACIVLLALLVIMSLGLGLGLGLRKLEKQGSCRKKCFDASFRGLENCRCDVACKDRGDCCWDFEDTCVESTRIWMCNKFRCGETRLEASLCSCSDDCLQRKDCCADYKSVCQGETSWLEENCDTAQQSQCPEGFDLPPVILFSMDGFRAEYLYTWDTLMPNINKLKTCGIHSKYMRAMYPTKTFPNHYTIVTGLYPESHGIIDNNMYDVNLNKNFSLSSKEQNNPAWWHGQPMWLTAMYQGLKAATYFWPGSEVAINGSFPSIYMPYNGSVPFEERISTLLKWLDLPKAERPRFYTMYFEEPDSSGHAGGPVSARVIKALQVVDHAFGMLMEGLKQRNLHNCVNIILLADHGMDQTYCNKMEYMTDYFPRINFFYMYEGPAPRIRAHNIPHDFFSFNSEEIVRNLSCRKPDQHFKPYLTPDLPKRLHYAKNVRIDKVHLFVDQQWLAVRSKSNTNCGGGNHGYNNEFRSMEAIFLAHGPSFKEKTEVEPFENIEVYNLMCDLLRIQPAPNNGTHGSLNHLLKVPFYEPSHAEEVSKFSVCGFANPLPTESLDCFCPHLQNSTQLEQVNQMLNLTQEEITATVKVNLPFGRPRVLQKNVDHCLLYHREYVSGFGKAMRMPMWSSYTVPQLPAIEHQIANMML

SEQ ID NO: 1123 - protein, 1729 aa, Homo sapiens
MKVSTLRESSAMASPLPREMEEELVPTGSEPGDTRAKPPVKPKPRALPAKPALPAKPSLLVPVGPRPPRGPLAELPSARKMNMLAGPQPYGGSKRPLPFAPRPAVEASTGGEATQETGKEEAGKEEPPPLTPPARCAAPGGVRKAPAPFRPASERFAATTVEEILAKMEQPRKEVLASPDRLWGSRLTFNHDGSSRYGPRTYGTTTAPRDEDGSTLFRGWSQEGPVKSPAECREEHSKTPEERSLPSDLAFNGDLAKAASSELPADISKPWIPSSPAPSSENGGPASPGLPAEASGSGPGSPHLHPPDKSSPCHSQLLEAQTPEASQASPCPAVTPSAPSAALPDEGSRHTPSPGLPAEGAPEAPRPSSPPPEVLEPHSLDQPPATSPRPLIEVGELLDLTRTFPSGGEEEAKGDAHLRPTSLVQRRFSEGVLQSPSQDQEKLGGSLAALPQGQGSQLALDRPFGAESNWSLSQSFEWTFPTRPSGLGVWRLDSPPPSPITEASEAAEAAEAGNLAVSSREEGVSQQGQGAGSAPSGSGSSWVQGDDPSMSLTQKGDGESQPQFPAVPLEPLPTTEGTPGLPLQQAEERYESQEPLAGQESPLPLATREAALPILEPVLGQEQPAAPDQPCVLFADAPEPGQALPVEEEAVTLARAETTQARTEAQDLCRASPEPPGPESSSRWLDDLLASPPPSGGGARRGAGAELKDTQSPSTCSEGLLGWSQKDLQSEFGITGDPQPSSFSPSSWCQGASQDYGLGGASPRGDPGLGERDWTSKYGQGAGEGSTREWASRCGIGQEEMEASSSQDQSKVSAPGVLTAQDRVVGKPAQLGTQRSQEADVQDWEFRKRDSQGTYSSRDAELQDQEFGKRDSLGTYSSRDVSLGDWEFGKRDSLGAYASQDANEQGQDLGKRDHHGRYSSQDADEQDWEFQKRDVSLGTYGSRAAEPQEQEFGKSAWIRDYSSGGSSRTLDAQDRSFGTRPLSSGFSPEEAQQQDEEFEKKIPSVEDSLGEGSRDAGRPGERGSGGLFSPSTAHVPDGALGQRDQSSWQNSDASQEVGGHQERQQAGAQGPGSADLEDGEMGKRGWVGEFSLSVGPQREAAFSPGQQDWSRDFCIEASERSYQFGIIGNDRVSGAGFSPSSKMEGGHFVPPGKTTAGSVDWTDQLGLRNLEVSSCVGSGGSSEARESAVGQMGWSGGLSLRDMNLTGCLESGGSEEPGGIGVGEKDWTSDVNVKSKDLAEVGEGGGHSQARESGVGQTDWSGVEAGEFLKSRERGVGQADWTPDLGLRNMAPGAVCSPGESKELGVGQMDWGNNLGLRDLEVTCDPDSGGSQGLRGCGVGQMDWTQDLAPQNVELFGAPSEAREHGVGGVSQCPEPGLRHNGSLSPGLEARDPLEARELGVGETSGPETQGEDYSSSSLEPHPADPGMETGEALSFGASPGRCPARPPPSGSQGLLEEMLAASSSKAVARRESAASGLGGLLEEEGAGAGAAQEEVLEPGRDSPPSWRPQPDGEASQTEDVDGTWGSSAARWSDQGPAQTSRRPSQGPPARSPSQDFSFIEDTEILDSAMYRSRANLGRKRGHRAPVIRPGGTLGLSEAADSDAHLFQDSTEPRASRVPSSDEEVVEEPQSRRTRMSLGTKGLKVNLFPGLSPSALKAKLRPRNRSAEEGELAESKSSQKESAVQRSKSCKVPGLGKPLTLPPKPEKSSGSEGSSPNWLQALKLKKKKV

SEQ ID NO: 1124 - protein, 502 aa, Homo sapiens
MAAPCEGQAFAVGVEKNWGAVVRSPEGTPQKIRQLIDEGIAPEEGGVDAKDTSATSQSVNGSPQAEQPSLESTSKEAFFSRVETFSSLKWAGKPFELSPLVCAKYGWVTVECDMLKCSSCQAFLCASLQPAFDFDRYKQRCAELKKALCTAHEKFCFWPDSPSPDRFGMLPLDEPAILVSEFLDRFQSLCHLDLQLPSLRPEDLKTMCLTEDKISLLLHLLEDELDHRTDERKTTIKLGSDIQVHVTACILSVCGWACSSSLESMQLSLITCSQCMRKVGLWGFQQIESSMTDLDASFGLTSSPIPGLEGRPERLPLVPESPRRMMTRSQDATFSPGSEQAEKSPGPIVSRTRSWDSSSPVDRPEPEAASPTTRTRPVTRSMGTGDTPGLEVPSSPLRKAKRARLCSSSSSDTSSRSFFDPTSQHRDWCPWVNITLGKESRENGGTEPDASAPAEPGWKAVLTILLAHKQSSQPAETDSMSLSEKSRKVFRIFRQWESLCSC

SEQ ID NO: 1125 - protein, 822 aa, Homo sapiens
MKPALLPWALLLLATALGPGPGPTADAQESCSMRCGALDGPCSCHPTCSGLGTCCLDFRDFCLEILPYSGSMMGGKDFVVRHFKMSSPTDASVICRFKDSIQTLGHVDSSGQVHCVSPLLYESGRIPFTVSLDNGHSFPRAGTWLAVHPNKVSMMEKSELVNETRWQYYGTANTSGNLSLTWHVKSLPTQTITIELWGYEETGMPYSQEWTAKWSYLYPLATHIPNSGSFTFTPKPAPPSYQRWRVGALRIIDSKNYAGQKDVQALWTNDHALAWHLSDDFREDPVAWARTQCQAWEELEDQLPNFLEELPDCPCTLTQARADSGRFFTDYGCDMEQGSVCTYHPGAVHCVRSVQASLRYGSGQQCCYTADGTQLLTADSSGGSTPDRGHDWGAPPFRTPPRVPSMSHWLYDVLSFYYCCLWAPDCPRYMQRRPSNDCRNYRPPRLASAFGDPHFVTFDGTNFTFNGRGEYVLLEAALTDLRVQARAQPGTMSNGTETRGTGLTAVAVQEGNSDVVEVRLANRTGGLEVLLNQEVLSFTEQSWMDLKGMFLSVAAGDRVSIMLASGAGLEVSVQGPFLSVSVLLPEKFLTHTHGLLGTLNNDPTDDFTLHSGRVLPPGTSPQELFLFGANWTVHNASSLLTYDSWFLVHNFLYQPKHDPTFEPLFPSETTLNPSLAQEAAKLCGDDHFCNFDVAATGSLSTGTATRVAHQLHQRRMQSLQPVVSCGWLAPPPNGQKEGNRYLAGSTIYFHCDNGYSLAGAETSTCQADGTWSSPTPKCQPGRSYAVLLGIIFGGLAVVAAVALVYVLLRRRKGNTHVWGAQP

SEQ ID NO: 1126 - protein, 495 aa, Homo sapiens
MNKSRWQSRRRHGRRSHQQNPWFRLRDSEDRSDSRAAQPAHDSGHGDDESPSTSSGTAGTSSVPELPGFYFDPEKKRYFRLLPGHNNCNPLTKESIRQKEMESKRLRLLQEEDRRKKIARMGFNASSMLRKSQLGFLNVTNYCHLAHELRLSCMERKKVQIRSMDPSALASDRFNLILADTNSDRLFTVNDVKVGGSKYGIINLQSLKTPTLKVFMHENLYFTNRKVNSVCWASLNHLDSHILLCLMGLAETPGCATLLPASLFVNSHPGIDRPGMLCSFRIPGAWSCAWSLNIQANNCFSTGLSRRVLLTNVVTGHRQSFGTNSDVLAQQFALMAPLLFNGCRSGEIFAIDLRCGNQGKGWKATRLFHDSAVTSVRILQDEQYLMASDMAGKIKLWDLRTTKCVRQYEGHVNEYAYLPLHVHEEEGILVAVGQDCYTRIWSLHDARLLRTIPSPYPASKADIPSVAFSSRLGGSRGAPGLLMAVGQDLYCYSYS

SEQ ID NO: 1127 - protein, 1818 aa, Homo sapiens
MEPWSSRWKTKRWLWDFTVTTLALTFLFQAREVRGAAPVDVLKALDFHNSPEGISKTTGFCTNRKNSKGSDTAYRVSKQAQLSAPTKQLFPGGTFPEDFSILFTVKPKKGIQSFLLSIYNEHGIQQIGVEVGRSPVFLFEDHTGKPAPEDYPLFRTVNIADGKWHRVAISVEKKTVTMIVDCKKKTTKPLDRSERAIVDTNGITVFGTRILDEEVFEGDIQQFLITGDPKAAYDYCEHYSPDCDSSAPKAAQAQEPQIDEKKKSNFKKKMRTVATKSKEKSKKFTPPKSEKFSSKKKKSYQASAKAKLGVKANIVDDFQEYNYGTMESYQTEAPRHVSGTNEPNPVEEIFTEEYLTGEDYDSQRKNSEDTLYENKEIDGRDSDLLVDGDLGEYDFYEYKEYEDKPTSPPNEEFGPGVPAETDITETSINGHGAYGEKGQKGEPAVVEPGMLVEGPPGPAGPAGIMGPPGLQGPTGPPGDPGDRGPPGRPGLPGADGLPGPPGTMLMLPFRYGGDGSKGPTISAQEAQAQAILQQARIALRGPPGPMGLTGRPGPVGGPGSSGAKGESGDPGPQGPRGVQGPPGPTGKPGKRGRPGADGGRGMPGEPGAKGDRGFDGLPGLPGDKGHRGERGPQGPPGPPGDDGMRGEDGEIGPRGLPGEAGPRGLLGPRGTPGAPGQPGMAGVDGPPGPKGNMGPQGEPGPPGQQGNPGPQGLPGPQGPIGPPGEKGPQGKPGLAGLPGADGPPGHPGKEGQSGEKGALGPPGPQGPIGYPGPRGVKGADGVRGLKGSKGEKGEDGFPGFKGDMGLKGDRGEVGQIGPRGEDGPEGPKGRAGPTGDPGPSGQAGEKGKLGVPGLPGYPGRQGPKGSTGFPGFPGANGEKGARGVAGKPGPRGQRGPTGPRGSRGARGPTGKPGPKGTSGGDGPPGPPGERGPQGPQGPVGFPGPKGPPGPPGKDGLPGHPGQRGETGFQGKTGPPGPGGVVGPQGPTGETGPIGERGHPGPPGPPGEQGLPGAAGKEGAKGDPGPQGISGKDGPAGLRGFPGERGLPGAQGAPGLKGGEGPQGPPGPVGSPGERGSAGTAGPIGLPGRPGPQGPPGPAGEKGAPGEKGPQGPAGRDGVQGPVGLPGPAGPAGSPGEDGDKGEIGEPGQKGSKGDKGENGPPGPPGLQGPVGAPGIAGGDGEPGPRGQQGMFGQKGDEGARGFPGPPGPIGLQGLPGPPGEKGENGDVGPMGPPGPPGPRGPQGPNGADGPQGPPGSVGSVGGVGEKGEPGEAGNPGPPGEAGVGGPKGERGEKGEAGPPGAAGPPGAKGPPGDDGPKGNPGPVGFPGDPGPPGEPGPAGQDGVGGDKGEDGDPGQPGPPGPSGEAGPPGPPGKRGPPGAAGAEGRQGEKGAKGEAGAEGPPGKTGPVGPQGPAGKPGPEGLRGIPGPVGEQGLPGAAGQDGPPGPMGPPGLPGLKGDPGSKGEKGHPGLIGLIGPPGEQGEKGDRGLPGTQGSPGAKGDGGIPGPAGPLGPPGPPGLPGPQGPKGNKGSTGPAGQKGDSGLPGPPGSPGPPGEVIQPLPILSSKKTRRHTEGMQADADDNILDYSDGMEEIFGSLNSLKQDIEHMKFPMGTQTNPARTCKDLQLSHPDFPDGEYWIDPNQGCSGDSFKVYCNFTSGGETCIYPDKKSEGVRISSWPKEKPGSWFSEFKRGKLLSYLDVEGNSINMVQMTFLKLLTASARQNFTYHCHQSAAWYDVSSGSYDKALRFLGSNDEEMSYDNNPFIKTLYDGCASRKGYEKTVIEINTPKIDQVPIVDVMINDFGDQNQKFGFEVGPVCFLG

SEQ ID NO: 1128 - protein, 683 aa, Homo sapiens
MLKQARRPLFRNVLSATQWKKVKITRLVQISGASLAEKQEKHQDFLIQRQTKTKDRRFNDEIDKLTGYKTKSLLCMPIRSSDGEIIGVAQAINKIPEGAPFTEDDEKVMQMYLPFCGIAISNAQLFAASRKEYERSRALLEVVNDLFEEQTDLEKIVKKIMHRAQTLLKCERCSVLLLEDIESPVVKFTKSFELMSPKCSADAENSFKESMEKSSYSDWLINNSIAELVASTGLPVNISDAYQDPRFDAEADQISGFHIRSVLCVPIWNSNHQIIGVAQVLNRLDGKPFDDADQRLFEAFVIFCGLGINNTIMYDQVKKSWAKQSVALDVLSYHATCSKAEVDKFKAANIPLVSELAIDDIHFDDFSLDVDAMITAALRMFMELGMVQKFKIDYETLCRWLLTVRKNYRMVLYHNWRHAFNVCQLMFAMLTTAGFQDILTEVEILAVIVGCLCHDLDHRGTNNAFQAKSGSALAQLYGTSATLEHHHFNHAVMILQSEGHNIFANLSSKEYSDLMQLLKQSILATDLTLYFERRTEFFELVSKGEYDWNIKNHRDIFRSMLMTACDLGAVTKPWEISRQVAELVTSEFFEQGDRERLELKLTPSAIFDRNRKDELPRLQLEWIDSICMPLYQALVKVNVKLKPMLDSVATNRSKWEELHQKRLLASTASSSPASVMVAKEDRN

SEQ ID NO: 1129 - protein, 1127 aa, Homo sapiens
MAENKGGGEAESGGGGSGSAPVTAGAAGPAAQEAEPPLTAVLVEEEEEEGGRAGAEGGAAGPDDGGVAAASSGSAQAASSPAASVGTGVAGGAVSTPAPAPASAPAPGPSAGPPPGPPASLLDTCAVCQQSLQSRREAEPKLLPCLHSFCLRCLPEPERQLSVPIPGGSNGDIQQVGVIRCPVCRQECRQIDLVDNYFVKDTSEAPSSSDEKSEQVCTSCEDNASAVGFCVECGEWLCKTCIEAHQRVKFTKDHLIRKKEDVSESVGASGQRPVFCPVHKQEQLKLFCETCDRLTCRDCQLLEHKEHRYQFLEEAFQNQKGAIENLLAKLLEKKNYVHFAATQVQNRIKEVNETNKRVEQEIKVAIFTLINEINKKGKSLLQQLENVTKERQMKLLQQQNDITGLSRQVKHVMNFTNWAIASGSSTALLYSKRLITFQLRHILKARCDPVPAANGAIRFHCDPTFWAKNVVNLGNLVIESKPAPGYTPNVVVGQVPPGTNHISKTPGQINLAQLRLQHMQQQVYAQKHQQLQQMRMQQPPAPVPTTTTTTQQHPRQAAPQMLQQQPPRLISVQTMQRGNMNCGAFQAHQMRLAQNAARIPGIPRHSGPQYSMMQPHLQRQHSNPGHAGPFPVVSVHNTTINPTSPTTATMANANRGPTSPSVTAIELIPSVTNPENLPSLPDIPPIQLEDAGSSSLDNLLSRYISGSHLPPQPTSTMNPSPGPSALSPGSSGLSNSHTPVRPPSTSSTGSRGSCGSSGRTAEKTSLSFKSDQVKVKQEPGTEDEICSFSGGVKQEKTEDGRRSACMLSSPESSLTPPLSTNLHLESELDALASLENHVKIEPADMNESCKQSGLSSLVNGKSPIRSLMHRSARIGGDGNNKDDDPNEDWCAVCQNGGDLLCCEKCPKVFHLTCHVPTLLSFPSGDWICTFCRDIGKPEVEYDCDNLQHSKKGKTAQGLSPVDQRKCERLLLYLYCHELSIEFQEPVPASIPNYYKIIKKPMDLSTVKKKLQKKHSQHYQIPDDFVADVRLIFKNCERFNEMMKVVQVYADTQEINLKADSEVAQAGKAVALYFEDKLTEIYSDRTFAPLPEFEQEEDDGEVTEDSDEDFIQPRRKRLKSDERPVHIK

SEQ ID NO: 1130 - protein, 538 aa, Homo sapiens
MEGGRRARVVIESKRNFFLGAFPTPFPAEHVELGRLGDSETAMVPGKGGADYILLPFKKMDFSRNLYDIGEQLDSEDLASLKFLSLDYIPQRKQEPIKDALMLFQRLQEKRMLEESNLSFLKELLFRINRLDLLITYLNTRKEEMERELQTPGRAQISAYRVMLYQISEEVSRSELRSFKFLLQEEISKCKLDDDMNLLDIFIEMEKRVILGEGKLDILKRVCAQINKSLLKIINDYEEFSKERSSSLEGSPDEFSNGEELCGVMTISDSPREQDSESQTLDKVYQMKSKPRGYCLIINNHNFAKAREKVPKLHSIRDRNGTHLDAGALTTTFEELHFEIKPHDDCTVEQIYEILKIYQLMDHSNMDCFICCILSHGDKGIIYGTDGQEAPIYELTSQFTGLKCPSLAGKPKVFFIQACQGDNYQKGIPVETDSEEQPYLEMDLSSPQTRYIPDEADFLLGMATVNNCVSYRNPAEGTWYIQSLCQSLRERCPRGDDILTILTEVNYEVSNKDDKKNMGKQMPQPTFTLRKKLVFPSD

SEQ ID NO: 1131 - protein, 2347 aa, Homo sapiens
MTEGARAADEVRVPLGAPPPGPAALVGASPESPGAPGREAERGSELGVSPSESPAAERGAELGADEEQRVPYPALAATVFFCLGQTTRPRSWCLRLVCNPWFEHVSMLVIMLNCVTLGMFRPCEDVECGSERCNILEAFDAFIFAFFAVEMVIKMVALGLFGQKCYLGDTWNRLDFFIVVAGMMEYSLDGHNVSLSAIRTVRVLRPLRAINRVPSMRILVTLLLDTLPMLGNVLLLCFFVFFIFGIVGVQLWAGLLRNRCFLDSAFVRNNNLTFLRPYYQTEEGEENPFICSSRRDNGMQKCSHIPGRRELRMPCTLGWEAYTQPQAEGVGAARNACINWNQYYNVCRSGDSNPHNGAINFDNIGYAWIAIFQVITLEGWVDIMYYVMDAHSFYNFIYFILLIIVGSFFMINLCLVVIATQFSETKQRESQLMREQRARHLSNDSTLASFSEPGSCYEELLKYVGHIFRKVKRRSLRLYARWQSRWRKKVDPSAVQGQGPGHRQRRAGRHTASVHHLVYHHHHHHHHHYHFSHGSPRRPGPEPGACDTRLVRAGAPPSPPSPGRGPPDAESVHSIYHADCHIEGPQERARVAHAAATAAASLRLATGLGTMNYPTILPSGVGSGKGSTSPGPKGKWAGGPPGTGGHGPLSLNSPDPYEKIPHVVGEHGLGQAPGHLSGLSVPCPLPSPPAGTLTCELKSCPYCTRALEDPEGELSGSESGDSDGRGVYEFTQDVRHGDRWDPTRPPRATDTPGPGPGSPQRRAQQRAAPGEPGWMGRLWVTFSGKLRRIVDSKYFSRGIMMAILVNTLSMGVEYHEQPEELTNALEISNIVFTSMFALEMLLKLLACGPLGYIRNPYNIFDGIIVVISVWEIVGQADGGLSVLRTFRLLRVLKLVRFLPALRRQLVVLVKTMDNVATFCTLLMLFIFIFSILGMHLFGCKFSLKTDTGDTVPDRKNFDSLLWAIVTVFQILTQEDWNVVLYNGMASTSSWAALYFVALMTFGNYVLFNLLVAILVEGFQAEGDANRSDTDEDKTSVHFEEDFHKLRELQTTELKMCSLAVTPNGHLEGRGSLSPPLIMCTAATPMPTPKSSPFLDAAPSLPDSRRGSSSSGDPPLGDQKPPASLRSSPCAPWGPSGAWSSRRSSWSSLGRAPSLKRRGQCGERESLLSGEGKGSTDDEAEDGRAAPGPRATPLRRAESLDPRPLRPAALPPTKCRDRDGQVVALPSDFFLRIDSHREDAAELDDDSEDSCCLRLHKVLEPYKPQWCRSREAWALYLFSPQNRFRVSCQKVITHKMFDHVVLVFIFLNCVTIALERPDIDPGSTERVFLSVSNYIFTAIFVAEMMVKVVALGLLSGEHAYLQSSWNLLDGLLVLVSLVDIVVAMASAGGAKILGVLRVLRLLRTLRPLRVISRAPGLKLVVETLISSLRPIGNIVLICCAFFIIFGILGVQLFKGKFYYCEGPDTRNISTKAQCRAAHYRWVRRKYNFDNLGQALMSLFVLSSKDGWVNIMYDGLDAVGVDQQPVQNHNPWMLLYFISFLLIVSFFVLNMFVGVVVENFHKCRQHQEAEEARRREEKRLRRLERRRRKAQRRPYYADYSPTRRSIHSLCTSHYLDLFITFIICVNVITMSMEHYNQPKSLDEALKYCNYVFTIVFVFEAALKLVAFGFRRFFKDRWNQLDLAIVLLSLMGITLEEIEMSAALPINPTIIRIMRVLRIARVLKLLKMATGMRALLDTVVQALPQVGNLGLLFMLLFFIYAALGVELFGRLECSEDNPCEGLSRHATFSNFGMAFLTLFRVSTGDNWNGIMKDTLRECSREDKHCLSYLPALSPVYFVTFVLVAQFVLVNVVVAVLMKHLEESNKEAREDAELDAEIELEMAQGPGSARRVDADRPPLPQESPGARDAPNLVARKVSVSRMLSLPNDSYMFRPVVPASAPHPRPLQEVEMETYGAGTPLGSVASVHSPPAESCASLQIPLAVSSPARSGEPLHALSPRGTARSPSLSRLLCRQEAVHTDSLEGKIDSPRDTLDPAEPGEKTPVRPVTQGGSLQSPPRSPRPASVRTRKHTFGQRCVSSRPAAPGGEEAEASDPADEEVSHITSSACPWQPTAEPHGPEASPVAGGERDLRRLYSVDAQGFLDKPGRADEQWRPSAELGSGEPGEAKAWGPEAEPALGARRKKKMSPPCISVEPPAEDEGSARPSAAEGGSTTLRRRTPSCEATPHRDSLEPTEGSGAGGDPAAKGERWGQASCRAEHLTVPSFAFEPLDLGVPSGDPFLDGSHSVTPESRASSSGAIVPLEPPESEPPMPVGDPPEKRRGLYLTVPQCPLEKPGSPSATPAPGGGADDPV

SEQ ID NO: 1132 - protein, 911 aa, Homo sapiens
MKKASRSVGSVPKVSAISKTQTAEKIKPENSSSASTGGKLVKPGTAASLSKTKSSDDLLAGMAGGVTVTNGVKGKKSTCPSAAPSASAPAMTTVENKSKISTGTASSTKRSTSTGNKESSSTRERLRERTRLNQSKKLPSAGQGANDMALAKRSRSRTATECDVRMSKSKSDNQISDRAALEAKVKDLLTLAKTKDVEILHLRNELRDMRAQLGINEDHSEGDEKSEKETIMAHQPTDVESTLLQLQEQNTAIREELNQLKNENRMLKDRLNALGFSLEQRLDNSEKLFGYQSLSPEITPGNQSDGGGTLTSSVEGSAPGSVEDLLSQDENTLMDHQHSNSMDNLDSECSEVYQPLTSSDDALDAPSSSESEGIPSIERSRKGSSGNASEVSVACLTERIHQMEENQHSTSEELQATLQELADLQQITQELNSENERLGEEKVILMESLCQQSDKLEHFSRQIEYFRSLLDEHHISYVIDEDVKSGRYMELEQRYMDLAENARFEREQLLGVQQHLSNTLKMAEQDNKEAQEMIGALKERSHHMERIIESEQKGKAALAATLEEYKATVASDQIEMNRLKAQLENEKQKVAELYSIHNSGDKSDIQDLLESVRLDKEKAETLASSLQEDLAHTRNDANRLQDAIAKVEDEYRAFQEEAKKQIEDLNMTLEKLRSDLDEKETERSDMKETIFELEDEVEQHRAVKLHDNLIISDLENTVKKLQDQKHDMEREIKTLHRRLREESAEWRQFQADLQTAVVIANDIKSEAQEEIGDLKRRLHEAQEKNEKLTKELEEIKSRKQEEERGRVYNYMNAVERDLAALRQGMGLSRRSSTSSEPTPTVKTLIKSFDSASQVPNPAAAAIPRTPLSPSPMKTPPAAAVSPMQMESSSVAHAGMQWRDLGSLQPLPPGFK

SEQ ID NO: 1133 - protein, 1143 aa, Homo sapiens
MKVTVCFGRTGIVVPCKEGQLRVGELTQQALQRYLKTREKGPGYWVKIHHLEYTDGGILDPDDVLADVVEDKDKLIAVFEEQEPLHKIESPSGNPADRQSPDAFETEVAAQLAAFKPIGGEIEVTPSALKLGTPLLVRRSSDPVPGPPADTQPSASHPGGQSLKLVVPDSTQNLEDREVLNGVQTELLTSPRTKDTLSDMTRTVEISGEGGPLGIHVVPFFSSLSGRILGLFIRGIEDNSRSKREGLFHENECIVKINNVDLVDKTFAQAQDVFRQAMKSPSVLLHVLPPQNREQYEKSVIGSLNIFGNNDGVLKTKVPPPVHGKSGLKTANLTGTDSPETDASASLQQNKSPRVPRLGGKPSSPSLSPLMGFGSNKNAKKIKIDLKKGPEGLGFTVVTRDSSIHGPGPIFVKNILPKGAAIKDGRLQSGDRILEVNGRDVTGRTQEELVAMLRSTKQGETASLVIARQEGHFLPRELDGRLRMNDQLIAVNGESLLGKSNHEAMETLRRSMSMEGNIRGMIQLVILRRPERPMEDPAECGAFSKPCFENCQNAVTTSRRNDNSILHPLGTCSPQDKQKGLLLPNDGWAESEVPPSPTPHSALGLGLEDYSHSSGVDSAVYFPDQHINFRSVTPARQPESINLKASKSMDLVPDESKVHSLAGQKSESPSKDFGPTLGLKKSSSLESLQTAVAEVRKNDLPFHRPRPHMVRGRGCNESFRAAIDKSYDGPEEIEADGLSDKSSHSGQGALNCESAPQGNSELEDMENKARKVKKTKEKEKKKEKGKLKVKEKKRKEENEDPERKIKKKGFGAMLRFGKKKEDKGGKAEQKGTLKHGGLREEELEKMKEERERIGAKHQELREKQARGLLDYATGAIGSVYDMDDDEMDPNYARVNHFREPCTSANVFRSPSPPRAGPFGYPRDGHPLSPERDHLEGLYAKVNKPYHPLVPADSGRPTGGSTDRIQKLRKEYYQARREGFPLYEDDEGRARPSEYDLLWVPGRGPDGNAHNLRFEGMERQYASLPRGGPADPVDYLPAAPRGLYKERELPYYPGAHPMHPPKGSYPRPTELRVADLRYPQHYPPPPAPQHKGPFRQDVPPSPPQHQRMPAYQETGRPGPRGGSPDQYPYRTQDSRQKNPMTAAV

SEQ ID NO: 1134 - protein, 3130 aa, Homo sapiens
MFSVRIVTADYYMASPLQGLDTCQSPLTQAPVKKVPVVRVFGATPAGQKTCLHLHGIFPYLYVPYDGYGQQPESYLSQMAFSIDRALNVALGNPSSTAQHVFKVSLVSGMPFYGYHEKERHFMKIYLYNPTMVKRICELLQSGAIMNKFYQPHEAHIPYLLQLFIDYNLYGMNLINLAAVKFRKARRKSNTLHATGSCKNHLSGNSLADTLFRWEQDEIPSSLILEGVEPQSTCELEVDAVAADILNRLDIEAQIGGNPGLQAIWEDEKQRRRNRNETSQMSQPESQDHRFVPATESEKKFQKRLQEILKQNDFSVTLSGSVDYSDGSQEFSAELTLHSEVLSPEMLQCTPANMVEVHKDKESSKGHTRHKVEEALINEEAILNLMENSQTFQPLTQRLSESPVFMDSSPDEALVHLLAGLESDGYRGERNRMPSPCRSFGNNKYPQNSDDEENEPQIEKEEMELSLVMSQRWDSNIEEHCAKKRSLCRNTHRSSTEDDDSSSGEEMEWSDNSLLLASLSIPQLDGTADENSDNPLNNENSRTHSSVIATSKLSVKPSIFHKDAATLEPSSSAKITFQCKHTSALSSHVLNKEDLIEDLSQTNKNTEKGLDNSVTSFTNESTYSMKYPGSLSSTVHSENSHKENSKKEILPVSSCESSIFDYEEDIPSVTRQVPSRKYTNIRKIEKDSPFIHMHRHPNENTLGKNSFNFSDLNHSKNKVSSEGNEKGNSTALSSLFPSSFTENCELLSCSGENRTMVHSLNSTADESGLNKLKIRYEEFQEHKTEKPSLSQQAAHYMFFPSVVLSNCLTRPQKLSPVTYKLQPGNKPSRLKLNKRKLAGHQETSTKSSETGSTKDNFIQNNPCNSNPEKDNALASDLTKTTRGAFENKTPTDGFIDCHFGDGTLETEQSFGLYGNKYTLRAKRKVNYETEDSESSFVTHNSKISLPHPMEIGESLDGTLKSRKRRKMSKKLPPVIIKYIIINRFRGRKNMLVKLGKIDSKEKQVILTEEKMELYKKLAPLKDFWPKVPDSPATKYPIYPLTPKKSHRRKSKHKSAKKKTGKQQRTNNENIKRTLSFRKKRSHAILSPPSPSYNAETEDCDLNYSDVMSKLGFLSERSTSPINSSPPRCWSPTDPRAEEIMAAAEKEAMLFKGPNVYKKTVNSRIGKTSRARAQIKKSKAKLANPSIVTKKRNKRNQTNKLVDDGKKKPRAKQKTNEKGTSRKHTTLKDEKIKSQSGAEVKFVLKHQNVSEFASSSGGSQLLFKQKDMPLMGSAVDHPLSASLPTGINAQQKLSGCFSSFLESKKSVDLQTFPSSRDDLHPSVVCNSIGPGVSKINVQRPHNQSAMFTLKESTLIQKNIFDLSNHLSQVAQNTQISSGMSSKIEDNANNIQRNYLSSIGKLSEYRNSLESKLDQAYTPNFLHCKDSQQQIVCIAEQSKHSETCSPGNTASEESQMPNNCFVTSLRSPIKQIAWEQKQRGFILDMSNFKPERVKPRSLSEAISQTKALSQCKNRNVSTPSAFGEGQSGLAVLKELLQKRQQKAQNANTTQDPLSNKHQPNKNISGSLEHNKANKRTRSVTSPRKPRTPRSTKQKEKIPKLLKVDSLNLQNSSQLDNSVSDDSPIFFSDPGFESCYSLEDSLSPEHNYNFDINTIGQTGFCSFYSGSQFVPADQNLPQKFLSDAVQDLFPGQAIEKNEFLSHDNQKCDEDKHHTTDSASWIRSGTLSPEIFEKSTIDSNENRRHNQWKNSFHPLTTRSNSIMDSFCVQQAEDCLSEKSRLNRSSVSKEVFLSLPQPNNSDWIQGHTRKEMGQSLDSANTSFTAILSSPDGELVDVACEDLELYVSRNNDMLTPTPDSSPRSTSSPSQSKNGSFTPRTANILKPLMSPPSREEIMATLLDHDLSETIYQEPFCSNPSDVPEKPREIGGRLLMVETRLANDLAEFEGDFSLEGLRLWKTAFSAMTQNPRPGSPLRSGQGVVNKGSSNSPKMVEDKKIVIMPCKCAPSRQLVQVWLQAKEEYERSKKLPKTKPTGVVKSAENFSSSVNPDDKPVVPPKMDVSPCILPTTAHTKEDVDNSQIALQAPTTGCSQTASESQMLPPVASASDPEKDEDDDDNYYISYSSPDSPVIPPWQQPISPDSKALNGDDRPSSPVEELPSLAFENFLKPIKDGIQKSPCSEPQEPLVISPINTRARTGKCESLCFHSTPIIQRKLLERLPEAPGLSPLSTEPKTQKLSNKKGSNTDTLRRVLLTQAKNQFAAVNTPQKETSQIDGPSLNNTYGFKVSIQNLQEAKALHEIQNLTLISVELHARTRRDLEPDPEFDPICALFYCISSDTPLPDTEKTELTGVIVIDKDKTVFSQDIRYQTPLLIRSGITGLEVTYAADEKALFHEIANIIKRYDPDILLGYEIQMHSWGYLLQRAAALSIDLCRMISRVPDDKIENRFAAERDEYGSYTMSEINIVGRITLNLWRIMRNEVALTNYTFENVSFHVLHQRFPLFTFRVLSDWFDNKTDLYRWKMVDHYVSRVRGNLQMLEQLDLIGKTSEMARLFGIQFLHVLTRGSQYRVESMMLRIAKPMNYIPVTPSVQQRSQMRAPQCVPLIMEPESRFYSNSVLVLDFQSLYPSIVIAYNYCFSTCLGHVENLGKYDEFKFGCTSLRVPPDLLYQVRHDITVSPNGVAFVKPSVRKGVLPRMLEEILKTRFMVKQSMKAYKQDRALSRMLDARQLGLKLIANVTFGYTSANFSGRMPCIEVGDSIVHKARETLERAIKLVNDTKKWGARVVYGDTDSMFVLLKGATKEQSFKIGQEIAEAVTATNPKPVKLKFEKVYLPCVLQTKKRYVGYMYETLDQKDPVFDAKGIETVRRDSCPAVSKILERSLKLLFETRDISLIKQYVQRQCMKLLEGKASIQDFIFAKEYRGSFSYKPGACVPALELTRKMLTYDRRSEPQVGERVPYVIIYGTPGVPLIQLVRRPVEVLQDPTLRLNATYYITKQILPPLARIFSLIGIDVFSWYHELPRIHKATSSSRSEPEGRKGTISQYFTTLHCPVCDDLTQHGICSKCRSQPQHVAVILNQEIRELERQQEQLVKICKNCTGCFDRHIPCVSLNCPVLFKLSRVNRELSKAPYLRQLLDQF

SEQ ID NO: 1135 - protein, 752 aa, Homo sapiens
MLPGLALLLLAAWTARALEVPTDGNAGLLAEPQIAMFCGRLNMHMNVQNGKWDSDPSGTKTCIDTKEGILQYCQEVYPELQITNVVEANQPVTIQNWCKRGRKQCKTHPHFVIPYRCLVGEFVSDALLVPDKCKFLHQERMDVCETHLHWHTVAKETCSEKSTNLHDYGMLLPCGIDKFRGVEFVCCPLAEESDNVDSADAEEDDSDVWWGGADTDYADGSEDKVVEVAEEEEVAEVEEEEADDDEDDEDGDEVEEEAEEPYEEATERTTSIATTTTTTTESVEEVVREVCSEQAETGPCRAMISRWYFDVTEGKCAPFFYGGCGGNRNNFDTEEYCMAVCGSAMSQSLLKTTQEPLARDPVKLPTTAASTPDAVDKYLETPGDENEHAHFQKAKERLEAKHRERMSQVMREWEEAERQAKNLPKADKKAVIQHFQEKVESLEQEAANERQQLVETHMARVEAMLNDRRRLALENYITALQAVPPRPRHVFNMLKKYVRAEQKDRQHTLKHFEHVRMVDPKKAAQIRSQVMTHLRVIYERMNQSLSLLYNVPAVAEEIQDEVDELLQKEQNYSDDVLANMISEPRISYGNDALMPSLTETKTTVELLPVNGEFSLDDLQPWHSFGADSVPANTENEGSGLTNIKTEEISEVKMDAEFRHDSGYEVHHQKLVFFAEDVGSNKGAIIGLMVGGVVIATVIVITLVMLKKKQYTSIHHGVVEVDAAVTPEERHLSKMQQNGYENPTYKFFEQMQN

SEQ ID NO: 1136 - protein, 786 aa, Homo sapiens
MAGLTAAAPRPGVLLLLLSILHPSRPGGVPGAIPGGVPGGVFYPGAGLGALGGGALGPGGKPLKPVPGGLAGAGLGAGLGAFPAVTFPGALVPGGVADAAAAYKAAKAGAGLGGVPGVGGLGVSAGAVVPQPGAGVKPGKVPGVGLPGVYPGGVLPGARFPGVGVLPGVPTGAGVKPKAPGVGGAFAGIPGVGPFGGPQPGVPLGYPIKAPKLPGGYGLPYTTGKLPYGYGPGGVAGAAGKAGYPTGTGVGPQAAAAAAAKAAAKFGAGAAGVLPGVGGAGVPGVPGAIPGIGGIAGVGTPAAAAAAAAAAKAAKYGAAAGLVPGGPGFGPGVVGVPGAGVPGVGVPGAGIPVVPGAGIPGAAVPGVVSPEAAAKAAAKAAKYGARPGVGVGGIPTYGVGAGGFPGFGVGVGGIPGVAGVPGVGGVPGVGGVPGVGISPEAQAAAAAKAAKYGAAGAGVLGGLVPGAPGAVPGVPGTGGVPGVGTPAAAAAKAAAKAAQFGLVPGVGVAPGVGVAPGVGVAPGVGLAPGVGVAPGVGVAPGVGVAPGIGPGGVAAAAKSAAKVAAKAQLRAAAGLGAGIPGLGVGVGVPGLGVGAGVPGLGVGAGVPGFGAGADEGVRRSLSPELREGDPSSSQHLPSTPSSPRVPGALAAAKAAKYGAAVPGVLGGLGALGGVGIPGGVVGAGPAAAAAAAKAAAKAAQFGLVGAAGLGGLGVGGLGVPGVGGLGGIPPAAAAKAAKYGAAGLGGVLGGAGQFPLGGVAARPGFGLSPIFPGGACLGKACGRKRK

SEQ ID NO: 1137 - protein, 3910 aa, Homo sapiens
MEDEERQKKLEAGKAKVGEPEGYFLFSLAQFRQRKAQSDGQSPSKKQKKKRKTSSSKHDVSAHHDLNIDQSQCNEMYINSSQRVESTVIPESTIMRTLHSGEITSHEQGFSVELESEISTTADDCSSEVNGCSFVMRTGKPTNLLREEEFGVDDSYSEQGAQDSPTHLEMMESELAGKQHEIEELNRELEEMRVTYGTEGLQQLQEFEAAIKQRDGIITQLTANLQQARREKDETMREFLELTEQSQKLQIQFQQLQASETLRNSTHSSTAADLLQAKQQILTHQQQLEEQDHLLEDYQKKKEDFTMQISFLQEKIKVYEMEQDKKVENSNKEEIQEKETIIEELNTKIIEEEKKTLELKDKLTTADKLLGELQEQIVQKNQEIKNMKLELTNSKQKERQSSEEIKQLMGTVEELQKRNHKDSQFETDIVQRMEQETQRKLEQLRAELDEMYGQQIVQMKQELIRQHMAQMEEMKTRHKGEMENALRSYSNITVNEDQIKLMNVAINELNIKLQDTNSQKEKLKEELGLILEEKCALQRQLEDLVEELSFSREQIQRARQTIAEQESKLNEAHKSLSTVEDLKAEIVSASESRKELELKHEAEVTNYKIKLEMLEKEKNAVLDRMAESQEAELERLRTQLLFSHEEELSKLKEDLEIEHRINIEKLKDNLGIHYKQQIDGLQNEMSQKIETMQFEKDNLITKQNQLILEISKLKDLQQSLVNSKSEEMTLQINELQKEIEILRQEEKEKGTLEQEVQELQLKTELLEKQMKEKENDLQEKFAQLEAENSILKDEKKTLEDMLKIHTPVSQEERLIFLDSIKSKSKDSVWEKEIEILIEENEDLKQQCIQLNEEIEKQRNTFSFAEKNFEVNYQELQEEYACLLKVKDDLEDSKNKQELEYKSKLKALNEELHLQRINPTTVKMKSSVFDEDKTFVAETLEMGEVVEKDTTELMEKLEVTKREKLELSQRLSDLSEQLKQKHGEISFLNEEVKSLKQEKEQVSLRCRELEIIINHNRAENVQSCDTQVSSLLDGVVTMTSRGAEGSVSKVNKSFGEESKIMVEDKVSFENMTVGEESKQEQLILDHLPSVTKESSLRATQPSENDKLQKELNVLKSEQNDLRLQMEAQRICLSLVYSTHVDQVREYMENEKDKALCSLKEELIFAQEEKIKELQKIHQLELQTMKTQETGDEGKPLHLLIGKLQKAVSEECSYFLQTLCSVLGEYYTPALKCEVNAEDKENSGDYISENEDPELQDYRYEVQDFQENMHTLLNKVTEEYNKLLVLQTRLSKIWGQQTDGMKLEFGEENLPKEETEFLSIHSQMTNLEDIDVNHKSKLSSLQDLEKTKLEEQVQELESLISSLQQQLKETEQNYEAEIHCLQKRLQAVSESTVPPSLPVDSVVITESDAQRTMYPGSCVKKNIDGTIEFSGEFGVKEETNIVKLLEKQYQEQLEEEVAKVIVSMSIAFAQQTELSRISGGKENTASSKQAHAVCQQEQHYFNEMKLSQDQIGFQTFETVDVKFKEEFKPLSKELGEHGKEILLSNSDPHDIPESKDCVLTISEEMFSKDKTFIVRQSIHDEISVSSMDASRQLMLNEEQLEDMRQELVRQYQEHQQATELLRQAHMRQMERQREDQEQLQEEIKRLNRQLAQRSSIDNENLVSERERVLLEELEALKQLSLAGREKLCCELRNSSTQTQNGNENQGEVEEQTFKEKELDRKPEDVPPEILSNERYALQKANNRLLKILLEVVKTTAAVEETIGRHVLGILDRSSKSQSSASLIWRSEAEASVKSCVHEEHTRVTDESIPSYSGSDMPRNDINMWSKVTEEGTELSQRLVRSGFAGTEIDPENEELMLNISSRLQAAVEKLLEAISETSSQLEHAKVTQTELMRESFRQKQEATESLKCQEELRERLHEESRAREQLAVELSKAEGVIDGYADEKTLFERQIQEKTDIIDRLEQELLCASNRLQELEAEQQQIQEERELLSRQKEAMKAEAGPVEQQLLQETEKLMKEKLEVQCQAEKVRDDLQKQVKALEIDVEEQVSRFIELEQEKNTELMDLRQQNQALEKQLEKMRKFLDEQAIDREHERDVFQQEIQKLEQQLKVVPRFQPISEHQTREVEQLANHLKEKTDKCSELLLSKEQLQRDIQERNEEIEKLEFRVRELEQALLVSADTFQKVEDRKHFGAVEAKPELSLEVQLQAERDAIDRKEKEITNLEEQLEQFREELENKNEEVQQLHMQLEIQKKESTTRLQELEQENKLFKDDMEKLGLAIKESDAMSTQDQHVLFGKFAQIIQEKEVEIDQLNEQVTKLQQQLKITTDNKVIEEKNELIRDLETQIECLMSDQECVKRNREEEIEQLNEVIEKLQQELANIGQKTSMNAHSLSEEADSLKHQLDVVIAEKLALEQQVETANEEMTFMKNVLKETNFKMNQLTQELFSLKRERESVEKIQSIPENSVNVAIDHLSKDKPELEVVLTEDALKSLENQTYFKSFEENGKGSIINLETRLLQLESTVSAKDLELTQCYKQIKDMQEQGQFETEMLQKKIVNLQKIVEEKVAAALVSQIQLEAVQEYAKFCQDNQTISSEPERTNIQNLNQLREDELGSDISALTLRISELESQVVEMHTSLILEKEQVEIAEKNVLEKEKKLLELQKLLEGNEKKQREKEKKRSPQDVEVLKTTTELFHSNEESGFFNELEALRAESVATKAELASYKEKAEKLQEELLVKETNMTSLQKDLSQVRDHLAEAKEKLSILEKEDETEVQESKKACMFEPLPIKLSKSIASQTDGTLKISSSNQTPQILVKNAGIQINLQSECSSEEVTEIISQFTEKIEKMQELHAAEILDMESRHISETETLKREHYVAVQLLKEECGTLKAVIQCLRSKEVFGFYNMCFSTLCDSGSDWGQGIYLTHSQGFDIASEGRGEESESATDSFPKKIKGLLRAVHNEGMQVLSLTESPYSDGEDHSIQQVSEPWLEERKAYINTISSLKDLITKMQLQREAEVYDSSQSHESFSDWRGELLLALQQVFLEERSVLLAAFRTELTALGTTDAVGLLNCLEQRIQEQGVEYQAAMECLQKADRRSLLSEIQALHAQMNGRKITLKREQESEKPSQELLEYNIQQKQSQMLEMQVELSSMKDRATELQEQLSSEKMVVAELKSELAQTKLELETTLKAQHKHLKELEAFRLEVKDKTDEVHLLNDTLASEQKKSRELQWALEKEKAKLGRSEERDKEELEDLKFSLESQKQRNLQLNLLLEQQKQLLNESQQKIESQRMLYDAQLSEEQGRNLELQVLLESEKVRIREMSSTLDRERELHAQLQSSDGTGQSRPPLPSEDLLKELQKQLEEKHSRIVELLNETEKYKLDSLQTRQQMEKDRQVHRKTLQTEQEANTEGQKKMHELQSKVEDLQRQLEEKRQQVYKLDLEGQRLQGIMQEFQKQELEREEKRESRRILYQNLNEPTTWSLTSDRTRNWVLQQKIEGETKESNYAKLIEMNGGGTGCNHELEMIRQKLQCVASKLQVLPQKASERLQFETADDEDFIWVQENIDEIILQLQKLTGQQGEEPSLVSPSTSCGSLTERLLRQNAELTGHISQLTEEKNDLRNMVMKLEEQIRWYRQTGAGRDNSSRFSLNGGANIEAIIASEKEVWNREKLTLQKSLKRAEAEVYKLKAELRNDSLLQTLSPDSEHVTLKRIYGKYLRAESFRKALIYQKKYLLLLLGGFQECEDATLALLARMGGQPAFTDLEVITNRPKGFTRFRSAVRVSIAISRMKFLVRRWHRVTGSVSININRDGFGLNQGAEKTDSFYHSSGGLELYGEPRHTTYRSRSDLDYIRSPLPFQNRYPGTPADFNPGSLACSQLQNYDPDRALTDYITRLEALQRRLGTIQSGSTTQFHAGMRR

SEQ ID NO: 1138 - protein, 446 aa, Homo sapiens
MGLEALVPLAVIVAIFLLLVDLMHRRQRWAARYPPGPLPLPGLGNLLHVDFQNTPYCFDQLRRRFGDVFSLQLAWTPVVVLNGLAAVREALVTHGEDTADRPPVPITQILGFGPRSQGRPFRPNGLLDKAVSNVIASLTCGRRFEYDDPRFLRLLDLAQEGLKEESGFLREVLNAVPVLLHIPALAGKVLRFQKAFLTQLDELLTEHRMTWDPAQPPRDLTEAFLAEMEKAKGNPESSFNDENLRIVVADLFSAGMVTTSTTLAWGLLLMILHPDVQRRVQQEIDDVIGQVRRPEMGDQAHMPYTTAVIHEVQRFGDIVPLGVTHMTSRDIEVQGFRIPKGTTLITNLSSVLKDEAVWEKPFRFHPEHFLDAQGHFVKPEAFLPFSAGRRACLGEPLARMELFLFFTSLLQHFSFSVPTGQPRPSHHGVFAFLVSPSPYELCAVPR

SEQ ID NO: 1139 - protein, 896 aa, Homo sapiens
MTEESEETVLYIEHRYVCSECNQLYGSLEEVLMHQNSHVPQQHFELVGVADPGVTVATDTASGTGLYQTLVQESQYQCLECGQLLMSPSQLLEHQELHLKMMAPQEAVPAEPSPKAPPLSSSTIHYECVDCKALFASQELWLNHRQTHLRATPTKAPAPVVLGSPVVLGPPVGQARVAVEHSYRKAEEGGEGATVPSAAATTTEVVTEVELLLYKCSECSQLFQLPADFLEHQATHFPAPVPESQEPALQQEVQASSPAEVPVSQPDPLPASDHSYELRNGEAIGRDRRGRRARRNNSGEAGGAATQELFCSACDQLFLSPHQLQQHLRSHREGVFKCPLCSRVFPSPSSLDQHLGDHSSESHFLCVDCGLAFGTEALLLAHRRAHTPNPLHSCPCGKTFVNLTKFLYHRRTHGVGGVPLPTTPVPPEEPVIGFPEPAPAETGEPEAPEPPVSEETSAGPAAPGTYRCLLCSREFGKALQLTRHQRFVHRLERRHKCSICGKMFKKKSHVRNHLRTHTGERPFPCPDCSKPFNSPANLARHRLTHTGERPYRCGDCGKAFTQSSTLRQHRLVHAQHFPYRCQECGVRFHRPYRLLMHRYHHTGEYPYKCRECPRSFLLRRLLEVHQLVVHAGRQPHRCPSCGAAFPSSLRLREHRCAAAAAQAPRRFECGTCGKKVGSAARLQAHEAAHAAAGPGEVLAKEPPAPRAPRATRAPVASPAALGSTATASPAAPARRRGLECSECKKLFSTETSLQVHRRIHTGERPYPCPDCGKAFRQSTHLKDHRRLHTGERPFACEVCGKAFAISMRLAEHRRIHTGERPYSCPDCGKSYRSFSNLWKHRKTHQQQHQAAVRQQLAEAEAAVGLAVMETAVEALPLVEAIEIYPLAEAEGVQISG

SEQ ID NO: 1140 - protein, 1141 aa, Homo sapiens
MAVPGDAARVRDKPVHSGVSQAPTAGRDCHHRADPASPRDSGCRGCWGDLVLQPLRSSRKLSSALCAGSLSFLLALLVRLVRGEVGCDLEQCKEAAAAEEEEAAPGAEGGVFPGPRGGAPGGGARLSPWLQPSALLFSLLCAFFWMGLYLLRAGVRLPLAVALLAACCGGEALVQIGLGVGEDHLLSLPAAGVVLSCLAAATWLVLRLRLGVLMIALTSAVRTVSLISLERFKVAWRPYLAYLAGVLGILLARYVEQILPQSAEAAPREHLGSQLIAGTKEDIPVFKRRRRSSSVVSAEMSGCSSKSHRRTSLPCIPREQLMGHSEWDHKRGPRGSQSSGTSITVDIAVMGEAHGLITDLLADPSLPPNVCTSLRAVSNLLSTQLTFQAIHKPRVNPVTSLSENYTCSDSEESSEKDKLAIPKRLRRSLPPGLLRRVSSTWTTTTSATGLPTLEPAPVRRDRSTSIKLQEAPSSSPDSWNNPVMMTLTKSRSFTSSYAISAANHVKAKKQSRPGALAKISPLSSPCSSPLQGTPASSLVSKISAVQFPESADTTAKQSLGSHRALTYTQSAPDLSPQILTPPVICSSCGRPYSQGNPADEPLERSGVATRTPSRTDDTAQVTSDYETNNNSDSSDIVQNEDETECLREPLRKASACSTYAPETMMFLDKPILAPEPLVMDNLDSIMEQLNTWNFPIFDLVENIGRKCGRILSQVSYRLFEDMGLFEAFKIPIREFMNYFHALEIGYRDIPYHNRIHATDVLHAVWYLTTQPIPGLSTVINDHGSTSDSDSDSGFTHGHMGYVFSKTYNVTDDKYGCLSGNIPALELMALYVAAAMHDYDHPGRTNAFLVATSAPQAVLYNDRSVLENHHAAAAWNLFMSRPEYNFLINLDHVEFKHFRFLVIEAILATDLKKHFDFVAKFNGKVNDDVGIDWTNENDRLLVCQMCIKLADINGPAKCKELHLQWTDGIVNEFYEQGDEEASLGLPISPFMDRSAPQLANLQESFISHIVGPLCNSYDSAGLMPGKWVEDSDESGDTDDPEEEEEEAPAPNEEETCENNESPKKKTFKRRKIYCQITQHLLQNHKMWKKVIEEEQRLAGIENQSLDQTPQSHSSEQIQAIKEEEEEKGKPRGEEIPTQKPDQ

SEQ ID NO: 1141 - protein, 1863 aa, Homo sapiens
MGDVKLVASSHISKTSLSVDPSRVDSMPLTEAPAFILPPRNLCIKEGATAKFEGRVRGYPEPQVTWHRNGQPITSGGRFLLDCGIRGTFSLVIHAVHEEDRGKYTCEATNGSGARQVTVELTVEGSFAKQLGQPVVSKTLGDRFSAPAVETRPSIWGECPPKFATKLGRVVVKEGQMGRFSCKITGRPQPQVTWLKGNVPLQPSARVSVSEKNGMQVLEIHGVNQDDVGVYTCLVVNGSGKASMSAELSIQGLDSANRSFVRETKATNSDVRKEVTNVISKESKLDSLEAAAKSKNCSSPQRGGSPPWAANSQPQPPRESKLESCKDSPRTAPQTPVLQKTSSSITLQAARVQPEPRAPGLGVLSPSGEERKRPAPPRPATFPTRQPGLGSQDVVSKAANRRIPMEGQRDSAFPKFESKPQSQEVKENQTVKFRCEVSGIPKPEVAWFLEGTPVRRQEGSIEVYEDAGSHYLCLLKARTRDSGTYSCTASNAQGQLSCSWTLQVERLAVMEVAPSFSSVLKDCAVIEGQDFVLQCSVRGTPVPRITWLLNGQPIQYARSTCEAGVAELHIQDALPEDHGTYTCLAENALGQVSCSAWVTVHEKKSSRKSEYLLPVAPSKPTAPIFLQGLSDLKVMDGSQVTMTVQVSGNPPPEVIWLHNGNEIQESEDFHFEQRGTQHSLCIQEVFPEDTGTYTCEAWNSAGEVRTQAVLTVQEPHDGTQPWFISKPRSVTASLGQSVLISCAIAGDPFPTVHWLRDGKALCKDTGHFEVLQNEDVFTLVLKKVQPWHAGQYEILLKNRVGECSCQVSLMLQNSSARALPRGREPASCEDLCGGGVGADGGGSDRYGSLRPGWPARGQGWLEEEDGEDVRGVLKRRVETRQHTEEAIRQQEVEQLDFRDLLGKKVSTKTLSEDDLKEIPAEQMDFRANLQRQVKPKTVSEEERKVHSPQQVDFRSVLAKKGTSKTPVPEKVPPPKPATPDFRSVLGGKKKLPAENGSSSAETLNAKAVESSKPLSNAQPSGPLKPVGNAKPAETLKPMGNAKPAETLKPMGNAKPDENLKSASKEELKKDVKNDVNCKRGHAGTTDNEKRSESQGTAPAFKQKLQDVHVAEGKKLLLQCQVSSDPPATIIWTLNGKTLKTTKFIILSQEGSLCSVSIEKALPEDRGLYKCVAKNDAGQAECSCQVTVDDAPASENTKAPEMKSRRPKSSLPPVLGTESDATVKKKPAPKTPPKAAMPPQIIQFPEDQKVRAGESVELFGKVTGTQPITCTWMKFRKQIQESEHMKVENSENGSKLTILAARQEHCGCYTLLVENKLGSRQAQVNLTVVDKPDPPAGTPCASDIRSSSLTLSWYGSSYDGGSAVQSYSIEIWDSANKTWKELATCRSTSFNVQDLLPDHEYKFRVRAINVYGTSEPSQESELTTVGEKPEEPKDEVEVSDDDEKEPEVDYRTVTINTEQKVSDFYDIEERLGSGKFGQVFRLVEKKTRKVWAGKFFKAYSAKEKENIRQEISIMNCLHHPKLVQCVDAFEEKANIVMVLEIVSGGELFERIIDEDFELTERECIKYMRQISEGVEYIHKQGIVHLDLKPENIMCVNKTGTRIKLIDFGLARRLENAGSLKVLFGTPEFVAPEVINYEPIGYATDMWSIGVICYILNRLDCTQCLQHPWLMKDTKNMEAKKLSKDRMKKYMARRKWQKTGNAVRAIGRLSSMAMISGLSGRKSSTGSPTSPLNAEKLESEEDVSQAFLEAVAEEKPHVKPYFSKTIRDLEVVEGSAARFDCKIEGYPDPEVVWFKDDQSIRESRHFQIDYDEDGNCSLIISDVCGDDDAKYTCKAVNSLGEATCTAELIVETMEEGEGEGEEEEE

SEQ ID NO: 1142 - protein, 739 aa, Homo sapiens
MGFSNMEDDGPEEEERVAEPQANFNTPQALRFEELLANLLNEQHQIAKELFEQLKMKKPSAKQQKEVEKVKPQCKEVHQTLILDPAQRKRLQQQMQQHVQLLTQIHLLATCNPNLNPEASSTRICLKELGTFAQSSIALHHQYNPKFQTLFQPCNLMGAMQLIEDFSTHVSIDCSPHKTVKKTANEFPCLPKQVAWILATSKVFMYPELLPVCSLKAKNPQDKILFTKAEDNLLALGLKHFEGTEFLNPLISKYLLTCKTARQLTVRIKNLNMNRAPDNIIKFYKKTKQLPVLGKCCEEIQPHQWKPPIEREEHRLPFWLKASLPSIQEELRHMADGAREVGNMTGTTEINSDQGLEKDNSELGSETRYPLLLPKGVVLKLKPVADRFPKKAWRQKRSSVLKPLLIQPSPSLQPSFNPGKTPAQSTHSEAPPSKMVLRIPHPIQPATVLQTVPGVPPLGVSGGESFESPAALPAMPPEARTSFPLSESQTLLSSAPVPKVMMPSPASSMFRKPYVRRRPSKRRGARAFRCIKPAPVIHPASVIFTVPATTVKIVSLGGGCNMIQPVNAAVAQSPQTIPIATLLVNPTSFPCPLNQPLVASSVSPLIVSGNSVNLPIPSTPEDKAHMNVDIACAVADGENAFQGLEPKLEPQELSPLSATVFPKVEHSPGPPPVDKQCQEGLSENSAYRWTVVKTEEGRQALEPLPQGIQESLNNSSPGDLEEVVKMEPEDATEEISGFL

SEQ ID NO: 1143 - protein, 27051 aa, Homo sapiens
MTTQAPTFTQPLQSVVVLEGSTATFEAHISGFPVPEVSWFRDGQVISTSTLPGVQISFSDGRAKLTIPAVTKANSGRYSLKATNGSGQATSTAELLVKAETAPPNFVQRLQSMTVRQGSQVRLQVRVTGIPTPVVKFYRDGAEIQSSLDFQISQEGDLYSLLIAEAYPEDSGTYSVNATNSVGRATSTAELLVQGEEEVPAKKTKTIVSTAQISESRQTRIEKKIEAHFDARSIATVEMVIDGAAGQQLPHKTPPRIPPKPKSRSPTPPSIAAKAQLARQQSPSPIRHSPSPVRHVRAPTPSPVRSVSPAARISTSPIRSVRSPLLMRKTQASTVATGPEVPPPWKQEGYVASSSEAEMRETTLTTSTQIRTEERWEGRYGVQEQVTISGAAGAAASVSASASYAAEAVATGAKEVKQDADKSAAVATVVAAVDMARVREPVISAVEQTAQRTTTTAVHIQPAQEQVRKEAEKTAVTKVVVAADKAKEQELKSRTKEVITTKQEQMHVTHEQIRKETEKTFVPKVVISAAKAKEQETRISEEITKKQKQVTQEAIMKETRKTVVPKVIVATPKVKEQDLVSRGREGITTKREQVQITQEKMRKEAEKTALSTIAVATAKAKEQETILRTRETMATRQEQIQVTHGKVDVGKKAEAVATVVAAVDQARVREPREPGHLEESYAQQTTLEYGYKERISAAKVAEPPQRPASEPHVVPKAVKPRVIQAPSETHIKTTDQKGMHISSQIKKTTDLTTERLVHVDKRPRTASPHFTVSKISVPKTEHGYEASIAGSAIATLQKELSATSSAQKITKSVKAPTVKPSETRVRAEPTPLPQFPFADTPDTYKSEAGVEVKKEVGVSITGTTVREERFEVLHGREAKVTETARVPAPVEIPVTPPTLVSGLKNVTVIEGESVTLECHISGYPSPTVTWYREDYQIESSIDFQITFQSGIARLMIREAFAEDSGRFTCSAVNEAGTVSTSCYLAVQVSEEFEKETTAVTEKFTTEEKRFVESRDVVMTDTSLTEEQAGPGEPAAPYFITKPVVQKLVEGGSVVFGCQVGGNPKPHVYWKKSGVPLTTGYRYKVSYNKQTGECKLVISMTFADDAGEYTIVVRNKHGETSASASLLEEADYELLMKSQQEMLYQTQVTAFVQEPKVGETAPGFVYSEYEKEYEKEQALIRKKMAKDTVVVRTYVEDQEFHISSFEERLIKEIEYRIIKTTLEELLEEDGEEKMAVDISESEAVESGFDSRIKNYRILEGMGVTFHCKMSGYPLPKIAWYKDGKRIKHGERYQMDFLQDGRASLRIPVVLPEDEGIYTAFASNIKGNAICSGKLYVEPAAPLGAPTYIPTLEPVSRIRSLSPRSVSRSPIRMSPARMSPARMSPARMSPARMSPGRRLEETDESQLERLYKPVFVLKPVSFKCLEGQTARFDLKVVGRPMPETFWFHDGQQIVNDYTHKVVIKEDGTQSLIIVPATPSDSGEWTVVAQNRAGRSSISVILTVEAVEHQVKPMFVEKLKNVNIKEGSRLEMKVRATGNPNPDIVWLKNSDIIVPHKYPKIRIEGTKGEAALKIDSTVSQDSAWYTATAINKAGRDTTRCKVNVEVEFAEPEPERKLIIPRGTYRAKEIAAPELEPLHLRYGQEQWEEGDLYDKEKQQKPFFKKKLTSLRLKRFGPAHFECRLTPIGDPTMVVEWLHDGKPLEAANRLRMINEFGYCSLDYGVAYSRDSGIITCRATNKYGTDHTSATLIVKDEKSLVEESQLPEGRKGLQRIEELERMAHEGALTGVTTDQKEKQKPDIVLYPEPVRVLEGETARFRCRVTGYPQPKVNWYLNGQLIRKSKRFRVRYDGIHYLDIVDCKSYDTGEVKVTAENPEGVIEHKVKLEIQQREDFRSVLRRAPEPRPEFHVHEPGKLQFEVQKVDRPVDTTETKEVVKLKRAERITHEKVPEESEELRSKFKRRTEEGYYEAITAVELKSRKKDESYEELLRKTKDELLHWTKELTEEEKKALAEEGKITIPTFKPDKIELSPSMEAPKIFERIQSQTVGQGSDAHFRVRVVGKPDPECEWYKNGVKIERSDRIYWYWPEDNVCELVIRDVTAEDSASIMVKAINIAGETSSHAFLLVQAKQLITFTQELQDVVAKEKDTMATFECETSEPFVKVKWYKDGMEVHEGDKYRMHSDRKVHFLSILTIDTSDAEDYSCVLVEDENVKTTAKLIVEGAVVEFVKELQDIEVPESYSGELECIVSPENIEGKWYHNDVELKSNGKYTITSRRGRQNLTVKDVTKEDQGEYSFVIDGKKTTCKLKMKPRPIAILQGLSDQKVCEGDIVQLEVKVSLESVEGVWMKDGQEVQPSDRVHIVIDKQSHMLLIEDMTKEDAGNYSFTIPALGLSTSGRVSVYSVDVITPLKDVNVIEGTKAVLECKVSVPDVTSVKWYLNDEQIKPDDRVQAIVKGTKQRLVINRTHASDEGPYKLIVGRVETNCNLSVEKIKIIRGLRDLTCTETQNVVFEVELSHSGIDVLWNFKDKEIKPSSKYKIEAHGKIYKLTVLNMMKDDEGKYTFYAGENMTSGKLTVAGGAISKPLTDQTVAESQEAVFECEVANPDSKGEWLRDGKHLPLTNNIRSESDGHKRRLIIAATKLDDIGEYTYKVATSKTSAKLKVEAVKIKKTLKNLTVTETQDAVFTVELTHPNVKGVQWIKNGVVLESNEKYAISVKGTIYSLRIKNCAIVDESVYGFRLGRLGASARLHVETVKIIKKPKDVTALENATVAFEVSVSHDTVPVKWFHKSVEIKPSDKHRLVSERKVHKLMLQNISPSDAGEYTAVVGQLECKAKLFVETLHITKTMKNIEVPETKTASFECEVSHFNVPSMWLKNGVEIEMSEKFKIVVQGKLHQLIIMNTSTEDSAEYTFVCGNDQVSATLTVTPIMITSMLKDINAEEKDTITFEVTVNYEGISYKWLKNGVEIKSTDKCQMRTKKLTHSLNIRNVHFGDAADYTFVAGKATSTATLYVEARHIEFRKHIKDIKVLEKKRAMFECEVSEPDITVQWMKDDQELQITDRIKIQKEKYVHRLLIPSTRMSDAGKYTVVAGGNVSTAKLFVEGRDVRIRSIKKEVQVIEKQRAVVEFEVNEDDVDAHWYKDGIEINFQVQERHKYVVERRIHRMFISETRQSDAGEYTFVAGRNRSSVTLYVNAPEPPQVLQELQPVTVQSGKPARFCAVISGRPQPKISWYKEEQLLSTGFKCKFLHDGQEYTLLLIEAFPEDAAVYTCEAKNDYGVATTSASLSVEVPEVVSPDQEMPVYPPAIITPLQDTVTSEGQPARFQCRVSGTDLKVSWYSKDKKIKPSRFFRMTQFEDTYQLEIAEAYPEDEGTYTFVASNAVGQVSSTANLSLEGFSKFEENTSNSQWHVSLSVSFKKEPLGQKPSFIQPLSSLRVHNGETVRFHARVSGIPKPEIQWFHNQQLILPTKDVVFHFEESTGMALMLIVDAYSEHAGQYSCKAANSAGEATCAATLTVTPKAPESILHERIEQEIEMEMKEFSSSFLSAEEEGLHSAELQLSKINETLELLSESPVYPTKFDSEKEGTGPIFIKEVSNADISMGDVATLSVTVIGIPKPKIQWFFNGVLLTPSADYKFVFDGDDHSLIILFTKLEDEGEYTCMASNDYGKTICSAYLKINSKGEGHKDTETESAVAKSLEKLGGPCPPHFLKELKPIRCAQGLPAIFEYTVVGEPAPTVTWFKENKQLCTSVYYTIIHNPNGSGTFIVNDPQREDSGLYICKAENMLGESTCAAELLVLLEDTDMTDTPCKAKSTPEAPEDFPQTPLKGPAVEALDSEQEIATFVKDTILKAALITEENQQLSYEHIAKANELSSQLPLGAQELQSILEQDKLTPESTREFLCINGSIHFQPLKEPSPNLQLQIVQSQKTFSKEGILMPEEPETQAVLSDTEKIFPSAMSIEQINSLTVEPLKTLLAEPEGNYPQSSIEPPMHSYLTSVAEEVLSPKEKTVSDTNREQRVTLQKQEAQSALILSQSLAEGHVESLQSPDVMISQVNYEPLVPSEHSCTEGGKILIESANPLENAGQDSAVRIEEGKSLRFPLALEEKQVLLKEEHSDNVVMPPDQIIESKREPVAIKKVQEVQGRDLLSKESLLSGIPEEQRLNLKIQICRALQAAVASEQPGLFSEWLRNIEKVEVEAVNITQEPRHIMCMYLVTSAKSVTEEVTIIIEDVDPQMANLKMELRDALCAIIYEEIDILTAEGPRIQQGAKTSLQEEMDSFSGSQKVEPITEPEVESKYLISTEEVSYFNVQSRVKYLDATPVTKGVASAVVSDEKQDESLKPSEEKEESSSESGTEEVATVKIQEAEGGLIKEDGPMIHTPLVDTVSEEGDIVHLTTSITNAKEVNWYFENKLVPSDEKFKCLQDQNTYTLVIDKVNTEDHQGEYVCEALNDSGKTATSAKLTVVKRAAPVIKRKIEPLEVALGHLAKFTCEIQSAPNVRFQWFKAGREIYESDKCSIRSSKYISSLEILRTQVVDCGEYTCKASNEYGSVSCTATLTVTVPGGEKKVRKLLPERKPEPKEEVVLKSVLRKRPEEEEPKVEPKKLEKVKKPAVPEPPPPKPVEEVEVPTVTKRERKIPEPTKVPEIKPAIPLPAPEPKPKPEAEVKTIKPPPVEPEPTPIAAPVTVPVVGKKAEAKAPKEEAAKPKGPIKGVPKKTPSPIEAERRKLRPGSGGEKPPDEAPFTYQLKAVPLKFVKEIKDIILTESEFVGSSAIFECLVSPSTAITTWMKDGSNIRESPKHRFIADGKDRKLHIIDVQLSDAGEYTCVLRLGNKEKTSTAKLVVEELPVRFVKTLEEEVTVVKGQPLYLSCELNKERDVVWRKDGKIVVEKPGRIVPGVIGLMRALTINDADDTDAGTYTVTVENANNLECSSCVKVVEVIRDWLVKPIRDQHVKPKGTAIFACDIAKDTPNIKWFKGYDEIPAEPNDKTEILRDGNHLYLKIKNAMPEDIAEYAVEIEGKRYPAKLTLGEREVELLKPIEDVTIYEKESASFDAEISEADIPGQWKLKGELLRPSPTCEIKAEGGKRFLTLHKVKLDQAGEVLYQALNAITTAILTVKEIELDFAVPLKDVTVPERRQARFECVLTREANVIWSKGPDIIKSSDKFDIIADGKKHILVINDSQFDDEGVYTAEVEGKKTSARLFVTGIRLKFMSPLEDQTVKEGETATFVCELSHEKMHVVWFKNDAKLHTSRTVLISSEGKTHKLEMKEVTLDDISQIKAQVKELSSTAQLKVLEADPYFTVKLHDKTAVEKDEITLKCEVSKDVPVKWFKDGEEIVPSPKYSIKADGLRRILKIKKADLKDKGEYVCDCGTDKTKANVTVEARLIKVEKPLYGVEVFVGETAHFEIELSEPDVHGQWKLKGQPLTASPDCEIIEDGKKHILILHNCQLGMTGEVSFQAANAKSAANLKVKELPLIFITPLSDVKVFEKDEAKFECEVSREPKTFRWLKGTQEITGDDRFELIKDGTKHSMVIKSAAFEDEAKYMFEAEDKHTSGKLIIEGIRLKFLTPLKDVTAKEKESAVFTVELSHDNIRVKWFKNDQRLHTTRSVSMQDEGKTHSITFKDLSIDDTSQIRVEAMGMSSEAKLTVLEGDPYFTGKLQDYTGVEKDEVILQCEISKADAPVKWFKDGKEIKPSKNAVIKADGKKRMLILKKALKSDIGQYTCDCGTDKTSGKLDIEDREIKLVRPLHSVEVMETETARFETEISEDDIHANWKLKGEALLQTPDCEIKEEGKIHSLVLHNCRLDQTGGVDFQAANVKSSAHLRVKPRVIGLLRPLKDVTVTAGETATFDCELSYEDIPVEWYLKGKKLEPSDKVVPRSEGKVHTLTLRDVKLEDAGEVQLTAKDFKTHANLFVKEPPVEFTKPLEDQTVEEGATAVLECEVSRENAKVKWFKNGTEILKSKKYEIVADGRVRKLVIHDCTPEDIKTYTCDAKDFKTSCNLNVVPPHVEFLRPLTDLQVREKEMARFECELSRENAKVKWFKDGAEIKKGKKYDIISKGAVRILVINKCLLDDEAEYSCEVRTARTSGMLTVLEEEAVFTKNLANIEVSETDTIKLVCEVSKPGAEVIWYKGDEEIIETGRYEILTEGRKRILVIQNAHLEDAGNYNCRLPSSRTDGKVKVHELAAEFISKPQNLEILEGEKAEFVCSISKESFPVQWKRDDKTLESGDKYDVIADGKKRVLVVKDATLQDMGTYVVMVGAARAAAHLTVIEKLRIVVPLKDTRVKEQQEVVFNCEVNTEGAKAKWFRNEEAIFDSSKYIILQKDLVYTLRIRDAHLDDQANYNVSLTNHRGENVKSAANLIVEEEDLRIVEPLKDIETMEKKSVTFWCKVNRLNVTLKWTKNGEEVPFDNRVSYRVDKYKHMLTIKDCGFPDEGEYIVTAGQDKSVAELLIIEAPTEFVEHLEDQTVTEFDDAVFSCQLSREKANVKWYRNGREIKEGKKYKFEKDGSIHRLIIKDCRLDDECEYACGVEDRKSRARLFVEEIPVEIIRPPQDILEAPGADVVFLAELNKDKVEVQWLRNNMVVVQGDKHQMMSEGKIHRLQICDIKPRDQGEYRFIAKDKEARAKLELAAAPKIKTADQDLVVDVGKPLTMVVPYDAYPKAEAEWFKENEPLSTKTIDTTAEQTSFRILEAKKGDKGRYKIVLQNKHGKAEGFINLKVIDVPGPVRNLEVTETFDGEVSLAWEEPLTDGGSKIIGYVVERRDIKRKTWVLATDRAESCEFTVTGLQKGGVEYLFRVSARNRVGTGEPVETDNPVEARSKYDVPGPPLNVTITDVNRFGVSLTWEPPEYDGGAEITNYVIELRDKTSIRWDTAMTVRAEDLSATVTDVVEGQEYSFRVRAQNRIGVGKPSAATPFVKVADPIERPSPPVNLTSSDQTQSSVQLKWEPPLKDGGSPILGYIIERCEEGKDNWIRCNMKLVPELTYKVTGLEKGNKYLYRVSAENKAGVSDPSEILGPLTADDAFVEPTMDLSAFKDGLEVIVPNPITILVPSTGYPRPTATWCFGDKVLETGDRVKMKTLSAYAELVISPSERSDKGIYTLKLENRVKTISGEIDVNVIARPSAPKELKFGDITKDSVHLTWEPPDDDGGSPLTGYVVEKREVSRKTWTKVMDFVTDLEFTVPDLVQGKEYLFKVCARNKCGPGEPAYVDEPVNMSTPATVPDPPENVKWRDRTANSIFLTWDPPKNDGGSRIKGYIVERCPRGSDKWVACGEPVAETKMEVTGLEEGKWYAYRVKALNRQGASKPSRPTEEIQAVDTQEAPEIFLDVKLLAGLTVKAGTKIELPATVTGKPEPKITWTKADMILKQDKRITIENVPKKSTVTIVDSKRSDTGTYIIEAVNVCGRATAVVEVNVLDKPGPPAAFDITDVTNESCLLTWNPPRDDGGSKITNYVVERRATDSEVWHKLSSTVKDTNFKATKLIPNKEYIFRVAAENMYGVGEPVQASPITAKYQFDPPGPPTRLEPSDITKDAVTLTWCEPDDDGGSPITGYWVERLDPDTDKWVRCNKMPVKDTTYRVKGLTNKKKYRFRVLAENLAGPGKPSKSTEPILIKDPIDPPWPPGKPTVKDVGKTSVRLNWTKPEHDGGAKIESYVIEMLKTGTDEWVRVAEGVPTTQHLLPGLMEGQEYSFRVRAVNKAGESEPSEPSDPVLCREKLYPPSPPRWLEVINITKNTADLKWTVPEKDGGSPITNYIVEKRDVRRKGWQTVDTTVKDTKCTVTPLTEGSLYVFRVAAENAIGQSDYTEIEDSVLAKDTFTTPGPPYALAVVDVTKRHVDLKWEPPKNDGGRPIQRYVIEKKERLGTRWVKAGKTAGPDCNFRVTDVIEGTEVQFQVRAENEAGVGHPSEPTEILSIEDPTSPPSPPLDLHVTDAGRKHIAIAWKPPEKNGGSPIIGYHVEMCPVGTEKWMRVNSRPIKDLKFKVEEGVVPDKEYVLRVRAVNAIGVSEPSEISENVVAKDPDCKPTIDLETHDIIVIEGEKLSIPVPFRAVPVPTVSWHKDGKEVKASDRLTMKNDHISAHLEVPKSVRADAGIYTITLENKLGSATASINVKVIGLPGPCKDIKASDITKSSCKLTWEPPEFDGGTPILHYVLERREAGRRTYIPVMSGENKLSWTVKDLIPNGEYFFRVKAVNKVGGGEYIELKNPVIAQDPKQPPDPPVDVEVHNPTAEAMTITWKPPLYDGGSKIMGYIIEKIAKGEERWKRCNEHLVPILTYTAKGLEEGKEYQFRVRAENAAGISEPSRATPPTKAVDPIDAPKVILRTSLEVKRGDEIALDASISGSPYPTITWIKDENVIVPEEIKKRAAPLVRRRKGEVQEEEPFVLPLTQRLSIDNSKKGESQLRVRDSLRPDHGLYMIKVENDHGIAKAPCTVSVLDTPGPPINFVFEDIRKTSVLCKWEPPLDDGGSEIINYTLEKKDKTKPDSEWIVVTSTLRHCKYSVTKLIEGKEYLFRVRAENRFGPGPPCVSKPLVAKDPFGPPDAPDKPIVEDVTSNSMLVKWNEPKDNGSPILGYWLEKREVNSTHWSRVNKSLLNALKANVDGLLEGLTYVFRVCAENAAGPGKFSPPSDPKTAHDPISPPGPPIPRVTDTSSTTIELEWEPPAFNGGGEIVGYFVDKQLVGTNEWSRCTEKMIKVRQYTVKEIREGADYKLRVSAVNAAGEGPPGETQPVTVAEPQEPPAVELDVSVKGGIQIMAGKTLRIPAVVTGRPVPTKVWTKEEGELDKDRVVIDNVGTKSELIIKDALRKDHGRYVITATNSCGSKFAAARVEVFDVPGPVLDLKPVVTNRKMCLLNWSDPEDDGGSEITGFIIERKDAKMHTWRQPIETERSKCDITGLLEGQEYKFRVIAKNKFGCGPPVEIGPILAVDPLGPPTSPERLTYTERTKSTITLDWKEPRSNGGSPIQGYIIEKRRHDKPDFERVNKRLCPTTSFLVENLDEHQMYEFRVKAVNEIGESEPSLPLNVVIQDDEVPPTIKLRLSVRGDTIKVKAGEPVHIPADVTGLPMPKIEWSKNETVIEKPTDALQITKEEVSRSEAKTELSIPKAVREDKGTYTVTASNRLGSVFRNVHVEVYDRPSPPRNLAVTDIKAESCYLTWDAPLDNGGSEITHYVIDKRDASRKKAEWEEVTNTAVEKRYGIWKLIPNGQYEFRVRAVNKYGISDECKSDKVVIQDPYRLPGPPGKPKVLARTKGSMLVSWTPPLDNGGSPITGYWLEKREEGSPYWSRVSRAPITKVGLKGVEFNVPRLLEGVKYQFRAMAINAAGIGPPSEPSDPEVAGDPIFPPGPPSCPEVKDKTKSSISLGWKPPAKDGGSPIKGYIVEMQEEGTTDWKRVNEPDKLITTCECVVPNLKELRKYRFRVKAVNEAGESEPSDTTGEIPATDIQEEPEVFIDIGAQDCLVCKAGSQIRIPAVIKGRPTPKSSWEFDGKAKKAMKDGVHDIPEDAQLETAENSSVIIIPECKRSHTGKYSITAKNKAGQKTANCRVKVMDVPGPPKDLKVSDITRGSCRLSWKMPDDDGGDRIKGYVIEKRTIDGKAWTKVNPDCGSTTFVVPDLLSEQQYFFRVRAENRFGIGPPVETIQRTTARDPIYPPDPPIKLKIGLITKNTVHLSWKPPKNDGGSPVTHYIVECLAWDPTGTKKEAWRQCNKRDVEELQFTVEDLVEGGEYEFRVKAVNAAGVSKPSATVGPVTVKDQTCPPSIDLKEFMEVEEGTNVNIVAKIKGVPFPTLTWFKAPPKKPDNKEPVLYDTHVNKLVVDDTCTLVIPQSRRSDTGLYTITAVNNLGTASKEMRLNVLGRPGPPVGPIKFESVSADQMTLSWFPPKDDGGSKITNYVIEKREANRKTWVHVSSEPKECTYTIPKLLEGHEYVFRIMAQNKYGIGEPLDSEPETARNLFSVPGAPDKPTVSSVTRNSMTVNWEEPEYDGGSPVTGYWLEMKDTTSKRWKRVNRDPIKAMTLGVSYKVTGLIEGSDYQFRVYAINAAGVGPASLPSDPATARDPIAPPGPPFPKVTDWTKSSADLEWSPPLKDGGSKVTGYIVEYKEEGKEEWEKGKDKEVRGTKLVVTGLKEGAFYKFRVRAVNIAGIGEPGEVTDVIEMKDRLVSPDLQLDASVRDRIVVHAGGVIRIIAYVSGKPPPTVTWNMNERTLPQEATIETTAISSSMVIKNCQRSHQGVYSLLAKNEAGERKKTIIVDVLDVPGPVGTPFLAHNLTNESCKLTWFSPEDDGGSPITNYVIEKRESDRRAWTPVTYTVTRQNATVQGLIQGKAYFFRIAAENSIGMGPFVETSEALVIREPITVPERPEDLEVKEVTKNTVTLTWNPPKYDGGSEIINYVLESRLIGTEKFHKVTNDNLLSRKYTVKGLKEGDTYEYRVSAVNIVGQGKPSFCTKPITCKDELAPPTLHLDFRDKLTIRVGEAFALTGRYSGKPKPKVSWFKDEADVLEDDRTHIKTTPATLALEKIKAKRSDSGKYCVVVENSTGSRKGFCQVNVVDRPGPPVGPVSFDEVTKDYMVISWKPPLDDGGSKITNYIIEKKEVGKDVWMPVTSASAKTTCKVSKLLEGKDYIFRIHAENLYGISDPLVSDSMKAKDRFRVPDAPDQPIVTEVTKDSALVTWNKPHDGGKPITNYILEKRETMSKRWARVTKDPIHPYTKFRVPDLLEGCQYEFRVSAENEIGIGDPSPPSKPVFAKDPIAKPSPPVNPEAIDTTCNSVDLTWQPPRHDGGSKILGYIVEYQKVGDEEWRRANHTPESCPETKYKVTGLRDGQTYKFRVLAVNAAGESDPAHVPEPVLVKDRLEPPELILDANMAREQHIKVGDTLRLSAIIKGVPFPKVTWKKEDRDAPTKARIDVTPVGSKLEIRNAAHEDGGIYSLTVENPAGSKTVSVKVLVLDKPGPPRDLEVSEIRKDSCYLTWKEPLDDGGSVITNYVVERRDVASAQWSPLSATSKKKSHFAKHLNEGNQYLFRVAAENQYGRGPFVETPKPIKALDPLHPPGPPKDLHHVDVDKTEVSLVWNKPDRDGGSPITGYLVEYQEEGTQDWIKFKTVTNLECVVTGLQQGKTYRFRVKAENIVGLGLPDTTIPIECQEKLVPPSVELDVKLIEGLVVKAGTTVRFPAIIRGVPVPTAKWTTDGSEIKTDEHYTVETDNFSSVLTIKNCLRRDTGEYQITVSNAAGSKTVAVHLTVLDVPGPPTGPINILDVTPEHMTISWQPPKDDGGSPVINYIVEKQDTRKDTWGVVSSGSSKTKLKIPHLQKGCEYVFRVRAENKIGVGPPLDSTPTVAKHKFSPPSPPGKPVVTDITENAATVSWTLPKSDGGSPITGYYMERREVTGKWVRVNKTPIADLKFRVTGLYEGNTYEFRVFAENLAGLSKPSPSSDPIKACRPIKPPGPPINPKLKDKSRETADLVWTKPLSDGGSPILGYVVECQKPGTAQWNRINKDELIRQCAFRVPGLIEGNEYRFRIKAANIVGEGEPRELAESVIAKDILHPPEVELDVTCRDVITVRVGQTIRILARVKGRPEPDITWTKEGKVLVREKRVDLIQDLPRVELQIKEAVRADHGKYIISAKNSSGHAQGSAIVNVLDRPGPCQNLKVTNVTKENCTISWENPLDNGGSEITNFIVEYRKPNQKGWSIVASDVTKRLIKANLLANNEYYFRVCAENKVGVGPTIETKTPILAINPIDRPGEPENLHIADKGKTFVYLKWRRPDYDGGSPNLSYHVERRLKGSDDWERVHKGSIKETHYMVDRCVENQIYEFRVQTKNEGGESDWVKTEEVVVKEDLQKPVLDLKLSGVLTVKAGDTIRLEAGVRGKPFPEVAWTKDKDATDLTRSPRVKIDTRADSSKFSLTKAKRSDGGKYVVTATNTAGSFVAYATVNVLDKPGPVRNLKIVDVSSDRCTVCWDPPEDDGGCEIQNYILEKCETKRMVWSTYSATVLTPGTTVTRLIEGNEYIFRVRAENKIGTGPPTESKPVIAKTKYDKPGRPDPPEVTKVSKEEMTVVWNPPEYDGGKSITGYFLEKKEKHSTRWVPVNKSAIPERRMKVQNLLPDHEYQFRVKAENEIGIGEPSLPSRPVVAKDPIEPPGPPTNFRVVDTTKHSITLGWGKPVYDGGAPIIGYVVEMRPKIADASPDEGWKRCNAAAQLVRKEFTVTSLDENQEYEFRVCAQNQVGIGRPAELKEAIKPKEILEPPEIDLDASMRKLVIVRAGCPIRLFAIVRGRPAPKVTWRKVGIDNVVRKGQVDLVDTMAFLVIPNSTRDDSGKYSLTLVNPAGEKAVFVNVRVLDTPGPVSDLKVSDVTKTSCHVSWAPPENDGGSQVTHYIVEKREADRKTWSTVTPEVKKTSFHVTNLVPGNEYYFRVTAVNEYGPGVPTDVPKPVLASDPLSEPDPPRKLEVTEMTKNSATLAWLPPLRDGGAKIDGYITSYREEEQPADRWTEYSVVKDLSLVVTGLKEGKKYKFRVAARNAVGVSLPREAEGVYEAKEQLLPPKILMPEQITIKAGKKLRIEAHVYGKPHPTCKWKKGEDEVVTSSHLAVHKADSSSILIIKDVTRKDSGYYSLTAENSSGTDTQKIKVVVMDAPGPPQPPFDISDIDADACSLSWHIPLEDGGSNITNYIVEKCDVSRGDWVTALASVTKTSCRVGKLIPGQEYIFRVRAENRFGISEPLTSPKMVAQFPFGVPSEPKNARVTKVNKDCIFVAWDRPDSDGGSPIIGYLIERKERNSLLWVKANDTLVRSTEYPCAGLVEGLEYSFRIYALNKAGSSPPSKPTEYVTARMPVDPPGKPEVIDVTKSTVSLIWARPKHDGGSKIIGYFVEACKLPGDKWVRCNTAPHQIPQEEYTATGLEEKAQYQFRAIARTAVNISPPSEPSDPVTILAENVPPRIDLSVAMKSLLTVKAGTNVCLDATVFGKPMPTVSWKKDGTLLKPAEGIKMAMQRNLCTLELFSVNRKDSGDYTITAENSSGSKSATIKLKVLDKPGPPASVKINKMYSDRAMLSWEPPLEDGGSEITNYIVDKRETSRPNWAQVSATVPITSCSVEKLIEGHEYQFRICAENKYGVGDPVFTEPAIAKNPYDPPGRCDPPVISNITKDHMTVSWKPPADDGGSPITGYLLEKRETQAVNWTKVNRKPIIERTLKATGLQEGTEYEFRVTAINKAGPGKPSDASKAAYARDPQYPPGPPAFPKVYDTTRSSVSLSWGKPAYDGGSPIIGYLVEVKRADSDNWVRCNLPQNLQKTRFEVTGLMEDTQYQFRVYAVNKIGYSDPSDVPDKHYPKDILIPPEGELDADLRKTLILRAGVTMRLYVPVKGRPPPKITWSKPNVNLRDRIGLDIKSTDFDTFLRCENVNKYDAGKYILTLENSCGKKEYTIVVKVLDTPGPPVNVTVKEISKDSAYVTWEPPIIDGGSPIINYVVQKRDAERKSWSTVTTECSKTSFRVANLEEGKSYFFRVFAENEYGIGDPGETRDAVKASQTPGPVVDLKVRSVSKSSCSIGWKKPHSDGGSRIIGYVVDFLTEENKWQRVMKSLSLQYSAKDLTEGKEYTFRVSAENENGEGTPSEITVVARDDVVAPDLDLKGLPDLCYLAKENSNFRLKIPIKGKPAPSVSWKKGEDPLATDTRVSVESSAVNTTLIVYDCQKSDAGKYTITLKNVAGTKEGTISIKVVGKPGIPTGPIKFDEVTAEAMTLKWAPPKDDGGSEITNYILEKRDSVNNKWVTCASAVQKTTFRVTRLHEGMEYTFRVSAENKYGVGEGLKSEPIVARHPFDVPDAPPPPNIVDVRHDSVSLTWTDPKKTGGSPITGYHLEFKERNSLLWKRANKTPIRMRDFKVTGLTEGLEYEFRVMAINLAGVGKPSLPSEPVVALDPIDPPGKPEVINITRNSVTLIWTEPKYDGGHKLTGYIVEKRDLPSKSWMKANHVNVPECAFTVTDLVEGGKYEFRIRAKNTAGAISAPSESTETIICKDEYEAPTIVLDPTIKDGLTIKAGDTIVLNAISILGKPLPKSSWSKAGKDIRPSDITQITSTPTSSMLTIKYATRKDAGEYTITATNPFGTKVEHVKVTVLDVPGPPGPVEISNVSAEKATLTWTPPLEDGGSPIKSYILEKRETSRLLWTVVSEDIQSCRHVATKLIQGNEYIFRVSAVNHYGKGEPVQSEPVKMVDRFGPPGPPEKPEVSNVTKNTATVSWKRPVDDGGSEITGYHVERREKKSLRWVRAIKTPVSDLRCKVTGLQEGSTYEFRVSAENRAGIGPPSEASDSVLMKDAAYPPGPPSNPHVTDTTKKSASLAWGKPHYDGGLEITGYVVEHQKVGDEAWIKDTTGTALRITQFVVPDLQTKEKYNFRISAINDAGVGEPAVIPDVEIVEREMAPDFELDAELRRTLVVRAGLSIRIFVPIKGRPAPEVTWTKDNINLKNRANIENTESFTLLIIPECNRYDTGKFVMTIENPAGKKSGFVNVRVLDTPGPVLNLRPTDITKDSVTLHWDLPLIDGGSRITNYIVEKREATRKSYSTATTKCHKCTYKVTGLSEGCEYFFRVMAENEYGIGEPTETTEPVKASEAPSPPDSLNIMDITKSTVSLAWPKPKHDGGSKITGYVIEAQRKGSDQWTHITTVKGLECVVRNLTEGEEYTFQVMAVNSAGRSAPRESRPVIVKEQTMLPELDLRGIYQKLVIAKAGDNIKVEIPVLGRPKPTVTWKKGDQILKQTQRVNFETTATSTILNINECVRSDSGPYPLTARNIVGEVGDVITIQVHDIPGPPTGPIKFDEVSSDFVTFSWDPPENDGGVPISNYVVEMRQTDSTTWVELATTVIRTTYKATRLTTGLEYQFRVKAQNRYGVGPGITSACIVANYPFKVPGPPGTPQVTAVTKDSMTISWHEPLSDGGSPILGYHVERKERNGILWQTVSKALVPGNIFKSSGLTDGIAYEFRVIAENMAGKSKPSKPSEPMLALDPIDPPGKPVPLNITRHTVTLKWAKPEYTGGFKITSYIVEKRDLPNGRWLKANFSNILENEFTVSGLTEDAAYEFRVIAKNAAGAISPPSEPSDAITCRDDVEAPKIKVDVKFKDTVILKAGEAFRLEADVSGRPPPTMEWSKDGKELEGTAKLEIKIADFSTNLVNKDSTRRDSGAYTLTATNPGGFAKHIFNVKVLDRPGPPEGPLAVTEVTSEKCVLSWFPPLDDGGAKIDHYIVQKRETSRLAWTNVASEVQVTKLKVTKLLKGNEYIFRVMAVNKYGVGEPLESEPVLAVNPYGPPDPPKNPEVTTITKDSMVVCWGHPDSDGGSEIINYIVERRDKAGQRWIKCNKKTLTDLRYKVSGLTEGHEYEFRIMAENAAGISAPSPTSPFYKACDTVFKPGPPGNPRVLDTSRSSISIAWNKPIYDGGSEITGYMVEIALPEEDEWQIVTPPAGLKATSYTITGLTENQEYKIRIYAMNSEGLGEPALVPGTPKAEDRMLPPEIELDADLRKVVTIRACCTLRLFVPIKGRPAPEVKWARDHGESLDKASIESTSSYTLLIVGNVNRFDSGKYILTVENSSGSKSAFVNVRVLDTPGPPQDLKVKEVTKTSVTLTWDPPLLDGGSKIKNYIVEKRESTRKAYSTVATNCHKTSWKVDQLQEGCSYYFRVLAENEYGIGLPAETAESVKASERPLPPGKITLMDVTRNSVSLSWEKPEHDGGSRILGYIVEMQTKGSDKWATCATVKVTEATITGLIQGEEYSFRVSAQNEKGISDPRQLSVPVIAKDLVIPPAFKLLFNTFTVLAGEDLKVDVPFIGRPTPAVTWHKDNVPLKQTTRVNAESTENNSLLTIKDACREDVGHYVVKLTNSAGEAIETLNVIVLDKPGPPTGPVKMDEVTADSITLSWGPPKYDGGSSINNYIVEKRDTSTTTWQIVSATVARTTIKACRLKTGCEYQFRIAAENRYGKSTYLNSEPTVAQYPFKVPGPPGTPVVTLSSRDSMEVQWNEPISDGGSRVIGYHLERKERNSILWVKLNKTPIPQTKFKTTGLEEGVEYEFRVSAENIVGIGKPSKVSECYVARDPCDPPGRPEAIIVTRNSVTLQWKKPTYDGGSKITGYIVEKKELPEGRWMKASFTNIIDTHFEVTGLVEDHRYEFRVIARNAAGVFSEPSESTGAITARDEVDPPRISMDPKYKDTIVVHAGESFKVDADIYGKPIPTIQWIKGDQELSNTARLEIKSTDFATSLSVKDAVRVDSGNYILKAKNVAGERSVTVNVKVLDRPGPPEGPVVISGVTAEKCTLAWKPPLQDGGSDIINYIVERRETSRLVWTVVDANVQTLSCKVTKLLEGNEYTFRIMAVNKYGVGEPLESEPVVAKNPFVVPDAPKAPEVTTVTKDSMIVVWERPASDGGSEILGYVLEKRDKEGIRWTRCHKRLIGELRLRVTGLIENHDYEFRVSAENAAGLSEPSPPSAYQKACDPIYKPGPPNNPKVIDITRSSVFLSWSKPIYDGGCEIQGYIVEKCDVSVGEWTMCTPPTGINKTNIEVEKLLEKHEYNFRICAINKAGVGEHADVPGPIIVEEKLEAPDIDLDLELRKIINIRAGGSLRLFVPIKGRPTPEVKWGKVDGEIRDAAIIDVTSSFTSLVLDNVNRYDSGKYTLTLENSSGTKSAFVTVRVLDTPSPPVNLKVTEITKDSVSITWEPPLLDGGSKIKNYIVEKREATRKSYAAVVTNCHKNSWKIDQLQEGCSYYFRVTAENEYGIGLPAQTADPIKVAEVPQPPGKITVDDVTRNSVSLSWTKPEHDGGSKIIQYIVEMQAKHSEKWSECARVKSLQAVITNLTQGEEYLFRVVAVNEKGRSDPRSLAVPIVAKDLVIEPDVKPAFSSYSVQVGQDLKIEVPISGRPKPTITWTKDGLPLKQTTRINVTDSLDLTTLSIKETHKDDGGQYGITVANVVGQKTASIEIVTLDKPDPPKGPVKFDDVSAESITLSWNPPLYTGGCQITNYIVQKRDTTTTVWDVVSATVARTTLKVTKLKTGTEYQFRIFAENRYGQSFALESDPIVAQYPYKEPGPPGTPFATAISKDSMVIQWHEPVNNGGSPVIGYHLERKERNSILWTKVNKTIIHDTQFKAQNLEEGIEYEFRVYAENIVGVGKASKNSECYVARDPCDPPGTPEPIMVKRNEITLQWTKPVYDGGSMITGYIVEKRDLPDGRWMKASFTNVIETQFTVSGLTEDQRYEFRVIAKNAAGAISKPSDSTGPITAKDEVELPRISMDPKFRDTIVVNAGETFRLEADVHGKPLPTIEWLRGDKEIEESARCEIKNTDFKALLIVKDAIRIDGGQYILRASNVAGSKSFPVNVKVLDRPGPPEGPVQVTGVTSEKCSLTWSPPLQDGGSDISHYVVEKRETSRLAWTVVASEVVTNSLKVTKLLEGNEYVFRIMAVNKYGVGEPLESAPVLMKNPFVLPGPPKSLEVTNIAKDSMTVCWNRPDSDGGSEIIGYIVEKRDRSGIRWIKCNKRRITDLRLRVTGLTEDHEYEFRVSAENAAGVGEPSPATVYYKACDPVFKPGPPTNAHIVDTTKNSITLAWGKPIYDGGSEILGYVVEICKADEEEWQIVTPQTGLRVTRFEISKLTEHQEYKIRVCALNKVGLGEATSVPGTVKPEDKLEAPELDLDSELRKGIVVRAGGSARIHIPFKGRPTPEITWSREEGEFTDKVQIEKGVNYTQLSIDNCDRNDAGKYILKLENSSGSKSAFVTVKVLDTPGPPQNLAVKEVRKDSAFLVWEPPIIDGGAKVKNYVIDKRESTRKAYANVSSKCSKTSFKVENLTEGAIYYFRVMAENEFGVGVPVETVDAVKAAEPPSPPGKVTLTDVSQTSASLMWEKPEHDGGSRVLGYVVEMQPKGTEKWSIVAESKVCNAVVTGLSSGQEYQFRVKAYNEKGKSDPRVLGVPVIAKDLTIQPSLKLPFNTYSIQAGEDLKIEIPVIGRPRPNISWVKDGEPLKQTTRVNVEETATSTVLHIKEGNKDDFGKYTVTATNSAGTATENLSVIVLEKPGPPVGPVRFDEVSADFVVISWEPPAYTGGCQISNYIVEKRDTTTTTWHMVSATVARTTIKITKLKTGTEYQFRIFAENRYGKSAPLDSKAVIVQYPFKEPGPPGTPFVTSISKDQMLVQWHEPVNDGGTKIIGYHLEQKEKNSILWVKLNKTPIQDTKFKTTGLDEGLEYEFKVSAENIVGIGKPSKVSECFVARDPCDPPGRPEAIVITRNNVTLKWKKPAYDGGSKITGYIVEKKDLPDGRWMKASFTNVLETEFTVSGLVEDQRYEFRVIARNAAGNFSEPSDSSGAITARDEIDAPNASLDPKYKDVIVVHAGETFVLEADIRGKPIPDVVWSKDGKELEETAARMEIKSTIQKTTLVVKDCIRTDGGQYILKLSNVGGTKSIPITVKVLDRPGPPEGPLKVTGVTAEKCYLAWNPPLQDGGANISHYIIEKRETSRLSWTQVSTEVQALNYKVTKLLPGNEYIFRVMAVNKYGIGEPLESGPVTACNPYKPPGPPSTPEVSAITKDSMVVTWARPVDDGGTEIEGYILEKRDKEGVRWTKCNKKTLTDLRLRVTGLTEGHSYEFRVAAENAAGVGEPSEPSVFYRACDALYPPGPPSNPKVTDTSRSSVSLAWSKPIYDGGAPVKGYVVEVKEAAADEWTTCTPPTGLQGKQFTVTKLKENTEYNFRICAINSEGVGEPATLPGSVVAQERIEPPEIELDADLRKVVVLRASATLRLFVTIKGRPEPEVKWEKAEGILTDRAQIEVTSSFTMLVIDNVTRFDSGRYNLTLENNSGSKTAFVNVRVLDSPSAPVNLTIREVKKDSVTLSWEPPLIDGGAKITNYIVEKRETTRKAYATITNNCTKTTFRIENLQEGCSYYFRVLASNEYGIGLPAETTEPVKVSEPPLPPGRVTLVDVTRNTATIKWEKPESDGGSKITGYVVEMQTKGSEKWSTCTQVKTLEATISGLTAGEEYVFRVAAVNEKGRSDPRQLGVPVIARDIEIKPSVELPFHTFNVKAREQLKIDVPFKGRPQATVNWRKDGQTLKETTRVNVSSSKTVTSLSIKEASKEDVGTYELCVSNSAGSITVPITIIVLDRPGPPGPIRIDEVSCDSITISWNPPEYDGGCQISNYIVEKKETTSTTWHIVSQAVARTSIKIVRLTTGSEYQFRVCAENRYGKSSYSESSAVVAEYPFSPPGPPGTPKVVHATKSTMLVTWQVPVNDGGSRVIGYHLEYKERSSILWSKANKILIADTQMKVSGLDEGLMYEYRVYAENIAGIGKCSKSCEPVPARDPCDPPGQPEVTNITRKSVSLKWSKPHYDGGAKITGYIVERRELPDGRWLKCNYTNIQETYFEVTELTEDQRYEFRVFARNAADSVSEPSESTGPIIVKDDVEPPRVMMDVKFRDVIVVKAGEVLKINADIAGRPLPVISWAKDGIEIEERARTEIISTDNHTLLTVKDCIRRDTGQYVLTLKNVAGTRSVAVNCKVLDKPGPPAGPLEINGLTAEKCSLSWGRPQEDGGADIDYYIVEKRETSHLAWTICEGELQMTSCKVTKLLKGNEYIFRVTGVNKYGVGEPLESVAIKALDPFTVPSPPTSLEITSVTKESMTLCWSRPESDGGSEISGYIIERREKNSLRWVRVNKKPVYDLRVKSTGLREGCEYEYRVYAENAAGLSLPSETSPLIRAEDPVFLPSPPSKPKIVDSGKTTITIAWVKPLFDGGAPITGYTVEYKKSDDTDWKTSIQSLRGTEYTISGLTTGAEYVFRVKSVNKVGASDPSDSSDPQIAKEREEEPLFDIDSEMRKTLIVKAGASFTMTVPFRGRPVPNVLWSKPDTDLRTRAYVDTTDSRTSLTIENANRNDSGKYTLTIQNVLSAASLTLVVKVLDTPGPPTNITVQDVTKESAVLSWDVPENDGGAPVKNYHIEKREASKKAWVSVTNNCNRLSYKVTNLQEGAIYYFRVSGENEFGVGIPAETKEGVKITEKPSPPEKLGVTSISKDSVSLTWLKPEHDGGSRIVHYVVEALEKGQKNWVKCAVAKSTHHVVSGLRENSEYFFRVFAENQAGLSDPRELLLPVLIKEQLEPPEIDMKNFPSHTVYVRAGSNLKVDIPISGKPLPKVTLSRDGVPLKATMRFNTEITAENLTINLKESVTADAGRYEITAANSSGTTKAFINIVVLDRPGPPTGPVVISDITEESVTLKWEPPKYDGGSQVTNYILLKRETSTAVWTEVSATVARTMMKVMKLTTGEEYQFRIKAENRFGISDHIDSACVTVKLPYTTPGPPSTPWVTNVTRESITVGWHEPVSNGGSAVVGYHLEMKDRNSILWQKANKLVIRTTHFKVTTISAGLIYEFRVYAENAAGVGKPSHPSEPVLAIDACEPPRNVRITDISKNSVSLSWQQPAFDGGSKITGYIVERRDLPDGRWTKASFTNVTETQFIISGLTQNSQYEFRVFARNAVGSISNPSEVVGPITCIDSYGGPVIDLPLEYTEVVKYRAGTSVKLRAGISGKPAPTIEWYKDDKELQTNALVCVENTTDLASILIKDADRLNSGCYELKLRNAMGSASATIRVQILDKPGPPGGPIEFKTVTAEKITLLWRPPADDGGAKITHYIVEKRETSRVVWSMVSEHLEECIITTTKIIKGNEYIFRVRAVNKYGIGEPLESDSVVAKNAFVTPGPPGIPEVTKITKNSMTVVWSRPIADGGSDISGYFLEKRDKKSLGWFKVLKETIRDTRQKVTGLTENSDYQYRVCAVNAAGQGPFSEPSEFYKAADPIDPPGPPAKIRIADSTKSSITLGWSKPVYDGGSAVTGYVVEIRQGEEEEWTTVSTKGEVRTTEYVVSNLKPGVNYYFRVSAVNCAGQGEPIEMNEPVQAKDILEAPEIDLDVALRTSVIAKAGEDVQVLIPFKGRPPPTVTWRKDEKNLGSDARYSIENTDSSSLLTIPQVTRNDTGKYILTIENGVGEPKSSTVSVKVLDTPAACQKLQVKHVSRGTVTLLWDPPLIDGGSPIINYVIEKRDATKRTWSVVSHKCSSTSFKLIDLSEKTPFFFRVLAENEIGIGEPCETTEPVKAAEVPAPIRDLSMKDSTKTSVILSWTKPDFDGGSVITEYVVERKGKGEQTWSHAGISKTCEIEVSQLKEQSVLEFRVFAKNEKGLSDPVTIGPITVKELIITPEVDLSDIPGAQVTVRIGHNVHLELPYKGKPKPSISWLKDGLPLKESEFVRFSKTENKITLSIKNAKKEHGGKYTVILDNAVCRIAVPITVITLGPPSKPKGPIRFDEIKADSVILSWDVPEDNGGGEITCYSIEKRETSQTNWKMVCSSVARTTFKVPNLVKDAEYQFRVRAENRYGVSQPLVSSIIVAKHQFRIPGPPGKPVIYNVTSDGMSLTWDAPVYDGGSEVTGFHVEKKERNSILWQKVNTSPISGREYRATGLVEGLDYQFRVYAENSAGLSSPSDPSKFTLAVSPVDPPGTPDYIDVTRETITLKWNPPLRDGGSKIVGYSIEKRQGNERWVRCNFTDVSECQYTVTGLSPGDRYEFRIIARNAVGTISPPSQSSGIIMTRDENVPPIVEFGPEYFDGLIIKSGESLRIKALVQGRPVPRVTWFKDGVEIEKRMNMEITDVLGSTSLFVRDATRDHRGVYTVEAKNASGSAKAEIKVKVQDTPGKVVGPIRFTNITGEKMTLWWDAPLNDGCAPITHYIIEKRETSRLAWALIEDKCEAQSYTAIKLINGNEYQFRVSAVNKFGVGRPLDSDPVVAQIQYTVPDAPGIPEPSNITGNSITLTWARPESDGGSEIQQYILERREKKSTRWVKVISKRPISETRFKVTGLTEGNEYEFHVMAENAAGVGPASGISRLIKCREPVNPPGPPTVVKVTDTSKTTVSLEWSKPVFDGGMEIIGYIIEMCKADLGDWHKVNAEACVKTRYTVTDLQAGEEYKFRVSAINGAGKGDSCEVTGTIKAVDRLTAPELDIDANFKQTHVVRAGASIRLFIAYQGRPTPTAVWSKPDSNLSLRADIHTTDSFSTLTVENCNRNDAGKYTLTVENNSGSKSITFTVKVLDTPGPPGPITFKDVTRGSATLMWDAPLLDGGARIHHYVVEKREASRRSWQVISEKCTRQIFKVNDLAEGVPYYFRVSAVNEYGVGEPYEMPEPIVATEQPAPPRRLDVVDTSKSSAVLAWLKPDHDGGSRITGYLLEMRQKGSDFWVEAGHTKQLTFTVERLVEKTEYEFRVKAKNDAGYSEPREAFSSVIIKEPQIEPTADLTGITNQLITCKAGSPFTIDVPISGRPAPKVTWKLEEMRLKETDRVSITTTKDRTTLTVKDSMRGDSGRYFLTLENTAGVKTFSVTVVVIGRPGPVTGPIEVSSVSAESCVLSWGEPKDGGGTEITNYIVEKRESGTTAWQLVNSSVKRTQIKVTHLTKYMEYSFRVSSENRFGVSKPLESAPIIAEHPFVPPSAPTRPEVYHVSANAMSIRWEEPYHDGGSKIIGYWVEKKERNTILWVKENKVPCLECNYKVTGLVEGLEYQFRTYALNAAGVSKASEASRPIMAQNPVDAPGRPEVTDVTRSTVSLIWSAPAYDGGSKVVGYIIERKPVSEVGDGRWLKCNYTIVSDNFFTVTALSEGDTYEFRVLAKNAAGVISKGSESTGPVTCRDEYAPPKAELDARLHGDLVTIRAGSDLVLDAAVGGKPEPKIIWTKGDKELDLCEKVSLQYTGKRATAVIKFCDRSDSGKYTLTVKNASGTKAVSVMVKVLDSPGPCGKLTVSRVTQEKCTLAWSLPQEDGGAEITHYIVERRETSRLNWVIVEGECPTLSYVVTRLIKNNEYIFRVRAVNKYGPGVPVESEPIVARNSFTIPSPPGIPEEVGTGKEHIIIQWTKPESDGGNEISNYLVDKREKKSLRWTRVNKDYVVYDTRLKVTSLMEGCDYQFRVTAVNAAGNSEPSEASNFISCREPSYTPGPPSAPRVVDTTKHSISLAWTKPMYDGGTDIVGYVLEMQEKDTDQWYRVHTNATIRNTEFTVPDLKMGQKYSFRVAAVNVKGMSEYSESIAEIEPVERIEIPDLELADDLKKTVTIRAGASLRLMVSVSGRPPPVITWSKQGIDLASRAIIDTTESYSLLIVDKVNRYDAGKYTIEAENQSGKKSATVLVKVYDTPGPCPSVKVKEVSRDSVTITWEIPTIDGGAPVNNYIVEKREAAMRAFKTVTTKCSKTLYRISGLVEGTMYYFRVLPENIYGIGEPCETSDAVLVSEVPLVPAKLEVVDVTKSTVTLAWEKPLYDGGSRLTGYVLEACKAGTERWMKVVTLKPTVLEHTVTSLNEGEQYLFRIRAQNEKGVSEPRETVTAVTVQDLRVLPTIDLSTMPQKTIHVPAGRPVELVIPIAGRPPPAASWFFAGSKLRESERVTVETHTKVAKLTIRETTIRDTGEYTLELKNVTGTTSETIKVIILDKPGPPTGPIKIDEIDATSITISWEPPELDGGAPLSGYVVEQRDAHRPGWLPVSESVTRSTFKFTRLTEGNEYVFRVAATNRFGIGSYLQSEVIECRSSIRIPGPPETLQIFDVSRDGMTLTWYPPEDDGGSQVTGYIVERKEVRADRWVRVNKVPVTMTRYRSTGLTEGLEYEHRVTAINARGSGKPSRPSKPIVAMDPIAPPGKPQNPRVTDTTRTSVSLAWSVPEDEGGSKVTGYLIEMQKVDQHEWTKCNTTPTKIREYTLTHLPQGAEYRFRVLACNAGGPGEPAEVPGTVKVTEMLEYPDYELDERYQEGIFVRQGGVIRLTIPIKGKPFPICKWTKEGQDISKRAMIATSETHTELVIKEADRGDSGTYDLVLENKCGKKAVYIKVRVIGSPNSPEGPLEYDDIQVRSVRVSWRPPADDGGADILGYILERREVPKAAWYTIDSRVRGTSLVVKGLKENVEYHFRVSAENQFGISKPLKSEEPVTPKTPLNPPEPPSNPPEVLDVTKSSVSLSWSRPKDDGGSRVTGYYIERKETSTDKWVRHNKTQITTTMYTVTGLVPDAEYQFRIIAQNDVGLSETSPASEPVVCKDPFDKPSQPGELEILSISKDSVTLQWEKPECDGGKEILGYWVEYRQSGDSAWKKSNKERIKDKQFTIGGLLEATEYEFRVFAENETGLSRPRRTAMSIKTKLTSGEAPGIRKEMKDVTTKLGEAAQLSCQIVGRPLPDIKWYRFGKELIQSRKYKMSSDGRTHTLTVMTEEQEDEGVYTCIATNEVGEVETSSKLLLQATPQFHPGYPLKEKYYGAVGSTLRLHVMYIGRPVPAMTWFHGQKLLQNSENITIENTEHYTHLVMKNVQRKTHAGKYKVQLSNVFGTVDAILDVEIQDKPDKPTGPIVIEALLKNSAVISWKPPADDGGSWITNYVVEKCEAKEGAEWQLVSSAISVTTCRIVNLTENAGYYFRVSAQNTFGISDPLEVSSVVIIKSPFEKPGAPGKPTITAVTKDSCVVAWKPPASDGGAKIRNYYLEKREKKQNKWISVTTEEIRETVFSVKNLIEGLEYEFRVKCENLGGESEWSEISEPITPKSDVPIQAPHFKEELRNLNVRYQSNATLVCKVTGHPKPIVKWYRQGKEIIADGLKYRIQEFKGGYHQLIIASVTDDDATVYQVRATNQGGSVSGTASLEVEVPAKIHLPKTLEGMGAVHALRGEVVSIKIPFSGKPDPVITWQKGQDLIDNNGHYQVIVTRSFTSLVFPNGVERKDAGFYVVCAKNRFGIDQKTVELDVADVPDPPRGVKVSDVSRDSVNLTWTEPASDGGSKITNYIVEKCATTAERWLRVGQARETRYTVINLFGKTSYQFRVIAENKFGLSKPSEPSEPTITKEDKTRAMNYDEEVDETREVSMTKASHSSTKELYEKYMIAEDLGRGEFGIVHRCVETSSKKTYMAKFVKVKGTDQVLVKKEISILNIARHRNILHLHESFESMEELVMIFEFISGLDIFERINTSAFELNEREIVSYVHQVCEALQFLHSHNIGHFDIRPENIIYQTRRSSTIKIIEFGQARQLKPGDNFRLLFTAPEYYAPEVHQHDVVSTATDMWSLGTLVYVLLSGINPFLAETNQQIIENIMNAEYTFDEEAFKEISIEAMDFVDRLLVKERKSRMTASEALQHPWLKQKIERVSTKVIRTLKHRRYYHTLIKKDLNMVVSAARISCGGAIRSQKGVSVAKVKVASIEIGPVSGQIMHAVGEEGGHVKYVCKIENYDQSTQVTWYFGVRQLENSEKYEITYEDGVAILYVKDITKLDDGTYRCKVVNDYGEDSSYAELFVKGVREVYDYYCRRTMKKIKRRTDTMRLLERPPEFTLPLYNKTAYVGENVRFGVTITVHPEPHVTWYKSGQKIKPGDNDKKYTFESDKGLYQLTINSVTTDDDAEYTVVARNKYGEDSCKAKLTVTLHPPPTDSTLRPMFKRLLANAECQEGQSVCFEIRVSGIPPPTLKWEKDGQPLSLGPNIEIIHEGLDYYALHIRDTLPEDTGYYRVTATNTAGSTSCQAHLQVERLRYKKQEFKSKEEHERHVQKQIDKTLRMAEILSGTESVPLTQVAKEALREAAVLYKPAVSTKTVKGEFRLEIEEKKEERKLRMPYDVPEPRKYKQTTIEEDQRIKQFVPMSDMKWYKKIRDQYEMPGKLDRVVQKRPKRIRLSRWEQFYVMPLPRITDQYRPKWRIPKLSQDDLEIVRPARRRTPSPDYDFYYRPRRRSLGDISDEELLLPIDDYLAMKRTEEERLRLEEELELGFSASPPSRSPPHFELSSLRYSSPQAHVKVEETRKDFRYSTYHIPTKAEASTSYAELRERHAQAAYRQPKQRQRIMAEREDEELLRPVTTTQHLSEYKSELDFMSKEEKSRKKSRRQREVTEITEIEEEYEISKHAQRESSSSASRLLRRRRSLSPTYIELMRPVSELIRSRPQPAEEYEDDTERRSPTPERTRPRSPSPVSSERSLSRFERSARFDIFSRYESMKAALKTQKTSERKYEVLSQQPFTLDHAPRITLRMRSHRVPCGQNTRFILNVQSKPTAEVKWYHNGVELQESSKIHYTNTSGVLTLEILDCHTDDSGTYRAVCTNYKGEASDYATLDVTGGDYTTYASQRRDEEVPRSVFPELTRTEAYAVSSFKKTSEMEASSSVREVKSQMTETRESLSSYEHSASAEMKSAALEEKSLEEKSTTRKIKTTLAARILTKPRSMTVYEGESARFSCDTDGEPVPTVTWLRKGQVLSTSARHQVTTTKYKSTFEISSVQASDEGNYSVVVENSEGKQEAEFTLTIQKARVTEKAVTSPPRVKSPEPRVKSPEAVKSPKRVKSPEPSHPKAVSPTETKPTPTEKVQHLPVSAPPKITQFLKAEASKEIAKLTCVVESSVLRAKEVTWYKDGKKLKENGHFQFHYSADGTYELKINNLTESDQGEYVCEISGEGGTSKTNLQFMGQAFKSIHEKVSKISETKKSDQKTTESTVTRKTEPKAPEPISSKPVIVTGLQDTTVSSDSVAKFAVKATGEPRPTAIWTKDGKAITQGGKYKLSEDKGGFFLEIHKTDTSDSGLYTCTVKNSAGSVSSSCKLTIKAIKDTEAQKVSTQKTSEITPQKKAVVQEEISQKALRSEEIKMSEAKSQEKLALKEEASKVLISEEVKKSAATSLEKSIVHEEITKTSQASEEVRTHAEIKAFSTQMSINEGQRLVLKANIAGATDVKWVLNGVELTNSEEYRYGVSGSDQTLTIKQASHRDEGILTCISKTKEGIVKCQYDLTLSKELSDAPAFISQPRSQNINEGQNVLFTCEISGEPSPEIEWFKNNLPISISSNVSISRSRNVYSLEIRNASVSDSGKYTIKAKNFRGQCSATASLMVLPLVEEPSREVVLRTSGDTSLQGSFSSQSVQMSASKQEASFSSFSSSSASSMTEMKFASMSAQSMSSMQESFVEMSSSSFMGISNMTQLESSTSKMLKAGIRGIPPKIEALPSDISIDEGKVLTVACAFTGEPTPEVTWSCGGRKIHSQEQGRFHIENTDDLTTLIIMDVQKQDGGLYTLSLGNEFGSDSATVNIHIRSI

SEQ ID NO: 1144 - protein, 1422 aa, Homo sapiens
MATLACRVQFLDDTDPFNSTNFPEPSRPPLFTFREDLALGTQLAGVHRLLQAPHKLDDCTLQLSHNGAYLDLEATLAEQRDELEGFQDDAGRGKKHSIILRTQLSVRVHACIEKLYNSSGRDLRRALFSLKQIFQDDKDLVHEFVVAEGLTCLIKVGAEADQNYQNYILRALGQIMLYVDGMNGVINRNETIQWLYTLIGSKFRLVVKTALKLLLVFVEYSESNAPLLIQAVTAVDTKRGVKPWSNIMEILEEKDGVDTELLVYAMTLVNKTLSGLPDQDTFYDVVDCLEELGIAAVSQRHLNKKGTDLDLVEQLNIYEVALRHEDGDETTEPPPSGCRDRRRASVCSSGGGEHRGLDRRRSRRHSVQSIKSTLSAPTSPCSQSAPSFKPNQVRDLREKYSNFGNNSYHSSRPSSGSSVPTTPTSSVSPPQEARLERSSPSGLLTSSFRQHQESLAAERERRRQEREERLQRIEREERNKFRYKYLEQLAAEEHEKELRSRSVSRGRADLSLDLTSPAAPACLAPLSHSPSSSDSQEALTVSASSPGTPHHPQASAGDPEPESEAEPEAEAGAGQVADEAGQDIASAHEGAETEVEQALEQEPEERASLSEKERQNEGVNERDNCSASSVSSSSSTLEREEKEDKLSRDRTTGLWPAGVQDAGVNGQCGDILTNKRFMLDMLYAHNRKSPDDEEKGDGEAGRTQQEAEAVASLATRISTLQANSQTQDESVRRVDVGCLDNRGSVKAFAEKFNSGDLGRGSISPDAEPNDKVPETAPVQPKTESDYIWDQLMANPRELRIQDMDFTDLGEEDDIDVLDVDLGHREAPGPPPPPPPTFLGLPPPPPPPLLDSIPPPPVPGNLLVPPPPVFNAPQGLGWSQVPRGQPTFTKKKKTIRLFWNEVRPFDWPCKNNRRCREFLWSKLEPIKVDTSRLEHLFESKSKELSVSKKTAADGKRQEIIVLDSKRSNAINIGLTVLPPPRTIKIAILNFDEYALNKEGIEKILTMIPTDEEKQKIQEAQLANPEIPLGSAEQFLLTLSSISELSARLHLWAFKMDYETTEKEVAEPLLDLKEGIDQLENNKTLGFILSTLLAIGNFLNGTNAKAFELSYLEKVPEVKDTVHKQSLLHHVCTMVVENFPDSSDLYSEIGAITRSAKVDFDQLQDNLCQMERRCKASWDHLKAIAKHEMKPVLKQRMSEFLKDCAERIIILKIVHRRIINRFHSFLLFMGHPPYAIREVNINKFCRIISEFALEYRTTRERVLQQKQKRANHRERNKTRGKMITDSGKFSGSSPAPPSQPQGLSYAEDAAEHENMKAVLKTSSPSVEDATPALGVRTRSRASRGSTSSWTMGTDDSPNVTDDAADEIMDRIVKSATQVPSQRVVPRERKRSRANRKSLRRTLKSGLTPEEARALGLVGTSELQL

SEQ ID NO: 1145 - protein, 683 aa, Homo sapiens
MNGAPSPEDGASPSSPPLPPPPPPSWREFCESHARAAALDFARRFRLYLASHPQYAGPGAEAAFSRRFAELFLQHFEAEVARASGSLSPPILAPLSPGAEISPHDLSLESCRVGGPLAVLGPSRSSEDLAGPLPSSVSSSSTTSSKPKLKKRFSLRSVGRSVRGSVRGILQWRGTVDPPSSAGPLETSSGPPVLGGNSNSNSSGGAGTVGRGLVSDGTSPGERWTHRFERLRLSRGGGALKDGAGMVQREELLSFMGAEEAAPDPAGVGRGGGVAGPPSGGGGQPQWQKCRLLLRSEGEGGGGSRLEFFVPPKASRPRLSIPCSSITDVRTTTALEMPDRENTFVVKVEGPSEYIMETVDAQHVKAWVSDIQECLSPGPCPATSPRPMTLPLAPGTSFLTRENTDSLELSCLNHSESLPSQDLLLGPSESNDRLSQGAYGGLSDRPSASISPSSASIAASHFDSMELLPPELPPRIPIEEGPPTGTVHPLSAPYPPLDTPETATGSFLFQGEPEGGEGDQPLSGYPWFHGMLSRLKAAQLVLTGGTGSHGVFLVRQSETRRGEYVLTFNFQGKAKHLRLSLNEEGQCRVQHLWFQSIFDMLEHFRVHPIPLESGGSSDVVLVSYVPSSQRQQGEQSRSAGEEVPVHPRSEAGSRLGAMRGCAREMDATPMPPAPSCPSERVTV

SEQ ID NO: 1146 - protein, 1838 aa, Homo sapiens
MALQLWALTLLGLLGAGASLRPRKLDFFRSEKELNHLAVDEASGVVYLGAVNALYQLDAKLQLEQQVATGPALDNKKCTPPIEASQCHEAEMTDNVNQLLLLDPPRKRLVECGSLFKGICALRALSNISLRLFYEDGSGEKSFVASNDEGVATVGLVSSTGPGGDRVLFVGKGNGPHDNGIIVSTRLLDRTDSREAFEAYTDHATYKAGYLSTNTQQFVAAFEDGPYVFFVFNQQDKHPARNRTLLARMCREDPNYYSYLEMDLQCRDPDIHAAAFGTCLAASVAAPGSGRVLYAVFSRDSRSSGGPGAGLCLFPLDKVHAKMEANRNACYTGTREARDIFYKPFHGDIQCGGHAPGSSKSFPCGSEHLPYPLGSRDGLRGTAVLQRGGLNLTAVTVAAENNHTVAFLGTSDGRILKVYLTPDGTSSEYDSILVEINKRVKRDLVLSGDLGSLYAMTQDKVFRLPVQECLSYPTCTQCRDSQDPYCGWCVVEGRCTRKAECPRAEEASHWLWSRSKSCVAVTSAQPQNMSRRAQGEVQLTVSPLPALSEEDELLCLFGESPPHPARVEGEAVICNSPSSIPVTPPGQDHVAVTIQLLLRRGNIFLTSYQYPFYDCRQAMSLEENLPCISCVSNRWTCQWDLRYHECREASPNPEDGIVRAHMEDSCPQFLGPSPLVIPMNHETDVNFQGKNLDTVKGSSLHVGSDLLKFMEPVTMQESGTFAFRTPKLSHDANETLPLHLYVKSYGKNIDSKLHVTLYNCSFGRSDCSLCRAANPDYRCAWCGGQSRCVYEALCNTTSECPPPVITRIQPETGPLGGGIRITILGSNLGVQAGDIQRISVAGRNCSFQPERYSVSTRIVCVIEAAETPFTGGVEVDVFGKLGRSPPNVQFTFQQPKPLSVEPQQGPQAGGTTLTIHGTHLDTGSQEDVRVTLNGVPCKVTKFGAQLQCVTGPQATRGQMLLEVSYGGSPVPNPGIFFTYRENPVLRAFEPLRSFASGGRSINVTGQGFSLIQRFAMVVIAEPLQSWQPPREAESLQPMTVVGTDYVFHNDTKVVFLSPAVPEEPEAYNLTVLIEMDGHRALLRTEAGAFEYVPDPTFENFTGGVKKQVNKLIHARGTNLNKAMTLQEAEAFVGAERCTMKTLTETDLYCEPPEVQPPPKRRQKRDTTHNLPEFIVKFGSREWVLGRVEYDTRVSDVPLSLILPLVIVPMVVVIAVSVYCYWRKSQQAEREYEKIKSQLEGLEESVRDRCKKEFTDLMIEMEDQTNDVHEAGIPVLDYKTYTDRVFFLPSKDGDKDVMITGKLDIPEPRRPVVEQALYQFSNLLNSKSFLINFIHTLENQREFSARAKVYFASLLTVALHGKLEYYTDIMHTLFLELLEQYVVAKNPKLMLRRSETVVERMLSNWMSICLYQYLKDSAGEPLYKLFKAIKHQVEKGPVDAVQKKAKYTLNDTGLLGDDVEYAPLTVSVIVQDEGVDAIPVKVLNCDTISQVKEKIIDQVYRGQPCSCWPRPDSVVLEWRPGSTAQILSDLDLTSQREGRWKRVNTLMHYNVRDGATLILSKVGVSQQPEDSQQDLPGERHALLEEENRVWHLVRPTDEVDEGKSKRGSVKEKERTKAITEIYLTRLLSVKGTLQQFVDNFFQSVLAPGHAVPPAVKYFFDFLDEQAEKHNIQDEDTIHIWKTNSLPLRFWVNILKNPHFIFDVHVHEVVDASLSVIAQTFMDACTRTEHKLSRDSPSNKLLYAKEISTYKKMVEDYYKGIRQMVQVSDQDMNTHLAEISRAHTDSLNTLVALHQLYQYTQKYYDEIINALEEDPAAQKMQLAFRLQQIAAALENKVTDL

SEQ ID NO: 1147 - protein, 340 aa, Homo sapiens
MSGEPELIELRELAPAGRAGKGRTRLERANALRIARGTACNPTRQLVPGRGHRFQPAGPATHTWCDLCGDFIWGVVRKGLQCAHCKFTCHYRCRALVCLDCCGPRDLGWEPAVERDTNVDEPVEWETPDLSQAEIEQKIKEYNAQINSNLFMSLNKDGSYTGFIKVQLKLVRPVSVPSSKKPPSLQDARRGPGRGTSVRRRTSFYLPKDAVKHLHVLSRTRAREVIEALLRKFLVVDDPRKFALFERAERHGQVYLRKLLDDEQPLRLRLLAGPSDKALSFVLKENDSGEVNWDAFSMPELHNFLRILQREEEEHLRQILQKYSYCRQKIQEALHACPLG

SEQ ID NO: 1148 - protein, 1439 aa, Homo sapiens
MAEAGDAALSVAEWLRALHLEQYTGLFEQHGLVWATECQGLSDTRLMDMGMLLPGHRRRILAGLLRAHTSPAPAPRPTPRPVPMKRHIFRSPPVPATPPEPLPTTTEDEGLPAAPPIPPRRSCLPPTCFTTPSTAAPDPVLPPLPAKRHLAELSVPPVPPRTGPPRLLVSLPTKEEESLLPSLSSPPQPQSEEPLSTLPQGPPQPPSPPPCPPEIPPKPVRLFPEFDDSDYDEVPEEGPGAPARVMTKKEEPPPSRVPRAVRVASLLSEGEELSGDDQGDEEEDDHAYEGVPNGGWHTSSLSLSLPSTIAAPHPMDGPPGGSTPVTPVIKAGWLDKNPPQGSYIYQKRWVRLDTDHLRYFDSNKDAYSKRFISVACISHVAAIGDQKFEVITNNRTFAFRAESDVERKEWMQALQQAMAEQRARARLSSAYLLGVPGSEQPDRAGSLELRGFKNKLYVAVVGDKVQLYKNLEEYHLGIGITFIDMSVGNVKEVDRRSFDLTTPYRIFSFSADSELEKEQWLEAMQGAIAEALSTSEVAERIWAAAPNRFCADCGAPQPDWASINLCVVICKRCAGEHRGLGAGVSKVRSLKMDRKVWTETLIELFLQLGNGAGNRFWAANVPPSEALQPSSSPSTRRCHLEAKYREGKYRRYHPLFGNQEELDKALCAAVTTTDLAETQALLGCGAGINCFSGDPEAPTPLALAEQAGQTLQMEFLRNNRTTEVPRLDSMKPLEKHYSVVLPTVSHSGFLYKTASAGKLLQDRRAREEFSRRWCVLGDGVLSYFENERAVTPNGEIRASEIVCLAVPPPDTHGFEHTFEVYTEGERLYLFGLESAEQAHEWVKCIAKAFVPPLAEDLLARDFERLGRLPYKAGLSLQRAQEGWFSLSGSELRAVFPEGPCEEPLQLRKLQELSIQGDSENQVLVLVERRRTLYIQGERRLDFMGWLGAIQKAAASMGDTLSEQQLGDSDIPVIVYRCVDYITQCGLTSEGIYRKCGQTSKTQRLLESLRQDARSVHLKEGEQHVDDVSSALKRFLRDLPDGLFTRAQRLTWLEASEIEDEEEKVSRYRELLVRLPPVNRATVKALISHLYCVQCFSDTNQMNVHNLAIVFGPTLFQTDGQDYKAGRVVEDLINHYVVVFSVDEEELRKQREEITAIVKMRVAGTASGTQHAGDFICTVYLEEKKAETEQHIKVPASMTAEELTLEILDRRNVGIREKDYWTCFEVNEREEAERPLHFAEKVLPILHGLGTDSHLVVKKHQAMEAMLLYLASRVGDTKHGMMKFREDRSLLGLGLPSGGFHDRYFILNSSCLRLYKEVRSHRPEKEWPIKSLKVYLGVKKKLRPPTCWGFTVVHETEKHEKQQWYLCCDTQMELREWFATFLFVQHDGLVWPSEPSRVSRAVPEVRLGSVSLIPLRGSENEMRRSVAAFTADPLSLLRNV

SEQ ID NO: 1149 - protein, 1252 aa, Homo sapiens
MSTTVNVDSLAEYEKSQIKRALELGTVMTVFSFRKSTPERRTVQVIMETRQVAWSKTADKIEGFLDIMEIKEIRPGKNSKDFERAKAVRQKEDCCFTILYGTQFVLSTLSLAADSKEDAVNWLSGLKILHQEAMNASTPTIIESWLRKQIYSVDQTRRNSISLRELKTILPLINFKVSSAKFLKDKFVEIGAHKDELSFEQFHLFYKKLMFEQQKSILDEFKKDSSVFILGNTDRPDASAVYLHDFQRFLIHEQQEHWAQDLNKVRERMTKFIDDTMRETAEPFLFVDEFLTYLFSRENSIWDEKYDAVDMQDMNNPLSHYWISSSHNTYLTGDQLRSESSPEAYIRCLRMGCRCIELDCWDGPDGKPVIYHGWTRTTKIKFDDVVQAIKDHAFVTSSFPVILSIEEHCSVEQQRHMAKAFKEVFGDLLLTKPTEASADQLPSPSQLREKIIIKHKKLGPRGDVDVNMEDKKDEHKQQGELYMWDSIDQKWTRHYCAIADAKLSFSDDIEQTMEEEVPQDIPPTELHFGEKWFHKKVEKRTSAEKLLQEYCMETGGKDGTFLVRESETFPNDYTLSFWRSGRVQHCRIRSTMEGGTLKYYLTDNLTFSSIYALIQHYRETHLRCAEFELRLTDPVPNPNPHESKPWYYDSLSRGEAEDMLMRIPRDGAFLIRKREGSDSYAITFRARGKVKHCRINRDGRHFVLGTSAYFESLVELVSYYEKHSLYRKMRLRYPVTPELLERYNMERDINSLYDVSRMYVDPSEINPSMPQRTVKALYDYKAKRSDELSFCRGALIHNVSKEPGGWWKGDYGTRIQQYFPSNYVEDISTADFEELEKQIIEDNPLGSLCRGILDLNTYNVVKAPQGKNQKSFVFILEPKQQGDPPVEFATDRVEELFEWFQSIREITWKIDTKENNMKYWEKNQSIAIELSDLVVYCKPTSKTKDNLENPDFREIRSFVETKADSIIRQKPVDLLKYNQKGLTRVYPKGQRVDSSNYDPFRLWLCGSQMVALNFQTADKYMQMNHALFSLNGRTGYVLQPESMRTEKYDPMPPESQRKILMTLTVKVLGARHLPKLGRSIACPFVEVEICGAEYDNNKFKTTVVNDNGLSPIWAPTQEKVTFEIYDPNLAFLRFVVYEEDMFSDPNFLAHATYPIKAVKSGFRSVPLKNGYSEDIELASLLVFCEMRPVLESEEELYSSCRQLRRRQEELNNQLFLYDTHQNLRNANRDALVKEFSVNENQSSCTRRNATRG

SEQ ID NO: 1150 - protein, 549 aa, Homo sapiens
MSPTISHKDSSRQRRPGNFSHSLDMKSGPLPPGGWDDSHLDSAGREGDREALLGDTGTGDFLKAPQSFRAELSSILLLLFLYVLQGIPLGLAGSIPLILQSKNVSYTDQAFFSFVFWPFSLKLLWAPLVDAVYVKNFGRRKSWLVPTQYILGLFMIYLSTQVDRLLGNTDDRTPDVIALTVAFFLFEFLAATQDIAVDGWALTMLSRENVGYASTCNSVGQTAGYFLGNVLFLALESADFCNKYLRFQPQPRGIVTLSDFLFFWGTVFLITTTLVALLKKENEVSVVKEETQGITDTYKLLFAIIKMPAVLTFCLLILTAKIGFSAADAVTGLKLVEEGVPKEHLALLAVPMVPLQIILPLIISKYTAGPQPLNTFYKAMPYRLLLGLEYALLVWWTPKVEHQGGFPIYYYIVVLLSYALHQVTVYSMYVSIMAFNAKVSDPLIGGTYMTLLNTVSNLGGNWPSTVALWLVDPLTVKECVGASNQNCRTPDAVELCKKLGGSCVTALDGYYVESIICVFIGFGWWFFLGPKFKKLQDEGSSSWKCKRNN

SEQ ID NO: 1151 - protein, 1960 aa, Homo sapiens [sequence omitted]

SEQ ID NO: 1152 - protein, 326 aa, Homo sapiens
MAPPAGGAAAAASDLGSAAVLLAVHAAVRPLGAGPDAEAQLRRLQLSADPERPGRFRLELLGAGPGAVNLEWPLESVSYTIRGPTQHELQPPPGGPGTLSLHFLNPQEAQRWAVLVRGATVEGQNGSKSNSPPALGPEACPVSLPSPPEASTLKGPPPEADLPRSPGNLTEREELAGSLARAIAGGDEKGAAQVAAVLAQHRVALSVQLQEACFPPGPIRLQVTLEDAASAASAASSAHVALQVHPHCTVAALQEQVFSELGFPPAVQRWVIGRCLCVPERSLASYGVRQDGDPAFLYLLSAPREAPAQLVLSFLHLHQCPRPPWL

SEQ ID NO: 1153 - protein, 1188 aa, Homo sapiens
MVPCWNHGNITRSKAEELLSRTGKDGSFLVRASESISRAYALCVLYRNCVYTYRILPNEDDKFTVQASEGVSMRFFTKLDQLIEFYKKENMGLVTHLQYPVPLEEEDTGDDPEEDTESVVSPPELPPRNIPLTASSCEAKEVPFSNENPRATETSRPSLSETLFQRLQSMDTSGLPEEHLKAIQDYLSTQLAQDSEFVKTGSSSLPHLKKLTTLLCKELYGEVIRTLPSLESLQRLFDQQLSPGLRPRPQVPGEANPINMVSKLSQLTSLLSSIEDKVKALLHEGPESPHRPSLIPPVTFEVKAESLGIPQKMQLKVDVESGKLIIKKSKDGSEDKFYSHKKILQLIKSQKFLNKLVILVETEKEKILRKEYVFADSKKREGFCQLLQQMKNKHSEQPEPDMITIFIGTWNMGNAPPPKKITSWFLSKGQGKTRDDSADYIPHDIYVIGTQEDPLSEKEWLEILKHSLQEITSVTFKTVAIHTLWNIRIVVLAKPEHENRISHICTDNVKTGIANTLGNKGAVGVSFMFNGTSLGFVNSHLTSGSEKKLRRNQNYMNILRFLALGDKKLSPFNITHRFTHLFWFGDLNYRVDLPTWEAETIIQKIKQQQYADLLSHDQLLTERREQKVFLHFEEEEITFAPTYRFERLTRDKYAYTKQKATGMKYNLPSWCDRVLWKSYPLVHVVCQSYGSTSDIMTSDHSPVFATFEAGVTSQFVSKNGPGTVDSQGQIEFLRCYATLKTKSQTKFYLEFHSSCLESFVKSQEGENEEGSEGELVVKFGETLPKLKPIISDPEYLLDQHILISIKSSDSDESYGEGCIALRLEATETQLPIYTPLTHHGELTGHFQGEIKLQTSQGKTREKLYDFVKTERDESSGPKTLKSLTSHDPMKQWEVTSRAPPCSGSSITEIINPNYMGVGPFGPPMPLHVKQTLSPDQQPTAWSYDQPPKDSPLGPCRGESPPTPPGQPPISPKKFLPSTANRGLPPRTQESRPSDLGKNAGDTLPQEDLPLTKPEMFENPLYGSLSSFPKPAPRKDQESPKMPRKEPPPCPEPGILSPSIVLTKAQEADRGEGPGKQVPAPRLRSFTCSSSAEGRAAGGDKSQGKPKTPVSSQAPVPAKRPIKPSRSEINQQTPPTPTPRPPLPVKSPAVLHLQHSKGRDYRDNTELPHHGKHRPEEGPPGPLGRTAMQ

SEQ ID NO: 1154 - protein, 343 aa, Homo sapiens
MEEPQSDPSVEPPLSQETFSDLWKLLPENNVLSPLPSQAMDDLMLSPDDIEQWFTEDPGPDEAPRMPEAAPPVAPAPAAPTPAAPAPAPSWPLSSSVPSQKTYQGSYGFRLGFLHSGTAKSVTCTYSPALNKMFCQLAKTCPVQLWVDSTPPPGTRVRAMAIYKQSQHMTEVVRRCPHHERCSDSDGLAPPQHLIRVEGNLRVEYLDDRNTFRHSVVVPYEPPEVGSDCTTIHYNYMCNSSCMGGMNRRPILTIITLEDSSGNLLGRNSFEVRVCACPGRDRRTEEENLRKKGEPHHELPPGSTKRALPNNTSSSPQPKKKPLDGEYFTLQKTFPARHGGSHL

SEQ ID NO: 1155 - protein, 385 aa, Homo sapiens
MRLLAKIICLMLWAICVAEDCNELPPRRNTEILTGSWSDQTYPEGTQAIYKCRPGYRSLGNVIMVCRKGEWVALNPLRKCQKRPCGHPGDTPFGTFTLTGGNVFEYGVKAVYTCNEGYQLLGEINYRECDTDGWTNDIPICEEISCKSPDVINGSPISQKIIYKENERFQYKCNMGYEYSERGDAVCTESGWRPLPSCEEKSCDNPYIPNGDYSPLRIKHRTGDEITYQCRNGFYPATRGNTAKCTSTGWIPAPRCTLKPCDYPDIKHGGLYHENMRRPYFPVAVGKYYSYYCDEHFETPSGSYWDHIHCTQDGWSPAVPCLRKCYFPYLENGYNQNHGRKFVQGKSIDVACHPGYALPKAQTTVTCMENGWSPTPRCIRVSFTL

SEQ ID NO: 1156 - protein, 2386 aa, Homo sapiens
MLRGPGPGLLLLAVQCLGTAVPSTGASKSKRQAQQMVQPQSPVAVSQSKPGCYDNGKHYQINQQWERTYLGNALVCTCYGGSRGFNCESKPEAEETCFDKYTGNTYRVGDTYERPKDSMIWDCTCIGAGRGRISCTIANRCHEGGQSYKIGDTWRRPHETGGYMLECVCLGNGKGEWTCKPIAEKCFDHAAGTSYVVGETWEKPYQGWMMVDCTCLGEGSGRITCTSRNRCNDQDTRTSYRIGDTWSKKDNRGNLLQCICTGNGRGEWKCERHTSVQTTSSGSGPFTDVRAAVYQPQPHPQPPPYGHCVTDSGVVYSVGMQWLKTQGNKQMLCTCLGNGVSCQETAVTQTYGGNSNGEPCVLPFTYNGRTFYSCTTEGRQDGHLWCSTTSNYEQDQKYSFCTDHTVLVQTRGGNSNGALCHFPFLYNNHNYTDCTSEGRRDNMKWCGTTQNYDADQKFGFCPMAAHEEICTTNEGVMYRIGDQWDKQHDMGHMMRCTCVGNGRGEWTCIAYSQLRDQCIVDDITYNVNDTFHKRHEEGHMLNCTCFGQGRGRWKCDPVDQCQDSETGTFYQIGDSWEKYVHGVRYQCYCYGRGIGEWHCQPLQTYPSSSGPVEVFITETPSQPNSHPIQWNAPQPSHISKYILRWRPKNSVGRWKEATIPGHLNSYTIKGLKPGVVYEGQLISIQQYGHQEVTRFDFTTTSTSTPVTSNTVTGETTPFSPLVATSESVTEITASSFVVSWVSASDTVSGFRVEYELSEEGDEPQYLDLPSTATSVNIPDLLPGRKYIVNVYQISEDGEQSLILSTSQTTAPDAPPDTTVDQVDDTSIVVRWSRPQAPITGYRIVYSPSVEGSSTELNLPETANSVTLSDLQPGVQYNITIYAVEENQESTPVVIQQETTGTPRSDTVPSPRDLQFVEVTDVKVTIMWTPPESAVTGYRVDVIPVNLPGEHGQRLPISRNTFAEVTGLSPGVTYYFKVFAVSHGRESKPLTAQQTTKLDAPTNLQFVNETDSTVLVRWTPPRAQITGYRLTVGLTRRGQPRQYNVGPSVSKYPLRNLQPASEYTVSLVAIKGNQESPKATGVFTTLQPGSSIPPYNTEVTETTIVITWTPAPRIGFKLGVRPSQGGEAPREVTSDSGSIVVSGLTPGVEYVYTIQVLRDGQERDAPIVNKVVTPLSPPTNLHLEANPDTGVLTVSWERSTTPDITGYRITTTPTNGQQGNSLEEVVHADQSSCTFDNLSPGLEYNVSVYTVKDDKESVPISDTIIPAVPPPTDLRFTNIGPDTMRVTWAPPPSIDLTNFLVRYSPVKNEEDVAELSISPSDNAVVLTNLLPGTEYVVSVSSVYEQHESTPLRGRQKTGLDSPTGIDFSDITANSFTVHWIAPRATITGYRIRHHPEHFSGRPREDRVPHSRNSITLTNLTPGTEYVVSIVALNGREESPLLIGQQSTVSDVPRDLEVVAATPTSLLISWDAPAVTVRYYRITYGETGGNSPVQEFTVPGSKSTATISGLKPGVDYTITVYAVTGRGDSPASSKPISINYRTEIDKPSQMQVTDVQDNSISVKWLPSSSPVTGYRVTTTPKNGPGPTKTKTAGPDQTEMTIEGLQPTVEYVVSVYAQNPSGESQPLVQTAVTNIDRPKGLAFTDVDVDSIKIAWESPQGQVSRYRVTYSSPEDGIHELFPAPDGEEDTAELQGLRPGSEYTVSVVALHDDMESQPLIGTQSTAIPAPTDLKFTQVTPTSLSAQWTPPNVQLTGYRVRVTPKEKTGPMKEINLAPDSSSVVVSGLMVATKYEVSVYALKDTLTSRPAQGVVTTLENVSPPRRARVTDATETTITISWRTKTETITGFQVDAVPANGQTPIQRTIKPDVRSYTITGLQPGTDYKIYLYTLNDNARSSPVVIDASTAIDAPSNLRFLATTPNSLLVSWQPPRARITGYIIKYEKPGSPPREVVPRPRPGVTEATITGLEPGTEYTIYVIALKNNQKSEPLIGRKKTDELPQLVTLPHPNLHGPEILDVPSTVQKTPFVTHPGYDTGNGIQLPGTSGQQPSVGQQMIFEEHGFRRTTPPTTATPIRHRPRPYPPNVGEEIQIGHIPREDVDYHLYPHGPGLNPNASTGQEALSQTTISWAPFQDTSEYIISCHPVGTDEEPLQFRVPGTSTSATLTGLTRGATYNVIVEALKDQQRHKVREEVVTVGNSVNEGLNQPTDDSCFDPYTVSHYAVGDEWERMSESGFKLLCQCLGFGSGHFRCDSSRWCHDNGVNYKIGEKWDRQGENGQMMSCTCLGNGKGEFKCDPHEATCYDDGKTYHVGEQWQKEYLGAICSCTCFGGQRGWRCDNCRRPGGEPSPEGTTGQSYNQYSQRYHQRTNTNVNCPIECFMPLDVQADREDSRE

SEQ ID NO: 1157 - protein, 660 aa, Homo sapiens
MFCGRLNMHMNVQNGKWDSDPSGTKTCIDTKEGILQYCQEVYPELQITNVVEANQPVTIQNWCKRGRKQCKTHPHFVIPYRCLVGEFVSDALLVPDKCKFLHQERMDVCETHLHWHTVAKETCSEKSTNLHDYGMLLPCGIDKFRGVEFVCCPLAEESDNVDSADAEEDDSDVWWGGADTDYADGSEDKVVEVAEEEEVAEVEEEEADDDEDDEDGDEVEEEAEEPYEEATERTTSIATTTTTTTESVEEVVRVPTTAASTPDAVDKYLETPGDENEHAHFQKAKERLEAKHRERMSQVMREWEEAERQAKNLPKADKKAVIQHFQEKVESLEQEAANERQQLVETHMARVEAMLNDRRRLALENYITALQAVPPRPRHVFNMLKKYVRAEQKDRQHTLKHFEHVRMVDPKKAAQIRSQVMTHLRVIYERMNQSLSLLYNVPAVAEEIQDEVDELLQKEQNYSDDVLANMISEPRISYGNDALMPSLTETKTTVELLPVNGEFSLDDLQPWHSFGADSVPANTENEVEPVDARPAADRGLTTRPGSGLTNIKTEEISEVKMDAEFRHDSGYEVHHQKLVFFAEDVGSNKGAIIGLMVGGVVIATVIVITLVMLKKKQYTSIHHGVVEVDAAVTPEERHLSKMQQNGYENPTYKFFEQMQN

SEQ ID NO: 1158 - protein, 807 aa, Homo sapiens
MDQREILQKFLDEAQSKKITKEEFANEFLKLKRQSTKYKADKTYPTTVAEKPKNIKKNRYKDILPYDYSRVELSLITSDEDSSYINANFIKGVYGPKAYIATQGPLSTTLLDFWRMIWEYSVLIIVMACMEYEMGKKKCERYWAEPGEMQLEFGPFSVSCEAEKRKSDYIIRTLKVKFNSETRTIYQFHYKNWPDHDVPSSIDPILELIWDVRCYQEDDSVPICIHCSAGCGRTGVICAIDYTWMLLKDGIIPENFSVFSLIREMRTQRPSLVQTQEQYELVYNAVLELFKRQMDVIRDKHSGTESQAKHCIPEKNHTLQADSYSPNLPKSTTKAAKMMNQQRTKMEIKESSSFDFRTSEISAKEELVLHPAKSSTSFDFLELNYSFDKNADTTMKWQTKAFPIVGEPLQKHQSLDLGSLLFEGCSNSKPVNAAGRYFNSKVPITRTKSTPFELIQQRETKEVDSKENFSYLESQPHDSCFVEMQAQKVMHVSSAELNYSLPYDSKHQIRNASNVKHHDSSALGVYSYIPLVENPYFSSWPPSGTSSKMSLDLPEKQDGTVFPSSLLPTSSTSLFSYYNSHDSLSLNSPTNISSLLNQESAVLATAPRIDDEIPPPLPVWTPESFIVVEEAGEFSPNVPKSLSSAVKVKIGTSLEWGGTSEPKKFDDSVILRPSKSVKLRSPKSELHQDRSSPPPPLPERTLESFFLADEDCMQAQSIETYSTSYPDTMENSTSSKQTLKTPGKSFTRSKSLKILRNMKKSICNSCPPNKPAESVQSNNSSSFLNFGFANRFSKPKGPRNPPPTWNI

SEQ ID NO: 1159 - protein, 564 aa, Homo sapiens
MNRSIPVEVDESEPYPSQLLKPIPEYSPEEESEPPAPNIRNMAPNSLSAPTMLHNSSGDFSQAHSTLKLANHQRPVSRQVTCLRTQVLEDSEDSFCRRHPGLGKAFPSGCSAVSEPASESVVGALPAEHQFSFMEKRNQWLVSQLSAASPDTGHDSDKSDQSLPNASADSLGGSQEMVQRPQPHRNRAGLDLPTIDTGYDSQPQDVLGIRQLERPLPLTSVCYPQDLPRPLRSREFPQFEPQRYPACAQMLPPNLSPHAPWNYHYHCPGSPDHQVPYGHDYPRAAYQQVIQPALPGQPLPGASVRGLHPVQKVILNYPSPWDHEERPAQRDCSFPGLPRHQDQPHHQPPNRAGAPGESLECPAELRPQVPQPPSPAAVPRPPSNPPARGTLKTSNLPEELRKVFITYSMDTAMEVVKFVNFLLVNGFQTAIDIFEDRIRGIDIIKWMERYLRDTVMIIVAISPKYKQDVEGAESQLDEDEHGLHTKYIHRMMQIEFIKQGSMNFRFIPVLFPNAKKEHVPTWLQNTHVYSWPKNKKNILLRLLREEEYVAPPRGPLPTLQVVPL

SEQ ID NO: 1160 - protein, 870 aa, Homo sapiens
MGPPSLVLCLLSATVFSLLGGSSAFLSHHRLKGRFQRDRRNIRPNIILVLTDDQDVELGSMQVMNKTRRIMEQGGAHFINAFVTTPMCCPSRSSILTGKYVHNHNTYTNNENCSSPSWQAQHESRTFAVYLNSTGYRTAFFGKYLNEYNGSYVPPGWKEWVGLLKNSRFYNYTLCRNGVKEKHGSDYSKDYLTDLITNDSVSFFRTSKKMYPHRPVLMVISHAAPHGPEDSAPQYSRLFPNASQHITPSYNYAPNPDKHWIMRYTGPMKPIHMEFTNMLQRKRLQTLMSVDDSMETIYNMLVETGELDNTYIVYTADHGYHIGQFGLVKGKSMPYEFDIRVPFYVRGPNVEAGCLNPHIVLNIDLAPTILDIAGLDIPADMDGKSILKLLDTERPVNRFHLKKKMRVWRDSFLVERGKLLHKRDNDKVDAQEENFLPKYQRVKDLCQRAEYQTACEQLGQKWQCVEDATGKLKLHKCKGPMRLGGSRALSNLVPKYYGQGSEACTCDSGDYKLSLAGRRKKLFKKKYKASYVRSRSIRSVAIEVDGRVYHVGLGDAAQPRNLTKRHWPGAPEDQDDKDGGDFSGTGGLPDYSAANPIKVTHRCYILENDTVQCDLDLYKSLQAWKDHKLHIDHEIETLQNKIKNLREVRGHLKKKRPEECDCHKISYHTQHKGRLKHRGSSLHPFRKGLQEKDKVWLLREQKRKKKLRKLLKRLQNNDTCSMPGLTCFTHDNQHWQTAPFWTLGPFCACTSANNNTYWCMRTINETHNFLFCEFATGFLEYFDLNTDPYQLMNAVNTLDRDVLNQLHVQLMELRSCKGYKQCNPRTRNMDLGLKDGGSYEQYRQFQRRKWPEMKRPSSKSLGQLWEGWEG

SEQ ID NO: 1161 - protein, 630 aa, Homo sapiens
MIQSDKGADPPDKKDMKLSTATNPQNGLSQILRLVLQELSLFYGRDVNGVCLLYDLLHSPWLQALLKIYDCLQEFKEKKLVPATPHAQVLSYEVVELLRETPTSPEIQELRQMLQAPHFKALLSAHDTIAQKDFEPLLPPLPDNIPESEEAMRIVCLVKNQQPLGATIKRHEMTGDILVARIIHGGLAERSGLLYAGDKLVEVNGVSVEGLDPEQVIHILAMSRGTIMFKVVPVSDPPVNSQQMVYVRAMTEYWPQEDPDIPCMDAGLPFQKGDILQIVDQNDALWWQARKISDPATCAGLVPSNHLLKRKQREFWWSQPYQPHTCLKSTLSISMEEEDDMKIDEKCVEAEELSEDKEEFVGYGQKFFIAGFRRSMRLCRRKSHLSPLHASVCCTGSCYSAVGAPYEEVVRYQRRPSDKYRLIVLMGPSGVGVNELRRQLIEFNPSHFQSAVPHTTRTKKSYEMNGREYHYVSKETFENLIYSHRMLEYGEYKGHLYGTSVDAVQTVLVEGKICVMDLEPQDIQGVRTHELKPYVIFIKPSNMRCMKQSRKNAKVITDYYVDMKFKDEDLQEMENLAQRMETQFGQFFDHVIVNDSLHDACAQLLSAIQKAQEEPQWVPATWISSDTESQ

SEQ ID NO: 1162 - protein, 1730 aa, Homo sapiens
MNVQPCSRCGYGVYPAEKISCIDQIWHKACFHCEVCKMMLSVNNFVSHQKKPYCHAHNPKNNTFTSVYHTPLNLNVRTFPEAISGIHDQEDGEQCKSVFHWDMKSKDKEGAPNRQPLANERAYWTGYGEGNAWCPGALPDPEIVRMVEARKSLGEEYTEDYEQPRGKGSFPAMITPAYQRAKKANQLASQVEYKRGHDERISRFSTVVDTPELLRSKAGAQLQSDVRYTEDYEQQRGKGSFPAMITPAYQIAKRANELASDVRYHQQYQKEMRGMAGPAIGAEGILTRECADQYGQGYPEEYEEHRGKGSFPAMITPAYQNAKKAHELASDIKYRQDFNKMKGAAHYHSLPAQDNLVLKQAQSVNKLVSEVEYKKDLESSRGHSINYCETPQFRNVSKISKFTSDNKYKENYQNHMRGRYEGVGMDRRTLHAMKVGSLASNVAYKADYKHDIVDYNYPATLTPSYQTAMKLVPLKDANYRQSIDKLKYSSVTDTPQIVQAKINAQQLSHVNYRADYEKNKLNYTLPQDVPQLVKAKTNAKLFSEVKYKEGWEKTKGKGFEMKLDAMSLLAAKASGELASNIKYKEEYEKTKGKAMGTADSRLLHSLQIAKMSSEVEYKKGFEESKTRFHLPMDMVNIRHAKKAQTLASDLDYRKKLHEYTVLPEDMKTQWAKKAYGLQSELQYKADLAWMKGVGWLTEGSLNLEQAKKAGQLVSEKNYRQRVDELKFTSVTDSSQMEHAKKSQELQSGVAYKAGNEQSVHQYTISKDEPLFLQARANAANLSEKLYKSSWENQKAKGFELRLDSLTFLAAKAKRDLASEVKYKEDYERSRGKLIGAKDVQGDSQMSHSLQMSKLQSELEYKKGFEDTKSQCHVSLDMVHLVHARKAQHLATDVGYKTAEHHFTALPTDMKVEWAKKAYGLQSDNQYRADVKWMKGMGWVATGSLNVEQAKKAGELISEKKYRQHPDALKFTSIKDTPEMVQARISYTQAVDRLYREQGENIKHHYTPTADLPEVLLAKLNAMNISETRYKESWSKLRDGGYKLRLDALPFQAAKASGEIISDYKYKEAFEKMKGQMLGSRSLEDDISLAHSVYATSLQSDVNYKKGFEHSKAQFHLPLDMAALVHAKKAQTLASNQDYKHPLPQYTSLAEDLRLSCAKKAHKLQSENLYRSDLNFMRGVACVIPGTLEIEGRKKASELISESKYRQHPHSFKYTAVTDTPNLLHAKFSNQITNERLYKAAGEDARHEYTMTLGLPEFIRAKTNAANLSDARYKESWRNLRAQGYKLTIEALPFQAARASGDIASDFLYRHDFVKERGKLIGPQSVRDDPRIQHCRRMGQLQSELQYRRGATSSQAQFHLPMDMVHLVHAKNAQALASDHDYRTQYHKFTALPEDLKMAWAKKAHALQSELRYKSDLIGMKGIGWLALRSPQMESAKKAGELISETKYRKKPDSIKFTTVVDSPDLVHAKNSYMHCNERMYRSGDAESLHRYTLIPDHPDFTRARLNALHLSDKVYRNSWEQTRAGSYDFRLDAIPFQTARASREIASDFRYKEAFLRDRGLQIGYRSVDDDPRMKHFLNVGRLQSDNEYKKDFAKSRSQFHSSTDQPGLLQAKRSQQLASDVHYRQPLPQPTCDPEQLGLRHAQKAHQLQSDVKYKSDLNLTRGVGWTPPGSYKVEMARRAAELANARGLGLQGAYRGAEAVEAGDHQSGEVNPDATEILHVKKKKALLL

SEQ ID NO: 1163 - protein, 1176 aa, Homo sapiens
MALARPGTPDPQALASVLLLLLWAPALSLLAGTVPSEPPSACASDPCAPGTECQATESGGYTCGPMEPRGCATQPCHHGALCVPQGPDPTGFRCYCVPGFQGPRCELDIDECASRPCHHGATCRNLADRYECHCPLGYAGVTCEMEVDECASAPCLHGGSCLDGVGSFRCVCAPGYGGTRCQLDLDECQSQPCAHGGTCHDLVNGFRCDCAGTGYEGTHCEREVLECASAPCEHNASCLEGLGSFRCLCWPGYSGELCEVDEDECASSPCQHGGRCLQRSDPALYGGVQAAFPGAFSFRHAAGFLCHCPPGFEGADCGVEVDECASRPCLNGGHCQDLPNGFQCHCPDGYAGPTCEEDVDECLSDPCLHGGTCSDTVAGYICRCPETWGGRDCSVQLTGCQGHTCPLAATCIPIFESGVHSYVCHCPPGTHGPFCGQNTTFSVMAGSPIQASVPAGGPLGLALRFRTTLPAGTLATRNDTKESLELALVAATLQATLWSYSTTVLVLRLPDLALNDGHWHQVEVVLHLATLELRLWHEGCPARLCVASGPVALASTASATPLPAGISSAQLGDATFAGCLQDVRVDGHLLLPEDLGENVLLGCERREQCRPLPCVHGGSCVDLWTHFRCDCARPHRGPTCADEIPAATFGLGGAPSSASFLLQELPGPNLTVSFLLRTRESAGLLLQFANDSAAGLTVFLSEGRIRAEVPGSPAVVLPGRWDDGLRHLVMLSFGPDQLQDLGQHVHVGGRLLAADSQPWGGPFRGCLQDLRLDGCHLPFFPLPLDNSSQPSELGGRQSWNLTAGCVSEDMCSPDPCFNGGTCLVTWNDFHCTCPANFTGPTCAQQLWCPGQPCLPPATCEEVPDGFVCVAEATFREGPPAAFSGHNASSGRLLGGLSLAFRTRDSEAWLLRAAAGALEGVWLAVRNGSLAGGVRGGHGLPGAVLPIPGPRVADGAWHRVRLAMERPAATTSRWLLWLDGAATPVALRGLASDLGFLQGPGAVRILLAENFTGCLGRVALGGLPLPLARPRPGAAPGAREHFASWPGTPAPILGCRGAPVCAPSPCLHDGACRDLFDAFACACGPGWEGPRCEAHVDPCHSAPCARGRCHTHPDGRFECRCPPGFGGPRCRWDGWAGGWAANAPWGYGGAEKSARSVDESLPFPGPHVLICDMRRTV

SEQ ID NO: 1164 - protein, 266 aa, Homo sapiens
MVCLKLPGGSCMTALTVTLMVLSSPLALSGDTRPRFLWQPKRECHFFNGTERVRFLDRYFYNQEESVRFDSDVGEFRAVTELGRPDAEYWNSQKDILEQARAAVDTYCRHNYGVVESFTVQRRVQPKVTVYPSKTQPLQHHNLLVCSVSGFYPGSIEVRWFLNGQEEKAGMVSTGLIQNGDWTFQTLVMLETVPRSGEVYTCQVEHPSVTSPLTVEWRARSESAQSKMLSGVGGFVLGLLFLGAGLFIYFRNQKGHSGLQPTGFLS

SEQ ID NO: 1165 - protein, 5795 aa, Homo sapiens
MCDCFHMVLPTWPGTPGSVSGRQLQPGEPGAETEDDHSVTEGPADEGIRPRPQGSSPVYEYTTEAADFGLQEDAPGRQGSAGRRRSWWKRDSGDSRTFFRMSRPEAVQEATEVTLKTEVEAGASGYSVTGGGDQGIFVKQVLKDSSAAKLFNLREGDQLLSTTVFFENIKYEDALKILQYSEPYKVQFKIRRQLPAPQDEEWASSDAQHGPQGKEKEDTDVADGCRETPTKTLEGDGDQERLISKPRVGRGRQSQRERLSWPKFQSIKSKRGPGPQRSHSSSEAYEPRDAHDVSPTSTDTEAQLTVERQEQKAGPGSQRRRKFLNLRFRTGSGQGPSSTGQPGRGFQSGVGRAGVLEELGPWGDSLEETGAATGSRREERAEQDREVMPAQSMPLPTELGDPRLCEGTPQEGGLRAARLHGKTLEGQAQETAVAQRKPRAQPTPGMSREGEGEGLQSLEIGIARLSLRDTTEGGTQIGPPEIRVRVHDLKTPKFAFSTEKEPERERRLSTPQRGKRQDASSKAGTGLKGEEVEGAGWMPGREPTTHAEAQGDEGDGEEGLQRTRITEEQDKGREDTEGQIRMPKFKIPSLGWSPSKHTKTGREKATEDTEQGREGEATATADRREQRRTEEGLKDKEDSDSMTNTTKIQLIHDEKRLKKEQILTEKEVATKDSKFKMPKFKMPLFGASAPGKSMEASVDVSAPKVEADVSLLSMQGDLKTTDLSVQTPSADLEVQDGQVDVKLPEGPLPEGASLKGHLPKVQRPSLKMPKVDLKGPKLDLKGPKAEVTAPDVKMSLSSMEVDVQAPRAKLDGARLEGDLSLADKEVTAKDSKFKMPKFKMPSFGVSAPGKSMEDSVDVSAPKVEADVSLSSMQGDLKATDLSIQPPSADLEVQAGQVDVKLPEGPVPEGAGPKVHLPKVEMPSFKMPKVDLKGPQIDVKGPKLDLKGPKAEVTAPDGEVSLPSMEVDVQAQKAKLDGAWLEGDLSLADKDVTAKDSKFKMPKFKMPSFGVSAPGKSIKALVDVSAPKVEADLSLPSMQGDLKTTDLSIQPASTDLKVQADQVDVKLPEGHLPEGAGLKGHLPKVEMPSFKMPKVALKGPQVDVKGPKLDLKSPKAEVTAPDVEVSLPSVEVDVEAPGAKLDSARLEGELSLADKDVTAKDSRFKMPKFKMPSFGASAPGKSIEASVDVSAPKVEADVSLPSMQGDLKTTDLSIQPPSADLEVHAGQVDVKLLEGHVPEGAGFKGHLPKVQMPSLKMPKVDLKGPQVEVRGPKLDLKGHKAEVTAHEVAVSLPSVEVDMQAPGAKLDGAQLDGDLSLADKDVTAKDSKFKMPKFKMPSFGVSAPGKSIEASVDLSAPKVEADMSLPSMQGDLKTTDLSIQPPSTDLELQAGQLDVKLPEGPVPEGAGLKGHLPKLQMPSFKVPKVDLKGPEIDIKGPKLDLKDPKVEVTAPDVEVSLPSVEVDVEAPGAKLDGGRLEEDMSLADKDLTTKDSKFKMPKFKMPSFGVSAPGKSIEASVDVSAPKVEADVSLPSMQGDLKATDLSIQPPSADLEVQAGQVDVKLPEGPVSEGAGLKGHLPKVQMPSFKMPKVDLKGPQIDVKGPKLDLKGPKVEVTAPDVKMSLSSMEVDVQAPRAKLDGAQLEGDLSLADKAVTAKDSKFKMPKFKMPSFGVSAPGKSIEASVDVSEPKVEADVSLPSMQGDLKTTDLSIQSPSADLEVQAGQVNVKLPEGPLPEGAGFKGHLPKVQMPSLKMPKVALKGPQMDVKGPKLDLKGPKAEVMAPDVEVSLPSVEVDVEAPGAKLDSVRLEGDLSLADKDVTAKDSKFKMPKFKMPSFGVSAPGKSIEASVDVSAPKVEAEVSLPSMQGDLKTTDLCIPLPSADLVVQAGQVDMKLPEGQVPEGAGLKGHLPKVDMPSFKMPKVDLKGPQTDVKGAKLDLKGPKAEVTAPDVEVSLPSMEVDVQAQKAKLDGARLEGDLSLADKDMTAKDSKFKMPKFKMPSFGVSAPGRSIEASVDVPAPKVEADVSLPSMQGDLKTTDLSIQPPSADLKVQTGQVDVKLPEGHVPEGAGLKGHLPKVEMPSLKMPKVDLKGPQVDIKGPKLDLKDPKVEMRVPDVEVSLPSMEVDVQAPRAKLDSAHLQGDLTLANKDLTTKDSKFKMPKFKMPSFGVSAPGKSIEASVDVSPPKVEADMSLPSMQGDLKTTDLSIQPLSADVKVQAGQVDVKLLEGPVPEEVGLKGHLPKLQMPSFKVPKVDLKGPEIDIKGPKLDLKDPKVEVTAPDVEVSLPSVEVDVKAPGAKLDGARLEGDMSLADKDVTAKDSKFKMPKFKMLSFGVSALGKSIEASADVSALKVEADVSLPSMQGDLKTTDLSVQPPSADLEVQAGQVDVKLPEGPVPEGAGLKGHLPKLQMPSFKMPKVDLKGPQIDVKGPKLDLKGPKTDVMAPDVEVSQPSVEVDVEAPGAKLDGAWLEGDLSVADKDVTTKDSRFKIPKFKMPSFGVSAPGKSIEASVDVSAPKVEADGSLSSMQGDLKATDLSIQPPSADLEVQAGQVDVKLPEGPVPEGAGLKGHLPKVQMPSFKMPEMDLKGPQLDVKGPKLDLKGPKAEVTAPDVEMSLSSMEVDVQAPRAKLDGARLEGDLSLADKGVTAKDSKFKMPKFKMPSFRVSAPGESIEALVDVSELKVEADMSLPSMQGDLKTTDISIQPPSAQLEVQAGQVDVKLPEGHVPEGAGLKGHLPKLQMPSFKMPEVDLKGPQIDVKGPNVDLKGPKAEVTAPDVKMSLSSMEVDVQAPRAKLDGARLEGDLSLADKGMTAKDSKFKMPKFKMPSFGVSAPGKSIEASVDVSELKVEADGSFPSMQGDLKTTDIRIQPPSAQLEVQAGQVDVKLPEGHVPEGAGLKGHLPKVQMPSFKMPKVDLKGPQIDVKGPKLDLKGPKAEVTAPDVEVSLPSVEVDVEAPRAKLDGARLEGDLSLADKDVTAKDSKFKMPKFKMPSFGVSAPGKSIEVSVDVSAPKVEAEVSLPSMQGDLKTTDISIEPPSAQLEVQAGQVDLKLPEGHVPEGAGLKGHLPKLQMPSFKMPKVDRKGPQIDVKGPKLDLKGPKTDVTAPDVEVSQPGMEVDVEAPGAKLDGARLEGDLSLADKDVTAKDSKFKMPKFKMPSFGVSAPGKSIEVLVDVSAPKVEADLSLPSMQGDLKNTDISIEPPSAQLEVQAGQVDVKLPEGHVLEGAGLKGHLPKLQMPSFKMPKVDRKGPQIDIKGPKLDLKGPKMDVTAPDVEVSQPSMEVDVEAPGAKLDGARLEGDLSLADKDVTAKDSKFKMPKFKMPSYRASAPGKSIQASVDVSAPKAEADVSLPSMQGDLKTTDLSIQLPSVDLEVQAGQVDVKLPEGHVPEGAGLKGHLPKVEMPSFKMPKVDLKSPQVDIKGPKLDLKVPKAEVTVPDVEVSLPSVEVDVQAPRAKLDGARLEGDLSLAEKDVTAKDSKFKMPKFKMPSFGVSAPGRSIEASLDVSAPKVEADVSLSSMQGDLKATDLSIQPPSADLEVQAVQVDVELLEGPVPEGAGLKGHLPKVEMPSLKTPKVDLKGPQIDVKGPKLDLKGPKAEVRVPDVEVSLPSVEVDVQAPKAKLDAGRLEGDLSLADKDVTAKDSKFKMPKFKMPSFRVSAPGKSMEASVDVSAPKVEADVSLPSMQGDLKTTDLSIQPPSADLKVQAGQMDVKLPEGQVPEGAGLKEHLPKVEMPSLKMPKVDLKGPQVDIKGPKLDLKVSKAEVTAPDVEVSLPSVEVDVQAPRAKLDSAQLEGDLSLADKDVTAKDSKFKMPKFKMPSFGVSAPGKSIEASVHVSAPKVEADVSLPSMQGDLKTTDLSIQPHSADLTVQARQVDMKLLEGHVPEEAGLKGHLPKVQMPSFKMPKVDLKGPEIDIKGPKLDLKDPKVEVTAPDVEVSLPSVEVDVEAPGAKLDGARLEGDLSLADKDMTAKDSKFKMPKFKMPSFGVSAPGKSMEASVDVTAPKVEADVSLPSMQGDLKATDLSVQPPSADLEVQAGQVDVKLPEGPVPEGASLKGHLPKVQMPSFKMPKVDLKGPQIDVKGPKLDLKGPKAEVTAPDVKMSLSSMEVDVQAPRAKLDGVQLEGDLSLADKDVTAKDSKFKMPKFKMPSFGVSAPGKSMEASVDVSELKAKADVSLPSMQGDLKTTDLSIQSPSADLEVQAGQVDVKLPEGPLPKGAGLKGHLPKVQMPCLKMPKVALKGPQVDVKGPKLDLKGPKADVMTPVVEVSLPSMEVDVEAPGAKLDSVRLEGDLSLADKDMTAKDSKFKMPKFKMPSFGVSAPGKSIEASLDVSALKVEADVSLPSMQGDLKTTHLSIQPPSADLEVQAGQEDVKLPEGPVHEGAGLKGHLPKLQMPSFKVPKVDLKGPQIDVNVPKLDLKGPKVEVTSPNLDVSLPSMEVDIQAPGAKLDSTRLEGDLSLADKDVTAKDSKFKMPKFKMPSFGMLSPGKSIEVSVDVSAPKMEADMSIPSMQGDLKTTDLRIQAPSADLEVQAGQVDLKLPEGHMPEVAGLKGHLPKVEMPSFKMPKVDLKGPQVDVKGPKLDLKGPKAEVMAPDVEVSLPSVETDVQAPGSMLDGARLEGDLSLAHEDVAGKDSKFQGPKLSTSGFEWSSKKVSMSSSEIEGNVTFHEKTSTFPIVESVVHEGDLHDPSRDGNLGLAVGEVGMDSKFKKLHFKVPKVSFSSTKTPKDSLVPGAKSSIGLSTIPLSSSECSSFELQQVSACSEPSMQMPKVGFAGFPSSRLDLTGPHFESSILSPCEDVTLTKYQVTVPRAALAPELALEIPSGSQADIPLPKTECSTDLQPPEGVPTSQAESHSGPLNSMIPVSLGQVSFPKFYKPKFVFSVPQMAVPEGDLHAAVGAPVMSPLSPGERVQCPLPSTQLPSPGTCVSQGPEELVASLQTSVVAPGEAPSEDADHEGKGSPLKMPKIKLPSFRWSPKKETGPKVDPECSVEDSKLSLVLDKDEVAPQSAIHMDLPPERDGEKGRSTKPGFAMPKLALPKMKASKSGVSLPQRDVDPSLSSATAGGSFQDTEKASSDGGRGGLGATASATGSEGVNLHRPQVHIPSLGFAKPDLRSSKAKVEVSQPEADLPLPKHDLSTEGDSRGCGLGDVPVSQPCGEGIAPTPEDPLQPSCRKPDAEVLTVESPEEEAMTKYSQESWFKMPKFRMPSLRRSFRDRGGAGKLEVAQTQAPAATGGEAAAKVKEFLVSGSNVEAAMSLQLPEADAEVTASESKSSTDILRCDLDSTGLKLHLSTAGMTGDELSTSEVRIHPSKGPLPFQMPGMRLPETQVLPGEIDETPLSKPGHDLASMEDKTEKWSSQPEGPLKLKASSTDMPSQISVVNVDQLWEDSVLTVKFPKLMVPRFSFPAPSSEDDVFIPTVREVQCPEANIDTALCKESPGLWGASILKAGAGVPGEQPVDLNLPLEAPPISKVRVHIQGAQVESQEVTIHSIVTPEFVDLSVPRTFSTQIVRESEIPTSEIQTPSYGFSLLKVKIPEPHTQARVYTTMTQHSRTQEGTEEAPIQATPGVDSISGDLQPDTGEPFEMISSSVNVLGQQTLTFEVPSGHQLADSCSDEEPAEILEFPPDDSQEATTPLADEGRAPKDKPESKKSGLLWFWLPNIGFSSSVDETGVDSKNDVQRSAPIQTQPEARPEAELPKKQEKAGWFRFPKLGFSSSPTKKSKSTEDGAELEEQKLQEETITFFDARESFSPEEKEEGELIGPVGTGLDSRVMVTSAARTELILPEQDRKADDESKGSGLGPNEG

SEQ ID NO: 1166 - protein, 483 aa, Homo sapiens
MKKGIRYETSRKTSYIFQPQHGPWQTRMRKISNHGSLRVAKVAYPLGLCVGVFIYVAYIKWHRATATQAFFSITRAAPGARWGQQAHSPLGTAADGHEVFYGIMFDAGSTGTRVHVFQFTRPPRETPTLTHETFKALKPGLSAYADDVEKSAQGIRELLDVAKQDIPFDFWKATPLVLKATAGLRLLPGEKAQKLLQKVKKVFKASPFLVGDDCVSIMNGTDEGVSAWITINFLTGSLKTPGGSSVGMLDLGGGSTQIAFLPRVEGTLQASPPGYLTALRMFNRTYKLYSYSYLGLGLMSARLAILGGVEGQPAKDGKELVSPCLSPSFKGEWEHAEVTYRVSGQKAAASLHELCAARVSEVLQNRVHRTEEVKHVDFYAFSYYYDLAAGVGLIDAEKGGSLVVGDFEIAAKYVCRTLETQPQSSPFSCMDLTYVSLLLQEFGFPRSKVLKLTRKIDNVETSWALGAIFHYIDSLNRQKSPAS

SEQ ID NO: 1167 - protein, 728 aa, Homo sapiens
MGMARGSLTRVPGVMGEGTQGPELSLDPDPCSPQSTPGLMKGNKLEEQDPRPLQPIPGLMEGNKLEEQDSSPPQSTPGLMKGNKREEQGLGPEPAAPQQPTAEEEALIEFHRSYRELFEFFCNNTTIHGAIRLVCSQHNRMKTAFWAVLWLCTFGMMYWQFGLLFGEYFSYPVSLNINLNSDKLVFPAVTICTLNPYRYPEIKEELEELDRITEQTLFDLYKYSSFTTLVAGSRSRRDLRGTLPHPLQRLRVPPPPHGARRARSVASSLRDNNPQVDWKDWKIGFQLCNQNKSDCFYQTYSSGVDAVREWYRFHYINILSRLPETLPSLEEDTLGNFIFACRFNQVSCNQANYSHFHHPMYGNCYTFNDKNNSNLWMSSMPGINNGLSLMLRAEQNDFIPLLSTVTGARVMVHGQDEPAFMDDGGFNLRPGVETSISMRKETLDRLGGDYGDCTKNGSDVPVENLYPSKYTQQVCIHSCFQESMIKECGCAYIFYPRPQNVEYCDYRKHSSWGYCYYKLQVDFSSDHLGCFTKCRKPCSVTSYQLSAGYSRWPSVTSQEWVFQMLSRQNNYTVNNKRNGVAKVNIFFKELNYKTNSESPSVTMVTLLSNLGSQWSLWFGSSVLSVVEMAELVFDLLVIMFLMLLRRFRSRYWSPGRGGRGAQEVASTLASSPPSHFCPHPMSLSLSQPGPAPSPALTAPPPAYATLGPRPSPGGSAGASSSTCPLGGP

SEQ ID NO: 1168 - protein, 1300 aa, Homo sapiens
MPKIVLNGVTVDFPFQPYKCQQEYMTKVLECLQQKVNGILESPTGTGKTLCLLCTTLAWREHLRDGISARKIAERAQGELFPDRALSSWGNAAAAAGDPIACYTDIPKIIYASRTHSQLTQVINELRNTSYRPKVCVLGSREQLCIHPEVKKQESNHLQIHLCRKKVASRSCHFYNNVEEKSLEQELASPILDIEDLVKSGSKHRVCPYYLSRNLKQQADIIFMPYNYLLDAKSRRAHNIDLKGTVVIFDEAHNVEKMCEESASFDLTPHDLASGLDVIDQVLEEQTKAAQQGEPHPEFSADSPSPGLNMELEDIAKLKMILLRLEGAIDAVELPGDDSGVTKPGSYIFELFAEAQITFQTKGCILDSLDQIIQHLAGRAGVFTNTAGLQKLADIIQIVFSVDPSEGSPGSPAGLGALQSYKVHIHPDAGHRRTAQRSDAWSTTAARKRGKVLSYWCFSPGHSMHELVRQGVRSLILTSGTLAPVSSFALEMQIPFPVCLENPHIIDKHQIWVGVVPRGPDGAQLSSAFDRRFSEECLSSLGKALGNIARVVPYGLLIFFPSYPVMEKSLEFWRARDLARKMEALKPLFVEPRSKGSFSETISAYYARVAAPGSTGATFLAVCRGKASEGLDFSDTNGRGVIVTGLPYPPRMDPRVVLKMQFLDEMKGQGGAGGQFLSGQEWYRQQASRAVNQAIGRVIRHRQDYGAVFLCDHRFAFADARAQLPSWVRPHVRVYDNFGHVIRDVAQFFRVAERTMPAPAPRATAPSVRGEDAVSEAKSPGPFFSTRKAKSLDLHVPSLKQRSSGSPAAGDPESSLCVEYEQEPVPARQRPRGLLAALEHSEQRAGSPGEEQAHSCSTLSLLSEKRPAEEPRGGRKKIRLVSHPEEPVAGAQTDRAKLFMVAVKQELSQANFATFTQALQDYKGSDDFAALAACLGPLFAEDPKKHNLLQGFYQFVRPHHKQQFEEVCIQLTGRGCGYRPEHSIPRRQRAQPVLDPTGRTAPDPKLTVSTAAAQQLDPQEHLNQGRPHLSPRPPPTGDPGSQPQWGSGVPRAGKQGQHAVSAYLADARRALGSAGCSQLLAALTAYKQDDDLDKVLAVLAALTTAKPEDFPLLHRFSMFVRPHHKQRFSQTCTDLTGRPYPGMEPPGPQEERLAVPPVLTHRAPQPGPSRSEKTGKTQSKISSFLRQRPAGTVGAGGEDAGPSQSSGPPHGPAASEWGEPHGRDIAGQQATGAPGGPLSAGCVCQGCGAEDVVPFQCPACDFQRCQACWQRHLQASRMCPACHTASRKQSVMQVFWPEPQ

SEQ ID NO: 1169 - protein, 2351 aa, Homo sapiens
MQIELSTCFFLCLLRFCFSATRRYYLGAVELSWDYMQSDLGELPVDARFPPRVPKSFPFNTSVVYKKTLFVEFTDHLFNIAKPRPPWMGLLGPTIQAEVYDTVVITLKNMASHPVSLHAVGVSYWKASEGAEYDDQTSQREKEDDKVFPGGSHTYVWQVLKENGPMASDPLCLTYSYLSHVDLVKDLNSGLIGALLVCREGSLAKEKTQTLHKFILLFAVFDEGKSWHSETKNSLMQDRDAASARAWPKMHTVNGYVNRSLPGLIGCHRKSVYWHVIGMGTTPEVHSIFLEGHTFLVRNHRQASLEISPITFLTAQTLLMDLGQFLLFCHISSHQHDGMEAYVKVDSCPEEPQLRMKNNEEAEDYDDDLTDSEMDVVRFDDDNSPSFIQIRSVAKKHPKTWVHYIAAEEEDWDYAPLVLAPDDRSYKSQYLNNGPQRIGRKYKKVRFMAYTDETFKTREAIQHESGILGPLLYGEVGDTLLIIFKNQASRPYNIYPHGITDVRPLYSRRLPKGVKHLKDFPILPGEIFKYKWTVTVEDGPTKSDPRCLTRYYSSFVNMERDLASGLIGPLLICYKESVDQRGNQIMSDKRNVILFSVFDENRSWYLTENIQRFLPNPAGVQLEDPEFQASNIMHSINGYVFDSLQLSVCLHEVAYWYILSIGAQTDFLSVFFSGYTFKHKMVYEDTLTLFPFSGETVFMSMENPGLWILGCHNSDFRNRGMTALLKVSSCDKNTGDYYEDSYEDISAYLLSKNNAIEPRSFSQNSRHPSTRQKQFNATTIPENDIEKTDPWFAHRTPMPKIQNVSSSDLLMLLRQSPTPHGLSLSDLQEAKYETFSDDPSPGAIDSNNSLSEMTHFRPQLHHSGDMVFTPESGLQLRLNEKLGTTAATELKKLDFKVSSTSNNLISTIPSDNLAAGTDNTSSLGPPSMPVHYDSQLDTTLFGKKSSPLTESGGPLSLSEENNDSKLLESGLMNSQESSWGKNVSSTESGRLFKGKRAHGPALLTKDNALFKVSISLLKTNKTSNNSATNRKTHIDGPSLLIENSPSVWQNILESDTEFKKVTPLIHDRMLMDKNATALRLNHMSNKTTSSKNMEMVQQKKEGPIPPDAQNPDMSFFKMLFLPESARWIQRTHGKNSLNSGQGPSPKQLVSLGPEKSVEGQNFLSEKNKVVVGKGEFTKDVGLKEMVFPSSRNLFLTNLDNLHENNTHNQEKKIQEEIEKKETLIQENVVLPQIHTVTGTKNFMKNLFLLSTRQNVEGSYDGAYAPVLQDFRSLNDSTNRTKKHTAHFSKKGEEENLEGLGNQTKQIVEKYACTTRISPNTSQQNFVTQRSKRALKQFRLPLEETELEKRIIVDDTSTQWSKNMKHLTPSTLTQIDYNEKEKGAITQSPLSDCLTRSHSIPQANRSPLPIAKVSSFPSIRPIYLTRVLFQDNSSHLPAASYRKKDSGVQESSHFLQGAKKNNLSLAILTLEMTGDQREVGSLGTSATNSVTYKKVENTVLPKPDLPKTSGKVELLPKVHIYQKDLFPTETSNGSPGHLDLVEGSLLQGTEGAIKWNEANRPGKVPFLRVATESSAKTPSKLLDPLAWDNHYGTQIPKEEWKSQEKSPEKTAFKKKDTILSLNACESNHAIAAINEGQNKPEIEVTWAKQGRTERLCSQNPPVLKRHQREITRTTLQSDQEEIDYDDTISVEMKKEDFDIYDEDENQSPRSFQKKTRHYFIAAVERLWDYGMSSSPHVLRNRAQSGSVPQFKKVVFQEFTDGSFTQPLYRGELNEHLGLLGPYIRAEVEDNIMVTFRNQASRPYSFYSSLISYEEDQRQGAEPRKNFVKPNETKTYFWKVQHHMAPTKDEFDCKAWAYFSDVDLEKDVHSGLIGPLLVCHTNTLNPAHGRQVTVQEFALFFTIFDETKSWYFTENMERNCRAPCNIQMEDPTFKENYRFHAINGYIMDTLPGLVMAQDQRIRWYLLSMGSNENIHSIHFSGHVFTVRKKEEYKMALYNLYPGVFETVEMLPSKAGIWRVECLIGEHLHAGMSTLFLVYSNKCQTPLGMASGHIRDFQITASGQYGQWAPKLARLHYSGSINAWSTKEPFSWIKVDLLAPMIIHGIKTQGARQKFSSLYISQFIIMYSLDGKKWQTYRGNSTGTLMVFFGNVDSSGIKHNIFNPPIIARYIRLHPTHYSIRSTLRMELMGCDLNSCSMPLGMESKAISDAQITASSYFTNMFATWSPSKARLHLQGRSNAWRPQVNNPKEWLQVDFQKTMKVTGVTTQGVKSLLTSMYVKEFLISSSQDGHQWTLFFQNGKVKVFQGNQDSFTPVVNSLDPPLLTRYLRIHPQSWVHQIALRMEVLGCEAQDLY

SEQ ID NO: 1170 - protein, 1914 aa, Homo sapiens
MGDVKLVASSHISKTSLSVDPSRVDSMPLTEAPAFILPPRNLCIKEGATAKFEGRVRGYPEPQVTWHRNGQPITSGGRFLLDCGIRGTFSLVIHAVHEEDRGKYTCEATNGSGARQVTVELTVEGSFAKQLGQPVVSKTLGDRFSAPAVETRPSIWGECPPKFATKLGRVVVKEGQMGRFSCKITGRPQPQVTWLKGNVPLQPSARVSVSEKNGMQVLEIHGVNQDDVGVYTCLVVNGSGKASMSAELSIQGLDSANRSFVRETKATNSDVRKEVTNVISKESKLDSLEAAAKSKNCSSPQRGGSPPWAANSQPQPPRESKLESCKDSPRTAPQTPVLQKTSSSITLQAARVQPEPRAPGLGVLSPSGEERKRPAPPRPATFPTRQPGLGSQDVVSKAANRRIPMEGQRDSAFPKFESKPQSQEVKENQTVKFRCEVSGIPKPEVAWFLEGTPVRRQEGSIEVYEDAGSHYLCLLKARTRDSGTYSCTASNAQGQLSCSWTLQVERLAVMEVAPSFSSVLKDCAVIEGQDFVLQCSVRGTPVPRITWLLNGQPIQYARSTCEAGVAELHIQDALPEDHGTYTCLAENALGQVSCSAWVTVHEKKSSRKSEYLLPVAPSKPTAPIFLQGLSDLKVMDGSQVTMTVQVSGNPPPEVIWLHNGNEIQESEDFHFEQRGTQHSLCIQEVFPEDTGTYTCEAWNSAGEVRTQAVLTVQEPHDGTQPWFISKPRSVTASLGQSVLISCAIAGDPFPTVHWLRDGKALCKDTGHFEVLQNEDVFTLVLKKVQPWHAGQYEILLKNRVGECSCQVSLMLQNSSARALPRGREPASCEDLCGGGVGADGGGSDRYGSLRPGWPARGQGWLEEEDGEDVRGVLKRRVETRQHTEEAIRQQEVEQLDFRDLLGKKVSTKTLSEDDLKEIPAEQMDFRANLQRQVKPKTVSEEERKVHSPQQVDFRSVLAKKGTSKTPVPEKVPPPKPATPDFRSVLGGKKKLPAENGSSSAETLNAKAVESSKPLSNAQPSGPLKPVGNAKPAETLKPMGNAKPAETLKPMGNAKPDENLKSASKEELKKDVKNDVNCKRGHAGTTDNEKRSESQGTAPAFKQKLQDVHVAEGKKLLLQCQVSSDPPATIIWTLNGKTLKTTKFIILSQEGSLCSVSIEKALPEDRGLYKCVAKNDAGQAECSCQVTVDDAPASENTKAPEMKSRRPKSSLPPVLGTESDATVKKKPAPKTPPKAAMPPQIIQFPEDQKVRAGESVELFGKVTGTQPITCTWMKFRKQIQESEHMKVENSENGSKLTILAARQEHCGCYTLLVENKLGSRQAQVNLTVVDKPDPPAGTPCASDIRSSSLTLSWYGSSYDGGSAVQSYSIEIWDSANKTWKELATCRSTSFNVQDLLPDHEYKFRVRAINVYGTSEPSQESELTTVGEKPEEPKDEVEVSDDDEKEPEVDYRTVTINTEQKVSDFYDIEERLGSGKFGQVFRLVEKKTRKVWAGKFFKAYSAKEKENIRQEISIMNCLHHPKLVQCVDAFEEKANIVMVLEIVSGGELFERIIDEDFELTERECIKYMRQISEGVEYIHKQGIVHLDLKPENIMCVNKTGTRIKLIDFGLARRLENAGSLKVLFGTPEFVAPEVINYEPIGYATDMWSIGVICYILVSGLSPFMGDNDNETLANVTSATWDFDDEAFDEISDDAKDFISNLLKKDMKNRLDCTQCLQHPWLMKDTKNMEAKKLSKDRMKKYMARRKWQKTGNAVRAIGRLSSMAMISGLSGRKSSTGSPTSPLNAEKLESEEDVSQAFLEAVAEEKPHVKPYFSKTIRDLEVVEGSAARFDCKIEGYPDPEVVWFKDDQSIRESRHFQIDYDEDGNCSLIISDVCGDDDAKYTCKAVNSLGEATCTAELIVETMEEGEGEGEEEEE

SEQ ID NO: 1171 - protein, 416 aa, Homo sapiens
MFSVFEEITRIVVKEMDAGGDMIAVRSLVDADRFRCFHLVGEKRTFFGCRHYTTGLTLMDILDTDGDKWLDELDSGLQGQKAEFQILDNVDSTGELIVRLPKEITISGSFQGFHHQKIKISENRISQQYLATLENRKLKRELPFSFRSINTRENLYLVTETLETVKEETLKSDRQYKFWSQISQGHLSYKHKGQREVTIPPNRVLSYRVKQLVFPNKETMNIHFRGKTKSFPEEKDGASSCLGKSLGSEDSRNMKEKLEDMESVLKDLTEEKRKDVLNSLAKCLGKEDIRQDLEQRVSEVLISGELHMEDPDKPLLSSLFNAAGVLVEARAKAILDFLDALLELSEEQQFVAEALEKGTLPLLKDQVKSVMEQNWDELASSPPDMDYDPEARILCALYVVVSILLELAEGPTSVSS

SEQ ID NO: 1172 - protein, 854 aa, Homo sapiens
MDFSMVAGAAAYNEKSGRITSLSLLFQKVFAQIFPQWRKGNTEECLPYKCSETGALGENYSWQIPINHNDFKILKNNERQLCEVLQNKFGCISTLVSPVQEGNSKSLQVFRKMLTPRIELSVWKDDLTTHAVDAVVNAANEDLLHGGGLALALVKAGGFEIQEESKQFVARYGKVSAGEIAVTGAGRLPCKQIIHAVGPRWMEWDKQGCTGKLQRAIVSILNYVIYKNTHIKTVAIPALSSGIFQFPLNLCTKTIVETIRVSLQGKPMMSNLKEIHLVSNEDPTVAAFKAASEFILGKSELGQETTPSFNAMVVNNLTLQIVQGHIEWQTADVIVNSVNPHDITVGPVAKSILQQAGVEMKSEFLATKAKQFQRSQLVLVTKGFNLFCKYIYHVLWHSEFPKPQILKHAMKECLEKCIEQNITSISFPALGTGNMEIKKETAAEILFDEVLTFAKDHVKHQLTVKFVIFPTDLEIYKAFSSEMAKRSKMLSLNNYSVPQSTREEKRENGLEARSPAINLMGFNVEEMYEAHAWIQRILSLQNHHIIENNHILYLGRKEHDILSQLQKTSSVSITEIISPGRTELEIEGARADLIEVVMNIEDMLCKVQEEMARKKERGLWRSLGQWTIQQQKTQDEMKENIIFLKCPVPPTQELLDQKKQFEKCGLQVLKVEKIDNEVLMAAFQRKKKMMEEKLHRQPVSHRLFQQVPYQFCNVVCRVGFQRMYSTPCDPKYGAGIYFTKNLKNLAEKAKKISAADKLIYVFEAEVLTGFFCQGHPLNIVPPPLSPGAIDGHDSVVDNVSSPETFVIFSGMQAIPQYLWTCTQEYVQSQDYSSGPMRPFAQHPWRGFASGSPVD

SEQ ID NO: 1173 - protein, 476 aa, Homo sapiens
MSDAQLGPLRLTLLSVSARTGFCKKQQELWQRRKEAAEALGTRKVSVLLATSHSGARPAVSTMDSSAAPTNASNCTDALAYSSCSPAPSPGSWVNLSHLDGNLSDPCGPNRTDLGGRDSLCPPTGSPSMITAITIMALYSIVCVVGLFGNFLVMYVIVRYTKMKTATNIYIFNLALADALATSTLPFQSVNYLMGTWPFGTILCKIVISIDYYNMFTSIFTLCTMSVDRYIAVCHPVKALDFRTPRNAKIINVCNWILSSAIGLPVMFMATTKYRQGSIDCTLTFSHPTWYWENLLKICVFIFAFIMPVLIITVCYGLMILRLKSVRMLSGSKEKDRNLRRITRMVLVVVAVFIVCWTPIHIYVIIKALVTIPETTFQTVSWHFCIALGYTNSCLNPVLYAFLDENFKRCFREFCIPTSSNIEQQNSTRIRQNTRDHPSTANTVDRTNHQNYYIIHRCCCNTPLISQKPVLLWFCD

SEQ ID NO: 1174 - protein, 984 aa, Homo sapiens
MAGNDCGALLDEELSSFFLNYLADTQGGGSGEEQLYADFPELDLSQLDASDFDSATCFGELQWCPENSETEPNQYSPDDSELFQIDSENEALLAELTKTLDDIPEDDVGLAAFPALDGGDALSCTSASPAPSSAPPSPAPEKPSAPAPEVDELSLADSTQDKKAPMMQSQSRSCTELHKHLTSAQCCLQDRGLQPPCLQSPRLPAKEDKEPGEDCPSPQPAPASPRDSLALGRADPGAPVSQEDMQAMVQLIRYMHTYCLPQRKLPPQTPEPLPKACSNPSQQVRSRPWSRHHSKASWAEFSILRELLAQDVLCDVSKPYRLATPVYASLTPRSRPRPPKDSQASPGRPSSVEEVRIAASPKSTGPRPSLRPLRLEVKREVRRPARLQQQEEEDEEEEEEEEEEEKEEEEEWGRKRPGRGLPWTKLGRKLESSVCPVRRSRRLNPELGPWLTFADEPLVPSEPQGALPSLCLAPKAYDVERELGSPTDEDSGQDQQLLRGPQIPALESPCESGCGDMDEDPSCPQLPPRDSPRCLMLALSQSDPTFGKKSFEQTLTVELCGTAGLTPPTTPPYKPTEEDPFKPDIKHSLGKEIALSLPSPEGLSLKATPGAAHKLPKKHPERSELLSHLRHATAQPASQAGQKRPFSCSFGDHDYCQVLRPEGVLQRKVLRSWEPSGVHLEDWPQQGAPWAEAQAPGREEDRSCDAGAPPKDSTLLRDHEIRASLTKHFGLLETALEEEDLASCKSPEYDTVFEDSSSSSGESSFLPEEEEEEGEEEEEDDEEEDSGVSPTCSDHCPYQSPPSKANRQLCSRSRSSSGSSPCHSWSPATRRNFRCESRGPCSDRTPSIRHARKRREKAIGEGRVVYIQNLSSDMSSRELKRRFEVFGEIEECEVLTRNRRGEKYGFITYRCSEHAALSLTKGAALRKRNEPSFQLSYGGLRHFCWPRYTDYDSNSEEALPASGKSKYEAMDFDSLLKEAQQSLH

SEQ ID NO: 1175 - protein, 1712 aa, Homo sapiens
MGRDQRAVAGPALRRWLLLGTVTVGFLAQSVLAGVKKFDVPCGGRDCSGGCQCYPEKGGRGQPGPVGPQGYNGPPGLQGFPGLQGRKGDKGERGAPGVTGPKGDVGARGVSGFPGADGIPGHPGQGGPRGRPGYDGCNGTQGDSGPQGPPGSEGFTGPPGPQGPKGQKGEPYALPKEERDRYRGEPGEPGLVGFQGPPGRPGHVGQMGPVGAPGRPGPPGPPGPKGQQGNRGLGFYGVKGEKGDVGQPGPNGIPSDTLHPIIAPTGVTFHPDQYKGEKGSEGEPGIRGISLKGEEGIMGFPGLRGYPGLSGEKGSPGQKGSRGLDGYQGPDGPRGPKGEAGDPGPPGLPAYSPHPSLAKGARGDPGFPGAQGEPGSQGEPGDPGLPGPPGLSIGDGDQRRGLPGEMGPKGFIGDPGIPALYGGPPGPDGKRGPPGPPGLPGPPGPDGFLFGLKGAKGRAGFPGLPGSPGARGPKGWKGDAGECRCTEGDEAIKGLPGLPGPKGFAGINGEPGRKGDRGDPGQHGLPGFPGLKGVPGNIGAPGPKGAKGDSRTITTKGERGQPGVPGVPGMKGDDGSPGRDGLDGFPGLPGPPGDGIKGPPGDPGYPGIPGTKGTPGEMGPPGLGLPGLKGQRGFPGDAGLPGPPGFLGPPGPAGTPGQIDCDTDVKRAVGGDRQEAIQPGCIGGPKGLPGLPGPPGPTGAKGLRGIPGFAGADGGPGPRGLPGDAGREGFPGPPGFIGPRGSKGAVGLPGPDGSPGPIGLPGPDGPPGERGLPGEVLGAQPGPRGDAGVPGQPGLKGLPGDRGPPGFRGSQGMPGMPGLKGQPGLPGPSGQPGLYGPPGLHGFPGAPGQEGPLGLPGIPGREGLPGDRGDPGDTGAPGPVGMKGLSGDRGDAGFTGEQGHPGSPGFKGIDGMPGTPGLKGDRGSPGMDGFQGMPGLKGRPGFPGSKGEAGFFGIPGLKGLAGEPGFKGSRGDPGPPGPPPVILPGMKDIKGEKGDEGPMGLKGYLGAKGIQGMPGIPGLSGIPGLPGRPGHIKGVKGDIGVPGIPGLPGFPGVAGPPGITGFPGFIGSRGDKGAPGRAGLYGEIGATGDFGDIGDTINLPGRPGLKGERGTTGIPGLKGFFGEKGTEGDIGFPGITGVTGVQGPPGLKGQTGFPGLTGPPGSQGELGRIGLPGGKGDDGWPGAPGLPGFPGLRGIRGLHGLPGTKGFPGSPGSDIHGDPGFPGPPGERGDPGEANTLPGPVGVPGQKGDQGAPGERGPPGSPGLQGFPGITPPSNISGAPGDKGAPGIFGLKGYRGPPGPPGSAALPGSKGDTGNPGAPGTPGTKGWAGDSGPQGRPGVFGLPGEKGPRGEQGFMGNTGPTGAVGDRGPKGPKGDPGFPGAPGTVGAPGIAGIPQKIAVQPGTVGPQGRRGPPGAPGEMGPQGPPGEPGFRGAPGKAGPQGRGGVSAVPGFRGDEGPIGHQGPIGQEGAPGRPGSPGLPGMPGRSVSIGYLLVKHSQTDQEPMCPVGMNKLWSGYSLLYFEGQEKAHNQDLGLAGSCLARFSTMPFLYCNPGDVCYYASRNDKSYWLSTTAPLPMMPVAEDEIKPYISRCSVCEAPAIAIAVHSQDVSIPHCPAGWRSLWIGYSFLMHTAAGDEGGGQSLVSPGSCLEDFRATPFIECNGGRGTCHYYANKYSFWLTTIPEQSFQGSPSADTLKAGLIRTHISRCQVCMKNL

SEQ ID NO: 1176 - protein, 121 aa, Homo sapiens
MARRAGGARMFGSLLLFALLAAGVAPLSWDLPEPRSRASKIRVHSRGNLWATGHFMGKKSLEPSSPSPLGTAPHTSLRDQRLQLSHDLLGILLLKKALGVSLSRPAPQIQYRRLLVQILQK

SEQ ID NO: 1177 - protein, 1695 aa, Homo sapiens
MNVQPCSRCGYGVYPAEKISCIDQIWHKACFHCEVCKMMLSVNNFVSHQKKPYCHAHNPKNNTFTSVYHTPLNLNVRTFPEAISGIHDQEDGEQCKSVFHWDMKSKDKEGAPNRQPLANERAYWTGYGEGNAWCPGALPDPEIVRMVEARKSLGEEYTEDYEQPRGKGSFPAMITPAYQRAKKANQLASQVEYKRGHDERISRFSTVVDTPELLRSKAGAQLQSDVRYTEDYEQQRGKGSFPAMITPAYQIAKRANELASDVRYHQQYQKEMRGMAGPAIGAEGILTRECADQYGQGYPEEYEEHRGKGSFPAMITPAYQNAKKAHELASDIKYRQDFNKMKGAAHYHSLPAQDNLVLKQAQSVNKLVSENKYKENYQNHMRGRYEGVGMDRRTLHAMKVGSLASNVAYKADYKHDIVDYNYPATLTPSYQTAMKLVPLKDANYRQSIDKLKYSSVTDTPQIVQAKINAQQLSHVNYRADYEKNKLNYTLPQDVPQLVKAKTNAKLFSEVKYKEGWEKTKGKGFEMKLDAMSLLAAKASGELASNIKYKEEYEKTKGKAMGTADSRLLHSLQIAKMSSEVEYKKGFEESKTRFHLPMDMVNIRHAKKAQTLASDLDYRKKLHEYTVLPEDMKTQWAKKAYGLQSELQYKADLAWMKGVGWLTEGSLNLEQAKKAGQLVSEKNYRQRVDELKFTSVTDSSQMEHAKKSQELQSGVAYKAGNEQSVHQYTISKDEPLFLQARANAANLSEKLYKSSWENQKAKGFELRLDSLTFLAAKAKRDLASEVKYKEDYERSRGKLIGAKDVQGDSQMSHSLQMSKLQSELEYKKGFEDTKSQCHVSLDMVHLVHARKAQHLATDVGYKTAEHHFTALPTDMKVEWAKKAYGLQSDNQYRADVKWMKGMGWVATGSLNVEQAKKAGELISEKKYRQHPDALKFTSIKDTPEMVQARISYTQAVDRLYREQGENIKHHYTPTADLPEVLLAKLNAMNISETRYKESWSKLRDGGYKLRLDALPFQAAKASGEIISDYKYKEAFEKMKGQMLGSRSLEDDISLAHSVYATSLQSDVNYKKGFEHSKAQFHLPLDMAALVHAKKAQTLASNQDYKHPLPQYTSLAEDLRLSCAKKAHKLQSENLYRSDLNFMRGVACVIPGTLEIEGRKKASELISESKYRQHPHSFKYTAVTDTPNLLHAKFSNQITNERLYKAAGEDARHEYTMTLGLPEFIRAKTNAANLSDARYKESWRNLRAQGYKLTIEALPFQAARASGDIASDFLYRHDFVKERGKLIGPQSVRDDPRIQHCRRMGQLQSELQYRRGATSSQAQFHLPMDMVHLVHAKNAQALASDHDYRTQYHKFTALPEDLKMAWAKKAHALQSELRYKSDLIGMKGIGWLALRSPQMESAKKAGELISETKYRKKPDSIKFTTVVDSPDLVHAKNSYMHCNERMYRSGDAESLHRYTLIPDHPDFTRARLNALHLSDKVYRNSWEQTRAGSYDFRLDAIPFQTARASREIASDFRYKEAFLRDRGLQIGYRSVDDDPRMKHFLNVGRLQSDNEYKKDFAKSRSQFHSSTDQPGLLQAKRSQQLASDVHYRQPLPQPTCDPEQLGLRHAQKAHQLQSDVKYKSDLNLTRGVGWTPPGSYKVEMARRAAELANARGLGLQGAYRGAEAVEAGDHQSGEVNPDATEILHVKKKKALLL

SEQ ID NO: 1178 - protein, 633 aa, Homo sapiens
MKAIKKSLTEEEYLYLDFSHQTEGCIFPLHTSVTLFLLSYCDCKIFKICLVVTKEVSRDSSLLRDDLIQDVEIQIISRQELPPIVQNCCLPAVVERSDNFCRAGLAVVLRHIIQKSYEADPLKKELLELLGFKKTCLKACAEVSQWTRLCELTIPLAIENFLRESSDQPPTIPVEILQLEKKLSEPVRVHNDDKLRRQKLKQQKADGVGPPLTKGKAKSKVHTQETSEGLDSSSKSLELKVAFSKLTVQEEPATTNREPSHIRKAKASDLPPLEHVFAEGLYFTLADIVLLPCIHHFLVIISRKFSEKLVEFPLLASWYQRIQEVPGVKTAASKCGIQFLHLPKLLTTSTEQHPNLCEVPGVEEQSDPLFIGGPRPTMAKLMEKGIEVMFSPHPCPTWTLDWNVLPAAVSPKEGKMSSDRALRKQQQLNNLVYVVTNQAKPGDRIVDFCSGGGHVGIVLAHMLPSCQVTLIENKELSLIRAKKRSDELGLSNIWFIQANMEYFTGMFNIGVALHACGVATDMVIEHCIKTRASFVTCPCCYGFIQNTSKFNFPKSEQFKKTLSYKEHMILCRFADQTAVQLPPQRRLIGKQCMCLVDLDRARAAEECGYSVQVISMEPESCSPKNNMIVGVPI

SEQ ID NO: 1179 - protein, 1102 aa, Homo sapiens
MRTSLQAVALWGQKAPPHSITAIMITDDQRTIVTGSQEGQLCLWNLSHELKISAKELLFGHSASVTCLARARDFSKQPYIVSAAENGEMCVWNVTNGQCMEKATLPYRHTAICYYHCSFRMTGEGWLLCCGEYQDVLIIDAKTLAVVHSFRSSQFPDWINCMCIVHSMRIQEDSLLVVSVAGELKVWDLSSSINSIQEKQDVYEKESKFLESLNCQTIRFCTYTERLLLVVFSKCWKVYDYCDFSLLLTEVSRNGQFFAGGEVIAAHRILIWTEDGHSYIYQLLNSGLSKSIYPADGRVLKETIYPHLLCSTSVQENKEQSRPFVMGYMNERKEPFYKVLFSGEVSGRITLWHIPDVPVSKFDGSPREIPVTATWTLQDNFDKHDTMSQSIIDYFSGLKDGAGTAVVTSSEYIPSLDKLICGCEDGTIIITQALNAAKARLLEGGSLVKDSPPHKVLKGHHQSVTSLLYPHGLSSKLDQSWMLSGDLDSCVILWDIFTEEILHKFFLEAGPVTSLLMSPEKFKLRGEQIICCVCGDHSVALLHLEGKSCLLHARKHLFPVRMIKWHPVENFLIVGCADDSVYIWEIETGTLERHETGERARIILNCCDDSQLVKSVLPIASETLKHKSIEQRSSSPYQLGPLPCPGLQVESSCKVTDAKFCPRPFNVLPVKTKWSNVGFHILLFDLENLVELLLPTPLSDVDSSSSFYGGEVLRRAKSTVEKKTLTLRKSKTACGPLSAEALAKPITESLAQGDNTIKFSEENDGIKRQKKMKISKKMQPKPSRKVDASLTIDTAKLFLSCLLPWGVDKDLDYLCIKHLNILKLQGPISLGISLNEDNFSLMLPGWDLCNSGMIKDYSGVNLFSRKVLDLSDKYTATLPNQVGIPRGLENNCDSLRESDTIVYLLSRLFLVNKLVNMPLELACRVGSSFRMESIHNKMRGAGNDILNMSSFYSCLRNGKNESHVPEADLSLLKLISCWRDQSVQVTEAIQAVLLAEVQQHMKSLGKIPVNSQPVSMAENGNCEMKQMLPKLEWTEELELQCVRNTLPLQTPVSPVKHDSNSNSANFQDVEDMPDRCALEESESPGEPRHHSWIAKVCPCKVS

SEQ ID NO: 1180 - protein, 1045 aa, Homo sapiens
MGSQPPLGSPLSREEGEAPPPAPASEGRRRSRRVRLRGSCRHRPSFLGCRELAASAPARPAPASSEIMASAAKEFKMDNFSPKAGTSKLQQTVPADASPDSKCPICLDRFDNVSYLDRCLHKFCFRCVQEWSKNKAECPLCKQPFDSIFHSVRAEDDFKEYVLRPSYNGSFVTPDRRFRYRTTLTRERNASVYSPSGPVNRRTTTPPDSGVLFEGLGISTRPRDVEIPQFMRQIAVRRPTTADERSLRKIQEQDIINFRRTLYRAGARVRNIEDGGRYRDISAEFFRRNPACLHRLVPWLKRELTVLFGAHGSLVNIVQHIIMSNVTRYDLESQAFVSDLRPFLLNRTEHFIHEFISFARSPFNMAAFDQHANYDCPAPSYEEGSHSDSSVITISPDEAETQELDINVATVSQAPWDDETPGPSYSSSEQVHVTMSSLLNTSDSSDEELVTGGATSQIQGVQTNDDLNNDSDDSSDNCVIVGFVKPLAERTPELVELSSDSEDLGSYEKMETVKTQEQEQSYSSGDSDVSRCSSPHSVLGKDEQINKGHCDSSTRIKSKKEEKRSTSLSSPRNLNSSVRGDRVYSPYNHRHRKRGRSRSSDSRSQSRSGHDQKNHRKHHGKKRMKSKRSRSRESSRPRGRRDKKRSRTRDSSWSRRSQTLSLSSESTSRSRSRSSDHGKRRSRSRNRDRYYLRNNYGSRYKWEYTYYSRNKDRDGYESSYRRRTLSRAHYSRQSSSPEFRVQSFSERTNARKKNNHSERKYYYYERHRSRSLSSNRSRTASTGTDRVRNEKPGGKRKYKTRHLEGTNEVAQPSREFASKAKDSHYQKSSSKLDGNYKNESDTFSDSRSSDRETKHKRRKRKTRSLSVEIVYEGKATDTTKHHKKKKKKHKKKHKKHHGDNASRSPVVITIDSDSDKDSEVKEDTECDNSGPQDPLQNEFLAPSLEPFETKDVVTIEAEFGVLDKECDIATLSNNLNNANKTVDNIPPLAASVEQTLDVREESTFVSDLENQPSNIVSLQTEPSRQLPSPRTSLMSVCLGRDCDMS

SEQ ID NO: 1181 - protein, 603 aa, Homo sapiens
MRRRAARGPGPPPPGPGLSRLPLPLLLLLALGTRGGCAAPAPAPRAEDLSLGVEWLSRFGYLPPADPTTGQLQTQEELSKAITAMQQFGGLEATGILDEATLALMKTPRCSLPDLPVLTQARRRRQAPAPTKWNKRNLSWRVRTFPRDSPLGHDTVRALMYYALKVWSDIAPLNFHEVAGSAADIQIDFSKADHNDGYPFDGPGGTVAHAFFPGHHHTAGDTHFDDDEAWTFRSSDAHGMDLFAVAVHEFGHAIGLSHVAAAHSIMRPYYQGPVGDPLRYGLPYEDKVRVWQLYGVRESVSPTAQPEEPPLLPEPPDNRSSAPPRKDVPHRCSTHFDAVAQIRGEAFFFKGKYFWRLTRDRHLVSLQPAQMHRFWRGLPLHLDSVDAVYERTSDHKIVFFKGDRYWVFKDNNVEEGYPRPVSDFSLPPGGIDAAFSWAHNDRTYFFKDQLYWRYDDHTRHMDPGYPAQSPLWRGVPSTLDDAMRWSDGASYFFRGQEYWKVLDGELEVAPGYPQSTARDWLVCGDSQADGSVAAGVDAAEGPRAPPGQHDQSRSEDGYEVCSCTSGASSPPGAPGPLVAATMLLLLPPLSPGALWTAAQALTL

SEQ ID NO: 1182 - protein, 514 aa, Homo sapiens
MGRKKIQIQRITDERNRQVTFTKRKFGLMKKAYELSVLCDCEIALIIFNHSNKLFQYASTDMDKVLLKYTEYNEPHESRTNADIIETLRKKGFNGCDSPEPDGEDSLEQSPLLEDKYRRASEELDGLFRRYGSTVPAPNFAMPVTVPVSNQSSLQFSNPSGSLVTPSLVTSSLTDPRLLSPQQPALQRNSVSPGLPQRPASAGAMLGGDLNSANGACPSPVGNGYVSARASPGLLPVANGNSLNKVIPAKSPPPPTHSTQLGAPSRKPDLRVITSQAGKGLMHHLNNAQRLGVSQSTHSLTTPVVSVATPSLLSQGLPFSSMPTAYNTDYQLTSAELSSLPAFSSPGGLSLGNVTAWQQPQQPQQPQQPQPPQQQPPQPQQPQPQQPQQPQQPPQQQSHLVPVSLSNLIPGSPLPHVGAALTVTTHPHISIKSEPVSPSRERSPAPPPPAVFPAARPEPGDGLSSPAGGSYETGDRDDGRGDFGPTLGLLRPAPEPEAEGSAVKRMRLDTWTLK

SEQ ID NO: 1183 - protein, 326 aa, Homo sapiens
MLLSKFGSLAHLCGPGGVDHLPVKILQPAKADKESFEKAYQVGAVLGSGGFGTVYAGSRIADGLPVAVKHVVKERVTEWGSLGGATVPLEVVLLRKVGAAGGARGVIRLLDWFERPDGFLLVLERPEPAQDLFDFITERGALDEPLARRFFAQVLAAVRHCHSCGVVHRDIKDENLLVDLRSGELKLIDFGSGALLKDTVYTDFDGTRVYSPPEWIRYHRYHGRSATVWSLGVLLYDMVCGDIPFEQDEEILRGRLLFRRRVSPECQQLIRWCLSLRPSERPSLDQIAAHPWMLGADGGVPESCDLRLCTLDPDDVASTTSSSESL

SEQ ID NO: 1184 - protein, 238 aa, Homo sapiens
MWVPVVFLTLSVTWIGAAPLILSRIVGGWECEKHSQPWQVLVASRGRAVCGGVLVHPQWVLTAAHCIRNKSVILLGRHSLFHPEDTGQVFQVSHSFPHPLYDMSLLKNRFLRPGDDSSHDLMLLRLSEPAELTDAVKVMDLPTQEPALGTTCYASGWGSIEPEEFLTPKKLQCVDLHVISNDVCAQVHPQKVTKFMLCAGRWTGGKSTCSWVILITELTMPALPMVLHGSLVPWRGGV

SEQ ID NO: 1185 - protein, 2365 aa, Homo sapiens
MESVSESSQQQKRKPVIHGLEDQKRIYTDWANHYLAKSGHKRLIRDLQQDVTDGVLLAQIIQVVANEKIEDINGCPKNRSQMIENIDACLNFLAAKGINIQGLSAEEIRNGNLKAILGLFFSLSRYKQQQQQPQKQHLSSPLPPAVSQVAGAPSQCQAGTPQQQVPVTPQAPCQPHQPAPHQQSKAQAEMQSRLPGPTARVSAAGSEAKTRGGSTTANNRRSQSFNNYDKSKPVTSPPPPPSSHEKEPLASSASSHPGMSDNAPASLESGSSSTPTNCSTSSAIPQPGAATKPWRSKSLSVKHSATVSMLSVKPPGPEAPRPTPEAMKPAPNNQKSMLEKLKLFNSKGGSKAGEGPGSRDTSCERLETLPSFEESEELEAASRMLTTVGPASSSPKIALKGIAQRTFSRALTNKKSSLKGNEKEKEKQQREKDKEKSKDLAKRASVTERLDLKEEPKEDPSGAAVPEMPKKSSKIASFIPKGGKLNSAKKEPMAPSHSGIPKPGMKSMPGKSPSAPAPSKEGERSRSGKLSSGLPQQKPQLDGRHSSSSSSLASSEGKGPGGTTLNHSISSQTVSGSVGTTQTTGSNTVSVQLPQPQQQYNHPNTATVAPFLYRSQTDTEGNVTAESSSTGVSVEPSHFTKTGQPALEELTGEDPEARRLRTVKNIADLRQNLEETMSSLRGTQVTHSTLETTFDTNVTTEMSGRSILSLTGRPTPLSWRLGQSSPRLQAGDAPSMGNGYPPRANASRFINTESGRYVYSAPLRRQLASRGSSVCHVDVSDKAGDEMDLEGISMDAPGYMSDGDVLSKNIRTDDITSGYMTDGGLGLYTRRLNRLPDGMAVVRETLQRNTSLGLGDADSWDDSSSVSSGISDTIDNLSTDDINTSSSISSYANTPASSRKNLDVQTDAEKHSQVERNSLWSGDDVKKSDGGSDSGIKMEPGSKWRRNPSDVSDESDKSTSGKKNPVISQTGSWRRGMTAQVGITMPRTKPSAPAGALKTPGTGKTDDAKVSEKGRLSPKASQVKRSPSDAGRSSGDESKKPLPSSSRTPTANANSFGFKKQSGSAAGLAMITASGVTVTSRSATLGKIPKSSALVSRSAGRKSSMDGAQNQDDGYLALSSRTNLQYRSLPRPSKSNSRNGAGNRSSTSSIDSNISSKSAGLPVPKLREPSKTALGSSLPGLVNQTDKEKGISSDNESVASCNSVKVNPAAQPVSSPAQTSLQPGAKYPDVASPTLRRLFGGKPTKQVPIATAENMKNSVVISNPHATMTQQGNLDSPSGSGVLSSGSSSPLYSKNVDLNQSPLASSPSSAHSAPSNSLTWGTNASSSSAVSKDGLGFQSVSSLHTSCESIDISLSSGGVPSHNSSTGLIASSKDDSLTPFVRTNSVKTTLSESPLSSPAASPKFCRSTLPRKQDSDPHLDRNTLPKKGLRYTPTSQLRTQEDAKEWLRSHSAGGLQDTAANSPFSSGSSVTSPSGTRFNFSQLASPTTVTQMSLSNPTMLRTHSLSNADGQYDPYTDSRFRNSSMSLDEKSRTMSRSGSFRDGFEEVHGSSLSLVSSTSSVYSTPEEKCQSEIRKLRRELDASQEKVSALTTQLTANAHLVAAFEQSLGNMTIRLQSLTMTAEQKDSELNELRKTIELLKKQNAAAQAAINGVINTPELNCKGNGTAQSADLRIRRQHSSDSVSSINSATSHSSVGSNIESDSKKKKRKNWLRSSFKQAFGKKKSPKSASSHSDIEEMTDSSLPSSPKLPHNGSTGSTPLLRNSHSNSLISECMDSEAETVMQLRNELRDKEMKLTDIRLEALSSAHQLDQLREAMNRMQSEIEKLKAENDRLKSESQGSGCSRAPSQVSISASPRQSMGLSQHSLNLTESTSLDMLLDDTGECSARKEGGRHVKIVVSFQEEMKWKEDSRPHLFLIGCIGVSGKTKWDVLDGVVRRLFKEYIIHVDPVSQLGLNSDSVLGYSIGEIKRSNTSETPELLPCGYLVGENTTISVTVKGLAENSLDSLVFESLIPKPILQRYVSLLIEHRRIILSGPSGTGKTYLANRLSEYIVLREGRELTDGVIATFNVDHKSSKELRQYLSNLADQCNSENNAVDMPLVIILDNLHHVSSLGEIFNGLLNCKYHKCPYIIGTMNQATSSTPNLQLHHNFRWVLCANHTEPVKGFLGRFLRRKLMETEISGRVRNMELVKIIDWIPKVWHHLNRFLEAHSSSDVTIGPRLFLSCPIDVDGSRVWFTDLWNYSIIPYLLEAVREGLQLYGRRAPWEDPAKWVMDTYPWAASPQQHEWPPLLQLRPEDVGFDGYSMPREGSTSKQMPPSDAEGDPLMNMLMRLQEAANYSSPQSYDSDSNSNSHHDDILDSSLESTL

SEQ ID NO: 1186 - protein, 5604 aa, Homo sapiens
MTTQAPTFTQPLQSVVVLEGSTATFEAHISGFPVPEVSWFRDGQVISTSTLPGVQISFSDGRAKLTIPAVTKANSGRYSLKATNGSGQATSTAELLVKAETAPPNFVQRLQSMTVRQGSQVRLQVRVTGIPTPVVKFYRDGAEIQSSLDFQISQEGDLYSLLIAEAYPEDSGTYSVNATNSVGRATSTAELLVQGEEEVPAKKTKTIVSTAQISESRQTRIEKKIEAHFDARSIATVEMVIDGAAGQQLPHKTPPRIPPKPKSRSPTPPSIAAKAQLARQQSPSPIRHSPSPVRHVRAPTPSPVRSVSPAARISTSPIRSVRSPLLMRKTQASTVATGPEVPPPWKQEGYVASSSEAEMRETTLTTSTQIRTEERWEGRYGVQEQVTISGAAGAAASVSASASYAAEAVATGAKEVKQDADKSAAVATVVAAVDMARVREPVISAVEQTAQRTTTTAVHIQPAQEQVRKEAEKTAVTKVVVAADKAKEQELKSRTKEVITTKQEQMHVTHEQIRKETEKTFVPKVVISAAKAKEQETRISEEITKKQKQVTQEAIRQETEITAASMVVVATAKSTKLETVPGAQEETTTQQDQMHLSYEKIMKETRKTVVPKVIVATPKVKEQDLVSRGREGITTKREQVQITQEKMRKEAEKTALSTIAVATAKAKEQETILRTRETMATRQEQIQVTHGKVDVGKKAEAVATVVAAVDQARVREPREPGHLEESYAQQTTLEYGYKERISAAKVAEPPQRPASEPHVVPKAVKPRVIQAPSETHIKTTDQKGMHISSQIKKTTDLTTERLVHVDKRPRTASPHFTVSKISVPKTEHGYEASIAGSAIATLQKELSATSSAQKITKSVKAPTVKPSETRVRAEPTPLPQFPFADTPDTYKSEAGVEVKKEVGVSITGTTVREERFEVLHGREAKVTETARVPAPVEIPVTPPTLVSGLKNVTVIEGESVTLECHISGYPSPTVTWYREDYQIESSIDFQITFQSGIARLMIREAFAEDSGRFTCSAVNEAGTVSTSCYLAVQVSEEFEKETTAVTEKFTTEEKRFVESRDVVMTDTSLTEEQAGPGEPAAPYFITKPVVQKLVEGGSVVFGCQVGGNPKPHVYWKKSGVPLTTGYRYKVSYNKQTGECKLVISMTFADDAGEYTIVVRNKHGETSASASLLEEADYELLMKSQQEMLYQTQVTAFVQEPKVGETAPGFVYSEYEKEYEKEQALIRKKMAKDTVVVRTYVEDQEFHISSFEERLIKEIEYRIIKTTLEELLEEDGEEKMAVDISESEAVESGFDSRIKNYRILEGMGVTFHCKMSGYPLPKIAWYKDGKRIKHGERYQMDFLQDGRASLRIPVVLPEDEGIYTAFASNIKGNAICSGKLYVEPAAPLGAPTYIPTLEPVSRIRSLSPRSVSRSPIRMSPARMSPARMSPARMSPARMSPGRRLEETDESQLERLYKPVFVLKPVSFKCLEGQTARFDLKVVGRPMPETFWFHDGQQIVNDYTHKVVIKEDGTQSLIIVPATPSDSGEWTVVAQNRAGRSSISVILTVEAVEHQVKPMFVEKLKNVNIKEGSRLEMKVRATGNPNPDIVWLKNSDIIVPHKYPKIRIEGTKGEAALKIDSTVSQDSAWYTATAINKAGRDTTRCKVNVEVEFAEPEPERKLIIPRGTYRAKEIAAPELEPLHLRYGQEQWEEGDLYDKEKQQKPFFKKKLTSLRLKRFGPAHFECRLTPIGDPTMVVEWLHDGKPLEAANRLRMINEFGYCSLDYGVAYSRDSGIITCRATNKYGTDHTSATLIVKDEKSLVEESQLPEGRKGLQRIEELERMAHEGALTGVTTDQKEKQKPDIVLYPEPVRVLEGETARFRCRVTGYPQPKVNWYLNGQLIRKSKRFRVRYDGIHYLDIVDCKSYDTGEVKVTAENPEGVIEHKVKLEIQQREDFRSVLRRAPEPRPEFHVHEPGKLQFEVQKVDRPVDTTETKEVVKLKRAERITHEKVPEESEELRSKFKRRTEEGYYEAITAVELKSRKKDESYEELLRKTKDELLHWTKELTEEEKKALAEEGKITIPTFKPDKIELSPSMEAPKIFERIQSQTVGQGSDAHFRVRVVGKPDPECEWYKNGVKIERSDRIYWYWPEDNVCELVIRDVTAEDSASIMVKAINIAGETSSHAFLLVQAKQLITFTQELQDVVAKEKDTMATFECETSEPFVKVKWYKDGMEVHEGDKYRMHSDRKVHFLSILTIDTSDAEDYSCVLVEDENVKTTAKLIVEGAVVEFVKELQDIEVPESYSGELECIVSPENIEGKWYHNDVELKSNGKYTITSRRGRQNLTVKDVTKEDQGEYSFVIDGKKTTCKLKMKPRPIAILQGLSDQKVCEGDIVQLEVKVSLESVEGVWMKDGQEVQPSDRVHIVIDKQSHMLLIEDMTKEDAGNYSFTIPALGLSTSGRVSVYSVDVITPLKDVNVIEGTKAVLECKVSVPDVTSVKWYLNDEQIKPDDRVQAIVKGTKQRLVINRTHASDEGPYKLIVGRVETNCNLSVEKIKIIRGLRDLTCTETQNVVFEVELSHSGIDVLWNFKDKEIKPSSKYKIEAHGKIYKLTVLNMMKDDEGKYTFYAGENMTSGKLTVAGGAISKPLTDQTVAESQEAVFECEVANPDSKGEWLRDGKHLPLTNNIRSESDGHKRRLIIAATKLDDIGEYTYKVATSKTSAKLKVEAVKIKKTLKNLTVTETQDAVFTVELTHPNVKGVQWIKNGVVLESNEKYAISVKGTIYSLRIKNCAIVDESVYGFRLGRLGASARLHVETVKIIKKPKDVTALENATVAFEVSVSHDTVPVKWFHKSVEIKPSDKHRLVSERKVHKLMLQNISPSDAGEYTAVVGQLECKAKLFVETLHITKTMKNIEVPETKTASFECEVSHFNVPSMWLKNGVEIEMSEKFKIVVQGKLHQLIIMNTSTEDSAEYTFVCGNDQVSATLTVTPIMITSMLKDINAEEKDTITFEVTVNYEGISYKWLKNGVEIKSTDKCQMRTKKLTHSLNIRNVHFGDAADYTFVAGKATSTATLYVEARHIEFRKHIKDIKVLEKKRAMFECEVSEPDITVQWMKDDQELQITDRIKIQKEKYVHRLLIPSTRMSDAGKYTVVAGGNVSTAKLFVEGRDVRIRSIKKEVQVIEKQRAVVEFEVNEDDVDAHWYKDGIEINFQVQERHKYVVERRIHRMFISETRQSDAGEYTFVAGRNRSSVTLYVNAPEPPQVLQELQPVTVQSGKPARFCAVISGRPQPKISWYKEEQLLSTGFKCKFLHDGQEYTLLLIEAFPEDAAVYTCEAKNDYGVATTSASLSVEVPEVVSPDQEMPVYPPAIITPLQDTVTSEGQPARFQCRVSGTDLKVSWYSKDKKIKPSRFFRMTQFEDTYQLEIAEAYPEDEGTYTFVASNAVGQVSSTANLSLEAPESILHERIEQEIEMEMKELFSEGESEHSERDTRDAFSDSEDIDHKSMAAKRYASRISSTSSWPEYFKPSFTQKLTFKYVLEGEPVVFTCRLIACPTPEMTWFHNNRPIPTGLRRIIKAESDLHHHSSSLEIKRVQDRDSGSYRLLAINSEGSAESTASLLVIQKGQDEKYLEFLKRAERTHENVEALVERGEDRIKVDLRFTGSPFNKKQDVEQKGMMRTIHFKTMSSAKKTDYMYDEEYLESKSDIRGWLNVGESFLDKETKVKLQRLREARKTLMEKKKLSLLDTSSEISSRTLRSEASDKDILFSREDMKIRSMSDLAESYKVDHSAESIVQNPHALSNQMDQNIESEELPTSFQTIVDEEIFQTEIRMSQEALVKESLPKDHLYGEILVNENTQARGQLEEIMANTTIGESSTYITNVCEKEEVYETPENVSQAITPHASESFGTLVNVEESEEIASERIKKDDLRELQLSASTRIDEFKTEQKEENMRFFENSFRKRPQRCPPSFLQEIESQEVYEGDSCNFVCHFQGYPQPIVTWYNNDMPIPRNQNFIIHSLENYSILTLSSVHHQNEGSITCVLFNQYGTVKTTSMLKVKAKQKHDVKAHKVPVFHDYLDEEEELALVFDQAKGAHPSMSQEGQTNLHLLKTNPPVPPSGDTELLSFPVEIQVTAATPIPEQDKESKEVFQTEELEPKAMPQDQVTQSPKHRFVFLSDITNEPPKMLQEMPKHARCREGDSIILECLISGEPQPVVTWFQNGVLLKQNQKFQFEEVNCSHQLYIKDVNSQDSGKYKCVAENNSGAVESVSDLTVEPVTYRENSQFENIGEIYGKYSRDQQLQDQGESVRAHFYDYPAGPFTPWTNVKEYSVRDYFQSLETIEQIDQKEQVRCIPSREKIPRFVHGASRTIKISKPIRAEFIQCQAEGKERHVSEKSKLHQAEGTVYPFVDDFSDVTIKKEIRNNFGKLGRSEKENVQECAQSDYLPNIHSERISDSYNTKDSSAIVYEESLGEEIHYPGKKVKHRIIEFEKLHVEKGVLEKRPTRTSIVNPPQKKIDDKAFSLKQRESRSSNLNANMYQAEKMSPNTESDSSNIAINLKLLSSQTHKEFDAQEREQQEKISLIDKPAISKRAEHESPITFDLKQFHTQIKHTDVKFQELDSGQPEEAYFKIQHPADTENIVFDLKQMYSHIGDPALEFQGQETREQQEIHYKEKIPSPETLQPDTHNISKSVQNNVFASQEISSSQELSNRTMVEKSSIDENSISLEKEVRHVQEQNLDILKTDLSLKSFSEEIYSESCALLPTSSADIEETDLSEKSCPLENGGRSSISHLKKAASEEKPLGVGEMEEECTLEPELAAFPKQDGGTQEYTDATLEDHRGDVQEADTLHRQLSLSQCFPLLMTEEQQNPGEQISTNIHASGEEKCYEEVQVQNEASFSTLEGEMIETSFSQNIPKLDEAHTTEAAESETSLTQYLLAAGKREVPETKDTRDQAKLVQSESITSMEVEEVTFNTVYEYYNQKQESLGRPLSPESDISIGVGSTTSEEISELDQFYTPPSSVEYFESPKSPDLYFNPSDITKQSSIHSGGETVERYSTPLGEVAERYSTPSEGEVGERYSTPPGETLERYSTPPGETLERYSTPPGETLERYSTPPGETLERYSTPPGETLERYSTPPGEALERYSIPTGGPNPTGTFKTYPSKIEREDGTPNEHFYTPTEERGSAYEIWRSDSFGTPNEAIEPKDNEMPPSFIEPLTKRKVYENTTLGFIVEVEGLPVPGVKWYRNKSLLEPDERIKMERVGNVCSLEISNIQKGEGGEYMCHAVNIIGEAKSFANVDIMPQEERVVALPPPVTHQHVMEFDLEHTTSSRTPSPQEIVLEVELSEKDVKEFEKQVKIVTVPEFTPDHKSMIVSLDVLPFNFVDPNMDSREGEDKELKIDLEVFEMPPRFIMPICDFKIPENSDAVFKCSVIGIPTPEVKWYKEYMCIEPDNIKYVISEEKGSHTLKIRNVCLSDSATYRCRAVNCVGEAICRGFLTMGDSEIFAVIAKKSKVTLSSLMEELVLKSNYTDSFFEFQVVEGPPRFIKGISDCYAPIGTAAYFQCLVRGSPRPTVYWYKDGKLVQGRRFTVEESGTGFHNLFITSLVKSDEGEYRCVATNKSGMAESFAALTLT

SEQ ID NO: 1187 - protein, 654 aa, Homo sapiens
MEAEDLSKAEDRNEDPGSKNEGQLAAVQPDVPHGGQSSSPTALWDMLERKFLEYQQLTHKSPIERQKSLLSLLPLFLKAWEHSVGIICFPSLQRLAEDVSDQLAQQLQKALVGKPAEQARLAAGQLLWWKGDVDQDGYLLLKSVYVLTGTDSETLGRVAESGLPALLLQCLYLFFVFPLDKDELLESDLQVQKMFVQMLLNICSDSQGLEGLLSGSELQSLLIATTCLREHSCCFWKEPTFCVLRAISKAQNLSIIQYLQATDCVRLSLQNLSRLTDTLPAPEVSEAVSLILGFVKDSYPVSSALFLEFENSEGYPLLLKVLLRYDGLTQSEVDPHLEELLGLVVWLTTCGRSELKVFDSITYPQLEGFKFHHEASGVTVKNLQAFQVLQNVFHKASDSVLCIQVLSVIRTMWAWNARNFFLLEWTLQPISQFVEIMPLKPAPVQEHFFQLLEALVFELHYVPHEILRKVQHLIKESPGPSCTLMALQSILSIAGGDPLFTDIFRDSGLLGLLLAQLRKQAKIMRKSGNKVSTPGVQDPERELTCVMLRIVVTLLKGSVRNAVVLKDHGMVPFIKIFLDDECYREASLSILEQLSAINAEEYMSIIVGALCSSTQGELQLKLDLLKVISSPPLRLASLWICTKRSTFAQAFVFM

SEQ ID NO: 1188 - protein, 354 aa, Homo sapiens
MAESPTEEAATAGAGAAGPGASSVAGVVGVSGSGGGFGPPFLPDVWAAAAAAGGAGGPGSGLAPLPGLPPSAAAHGAALLSHWDPTLSSDWDGERTAPQCLLRIKRDIMSIYKEPPPGMFVVPDTVDMTKIHALITGPFDTPYEGGFFLFVFRCPPDYPIHPPRVKLMTTGNNTVRFNPNFYRNGKVCLSILGTWTGPAWSPAQSISSVLISIQSLMTENPYHNEPGFEQERHPGDSKNYNECIRHETIRVAVCDMMEGKCPCPEPLRGVMEKSFLEYYDFYEVACKDRLHLQGQTMQDPFGEKRGHFDYQSLLMRLGLIRQKVLERLHNENAEMDSDSSSSGTETDLHGSLRV

SEQ ID NO: 1189 - protein, 144 aa, Homo sapiens
MYSEIQRERADIGGLMARPEYREWNPELIKPKKLLNPVKASRSHQELHRELLMNHRRGLGVDSKPELQRVLEHRRRNQLIKKKKEELEAKRLQCPFEQELLRRQQRLNQLEKPPEKEEDHAPEFIKVRENLRRIATLTSEEREL

SEQ ID NO: 1190 - protein, 604 aa, Homo sapiens
MASTWAIQAHMDQDEPLEVKIEEEKYTTRQDWDLRKNNTHSREVFRQYFRQFCYQETSGPREALSRLRELCHQWLRPETHTKEQILELLVLEQFLTILPEELQAWVQEQHPESGEEVVTVLEDLERELDEPGEQVSVHTGEQEMFLQETVRLRKEGEPSMSLQSMKAQPKYESPELESQQEQVLDVETGNEYGNLKQEVSEEMEPHGKTSSKFENDMSKSARCGETREPEEITEEPSACSREDKQPTCDENGVSLTENSDHTEHQRICPGEESYGCDDCGKAFSQHSHLIEHQRIHTGDRPYKCEECGKAFRGRTVLIRHKIIHTGEKPYKCNECGKAFGRWSALNQHQRLHTGEKHYHCNDCGKAFSQKAGLFHHIKIHTRDKPYQCTQCNKSFSRRSILTQHQGVHTGAKPYECNECGKAFVYNSSLVSHQEIHHKEKCYQCKECGKSFSQSGLIQHQRIHTGEKPYKCDVCEKAFIQRTSLTEHQRIHTGERPYKCDKCGKAFTQRSVLTEHQRIHTGERPYKCDECGNAFRGITSLIQHQRIHTGEKPYQCDECGKAFRQRKKTSYKEILLKNHSEPQAGVNLLLSSLIPEWQSCFRRDL

SEQ ID NO: 1191 - protein, 1575 aa, Homo sapiens
MAAAALLLGLALLAPRAAGAGMGACYDGAGRPQRCLPVFENAAFGRLAQASHTCGSPPEDFCPHVGAAGAGAHCQRCDAADPQRHHNASYLTDFHSQDESTWWQSPSMAFGVQYPTSVNITLRLGKAYEITYVRLKFHTSRPESFAIYKRSRADGPWEPYQFYSASCQKTYGRPEGQYLRPGEDERVAFCTSEFSDISPLSGGNVAFSTLEGRPSAYNFEESPGLQEWVTSTELLISLDRLNTFGDDIFKDPKVLQSYYYAVSDFSVGGRCKCNGHASECGPDVAGQLACRCQHNTTGTDCERCLPFFQDRPWARGTAEAAHECLPCNCSGRSEECTFDRELFRSTGHGGRCHHCRDHTAGPHCERCQENFYHWDPRMPCQPCDCQSAGSLHLQCDDTGTCACKPTVTGWKCDRCLPGFHSLSEGGCRPCTCNPAGSLDTCDPRSGRCPCKENVEGNLCDRCRPGTFNLQPHNPAGCSSCFCYGHSKVCASTAQFQVHHILSDFHQGAEGWWARSVGGSEHPPQWSPNGVLLSPEDEEELTAPEKFLGDQRFSYGQPLILTFRVPPGDSPLPVQLRLEGTGLALSLRHSSLSGPQDAGHPREVELRFHLQETSEDVAPPLPPFHFQRLLANLTSLRLRVSPGPSPAGPVFLTEVRLTSARPGLSPPASWVEICSCPTGYTGQFCESCAPGYKREMPQGGPYASCVPCTCNQHGTCDPNTGICVCSHHTEGPSCERCLPGFYGNPFAGQADDCQPCPCPGQSACTTIPESREVVCTHCPPGQRGRRCEVCDDGFFGDPLGLFGHPQPCHQCQCSGNVDPNAVGNCDPLSGHCLRCLHNTTGDHCEHCQEGFYGSALAPRPADKCMPCSCHPQGSVSEQMPCDPVTGQCSCLPHVTARDCSRCYPGFFDLQPGRGCRSCKCHPLGSQEDQCHPKTGQCTCRPGVTGQACDRCQLGFFGFSIKGCRACRCSPLGAASAQCHENGTCVCRPGFEGYKCDRCHDNFFLTADGTHCQQCPSCYALVKEEAAKLKARLTLTEGWLQGSDCGSPWGPLDILLGEAPRGDVYQGHHLLPGAREAFLEQMMSLEGAVKAAREQLQRLNKGARCAQAGSQKTCTQLADLEAVLESSEEEILHAAAILASLEIPQEGPSQPTKWSHLATEARALARSHRDTATKIAATAWRALLASNTSYALLWNLLEGRVALETQRDLEDRYQEVQAAQKALRTAVAEVLPEAESVLATVQQVGADTAPYLALLASPGALPQKSRAEDLGLKAKALEKTVASWQHMATEAARTLQTAAQATLRQTEPLTKLHQEARAALTQASSSVQAATVTVMGARTLLADLEGMKLQFPRPKDQAALQRKADSVSDRLLADTRKKTKQAERMLGNAAPLSSSAKKKGREAEVLAKDSAKLAKALLRERKQAHRRASRLTSQTQATLQQASQQVLASEARRQELEEAERVGAGLSEMEQQIRESRISLEKDIETLSELLARLGSLDTHQAPAQALNETQWALERLRLQLGSPGSLQRKLSLLEQESQQQELQIQGFESDLAEIRADKQNLEAILHSLPENCASWQ

SEQ ID NO: 1192 - protein, 774 aa, Homo sapiens
MAHEAMEYDVQVQLNHAEQQPAPAGMASSQGGPALLQPVPADVVSSQGVPSILQPAPAEVISSQATPPLLQPAPQLSVDLTEVEVLGEDTVENINPRTSEQHRQGSDGNHTIPASSLHSMTNFISGLQRLHGMLEFLRPSSSNHSVGPMRTRRRVSASRRARAGGSQRTDSARLRAPLDAYFQVSRTQPDLPATTYDSETRNPVSEELQVSSSSDSDSDSSAEYGGVVDQAEESGAVILEEQLAGVSAEQEVTCIDGGKTLPKQPSPQKSEPLLPSASMDEEEGDTCTICLEQWTNAGDHRLSALRCGHLFGYRCISTWLKGQVRKCPQCNKKARHSDIVVLYARTLRALDTSEQERMKSSLLKEQMLRKQAELESAQCRLQLQVLTDKCTRLQRRVQDLQKLTSHQSQNLQQPRGSQAWVLSCSPSSQGQHKHKYHFQKTFTVSQAGNCRIMAYCDALSCLVISQPSPQASFLPGFGVKMLSTANMKSSQYIPMHGKQIRGLAFSSYLRGLLLSASLDNTIKLTSLETNTVVQTYNAGRPVWSCCWCLDEANYIYAGLANGSILVYDVRNTSSHVQELVAQKARCPLVSLSYMPRAASAAFPYGGVLAGTLEDASFWEQKMDFSHWPHVLPLEPGGCIDFQTENSSRHCLVTYRPDKNHTTIRSVLMEMSYRLDDTGNPICSCQPVHTFFGGPTCKLLTKNAIFQSPENDGNILVCTGDEAANSALLWDAASGSLLQDLQTDQPVLDICPFEVNRNSYLATLTEKMVHIYKWE

SEQ ID NO: 1193 - protein, 1017 aa, Homo sapiens
MMSEGKPPDKKRPRRSLSISKNKKKASNSIISCFNNAPPAKLACPVCSKMVPRYDLNRHLDEMCANNDFVQVDPGQVGLINSNVSMVDLTSVTLEDVTPKKSPPPKTNLTPGQSDSAKREVKQKISPYFKSNDVVCKNQDELRNRSVKVICLGSLASKLSRKYVKAKKSIDKDEEFAGSSPQSSKSTVVKSLIDNSSEIEDEDQILENSSQKENVFKCDSLKEECIPEHMVRGSKIMEAESQKATRECEKSALTPGFSDNAIMLFSPDFTLRNTLKSTSEDSLVKQECIKEVVEKREACHCEEVKMTVASEAKIQLSDSEAKSHSSADDASAWSNIQEAPLQDDSCLNNDIPHSIPLEQGSSCNGPGQTTGHPYYLRSFLVVLKTVLENEDDMLLFDEQEKGIVTKFYQLSATGQKLYVRLFQRKLSWIKMTKLEYEEIALDLTPVIEELTNAGFLQTESELQELSEVLELLSAPELKSLAKTFHLVNPNGQKQQLVDAFLKLAKQRSVCTWGKNKPGIGAVILKRAKALAGQSVRICKGPRAVFSRILLLFSLTDSMEDEDAACGGQGQLSTVLLVNLGRMEFPSYTINRKTHIFQDRDDLIRYAAATHMLSDISSAMANGNWEEAKELAQCAKRDWNRLKNHPSLRCHEDLPLFLRCFTVGWIYTRILSRFVEILQRLHMYEEAVRELESLLSQRIYCPDSRGRWWDRLALNLHQHLKRLEPTIKCITEGLADPEVRTGHRLSLYQRAVRLRESPSCKKFKHLFQQLPEMAVQDVKHVTITGRLCPQRGMCKSVFVMEAGEAADPTTVLCSVEELALAHYRRSGFDQGIHGEGSTFSTLYGLLLWDIIFMDGIPDVFRNACQAFPLDLCTDSFFTSRRPALEARLQLIHDAPEESLRAWVAATWHEQEGRVASLVSWDRFTSLQQAQDLVSCLGGPVLSGVCRHLAADFRHCRGGLPDLVVWNSQSRHFKLVEVKGPNDRLSHKQMIWLAELQKLGAEVEVCHVVAVGAKSQSLS

SEQ ID NO: 1194 - protein, 7461 aa, Homo sapiens
MAGYLSPAAYLYVEEQEYLQAYEDVLERYKDERDKVQKKTFTKWINQHLMKVRKHVNDLYEDLRDGHNLISLLEVLSGDTLPREKGRMRFHRLQNVQIALDYLKRRQVKLVNIRNDDITDGNPKLTLGLIWTIILHFQISDIHVTGESEDMSAKERLLLWTQQATEGYAGIRCENFTTCWRDGKLFNAIIHKYRPDLIDMNTVAVQSNLANLEHAFYVAEKIGVIRLLDPEDVDVSSPDEKSVITYVSSLYDAFPKVPEGGEGIGANDVEVKWIEYQNMVNYLIQWIRHHVTTMSERTFPNNPVELKALYNQYLQFKETEIPPKETEKSKIKRLYKLLEIWIEFGRIKLLQGYHPNDIEKEWGKLIIAMLEREKALRPEVERLEMLQQIANRVQRDSVICEDKLILAGNALQSDSKRLESGVQFQNEAEIAGYILECENLLRQHVIDVQILIDGKYYQADQLVQRVAKLRDEIMALRNECSSVYSKGRILTTEQTKLMISGITQSLNSGFAQTLHPSLTSGLTQSLTPSLTSSSMTSGLSSGMTSRLTPSVTPAYTPGFPSGLVPNFSSGVEPNSLQTLKLMQIRKPLLKSSLLDQNLTEEEINMKFVQDLLNWVDEMQVQLDRTEWGSDLPSVESHLENHKNVHRAIEEFESSLKEAKISEIQMTAPLKLTYAEKLHRLESQYAKLLNTSRNQERHLDTLHNFVSRATNELIWLNEKEEEEVAYDWSERNTNIARKKDYHAELMRELDQKEENIKSVQEIAEQLLLENHPARLTIEAYRAAMQTQWSWILQLCQCVEQHIKENTAYFEFFNDAKEATDYLRNLKDAIQRKYSCDRSSSIHKLEDLVQESMEEKEELLQYKSTIANLMGKAKTIIQLKPRNSDCPLKTSIPIKAICDYRQIEITIYKDDECVLANNSHRAKWKVISPTGNEAMVPSVCFTVPPPNKEAVDLANRIEQQYQNVLTLWHESHINMKSVVSWHYLINEIDRIRASNVASIKTMLPGEHQQVLSNLQSRFEDFLEDSQESQVFSGSDITQLEKEVNVCKQYYQELLKSAEREEQEESVYNLYISEVRNIRLRLENCEDRLIRQIRTPLERDDLHESVFRITEQEKLKKELERLKDDLGTITNKCEEFFSQAAASSSVPTLRSELNVVLQNMNQVYSMSSTYIDKLKTVNLVLKNTQAAEALVKLYETKLCEEEAVIADKNNIENLISTLKQWRSEVDEKRQVFHALEDELQKAKAISDEMFKTYKERDLDFDWHKEKADQLVERWQNVHVQIDNRLRDLEGIGKSLKYYRDTYHPLDDWIQQVETTQRKIQENQPENSKTLATQLNQQKMLVSEIEMKQSKMDECQKYAEQYSATVKDYELQTMTYRAMVDSQQKSPVKRRRMQSSADLIIQEFMDLRTRYTALVTLMTQYIKFAGDSLKRLEEEEKSLEEEKKEHVEKAKELQKWVSNISKTLKDAEKAGKPPFSKQKISSEEISTKKEQLSEALQTIQLFLAKHGDKMTDEERNELEKQVKTLQESYNLLFSESLKQLQESQTSGDVKVEEKLDKVIAGTIDQTTGEVLSVFQAVLRGLIDYDTGIRLLETQLMISGLISPELRKCFDLKDAKSHGLIDEQILCQLKELSKAKEIISAASPTTIPVLDALAQSMITESMAIKVLEILLSTGSLVIPATGEQLTLQKAFQQNLVSSALFSKVLERQNMCKDLIDPCTSEKVSLIDMVQRSTLQENTGMWLLPVRPQEGGRITLKCGRNISILRAAHEGLIDRETMFRLLSAQLLSGGLINSNSGQRMTVEEAVREGVIDRDTASSILTYQVQTGGIIQSNPAKRLTVDEAVQCDLITSSSALLVLEAQRGYVGLIWPHSGEIFPTSSSLQQELITNELAYKILNGRQKIAALYIPESSQVIGLDAAKQLGIIDNNTASILKNITLPDKMPDLGDLEACKNARRWLSFCKFQPSTVHDYRQEEDVFDGEEPVTTQTSEETKKLFLSYLMINSYMDANTGQRLLLYDGDLDEAVGMLLEGCHAEFDGNTAIKECLDVLSSSGVFLNNASGREKDECTATPSSFNKCHCGEPEHEETPENRKCAIDEEFNEMRNTVINSEFSQSGKLASTISIDPKVNSSPSVCVPSLISYLTQTELADISMLRSDSENILTNYENQSRVETNERANECSHSKNIQNFPSDLIENPIMKSKMSKFCGVNETENEDNTNRDSPIFDYSPRLSALLSHDKLMHSQGSFNDTHTPESNGNKCEAPALSFSDKTMLSGQRIGEKFQDQFLGIAAINISLPGEQYGQKSLNMISSNPQVQYHNDKYISNTSGEDEKTHPGFQQMPEDKEDESEIEEYSCAVTPGGDTDNAIVSLTCATPLLDETISASDYETSLLNDQQNNTGTDTDSDDDFYDTPLFEDDDHDSLLLDGDDRDCLHPEDYDTLQEENDETASPADVFYDVSKENENSMVPQGAPVGSLSVKNKAHCLQDFLMDVEKDELDSGEKIHLNPVGSDKVNGQSLETGSERECTNILEGDESDSLTDYDIVGGKESFTASLKFDDSGSWRGRKEEYVTGQEFHSDTDHLDSMQSEESYGDYIYDSNDQDDDDDDGIDEEGGGIRDENGKPRCQNVAEDMDIQLCASILNENSDENENINTMILLDKMHSCSSLEKQQRVNVVQLASPSENNLVTEKSNLPEYTTEIAGKSKENLLNHEMVLKDVLPPIIKDTESEKTFGPASISHDNNNISSTSELGTDLANTKVKLIQGSELPELTDSVKGKDEYFKNMTPKVDSSLDHIICTEPDLIGKPAEESHLSLIASVTDKDPQGNGSDLIKGRDGKSDILIEDETSIQKMYLGEGEVLVEGLVEEENRHLKLLPGKNTRDSFKLINSQFPFPQITNNEELNQKGSLKKATVTLKDEPNNLQIIVSKSPVQFENLEEIFDTSVSKEISDDITSDITSWEGNTHFEESFTDGPEKELDLFTYLKHCAKNIKAKDVAKPNEDVPSHVLITAPPMKEHLQLGVNNTKEKSTSTQKDSPLNDMIQSNDLCSKESISGGGTEISQFTPESIEATLSILSRKHVEDVGKNDFLQSERCANGLGNDNSSNTLNTDYSFLEINNKKERIEQQLPKEQALSPRSQEKEVQIPELSQVFVEDVKDILKSRLKEGHMNPQEVEEPSACADTKILIQNLIKRITTSQLVNEASTVPSDSQMSDSSGVSPMTNSSELKPESRDDPFCIGNLKSELLLNILKQDQHSQKITGVFELMRELTHMEYDLEKRGITSKVLPLQLENIFYKLLADGYSEKIEHVGDFNQKACSTSEMMEEKPHILGDIKSKEGNYYSPNLETVKEIGLESSTVWASTLPRDEKLKDLCNDFPSHLECTSGSKEMASGDSSTEQFSSELQQCLQHTEKMHEYLTLLQDMKPPLDNQESLDNNLEALKNQLRQLETFELGLAPIAVILRKDMKLAEEFLKSLPSDFPRGHVEELSISHQSLKTAFSSLSNVSSERTKQIMLAIDSEMSKLAVSHEEFLHKLKSFSDWVSEKSKSVKDIEIVNVQDSEYVKKRLEFLKNVLKDLGHTKMQLETTAFDVQFFISEYAQDLSPNQSKQLLRLLNTTQKCFLDVQESVTTQVERLETQLHLEQDLDDQKIVAERQQEYKEKLQGICDLLTQTENRLIGHQEAFMIGDGTVELKKYQSKQEELQKDMQGSAQALAEVVKNTENFLKENGEKLSQEDKALIEQKLNEAKIKCEQLNLKAEQSKKELDKVVTTAIKEETEKVAAVKQLEESKTKIENLLDWLSNVDKDSERAGTKHKQVIEQNGTHFQEGDGKSAIGEEDEVNGNLLETDVDGQVGTTQENLNQQYQKVKAQHEKIISQHQAVIIATQSAQVLLEKQGQYLSPEEKEKLQKNMKELKVHYETALAESEKKMKLTHSLQEELEKFDADYTEFEHWLQQSEQELENLEAGADDINGLMTKLKRQKSFSEDVISHKGDLRYITISGNRVLEAAKSCSKRDGGKVDTSATHREVQRKLDHATDRFRSLYSKCNVLGNNLKDLVDKYQHYEDASCGLLAGLQACEATASKHLSEPIAVDPKNLQRQLEETKALQGQISSQQVAVEKLKKTAEVLLDARGSLLPAKNDIQKTLDDIVGRYEDLSKSVNERNEKLQITLTRSLSVQDGLDEMLDWMGNVESSLKEQGQVPLNSTALQDIISKNIMLEQDIAGRQSSINAMNEKVKKFMETTDPSTASSLQAKMKDLSARFSEASHKHKETLAKMEELKTKVELFENLSEKLQTFLETKTQALTEVDVPGKDVTELSQYMQESTSEFLEHKKHLEVLHSLLKEISSHGLPSDKALVLEKTNNLSKKFKEMEDTIKEKKEAVTSCQEQLDAFQVLVKSLKSWIKETTKKVPIVQPSFGAEDLGKSLEDTKKLQEKWSLKTPEIQKVNNSGISLCNLISAVTTPAKAIAAVKSGGAVLNGEGTATNTEEFWANKGLTSIKKDMTDISHGYEDLGLLLKDKIAELNTKLSKLQKAQEESSAMMQWLQKMNKTATKWQQTPAPTDTEAVKTQVEQNKSFEAELKQNVNKVQELKDKLTELLEENPDTPEAPRWKQMLTEIDSKWQELNQLTIDRQQKLEESSNNLTQFQTVEAQLKQWLVEKELMVSVLGPLSIDPNMLNTQRQQVQILLQEFATRKPQYEQLTAAGQGILSRPGEDPSLRGIVKEQLAAVTQKWDSLTGQLSDRCDWIDQAIVKSTQYQSLLRSLSDKLSDLDNKLSSSLAVSTHPDAMNQQLETAQKMKQEIQQEKKQIKVAQALCEDLSALVKEEYLKAELSRQLEGILKSFKDVEQKAENHVQHLQSACASSHQFQQMSRDFQAWLDTKKEEQNKSHPISAKLDVLESLIKDHKDFSKTLTAQSHMYEKTIAEGENLLLKTQGSEKAALQLQLNTIKTNWDTFNKQVKERENKLKESLEKALKYKEQVETLWPWIDKCQNNLEEIKFCLDPAEGENSIAKLKSLQKEMDQHFGMVELLNNTANSLLSVCEIDKEVVTDENKSLIQKVDMVTEQLHSKKFCLENMTQKFKEFQEVSKESKRQLQCAKEQLDIHDSLGSQAYSNKYLTMLQTQQKSLQALKHQVDLAKRLAQDLVVEASDSKGTSDVLLQVETIAQEHSTLSQQVDEKCSFLETKLQGIGHFQNTIREMFSQFAEFDDELDSMAPVGRDAETLQKQKETIKAFLKKLEALMASNDNANKTCKMMLATEETSPDLVGIKRDLEALSKQCNKLLDRAQAREEQVEGTIKRLEEFYSKLKEFSILLQKAEEHEESQGPVGMETETINQQLNMFKVFQKEEIEPLQGKQQDVNWLGQGLIQSAAKSTSTQGLEHDLDDVNARWKTLNKKVAQRAAQLQEALLHCGRFQDALESLLSWMVDTEELVANQKPPSAEFKVVKAQIQEQKLLQRLLDDRKSTVEVIKREGEKIATTAEPADKVKILKQLSLLDSRWEALLNKAETRNRQLEGISVVAQQFHETLEPLNEWLTTIEKRLVNCEPIGTQASKLEEQIAQHKVLQEDILLRKQNVDQALLNGLELLKQTTGDEVLIIQDKLEAIKARYKDITKLSTDVAKTLEQALQLARRLHSTHEELCTWLDKVEVELLSYETQVLKGEEASQAQMRPKELKKEAKNNKALLDSLNEVSSALLELVPWRAREGLEKMVAEDNERYRLVSDTITQKVEEIDAAILRSQQFDQAADAELSWITETEKKLMSLGDIRLEQDQTSAQLQVQKTFTMEILRHKDIIDDLVKSGHKIMTACSEEEKQSMKKKLDKVLKNYDTICQINSERYLQLERAQSLVNQFWETYEELWPWLTETQSIISQLPAPALEYETLRQQQEEHRQLRELIAEHKPHIDKMNKTGPQLLELSPGEGFSIQEKYVAADTLYSQIKEDVKKRAVALDEAISQSTQFHDKIDQILESLERIVERLRQPPSISAEVEKIKEQISENKNVSVDMEKLQPLYETLKQRGEEMIARSGGTDKDISAKAVQDKLDQMVFIWENIHTLVEEREAKLLDVMELAEKFWCDHMSLIVTIKDTQDFIRDLEDPGIDPSVVKQQQEAAETIREEIDGLQEELDIVINLGSELIAACGEPDKPIVKKSIDELNSAWDSLNKAWKDRIDKLEEAMQAAVQYQDGLQAVFDWVDIAGGKLASMSPIGTDLETVKQQIEELKQFKSEAYQQQIEMERLNHQAELLLKKVTEESDKHTVQDPLMELKLIWDSLEERIINRQHKLEGALLALGQFQHALDELLAWLTHTEGLLSEQKPVGGDPKAIEIELAKHHVLQNDVLAHQSTVEAVNKAGNDLIESSAGEEASNLQNKLEVLNQRWQNVLEKTEQRKQQLDGALRQAKGFHGEIEDLQQWLTDTERHLLASKPLGGLPETAKEQLNVHMEVCAAFEAKEETYKSLMQKGQQMLARCPKSAETNIDQDINNLKEKWESVETKLNERKTKLEEALNLAMEFHNSLQDFINWLTQAEQTLNVASRPSLILDTVLFQIDEHKVFANEVNSHREQIIELDKTGTHLKYFSQKQDVVLIKNLLISVQSRWEKVVQRLVERGRSLDDARKRAKQFHEAWSKLMEWLEESEKSLDSELEIANDPDKIKTQLAQHKEFQKSLGAKHSVYDTTNRTGRSLKEKTSLADDNLKLDDMLSELRDKWDTICGKSVERQNKLEEALLFSGQFTDALQALIDWLYRVEPQLAEDQPVHGDIDLVMNLIDNHKAFQKELGKRTSSVQALKRSARELIEGSRDDSSWVKVQMQELSTRWETVCALSISKQTRLEAALRQAEEFHSVVHALLEWLAEAEQTLRFHGVLPDDEDALRTLIDQHKEFMKKLEEKRAELNKATTMGDTVLAICHPDSITTIKHWITIIRARFEEVLAWAKQHQQRLASALAGLIAKQELLEALLAWLQWAETTLTDKDKEVIPQEIEEVKALIAEHQTFMEEMTRKQPDVDKVTKTYKRRAADPSSLQSHIPVLDKGRAGRKRFPASSLYPSGSQTQIETKNPRVNLLVSKWQQVWLLALERRRKLNDALDRLEELREFANFDFDIWRKKYMRWMNHKKSRVMDFFRRIDKDQDGKITRQEFIDGILSSKFPTSRLEMSAVADIFDRDGDGYIDYYEFVAALHPNKDAYKPITDADKIEDEVTRQVAKCKCAKRFQVEQIGDNKYRFFLGNQFGDSQQLRLVRILRSTVMVRVGGGWMALDEFLVKNDPCRVHHHGSKMLRSESNSSITTTQPTIAKGRTNMELREKFILADGASQGMAAFRPRGRRSRPSSRGASPNRSTSVSSQAAQAASPQVPATTTPKGTPIQGSKLRLPGYLSGKGFHSGEDSGLITTAAARVRTQFADSKKTPSRPGSRAGSKAGSRASSRRGSDASDFDISEIQSVCSDVETVPQTHRPTPRAGSRPSTAKPSKIPTPQRKSPASKLDKSSKR

SEQ ID NO: 1195 - protein, 563 aa, Homo sapiens
MSRPSSRAIYLHRKEYSQNLTSEPTLLQHRVEHLMTCKQGSQRVQGPEDALQKLFEMDAQGRVWSQDLILQVRDGWLQLLDIETKEELDSYRLDSIQAMNVALNTCSYNSILSITVQEPGLPGTSTLLFQCQEVGAERLKTSLQKALEEELEQRPRLGGLQPGQDRWRGPAMERPLPMEQARYLEPGIPPEQPHQRTLEHSLPPSPRPLPRHTSAREPSAFTLPPPRRSSSPEDPERDEEVLNHVLRDIELFMGKLEKAQAKTSRKKKFGKKNKDQGGLTQAQYIDCFQKIKHSFNLLGRLATWLKETSAPELVHILFKSLNFILARCPEAGLAAQVISPLLTPKAINLLQSCLSPPESNLWMGLGPAWTTSRADWTGDEPLPYQPTFSDDWQLPEPSSQAPLGYQDPVSLRPSSPKPAQPALKMQVLYEFEARNPRELTVVQGEKLEVLDHSKRWWLVKNEAGRSGYIPSNILEPLQPGTPGTQGQSPSRVPMLRLSSRPEEVTDWLQAENFSTATVRTLGSLTGSQLLRIRPGELQMLCPQEAPRILSRLEAVRRMLGISP

SEQ ID NO: 1196 - protein, 5430 aa, Homo sapiens
MSSSDEETLSERSCRSERSCRSERSYRSERSGSLSPCPPGDTLPWNLPLHEQKKRKSQDSVLDPAERAVVRVADERDRVQKKTFTKWVNKHLMKVRKHINDLYEDLRDGHNLISLLEVLSGIKLPREKGRMRFHRLQNVQIALDFLKQRQVKLVNIRNDDITDGNPKLTLGLIWTIILHFQISDIYISGESGDMSAKEKLLLWTQKVTAGYTGIKCTNFSSCWSDGKMFNALIHRYRPDLVDMERVQIQSNRENLEQAFEVAERLGVTRLLDAEDVDVPSPDEKSVITYVSSIYDAFPKVPEGGEGISATEVDSRWQEYQSRVDSLIPWIKQHTILMSDKTFPQNPVELKALYNQYIHFKETEILAKEREKGRIEELYKLLEVWIEFGRIKLPQGYHPNDVEEEWGKLIIEMLEREKSLRPAVERLELLLQIANKIQNGALNCEEKLTLAKNTLQADAAHLESGQPVQCESDVIMYIQECEGLIRQLQVDLQILRDENYYQLEELAFRVMRLQDELVTLRLECTNLYRKGHFTSLELVPPSTLTTTHLKAEPLTKATHSSSTSWFRKPMTRAELVAISSSEDEGNLRFVYELLSWVEEMQMKLERAEWGNDLPSVELQLETQQHIHTSVEELGSSVKEARLYEGKMSQNFHTSYAETLGKLETQYCKLKETSSFRMRHLQSLHKFVSRATAELIWLNEKEEEELAYDWSDNNSNISAKRNYFSELTMELEEKQDVFRSLQDTAELLSLENHPAKQTVEAYSAAVQSQLQWMKQLCLCVEQHVKENTAYFQFFSDARELESFLRNLQDSIKRKYSCDHNTSLSRLEDLLQDSMDEKEQLIQSKSSVASLVGRSKTIVQLKPRSPDHVLKNTISVKAVCDYRQIEITICKNDECVLEDNSQRTKWKVISPTGNEAMVPSVCFLIPPPNKDAIEMASRVEQSYQKVMALWHQLHVNTKSLISWNYLRKDLDLVQTWNLEKLRSSAPGECHQIMKNLQAHYEDFLQDSRDSVLFSVADRLRLEEEVEACKARFQHLMKSMENEDKEETVAKMYISELKNIRLRLEEYEQRVVKRIQSLASSRTDRDAWQDNALRIAEQEHTQEDLQQLRSDLDAVSMKCDSFLHQSPSSSSVPTLRSELNLLVEKMDHVYGLSTVYLNKLKTVDVIVRSIQDAELLVKGYEIKLSQEEVVLADLSALEAHWSTLRHWLSDVKDKNSVFSVLDEEIAKAKVVAEQMSRLTPERNLDLERYQEKGSQLQERWHRVIAQLEIRQSELESIQEVLGDYRACHGTLIKWIEETTAQQEMMKPGQAEDSRVLSEQLSQQTALFAEIERNQTKLDQCQKFSQQYSTIVKDYELQLMTYKAFVESQQKSPGKRRRMLSSSDAITQEFMDLRTRYTALVTLTTQHVKYISDALRRLEEEEKVVEEEKQEHVEKVKELLGWVSTLARNTQGKATSSETKESTDIEKAILEQQVLSEELTTKKEQVSEAIKTSQIFLAKHGHKLSEKEKKQISEQLNALNKAYHDLCDGSANQLQQLQSQLAHQTEQKTLQKQQNTCHQQLEDLCSWVGQAERALAGHQGRTTQQDLSALQKNQSDLKDLQDDIQNRATSFATVVKDIEGFMEENQTKLSPRELTALREKLHQAKEQYEALQEETRVAQKELEEAVTSALQQETEKSKAAKELAENKKKIDALLDWVTSVGSSGGQLLTNLPGMEQLSGASLEKGALDTTDGYMGVNQAPEKLDKQCEMMKARHQELLSQQQNFILATQSAQAFLDQHGHNLTPEEQQMLQQKLGELKEQYSTSLAQSEAELKQVQTLQDELQKFLQDHKEFESWLERSEKELENMHKGGSSPETLPSLLKRQGSFSEDVISHKGDLRFVTISGQKVLDMENSFKEGKEPSEIGNLVKDKLKDATERYTALHSKCTRLGSHLNMLLGQYHQFQNSADSLQAWMQACEANVEKLLSDTVASDPGVLQEQLATTKQLQEELAEHQVPVEKLQKVARDIMEIEGEPAPDHRHVQETTDSILSHFQSLSYSLAERSSLLQKAIAQSQSVQESLESLLQSIGEVEQNLEGKQVSSLSSGVIQEALATNMKLKQDIARQKSSLEATREMVTRFMETADSTTAAVLQGKLAEVSQRFEQLCLQQQEKESSLKKLLPQAEMFEHLSGKLQQFMENKSRMLASGNQPDQDITHFFQQIQELNLEMEDQQENLDTLEHLVTELSSCGFALDLCQHQDRVQNLRKDFTELQKTVKEREKDASSCQEQLDEFRKLVRTFQKWLKETEGSIPPTETSMSAKELEKQIEHLKSLLDDWASKGTLVEEINCKGTSLENLIMEITAPDSQGKTGSILPSVGSSVGSVNGYHTCKDLTEIQCDMSDVNLKYEKLGGVLHERQESLQAILNRMEEVHKEANSVLQWLESKEEVLKSMDAMSSPTKTETVKAQAESNKAFLAELEQNSPKIQKVKEALAGLLVTYPNSQEAENWKKIQEELNSRWERATEVTVARQRQLEESASHLACFQAAESQLRPWLMEKELMMGVLGPLSIDPNMLNAQKQQVQFMLKEFEARRQQHEQLNEAAQGILTGPGDVSLSTSQVQKELQSINQKWVELTDKLNSRSSQIDQAIVKSTQYQELLQDLSEKVRAVGQRLSVQSAISTQPEAVKQQLEETSEIRSDLEQLDHEVKEAQTLCDELSVLIGEQYLKDELKKRLETVALPLQGLEDLAADRINRLQAALASTQQFQQMFDELRTWLDDKQSQQAKNCPISAKLERLQSQLQENEEFQKSLNQHSGSYEVIVAEGESLLLSVPPGEEKRTLQNQLVELKNHWEELSKKTADRQSRLKDCMQKAQKYQWHVEDLVPWIEDCKAKMSELRVTLDPVQLESSLLRSKAMLNEVEKRRSLLEILNSAADILINSSEADEDGIRDEKAGINQNMDAVTEELQAKTGSLEEMTQRLREFQESFKNIEKKVEGAKHQLEIFDALGSQACSNKNLEKLRAQQEVLQALEPQVDYLRNFTQGLVEDAPDGSDASQLLHQAEVAQQEFLEVKQRVNSGCVMMENKLEGIGQFHCRVREMFSQLADLDDELDGMGAIGRDTDSLQSQIEDVRLFLNKIHVLKLDIEASEAECRHMLEEEGTLDLLGLKRELEALNKQCGKLTERGKARQEQLELTLGRVEDFYRKLKGLNDATTAAEEAEALQWVVGTEVEIINQQLADFKMFQKEQVDPLQMKLQQVNGLGQGLIQSAGKDCDVQGLEHDMEEINARWNTLNKKVAQRIAQLQEALLHCGKFQDALEPLLSWLADTEELIANQKPPSAEYKVVKAQIQEQKLLQRLLDDRKATVDMLQAEGGRIAQSAELADREKITGQLESLESRWTELLSKAAARQKQLEDILVLAKQFHETAEPISDFLSVTEKKLANSEPVGTQTAKIQQQIIRHKALEEDIENHATDVHQAVKIGQSLSSLTSPAEQGVLSEKIDSLQARYSEIQDRCCRKAALLDQALSNARLFGEDEVEVLNWLAEVEDKLSSVFVKDFKQDVLHRQHADHLALNEEIVNRKKNVDQAIKNGQALLKQTTGEEVLLIQEKLDGIKTRYADITVTSSKALRTLEQARQLATKFQSTYEELTGWLREVEEELATSGGQSPTGEQIPQFQQRQKELKKEVMEHRLVLDTVNEVSRALLELVPWRAREGLDKLVSDANEQYKLVSDTIGQRVDEIDAAIQRSQQYEQAADAELAWVAETKRKLMALGPIRLEQDQTTAQLQVQKAFSIDIIRHKDSMDELFSHRSEIFGTCGEEQKTVLQEKTESLIQQYEAISLLNSERYARLERAQVLVNQFWETYEELSPWIEETRALIAQLPSPAIDHEQLRQQQEEMRQLRESIAEHKPHIDKLLKIGPQLKELNPEEGEMVEEKYQKAENMYAQIKEEVRQRALALDEAVSQSTQITEFHDKIEPMLETLENLSSRLRMPPLIPAEVDKIRECISDNKSATVELEKLQPSFEALKRRGEELIGRSQGADKDLAAKEIQDKLDQMVFFWEDIKARAEEREIKFLDVLELAEKFWYDMAALLTTIKDTQDIVHDLESPGIDPSIIKQQVEAAETIKEETDGLHEELEFIRILGADLIFACGETEKPEVRKSIDEMNNAWENLNKTWKERLEKLEDAMQAAVQYQDTLQAMFDWLDNTVIKLCTMPPVGTDLNTVKDQLNEMKEFKVEVYQQQIEMEKLNHQGELMLKKATDETDRDIIREPLTELKHLWENLGEKIAHRQHKLEGALLALGQFQHALEELMSWLTHTEELLDAQRPISGDPKVIEVELAKHHVLKNDVLAHQATVETVNKAGNELLESSAGDDASSLRSRLEAMNQCWESVLQKTEEREQQLQSTLQQAQGFHSEIEDFLLELTRMESQLSASKPTGGLPETAREQLDTHMELYSQLKAKEETYNQLLDKGRLMLLSRDDSGSGSKTEQSVALLEQKWHVVSSKMEERKSKLEEALNLATEFQNSLQEFINWLTLAEQSLNIASPPSLILNTVLSQIEEHKVFANEVNAHRDQIIELDQTGNQLKFLSQKQDVVLIKNLLVSVQSRWEKVVQRSIERGRSLDDARKRAKQFHEAWKKLIDWLEDAESHLDSELEISNDPDKIKLQLSKHKEFQKTLGGKQPVYDTTIRTGRALKEKTLLPEDSQKLDNFLGEVRDKWDTVCGKSVERQHKLEEALLFSGQFMDALQALVDWLYKVEPQLAEDQPVHGDLDLVMNLMDAHKVFQKELGKRTGTVQVLKRSGRELIENSRDDTTWVKGQLQELSTRWDTVCKLSVSKQSRLEQALKQAEVFRDTVHMLLEWLSEAEQTLRFRGALPDDTEALQSLIDTHKEFMKKVEEKRVDVNSAVAMGEVILAVCHPDCITTIKHWITIIRARFEEVLTWAKQHQQRLETALSELVANAELLEELLAWIQWAETTLIQRDQEPIPQNIDRVKALIAEHQTFMEEMTRKQPDVDRVTKTYKRKNIEPTHAPFIEKSRSGGRKSLSQPTPPPMPILSQSEAKNPRINQLSARWQQVWLLALERQRKLNDALDRLEELKEFANFDFDVWRKKYMRWMNHKKSRVMDFFRRIDKDQDGKITRQEFIDGILASKFPTTKLEMTAVADIFDRDGDGYIDYYEFVAALHPNKDAYRPTTDADKIEDEVTRQVAQCKCAKRFQVEQIGENKYRFGDSQQLRLVRILRSTVMVRVGGGWMALDEFLVKNDPCRARGRTNIELREKFILPEGASQGMTPFRSRGRRSKPSSRAASPTRSSSSASQSNHSCTSMPSSPATPASGTKVIPSSGSKLKRPTPTFHSSRTSLAGDTSNSSSPASTGAKTNRADPKKSASRPGSRAGSRAGSRASSRRGSDASDFDLLETQSACSDTSESSAAGGQGNSRRGLNKPSKIPTMSKKTTTASPRTPGPKR

SEQ ID NO: 1197 - protein, 1522 aa, Homo sapiens
MSVRLPQSIDRLSSLSSLGDSAPERKSPSHHRQPSDASETTGLVQRCVIIQKDQHGFGFTVSGDRIVLVQSVRPGGAAMKAGVKEGDRIIKVNGTMVTNSSHLEVVKLIKSGAYVALTLLGSSPSSMGISGLQQDPSPAGAPRITSVIPSPPPPPPLPPPQRITGPKPLQDPEVQKHATQILRNMLRQEEKELQDILPLYGDTSQRPSEGRLSLDSQEGDSGLDSGTERFPSLSESLMNRNSVLSDPGLDSPRTSPVIMARVAQHHRRQGSDAAVPSTGDQGVDQSPKPLIIGPEEDYDPGYFNNESDIIFQDLEKLKSRPAHLGVFLRYIFSQADPSPLLFYLCAEVYQQASPKDSRSLGKDIWNIFLEKNAPLRVKIPEMLQAEIDSRLRNSEDARGVLCEAQEAAMPEIQEQIHDYRTKRTLGLGSLYGENDLLDLDGDPLRERQVAEKQLAALGDILSKYEEDRSAPMDFALNTYMSHAGIRLREARPSNTAEKAQSAPDKDKWLPFFPKTKKSSNSKKEKDALEDKKRNPILKYIGKPKSSSQSTFHIPLSPVEVKPGNVRNIIQHFENNQQYDAPEPGTQRLSTGSFPEDLLESDSSRSEIRLGRSESLKGREEMKRSRKAENVPRSRSDVDMDAAAEATRLHQSASSSTSSLSTRSLENPTPPFTPKMGRRSIESPSLGFCTDTLLPHLLEDDLGQLSDLEPEPDAQNWQHTVGKDVVAGLTQREIDRQEVINELFVTEASHLRTLRVLDLIFYQRMKKENLMPREELARLFPNLPELIEIHNSWCEAMKKLREEGPIIKEISDLMLARFDGPAREELQQVAAQFCSYQSIALELIKTKQRKESRFQLFMQEAESHPQCRRLQLRDLIISEMQRLTKYPLLLESIIKHTEGGTSEHEKLCRARDQCREILKYVNEAVKQTENRHRLEGYQKRLDATALERASNPLAAEFKSLDLTTRKMIHEGPLTWRISKDKTLDLHVLLLEDLLVLLQKQDEKLLLKCHSKTAVGSSDSKQTFSPVLKLNAVLIRSVATDKRAFFIICTSKLGPPQIYELVALTSSDKNTWMELLEEAVRNATRHPGAAPMPVHPPPPGPREPAQQGPTPSRVELDDSDVFHGEPEPEELPGGTGSQQRVQGKHQVLLEDPEQEGSAEEEELGVLPCPSTSLDGENRGIRTRNPIHLAFPGPLFMEGLADSALEDVENLRHLILWSLLPGHTMETQAAQEPEDDLTPTPSVISVTSHPWDPGSPGQAPPGGEGDNTQLAGLEGERPEQEDMGLCSLEHLPPRTRNSGIWESPELDRNLAEDASSTEAAGGYKVVRKAEVAGSKVVPALPESGQSEPGPPEVEGGTKATGNCFYVSMPSGPPDSSTDHSEAPMSPPQPDSLPAGQTEPQPQLQGGNDDPRRPSRSPPSLALRDVGMIFHTIEQLTLKLNRLKDMELAHRELLKSLGGESSGGTTPVGSFHTEAARWTDGSLSPPAKEPLASDSRNSHELGPCPEDGSDAPLEDSTADAAASPGP

SEQ ID NO: 1198 - protein, 517 aa, Homo sapiens
MLLGPPPFNESTKPSPSPCHSFASQAWLRQVPEVSKHLQCPSAKSLLTMEYHQPEDPAPGKAGTAEAVIPENHEVLAGPDEHPQDTDARDADGEAREREPADQALLPSQCGDNLESPLPEASSAPPGPTLGTLPEVETIRACSMPQELPQSPRTRQPEPDFYCVKWIPWKGEQTPIITQSTNGPCPLLAIMNILFLQWKVKLPPQKEVITSDELMAHLGNCLLSIKPQEKSEGLQLNFQQNVDDAMTVLPKLATGLDVNVRFTGVSDFEYTPECSVFDLLGIPLYHGWLVDPQSPEAVRAVGKLSYNQLVERIITCKHSSDTNLVTEGLIAEQFLETTAAQLTYHGLCELTAAAKEGELSVFFRNNHFSTMTKHKSHLYLLVTDQGFLQEEQVVWESLHNVDGDSCFCDSDFHLSHSLGKGPGAEGGSGSPETQLQVDQDYLIALSLQQQQPRGPLGLTDLELAQQLQQEEYQQQQAAQPVRMRTRVLSLQGRGATSGRPAGERRQRPKHESDCILL

SEQ ID NO: 1199 - protein, 564 aa, Homo sapiens
MRTLRRLKFMSSPSLSDLGKREPAAAADERGTQQRRACANATWNSIHNGVIAVFQRKGLPDQELFSLNEGVRQLLKTELGSFFTEYLQNQLLTKGMVILRDKIRFYEELQRDKAAAAAVLGAVRKRPSVVPMAGQDPALSTSHPFYDVARHGILQVAGDDRFGRRVVTFSCCRMPPSHELDHQRLLEYLKYTLDQYVENDYTIVYFHYGLNSRNKPSLGWLQSAYKEFDRKYKKNLKALYVVHPTSFIKVLWNILKPLISHKFGKKVIYFNYLSELHEHLKYDQLVIPPEVLRYDEKLQSLHEGRTPPPTKTPPPRPPLPTQQFGVSLQYLKDKNQGELIPPVLRFTVTYLREKGLRTEGLFRRSASVQTVREIQRLYNQGKPVNFDDYGDIHIPAVILKTFLRELPQPLLTFQAYEQILGITCVESSLRVTGCRQILRSLPEHNYVVLRYLMGFLHAVSRESIFNKMNSSNLACVFGLNLIWPSQGVSSLSALVPLNMFTELLIEYYEKIFSTPEAPGEHGLAPWEQGSRAAPLQEAVPRTQATGLTKPTLPPSPLMAARRRL

SEQ ID NO: 1200 - protein, 708 aa, Homo sapiens
MSQYTEKEPAAMDQESGKAVWPKPAGGYQTITGRRYGRRHAYVSFKPCMTRHERSLGRAGDDYEVLELDDVPKENSSGSSPLDQVDSSLPSEPIFEKSETEIPTCGSALNQTTESSQSFVAVHHSEEGRDTLGSSTNLHNHSEGEYIPGACSASSVQNGIALVHTDSYDPDGKHGEDNDHLQLSAEVVEGSRYQESLGNTVFELENREAEAYTGLSPPVPSFNCEVRDEFEELDSVPLVKSSAGDTEFVHQNSQEIQRSSQDEMVSTKQQNNTSQERQTEHSPEDAACGPGHICSEQNTNDREKNHGSSPEQVVRPKVRKLISSSQVDQETGFNRHEAKQRSVQRWREALEVEESGSDDLLIKCEEYDGEHDCMFLDPPYSRVITQRETENNQMTSESGATAGRQEVDNTFWNGCGDYYQLYDKDEDSSECSDGEWSASLPHRFSGTEKDQSSSDESWETLPGKDENEPELQSDSSGPEEENQELSLQEGEQTSLEEGEIPWLQYNEVNESSSDEGNEPANEFAQPAFMLDGNNNLEDDSSVSEDLDVDWSLFDGFADGLGVAEAISYVDPQFLTYMALEERLAQAMETALAHLESLAVDVEVANPPASKESIDGLPETLVLEDHTAIGQEQCCPICCSEYIKDDIATELPCHHFFHKPCVSIWLQKSGTCPVCRRHFPPAVIEASAAPSSEPDPDAPPSNDSIAEAP

SEQ ID NO: 1201 - protein, 376 aa, Homo sapiens
MAERGRKRPCGPGEHGQRIEWRKWKQQKKEEKKKWKDLKLMKKLERQRAQEEQAKRLEEEEAAAEKEDRGRPYTLSVALPGSILDNAQSPELRTYLAGQIARACAIFCVDEIVVFDEEGQDAKTVEGEFTGVGKKGQACVQLARILQYLECPQYLRKAFFPKHQDLQFAGLLNPLDSPHHMRQDEESEFREGIVVDRPTRPGHGSFVNCGMKKEVKIDKNLEPGLRVTVRLNQQQHPDCKTYHGKVVSSQDPRTKAGLYWGYTVRLASCLSAVFAEAPFQDGYDLTIGTSERGSDVASAQLPNFRHALVVFGGLQGLEAGADADPNLEVAEPSVLFDLYVNTCPGQGSRTIRTEEAILISLAALQPGLIQAGARHT

SEQ ID NO: 1202 - protein, 469 aa, Homo sapiens
MEYHQPEDPAPGKAGTAEAVIPENHEVLAGPDEHPQDTDARDADGEAREREPADQALLPSQCGDNLESPLPEASSAPPGPTLGTLPEVETIRACSMPQELPQSPRTRQPEPDFYCVKWIPWKGEQTPIITQSTNGPCPLLAIMNILFLQWKVKLPPQKEVITSDELMAHLGNCLLSIKPQEKSEGLQLNFQQNVDDAMTVLPKLATGLDVNVRFTGVSDFEYTPECSVFDLLGIPLYHGWLVDPQSPEAVRAVGKLSYNQLVERIITCKHSSDTNLVTEGLIAEQFLETTAAQLTYHGLCELTAAAKEGELSVFFRNNHFSTMTKHKSHLYLLVTDQGFLQEEQVVWESLHNVDGDSCFCDSDFHLSHSLGKGPGAEGGSGSPETQLQVDQDYLIALSLQQQQPRGPLGLTDLELAQQLQQEEYQQQQAAQPVRMRTRVLSLQGRGATSGRPAGERRQRPKHESDCILL

SEQ ID NO: 1203 - protein, 75 aa, Homo sapiens
MAKQPSDVSSECDREGRQLQPAERPPQLRPGAPTSLQTEPQVSLCHPGWSALVRSWLTATSNSQVQAVLLPQPPK

SEQ ID NO: 1204 - protein, 167 aa, Homo sapiens
MTAGTVVITGGILATVILLCIIAVLCYCRLQYYCCKKSGTEVADEEEEREHDLPTHPRGPTCNACSSQALDGRGSLAPLTSEPCSQPCGVAASHCTTCSPYSSPFYIRTADMVPNGGGGERLSFAPTYYKEGGPPSLKLAAPQSYPVTWPGSGREAFTNPRAISTDV

SEQ ID NO: 1205 - protein, 3685 aa, Homo sapiens
MLWWEEVEDCYEREDVQKKTFTKWVNAQFSKFGKQHIENLFSDLQDGRRLLDLLEGLTGQKLPKEKGSTRVHALNNVNKALRVLQNNNVDLVNIGSTDIVDGNHKLTLGLIWNIILHWQVKNVMKNIMAGLQQTNSEKILLSWVRQSTRNYPQVNVINFTTSWSDGLALNALIHSHRPDLFDWNSVVCQQSATQRLEHAFNIARYQLGIEKLLDPEDVDTTYPDKKSILMYITSLFQVLPQQVSIEAIQEVEMLPRPPKVTKEEHFQLHHQMHYSQQITVSLAQGYERTSSPKPRFKSYAYTQAAYVTTSDPTRSPFPSQHLEAPEDKSFGSSLMESEVNLDRYQTALEEVLSWLLSAEDTLQAQGEISNDVEVVKDQFHTHEGYMMDLTAHQGRVGNILQLGSKLIGTGKLSEDEETEVQEQMNLLNSRWECLRVASMEKQSNLHRVLMDLQNQKLKELNDWLTKTEERTRKMEEEPLGPDLEDLKRQVQQHKVLQEDLEQEQVRVNSLTHMVVVVDESSGDHATAALEEQLKVLGDRWANICRWTEDRWVLLQDILLKWQRLTEEQCLFSAWLSEKEDAVNKIHTTGFKDQNEMLSSLQKLAVLKADLEKKKQSMGKLYSLKQDLLSTLKNKSVTQKTEAWLDNFARCWDNLVQKLEKSTAQISQAVTTTQPSLTQTTVMETVTTVTTREQILVKHAQEELPPPPPQKKRQITVDSEIRKRLDVDITELHSWITRSEAVLQSPEFAIFRKEGNFSDLKEKVNAIEREKAEKFRKLQDASRSAQALVEQMVNEGVNADSIKQASEQLNSRWIEFCQLLSERLNWLEYQNNIIAFYNQLQQLEQMTTTAENWLKIQPTTPSEPTAIKSQLKICKDEVNRLSDLQPQIERLKIQSIALKEKGQGPMFLDADFVAFTNHFKQVFSDVQAREKELQTIFDTLPPMRYQETMSAIRTWVQQSETKLSIPQLSVTDYEIMEQRLGELQALQSSLQEQQSGLYYLSTTVKEMSKKAPSEISRKYQSEFEEIEGRWKKLSSQLVEHCQKLEEQMNKLRKIQNHIQTLKKWMAEVDVFLKEEWPALGDSEILKKQLKQCRLLVSDIQTIQPSLNSVNEGGQKIKNEAEPEFASRLETELKELNTQWDHMCQQVYARKEALKGGLEKTVSLQKDLSEMHEWMTQAEEEYLERDFEYKTPDELQKAVEEMKRAKEEAQQKEAKVKLLTESVNSVIAQAPPVAQEALKKELETLTTNYQWLCTRLNGKCKTLEEVWACWHELLSYLEKANKWLNEVEFKLKTTENIPGGAEEISEVLDSLENLMRHSEDNPNQIRILAQTLTDGGVMDELINEELETFNSRWRELHEEAVRRQKLLEQSIQSAQETEKSLHLIQESLTFIDKQLAAYIADKVDAAQMPQEAQKIQSDLTSHEISLEEMKKHNQGKEAAQRVLSQIDVAQKKLQDVSMKFRLFQKPANFEQRLQESKMILDEVKMHLPALETKSVEQEVVQSQLNHCVNLYKSLSEVKSEVEMVIKTGRQIVQKKQTENPKELDERVTALKLHYNELGAKVTERKQQLEKCLKLSRKMRKEMNVLTEWLAATDMELTKRSAVEGMPSNLDSEVAWGKATQKEIEKQKVHLKSITEVGEALKTVLGKKETLVEDKLSLLNSNWIAVTSRAEEWLNLLLEYQKHMETFDQNVDHITKWIIQADTLLDESEKKKPQQKEDVLKRLKAELNDIRPKVDSTRDQAANLMANRGDHCRKLVEPQISELNHRFAAISHRIKTGKASIPLKELEQFNSDIQKLLEPLEAEIQQGVNLKEEDFNKDMNEDNEGTVKELLQRGDNLQQRITDERKREEIKIKQQLLQTKHNALKDLRSQRRKKALEISHQWYQYKRQADDLLKCLDDIEKKLASLPEPRDERKIKEIDRELQKKKEELNAVRRQAEGLSEDGAAMAVEPTQIQLSKRWREIESKFAQFRRLNFAQIHTVREETMMVMTEDMPLEISYVPSTYLTEITHVSQALLEVEQLLNAPDLCAKDFEDLFKQEESLKNIKDSLQQSSGRIDIIHSKKTAALQSATPVERVKLQEALSQLDFQWEKVNKMYKDRQGRFDRSVEKWRRFHYDIKIFNQWLTEAEQFLRKTQIPENWEHAKYKWYLKELQDGIGQRQTVVRTLNATGEEIIQQSSKTDASILQEKLGSLNLRWQEVCKQLSDRKKRLEEQKNILSEFQRDLNEFVLWLEEADNIASIPLEPGKEQQLKEKLEQVKLLVEELPLRQGILKQLNETGGPVLVSAPISPEEQDKLENKLKQTNLQWIKVSRALPEKQGEIEAQIKDLGQLEKKLEDLEEQLNHLLLWLSPIRNQLEIYNQPNQEGPFDVKETEIAVQAKQPDVEEILSKGQHLYKEKPATQPVKRKLEDLSSEWKAVNRLLQELRAKQPDLAPGLTTIGASPTQTVTLVTQPVVTKETAISKLEMPSSLMLEVPALADFNRAWTELTDWLSLLDQVIKSQRVMVGDLEDINEMIIKQKATMQDLEQRRPQLEELITAAQNLKNKTSNQEARTIITDRIERIQNQWDEVQEHLQNRRQQLNEMLKDSTQWLEAKEEAEQVLGQARAKLESWKEGPYTVDAIQKKITETKQLAKDLRQWQTNVDVANDLALKLLRDYSADDTRKVHMITENINASWRSIHKRVSEREAALEETHRLLQQFPLDLEKFLAWLTEAETTANVLQDATRKERLLEDSKGVKELMKQWQDLQGEIEAHTDVYHNLDENSQKILRSLEGSDDAVLLQRRLDNMNFKWSELRKKSLNIRSHLEASSDQWKRLHLSLQELLVWLQLKDDELSRQAPIGGDFPAVQKQNDVHRAFKRELKTKEPVIMSTLETVRIFLTEQPLEGLEKLYQEPRELPPEERAQNVTRLLRKQAEEVNTEWEKLNLHSADWQRKIDETLERLRELQEATDELDLKLRQAEVIKGSWQPVGDLLIDSLQDHLEKVKALRGEIAPLKENVSHVNDLARQLTTLGIQLSPYNLSTLEDLNTRWKLLQVAVEDRVRQLHEAHRDFGPASQHFLSTSVQGPWERAISPNKVPYYINHETQTTCWDHPKMTELYQSLADLNNVRFSAYRTAMKLRRLQKALCLDLLSLSAACDALDQHNLKQNDQPMDILQIINCLTTIYDRLEQEHNNLVNVPLCVDMCLNWLLNVYDTGRTGRIRVLSFKTGIISLCKAHLEDKYRYLFKQVASSTGFCDQRRLGLLLHDSIQIPRQLGEVASFGGSNIEPSVRSCFQFANNKPEIEAALFLDWMRLEPQSMVWLPVLHRVAAAETAKHQAKCNICKECPIIGFRYRSLKHFNYDICQSCFFSGRVAKGHKMHYPMVEYCTPTTSGEDVRDFAKVLKNKFRTKRYFAKHPRMGYLPVQTVLEGDNMETPVTLINFWPVDSAPASSPQLSHDDTHSRIEHYASRLAEMENSNGSYLNDSISPNESIDDEHLLIQHYCQSLNQDSPLSQPRSPAQILISLESEERGELERILADLEEENRNLQAEYDRLKQQHEHKGLSPLPSPPEMMPTSPQSPRDAELIAEAKLLRQHKGRLEARMQILEDHNKQLESQLHRLRQLLEQPQAEAKVNGTTVSSPSTSLQRSDSSQPMLLRVVGSQTSDSMGEEDLLSPPQDTSTGLEEVMEQLNNSFPSSRGRNTPGKPMREDTM

SEQ ID NO: 1206 - protein, 786 aa, Homo sapiens
MTSIFHFAIIFMLILQIRIQLSEESEFLVDRSKNGLIHVPKDLSQKTTILNISQNYISELWTSDILSLSKLRILIISHNRIQYLDISVFKFNQELEYLDLSHNKLVKISCHPTVNLKHLDLSFNAFDALPICKEFGNMSQLKFLGLSTTHLEKSSVLPIAHLNISKVLLVLGETYGEKEDPEGLQDFNTESLHIVFPTNKEFHFILDVSVKTVANLELSNIKCVLEDNKCSYFLSILAKLQTNPKLSNLTLNNIETTWNSFIRILQLVWHTTVWYFSISNVKLQGQLDFRDFDYSGTSLKALSIHQVVSDVFGFPQSYIYEIFSNMNIKNFTVSGTRMVHMLCPSKISPFLHLDFSNNLLTDTVFENCGHLTELETLILQMNQLKELSKIAEMTTQMKSLQQLDISQNSVSYDEKKGDCSWTKSLLSLNMSSNILTDTIFRCLPPRIKVLDLHSNKIKSIPKQVVKLEALQELNVAFNSLTDLPGCGSFSSLSVLIIDHNSVSHPSADFFQSCQKMRSIKAGDNPFQCTCELGEFVKNIDQVSSEVLEGWPDSYKCDYPESYRGTLLKDFHMSELSCNITLLIVTIVATMLVLAVTVTSLCSYLDLPWYLRMVCQWTQTRRRARNIPLEELQRNLQFHAFISYSGHDSFWVKNELLPNLEKEGMQICLHERNFVPGKSIVENIITCIEKSYKSIFVLSPNFVQSEWCHYELYFAHHNLFHEGSNSLILILLEPIPQYSIPSSYHKLKSLMARRTYLEWPKEKSKRGLFWANLRAAINIKLTEQAKK

SEQ ID NO: 1207 - protein, 602 aa, Homo sapiens
MSNELDFRSVRLLKNDPVNLQKFSYTSEDEAWKTYLENPLTAATKAMMRVNGDDDSVAALSFLYDYYMGPKEKRILSSSTGGRNDQGKRYYHGMEYETDLTPLESPTHLMKFLTENVSGTPEYPDLLKKNNLMSLEGALPTPGKAAPLPAGPSKLEAGSVDSYLLPTTDMYDNGSLNSLFESIHGVPPTQRWQPDSTFKDDPQESMLFPDILKTSPEPPCPEDYPSLKSDFEYTLGSPKAIHIKSGESPMAYLNKGQFYPVTLRTPAGGKGLALSSNKVKSVVMVVFDNEKVPVEQLRFWKHWHSRQPTAKQRVIDVADCKENFNTVEHIEEVAYNALSFVWNVNEEAKVFIGVNCLSTDFSSQKGVKGVPLNLQIDTYDCGLGTERLVHRAVCQIKIFCDKGAERKMRDDERKQFRRKVKCPDSSNSGVKGCLLSGFRGNETTYLRPETDLETPPVLFIPNVHFSSLQRSGGAAPSAGPSSSNRLPLKRTCSPFTEEFEPLPSKQAKEGDLQRVLLYVRRETEEVFDALMLKTPDLKGLRNAISEKYGFPEENIYKVYKKCKRGILVNMDNNIIQHYSNHVAFLLDMGELDGKIQIILKEL

SEQ ID NO: 1208 - protein, 1957 aa, Homo sapiens
MFRQFYLWTCLASGIILGSLFEICLGQYDDDCKLARGGPPATIVAIDEESRNGTILVDNMLIKGTAGGPDPTIELSLKDNVDYWVLMDPVKQMLFLNSTGRVLDRDPPMNIHSIVVQVQCINKKVGTIIYHEVRIVVRDRNDNSPTFKHESYYATVNELTPVGTTIFTGFSGDNGATDIDDGPNGQIEYVIQYNPDDPTSNDTFEIPLMLTGNIVLRKRLNYEDKTRYFVIIQANDRAQNLNERRTTTTTLTVDVLDGDDLGPMFLPCVLVPNTRDCRPLTYQAAIPELRTPEELNPIIVTPPIQAIDQDRNIQPPSDRPGILYSILVGTPEDYPRFFHMHPRTAELSLLEPVNRDFHQKFDLVIKAEQDNGHPLPAFAGLHIEILDENNQSPYFTMPSYQGYILESAPVGATISDSLNLTSPLRIVALDKDIEDTKDPELHLFLNDYTSVFTVTQTGITRYLTLLQPVDREEQQTYTFSITAFDGVQESEPVIVNIQVMDANDNTPTFPEISYDVYVYTDMRPGDSVIQLTAVDADEGSNGEITYEILVGAQGDFIINKTTGLITIAPGVEMIVGRTYALTVQAADNAPPAERRNSICTVYIEVLPPNNQSPPRFPQLMYSLEISEAMRVGAVLLNLQATDREGDSITYAIENGDPQRVFNLSETTGILTLGKALDRESTDRYILIITASDGRPDGTSTATVNIVVTDVNDNAPVFDPYLPRNLSVVEEEANAFVGQVKATDPDAGINGQVHYSLGNFNNLFRITSNGSIYTAVKLNREVRDYYELVVVATDGAVHPRHSTLTLAIKVLDIDDNSPVFTNSTYTVLVEENLPAGTTILQIEAKDVDLGANVSYRIRSPEVKHFFALHPFTGELSLLRSLDYEAFPDQEASITFLVEAFDIYGTMPPGIATVTVIVKDMNDYPPVFSKRIYKGMVAPDAVKGTPITTVYAEDADPPGLPASRVRYRVDDVQFPYPASIFEVEEDSGRVITRVNLNEEPTTIFKLVVVAFDDGEPVMSSSATVKILVLHPGEIPRFTQEEYRPPPVSELATKGTMVGVISAAAINQSIVYSIVSGNEEDTFGINNITGVIYVNGPLDYETRTSYVLRVQADSLEVVLANLRVPSKSNTAKVYIEIQDENNHPPVFQKKFYIGGVSEDARMFTSVLRVKATDKDTGNYSVMAYRLIIPPIKEGKEGFVVETYTGLIKTAMLFHNMRRSYFKFQVIATDDYGKGLSGKADVLVSVVNQLDMQVIVSNVPPTLVEKKIEDLTEILDRYVQEQIPGAKVVVESIGARRHGDAFSLEDYTKCDLTVYAIDPQTNRAIDRNELFKFLDGKLLDINKDFQPYYGEGGRILEIRTPEAVTSIKKRGESLGYTEGALLALAFIIILCCIPAILVVLVSYRQFKVRQAECTKTARIQAALPAAKPAVPAPAPVAAPPPPPPPPPGAHLYEELGDSSMHNLFLLYHFQQSRGNNSVSEDRKHQQVVMPFSSNTIEAHKSAHVDGSLKSNKLKSARKFTFLSDEDDLSAHNPLYKENISQVSTNSDISQRTDFVDPFSPKIQAKSKSLRGPREKIQRLWSQSVSLPRRLMRKVPNRPEIIDLQQWQGTRQKAENENTGICTNKRGSSNPLLTTEEANLTEKEEIRQGETLMIEGTEQLKSLSSDSSFCFPRPHFSFSTLPTVSRTVELKSEPNVISSPAECSLELSPSRPCVLHSSLSRRETPICMLPIETERNIFENFAHPPNISPSACPLPPPPPISPPSPPPAPAPLAPPPDISPFSLFCPPPSPPSIPLPLPPPTFFPLSVSTSGPPTPPLLPPFPTPLPPPPPSIPCPPPPSASFLSTECVCITGVKCTTNLMPAEKIKSSMTQLSTTTVCKTDPQREPKGILRHVKNLAELEKSVANMYSQIEKNYLRTNVSELQTMCPSEVTNMEITSEQNKGSLNNIVEGTEKQSHSQSTSL

SEQ ID NO: 1209 - protein, 2170 aa, Homo sapiens
MKDSEGPQRPPLCFLSTLLSQKVPEKSDAVLRCIISGQPKPEVTWYKNGQAIDGSGIISNYEFFENQYIHVLHLSCCTKNDAAVYQISAKNSFGMICCSASVEVECSSENPQLSPNLEDDRDRGWKHETGTHEEERANQIDEKEHPYKEEESISPGTPRSADSSPSKSNHSLSLQSLGNLDISVSSSENPLGVKGTRHTGEAYDPSNTEEIANGLLFLNSSHIYEKQDRCCHKTVHSMASKFTDGDLNNDGPHDEGLRSSQQNPKVQKYISFSLPLSEATAHIYPGDSAVANKQPSPQLSSEDSDSDYELCPEITLTYTEEFSDDDLEYLECSDVMTDYSNAVWQRNLLGTEHVFLLESDDEEMEFGEHCLGGCEHFLSGMGCGSRVSGDAGPMVATAGFCGHHSQPQEVGVRSSRVSKHGPSSPQTGMTLILGPHQDGTSSVTEQGRYKLPTAPEAAENDYPGIQGETRDSHQAREEFASDNLLNMDESVRETEMKLLSGESENSGMSQCWETAADKRVGGKDLWSKRGSRKSARVRQPGMKGNPKKPNANLRESTTEGTLHLCSAKESAEPPLTQSDKRETSHTTAAATGRSSHADARECAISTQAEQEAKTLQTSTDSVSKEGNTNCKGEGMQVNTLFETSQVPDWSDPPQVQVQETVRETISCSQMPAFSEPAGEESPFTGTTTISFSNLGGVHKENASLAQHSEVKPCTCGPQHEEKQDRDGNIPDNFREDLKYEQSISEANDETMSPGVFSRHLPKDARADFREPVAVSVASPEPTDTALTLENVCDEPRDREAVCAMECFEAGDQGTCFDTIDSLVGRPVDKYSPQEICSVDTELAEGQNKVSDLCSSNDKTLEVFFQTQVSETSVSTCKSSKDGNSVMSPLFTSTFTLNISHTASEGATGENLAKVENSTYPLASTVHAGQEQPSPSNSGGLDETQLLSSENNPLVQFKEGGDKSPSPSAADTTATPASYSSIVSFPWEKPTTLTANNECFQATRETEDTSTVTIATEVHPAKYLAVSIPEDKHAGGTEERFPRASHEKVSQFPSQVQLDHILSGATIKSTKELLCRAPSVPGVPHHVLQLPEGEGFCSNSPLQVDNLSGDKSQTVDRADFRSYEENFQERGSETKQGVQQQSLSQQGSLSAPDFQQSLPTTSAAQEERNLVPTAHSPASSREGAGQRSGWGTRVSVVAETAGEEDSQALSNVPSLSDILLEESKEYRPGNWEAGNKLKIITLEASASEIWPPRQLTNSESKASDGGLIIPDKVWAVPDSLKADAVVPELAPSEIAALAHSPEDAESALADSRESHKGEEPTISVHWRSLSSRGFSQPRLLESSVDPVDEKELSVTDSLSAASETGGKENVNNVSQDQEEKQLKMDHTAFFKKFLTCPKILESSVDPIDEISVIEYTRAGKPEPSETTPQGAREGGQSNDGNMGHEAEIQPAILQVPCLQGTILSENRISRSQEGSMKQEAEQIQPEEAKTAIWQVLQPSEGGERIPSGCSIGQIQESSDGSLGEAEQSKKDKAELISPTSPLSSCLPIMTHASLGVDTHNSTGQIHDVPENDIVEPRKRQYVFPVSQKRGTIENERGKPLPSSPDLTRFPCTSSPEGNVTDFLISHKMEEPKIEVLQIGETKPPSSSSSSAKTLAFISGERELEKAPKLLQDPCQKGTLGCAKKSREREKSLEARAGKSPGTLTAVTGSEEVKRKPEAPGSGHLAEGVKKKILSRVAALRLKLEEKENIRKNSAFLKKMPKLETSLSHTEEKQDPKKPSCKREGRAPVLLKKIQAEMFPEHSGNVKLSCQFAEIHEDSTICWTKDSKSIAQVQRSAGDNSTVSFAIVQASPKDQGLYYCCIKNSYGKVTAEFNLTAEVLKQLSSRQDTKGCEEIEFSQLIFKEDFLHDSYFGGRLRGQIATEELHFGEGVHRKAFRSTVMHGLMPVFKPGHACVLKVHNAIAYGTRNNDELIQRNYKLAAQECYVQNTARYYAKIYAAEAQPLEGFGEVPEIIPIFLIHRPENNIPYATVEEELIGEFVKYSIRDGKEINFLRRESEAGQKCCTFQHWVYQKTSGCLLVTDMQGVGMKLTDVGIATLAKGYKGFKGNCSMTFIDQFKALHQCNKYCKMLGLKSLQNNNQKQKQPSIGKSKVQTNSMTIKKAGPETPGEKKT

SEQ ID NO: 1210 - protein, 521 aa, Homo sapiens
MAAHLVKRCTCLLREAARQAPAMAPVGRLRLAWVAHKTLTSSATSPISHLPGSLMEPVEKERASTPYIEKQVDHLIKKATRPEELLELLGGSHDLDSNQAAMVLIRLSHLLSEKPEDKGLLIQDAHFHQLLCLLNSQIASVWHGTLSKLLGSLYALGIPKASKELQSVEQEVRWRMRKLKYKHLAFLAESCATLSQEQHSQELLAELLTHLERRWTEIEDSHTLVTVMMKVGHLSEPLMNRLEDKHVLNRAQDITLPHLCSVLLAFARLNFHPDQEDQFFSLVHEKLGSELPGLEPALQVDLVWALCVLQQAREAELQAVLHPEFHIQFLGGKSQKDQNTFQKLLHINATALLEYPEYSGPLLPASAVAPGPSALDRKVTPLQKELQETLKGLLGSADKGSLEVATQYGWVLDAEVLLDSDGEFLPVRDFVAPHLAQPTGSQSPPPGSKRLAFLRWEFPNFNSRSKDLLGRFVLARRHIVAAGFLIVDVPFYEWLELKSEWQKGAYLKDKMRKAVAEELAK

SEQ ID NO: 1211 - protein, 1173 aa, Homo sapiens
MSRGSIEIPLRDTDEVIELDFDQLPEGDEVISILKQEHTQLHIWIALALEYYKQGKTEEFVKLLEAARIDGNLDYRDHEKDQMTCLDTLAAYYVQQARKEKNKDNKKDLITQATLLYTMADKIIMYDQNHLLGRACFCLLEGDKMDQADAQFHFVLNQSPNNIPALLGKACISFNKKDYRGALAYYKKALRTNPGCPAEVRLGMGHCFVKLNKLEKARLAFSRALELNSKCVGALVGLAVLELNNKEADSIKNGVQLLSRAYTIDPSNPMVLNHLANHFFFKKDYSKVQHLALHAFHNTEVEAMQAESCYQLARSFHVQEDYDQAFQYYYQATQFASSSFVLPFFGLGQMYIYRGDKENASQCFEKVLKAYPNNYETMKILGSLYAASEDQEKRDIAKGHLKKVTEQYPDDVEAWIELAQILEQTDIQGALSAYGTATRILQEKVQADVPPEILNNVGALHFRLGNLGEAKKYFLASLDRAKAEAEHDEHYYNAISVTTSYNLARLYEAMCEFHEAEKLYKNILREHPNYVDCYLRLGAMARDKGNFYEASDWFKEALQINQDHPDAWSLIGNLHLAKQEWGPGQKKFERILKQPSTQSDTYSMLALGNVWLQTLHQPTRDREKEKRHQDRALAIYKQVLRNDAKNLYAANGIGAVLAHKGYFREARDVFAQVREATADISDVWLNLAHIYVEQKQYISAVQMYENCLRKFYKHQNTEVVLYLARALFKCGKLQECKQTLLKARHVAPSDTVLMFNVALVLQRLATSVLKDEKSNLKEVLNAVKELELAHRYFSYLSKVGDKMRFDLALAATEARQCSDLLSQAQYHVARARKQDEEERELRAKQEQEKELLRQKLLKEQEEKRLREKEEQKKLLEQRAQYVEKTKNILMFTGETEATKEKKRGGGGGRRSKKGGEFDEFVNDDTDDDLPISKKKKRRKGSGSEQEGEDEEGGERKKKKRRRHPKGEEGSDDDETENGPKPKKRRPPKAEKKKAPKPERLPPSMKGKIKSKAIISSSDDSSDEDKLKIADEGHPRNSNSNSDSDEDEQRKKCASSESDSDENQNKSGSEAGSPRRPRRQRSDQDSDSDQPSRKRRPSGSEQSDNESVQSGRSHSGVSENDSRPASPSAESDHESERGSDNEGSGQGSGNESEPEGSNNEASDRGSEHGSDDSD

SEQ ID NO: 1212 - protein, 643 aa, Homo sapiens
MGQESSKPVWPNPTGGYQSNTGRRYGRRHAYVSFRPPTSQRERIASQRKTNSEVPMHRSAPSQTTKRSRSPFSTTRRSWDDSESSGTNLNIDNEDYSRYPPREYRASGSRRGMAYGHIDSYGADDSEEEGAGPVERPPVRGKTGKFKDDKLYDPEKGARSLAGPPPHFSSFSRDVREERDKLDPVPAARCSASRADFLPQSSVASQSSSEGKLATKGDSSERERREQNLPARPSRAPVSICGGGENTSKSAEEPVVRPKIRNLASPNCVKPKIFFDTDDDDDMPHSTSRWRDTANDNEGHSDGLARRGRGESSSGYPEPKYPEDKREARSDQVKPEKVPRRRRTMADPDFWTHSDDYYKYCDEDSDSDKEWIAALRRKYRSREQTLSSSGESWETLPGKEEREPPQAKVSASTGTSPGPGASASAGAGAGASAGSNGSNYLEEVREPSLQEEQASLEEGEIPWLQYHENDSSSEGDNDSGHELMQPGVFMLDGNNNLEDDSSVSEDLEVDWSLFDGFADGLGVAEAISYVDPQFLTYMALEERLAQAMETALAHLESLAVDVEVANPPASKESIDALPEILVTEDHGAVGQEMCCPICCSEYVKGEVATELPCHHYFHKPCVSIWLQKSGTCPVCRCMFPPPL

SEQ ID NO: 1213 - protein, 249 aa, Homo sapiens
MLQTLYDYFWWERLWLPVNLTWADLEDRDGRVYAKASDLYITLPLALLFLIVRYFFELYVATPLAALLNIKEKTRLRAPPNATLEHFYLTSGKQPKQVEVELLSRQSGLSGRQVERWFRRRRNQDRPSLLKKFREASWRFTFYLIAFIAGMAVIVDKPWFYDMKKVWEGYPIQSTIPSQYWYYMIELSFYWSLLFSIASDVKRKDFKEQIIHHVATIILISFSWFANYIRAGTLIMALHDSSDYLLEVR

SEQ ID NO: 1214 - protein, 841 aa, Homo sapiens
MSAQSLPAATPPTQKPPRIIRPRPPSRSRAAQSPGPPHNGSSPQELPRNSNDAPTPMCTPIFWEPPAASLKPPALLPPSASRASLDSQTSPDSPSSTPTPSPVSRRSASPEPAPRSPVPPPKPSGSPCTPLLPMAGVLAQNGSASAPGTVRRLAGRFEGGAEGRAQDADAPEPGLQARADVNGEREAPLTGSGSQENGAPDAGLACPPCCPCVCHTTRPGLELRWVPVGGYEEVPRVPRRASPLRTSRSRPHPPSIGHPAVVLTSYRSTAERKLLPLLKPPKPTRVRQDATIFGDPPQPDLDLLSEDGIQTGDSPDEAPQNTPPATVEGREEEGLEVLKEQNWELPLQDEPLYQTYRAAVLSEELWGVGEDGSPSPANAGDAPTFPRPPGPRNTLWQELPAVQASGLLDTLSPQERRMQESLFEVVTSEASYLRSLRLLTDTFVLSQALRDTLTPRDHHTLFSNVQRVQGVSERFLATLLSRVRSSPHISDLCDVVHAHAVGPFSVYVDYVRNQQYQEETYSRLMDTNVRFSAELRRLQSLPKCERLPLPSFLLLPFQRITRLRMLLQNILRQTEEGSSRQENAQKALGAVSKIIERCSAEVGRMKQTEELIRLTQRLRFHKVKALPLVSWSRRLEFQGELTELGCRRGGVLFASRPRFTPLCLLLFSDLLLITQPKSGQRLQVLDYAHRSLVQAQQVPDPSGPPTFRLSLLSNHQGRPTHRLLQASSLSDMQRWLGAFPTPGPLPCSPDTIYEDCDCSQELCSESSAPAKTEGRSLESRAAPKHLHKTPEGWLKGLPGAFPAQLVCEVTGEHERRRHLRQNQRLLEAVGSSSGTPNAPPP

SEQ ID NO: 1215 - protein, 355 aa, Homo sapiens
MQLTTCLRETLFTGASQKTSLWWLGIASFGVPEKLGCANLPLNSRQKELCKRKPYLLPSIREGARLGIQECGSQFRHERWNCMITAAATTAPMGASPLFGYELSSGTKETAFIYAVMAAGLVHSVTRSCSAGNMTECSCDTTLQNGGSASEGWHWGGCSDDVQYGMWFSRKFLDFPIGNTTGKENKVLLAMNLHNNEAGRQAVAKLMSVDCRCHGVSGSCAVKTCWKTMSSFEKIGHLLKDKYENSIQISDKTKRKMRRREKDQRKIPIHKDDLLYVNKSPNYCVEDKKLGIPGTQGRECNRTSEGADGCNLLCCGRGYNTHVVRHVERCECKFIWCCYVRCRRCESMTDVHTCK

SEQ ID NO: 1216 - protein, 435 aa, Homo sapiens
MLPARCARLLTPHLLLVLVQLSPARGHRTTGPRFLISDRDPQCNLHCSRTQPKPICASDGRSYESMCEYQRAKCRDPTLGVVHRGRCKDAGQSKCRLERAQALEQAKKPQEAVFVPECGEDGSFTQVQCHTYTGYCWCVTPDGKPISGSSVQNKTPVCSGSVTDKPLSQGNSGRKDDGSKPTPTMETQPVFDGDEITAPTLWIKHLVIKDSKLNNTNIRNSEKVYSCDQERQSALEEAQQNPREGIVIPECAPGGLYKPVQCHQSTGYCWCVLVDTGRPLPGTSTRYVMPSCESDARAKTTEADDPFKDRELPGCPEGKKMEFITSLLDALTTDMVQAINSAAPTGGGRFSEPDPSHTLEERVVHWYFSQLDSNSSNDINKREMKPFKRYVKKKAKPKKCARRFTDYCDLNKDKVISLPELKGCLGVSKEVGRLV

SEQ ID NO: 1217 - protein, 593 aa, Homo sapiens
MSRPSSRAIYLHRKEYSQNLTSEPTLLQHRVEHLMTCKQGSQRVQGPEDALQKLFEMDAQGRVWSQDLILQVRDGWLQLLDIETKEELDSYRLDSIQAMNVALNTCSYNSILSITVQEPGLPGTSTLLFQCQEVGAERLKTSLQKALEEELEQRPRLGGLQPGQDRWRGPAMERPLPMEQARYLEPGIPPEQPHQRTLEHSLPPSPRPLPRHTSAREPSAFTLPPPRRSSSPEDPERDEEVLNHVLRDIELFMGKLEKAQAKTSRKKKFGKKNKDQGGLTQAQYIDCFQKIKHSFNLLGRLATWLKETSAPELVHILFKSLNFILARCPEAGLAAQVISPLLTPKAINLLQSCLSPPESNLWMGLGPAWTTSRADWTGDEPLPYQPTFSDDWQLPEPSSQAPLGYQDPVSLRRGSHRLGSTSHFPQEKTHNHDPQPGDPNSRPSSPKPAQPALKMQVLYEFEARNPRELTVVQGEKLEVLDHSKRWWLVKNEAGRSGYIPSNILEPLQPGTPGTQGQSPSRVPMLRLSSRPEEVTDWLQAENFSTATVRTLGSLTGSQLLRIRPGELQMLCPQEAPRILSRLEAVRRMLGISP

SEQ ID NO: 1218 - protein, 239 aa, Homo sapiens
MWLPQLDLMRVISAKSQGYSIVTQITGPTTVNGLERGSLTVQCVYRSGWETYLKWWCRGAIWRDCKILVKTSGSEQEVKRDRVSIKDNQKNRTFTVTMEDLMKTDADTYWCGIEKTGNDLGVTVQVTIDPASTPAPTTPTSTTFTAPVTQEETSSSPTLTGHHLDNRHKLLKLSVLLPLIFTILLLLLVAASLLAWRMMKYQQKGTAAPGGRPLLCRPDPAAGRNLPAKGYHEAFLCPG

SEQ ID NO: 1219 - protein, 175 aa, Homo sapiens
MEERGDSEPTPGCSGLGPGGVRGFGDGGGAPSWAPEDAWMGTHPKYLEMMELDIGDATQVYVAFLVYLDLMESKSWHEVNCVGLPELQLICLVGTEIEGEGLQTVVPTPITASLSHNRIREILKASRKLQGDPDLPMSFTLAIVESDSTIVYYKLTDGFMLPDPQVSFENISLRR

SEQ ID NO: 1220 - protein, 269 aa, Homo sapiens
MLGPGQVRLRPRVWRDKAGGRVADGASGLPPARGSWRETGTGRALGASSPPRPAQGSSSPGIQSGPSSRPGSPRGAEQAGTPRPRLSLGISQATGSAARWRTRRTGKGLGYNSDEIRPRTLLIEHLMEGGRRDHHTMTVLWGTQEIIVAEFHKKIKEAFEVFDHESNNTVDVREIGTIIRSLGCCPTEGELHDLIAEVEEEEPTGYIRFEKFLPVMTEILLERKYRPIPEDVLLRAFEVLDSAKRGFLTKDELIKYMTEEDGVSLRRPG

SEQ ID NO: 1221 - protein, 713 aa, Homo sapiens
MAKSPENSTLEEILGQYQRSLREHASRSIHQLTCALKEGDVTIGEDAPNLSFSTSVGNEDARTAWPELQQSHAVNQLKDLLRQQADKESEVSPSRRRKMSPLRSLEHEETNMPTMHDLVHTINDQSQYIHHLEAEVKFCKEELSGMKNKIQVVVLENEGLQQQLKSQRQEETLREQTLLDASGNMHNSWITTGEDSGVGETSKRPFSHDNADFGKAASAGEQLELEKLKLTYEEKCEIEESQLKFLRNDLAEYQRTCEDLKEQLKHKEFLLAANTCNRVGGLCLKCAQHEAVLSQTHTNVHMQTIERLVKERDDLMSALVSVRSSLADTQQREASAYEQVKQVLQISEEANFEKTKALIQCDQLRKELERQAERLEKELASQQEKRAIEKDMMKKEITKEREYMGSKMLILSQNIAQLEAQVEKVTKEKISAINQLEEIQSQLASREMDVTKVCGEMRYQLNKTNMEKDEAEKEHREFRAKTNRDLEIKDQEIEKLRIELDESKQHLEQEQQKAALAREECLRLTELLGESEHQLHLTRQEKDSIQQSFSKEAKAQALQAQQREQELTQKIQQMEAQHDKTENEQYLLLTSQNTFLTKLKEECCTLAKKLEQISQKTRSEIAQLSQEKRYTYDKLGKLQRRNEELEEQCVQHGRVHETMKQRLRQLDKHSQATAQQLVQLLSKQNQLLLERQSLSEEVDRLRTQLPSMPQSDC

SEQ ID NO: 1222 - protein, 1584 aa, Homo sapiens
MSLTSWFLVSSGGTRHRLPREMIFVGRDDCELMLQSRSVDKQHAVINYDASTDEHLVKDLGSLNGTFVNDVRIPEQTYITLKLEDKLRFGYDTNLFTVVQGEMRVPEEALKHEKFTIQLQLSQKSSESELSKSASAKSIDSKVADAATEVQHKTTEALKSEEKAMDISAMPRGTPLYGQPSWWGDDEVDEKRAFKTNGKPEEKNHEAGTSGCGIDAKQVEEQSAAANEEVLFPFCREPSYFEIPTKEFQQPSQITESTIHEIPTKDTPSSHITGAGHASFTIEFDDSTPGKVTIRDHVTKFTSDQRHKSKKSSPGTQDLLGIQTGMMAPENKVADWLAQNNPPQMLWERTEEDSKSIKSDVPVYLKRLKGNKHDDGTQSDSENAGAHRRCSKRATLEEHLRRHHSEHKKLQKVQATEKHQDQAVTSSAHHRGGHGVPHGKLLKQKSEEPSVSIPFLQTALLRSSGSLGHRPSQEMDKMLKNQATSATSEKDNDDDQSDKGTYTIELENPNSEEVEARKMIDKVFGVDDNQDYNRPVINEKHKDLIKDWALSSAAAVMEERKPLTTSGFHHSEEGTSSSGSKRWVSQWASLAANHTRHDQEERIMEFSAPLPLENETEISESGMTVRSTGSATSLASQGERRRRTLPQLPNEEKSLESHRAKVVTQRSEIGEKQDTELQEKETPTQVYQKDKQDADRPLSKMNRAVNGETLKTGGDNKTLLHLGSSAPGKEKSETDKETSLVKQTLAKLQQQEQREEAQWTPTKLSSKNVSGQTDKCREETFKQESQPPEKNSGHSTSKGDRVAQSESKRRKAEEILKSQTPKGGDKKESSKSLVRQGSFTIEKPSPNIPIELIPHINKQTSSTPSSLALTSASRIRERSESLDPDSSMDTTLILKDTEAVMAFLEAKLREDNKTDEGPDTPSYNRDNSISPESDVDTASTISLVTGETERKSTQKRKSFTSLYKDRCSTGSPSKDVTKSSSSGAREKMEKKTKSRSTDVGSRADGRKFVQSSGRIRQPSVDLTDDDQTSSVPHSAISDIMSSDQETYSCKPHGRTPLTSADEHVHSKLEGSKVTKSKTSPVVSGSSSKSTTLPRPRPTRTSLLRRARLGEASDSELADADKASVASEVSTTSSTSKPPTGRRNISRIDLLAQPRRTRLGSLSARSDSEATISRSSASSRTAEAIIRSGARLVPSDKFSPRIRANSISRLSDSKVKSMTSAHGSASVNSRWRRFPTDYASTSEDEFGSNRNSPKHTRLRTSPALKTTRLQSAGSAMPTSSSFKHRIKEQEDYIRDWTAHREEIARISQDLALIAREINDVAGEIDSVTSSGTAPSTTVSTAATTPGSAIDTREELVDRVFDESLNFRKIPPLVHSKTPEGNNGRSGDPRPQAAEPPDHLTITRRRTWSRDEVMGDNLLLSSVFQFSKKIRQSIDKTAGKIRILFKDKDRNWDDIESKLRAESEVPIVKTSSMEISSILQELKRVEKQLQAINAMIDPDGTLEALNNMGFPSAMLPSPPKQKSSPVNNHHSPGQTPTLGQPEARALHPAAVSAAAEFENAESEADFSIHFNRFNPDGEEEDVTVQE

SEQ ID NO: 1223 - protein, 1460 aa, Homo sapiens
MSLTSWFLVSSGGTRHRLPREMIFVGRDDCELMLQSRSVDKQHAVINYDASTDEHLVKDLGSLNGTFVNDVRIPEQTYITLKLEDKLRFGYDTNLFTVVQGEMRVPEEALKHEKFTIQLQLSQKSSESELSKSASAKSIDSKVADAATEVQHKTTEALKSEEKAMDISAMPRGTPLYGQPSWWGDDEVDEKRAFKTNGKPEEKNHEAGTSGCGIDAKQVEEQSAAANEEVLFPFCREPSYFEIPTKEFQQPSQITESTIHEIPTKDTPSSHITGAGHASFTIEFDDSTPGKVTIRDHVTKFTSDQRHKSKKSSPGTQDLLGIQTGMMAPENKVADWLAQNNPPQMLWERTEEDSKSIKSDVPVYLKRLKGNKHDDGTQSDSENAGAHRRCSKRATLEEHLRRHHSEHKKLQKVQATEKHQDQAVVFGVDDNQDYNRPVINEKHKDLIKDWALSSAAAVMEERKPLTTSGFHHSEEGTSSSGSKRWVSQWASLAANHTRHDQEERIMEFSAPLPLENETEISESGMTVRSTGSATSLASQGERRRRTLPQLPNEEKSLESHRAKVVTQRSEIGEKQDTELQEKETPTQVYQKDKQDADRPLSKMNRAVNGETLKTGGDNKTLLHLGSSAPGKEKSETDKETSLVKQTLAKLQQQEQREEAQWTPTKLSSKNVSGQTDKCREETFKQESQPPEKNSGHSTSKGDRVAQSESKRRKAEEILKSQTPKGGDKKESSKSLVRQGSFTIEKPSPNIPIELIPHINKQTSSTPSSLALTSASRIRERSESLDPDSSMDTTLILKDTEAVMAFLEAKLREDNKTDEGPDTPSYNRDNSISPESDVDTASTISLVTGETERKSTQKRKSFTSLYKDRCSTGSPSKDVTKSSSSGAREKMEKKTKSRSTDVGSRADGRKFVQSSGRIRQPSVDLTDDDQTSSVPHSAISDIMSSDQETYSCKPHGRTPLTSADEHVHSKLEGSKVTKSKTSPVVSGSSSKSTTLPRPRPTRTSLLRRARLGEASDSELADADKASVASEVSTTSSTSKPPTGRRNISRIDLLAQPRRTRLGSLSARSDSEATISRSSASSRTAEAIIRSGARLVPSDKFSPRIRANSISRLSDSKVKSMTSAHGSASALKTTRLQSAGSAMPTSSSFKHRIKEQEDYIRDWTAHREEIARISQDLALIAREINDVAGEIDSVTSSGTAPSTTVSTAATTPGSAIDTREEVGDLHGEMHKLVDRVFDESLNFRKIPPLVHSKTPEGNNGRSGDPRPQAAEPPDHLTITRRRTWSRDEVMGDNLLLSSVFQFSKKIRQSIDKTAGKIRILFKDKDRNWDDIESKLRAESEVPIVKTSSMEISSILQELKRVEKQLQAINAMIDPDGTLEALNNMGFPSAMLPSPPKQKSSPVNNHHSPGQTPTLGQPEARALHPAAVSAAAEFENAESEADFSIHFNRFNPDGEEEDVTVQE

SEQ ID NO: 1224 - protein, 1486 aa, Homo sapiens
MSLTSWFLVSSGGTRHRLPREMIFVGRDDCELMLQSRSVDKQHAVINYDASTDEHLVKDLGSLNGTFVNDVRIPEQTYITLKLEDKLRFGYDTNLFTVVQGEMRVPEEALKHEKFTIQLQLSQKSSESELSKSASAKSIDSKVADAATEVQHKTTEALKSEEKAMDISAMPRGTPLYGQPSWWGDDEVDEKRAFKTNGKPEEKNHEAGTSGCGIDAKQVEEQSAAANEEVLFPFCREPSYFEIPTKEFQQPSQITESTIHEIPTKDTPSSHITGAGHASFTIEFDDSTPGKVTIRDHVTKFTSDQRHKSKKSSPGTQDLLGIQTGMMAPENKVADWLAQNNPPQMLWERTEEDSKSIKSDVPVYLKRLKGNKHDDGTQSDSENAGAHRRCSKRATLEEHLRRHHSEHKKLQKVQATEKHQDQAVVFGVDDNQDYNRPVINEKHKDLIKDWALSSAAAVMEERKPLTTSGFHHSEEGTSSSGSKRWVSQWASLAANHTRHDQEERIMEFSAPLPLENETEISESGMTVRSTGSATSLASQGERRRRTLPQLPNEEKSLESHRAKVVTQRSEIGEKQDTELQEKETPTQVYQKDKQDADRPLSKMNRAVNGETLKTGGDNKTLLHLGSSAPGKEKSETDKETSLVKQTLAKLQQQEQREEAQWTPTKLSSKNVSGQTDKCREETFKQESQPPEKNSGHSTSKGDRVAQSESKRRKAEEILKSQTPKGGDKKESSKSLVRQGSFTIEKPSPNIPIELIPHINKQTSSTPSSLALTSASRIRERSESLDPDSSMDTTLILKDTEAVMAFLEAKLREDNKTDEGPDTPSYNRDNSISPESDVDTASTISLVTGETERKSTQKRKSFTSLYKDRCSTGSPSKDVTKSSSSGAREKMEKKTKSRSTDVGSRADGRKFVQSSGRIRQPSVDLTDDDQTSSVPHSAISDIMSSDQETYSCKPHGRTPLTSADEHVHSKLEGSKVTKSKTSPVVSGSSSKSTTLPRPRPTRTSLLRRARLGEASDSELADADKASVASEVSTTSSTSKPPTGRRNISRIDLLAQPRRTRLGSLSARSDSEATISRSSASSRTAEAIIRSGARLVPSDKFSPRIRANSISRLSDSKVKSMTSAHGSASVNSRWRRFPTDYASTSEDEFGSNRNSPKHTRLRTSPALKTTRLQSAGSAMPTSSSFKHRIKEQEDYIRDWTAHREEIARISQDLALIAREINDVAGEIDSVTSSGTAPSTTVSTAATTPGSAIDTREELVDRVFDESLNFRKIPPLVHSKTPEGNNGRSGDPRPQAAEPPDHLTITRRRTWSRDEVMGDNLLLSSVFQFSKKIRQSIDKTAGKIRILFKDKDRNWDDIESKLRAESEVPIVKTSSMEISSILQELKRVEKQLQAINAMIDPDGTLEALNNMGFPSAMLPSPPKQKSSPVNNHHSPGQTPTLGQPEARALHPAAVSAAAEFENAESEADFSIHFNRFNPDGEEEDVTVQE

SEQ ID NO: 1225 - protein, 485 aa, Homo sapiens
MRKRAPQSEMAPAGVSLRATILCLLAWAGLAAGDRVYIHPFHLVIHNESTCEQLAKANAGKPKDPTFIPAPIQAKTSPVDEKALQDQLVLVAAKLDTEDKLRAAMVGMLANFLGFRIYGMHSELWGVVHGATVLSPTAVFGTLASLYLGALDHTADRLQAILGVPWKDKNCTSRLDAHKVLSALQAVQGLLVAQGRADSQAQLLLSTVVGVFTAPGLHLKQPFVQGLALYTPVVLPRSLDFTELDVAAEKIDRFMQAVTGWKTGCSLMGASVDSTLAFNTYVHFQGKMKGFSLLAEPQEFWVDNSTSVSVPMLSGMGTFQHWSDIQDNFSVTQVPFTESACLLLIQPHYASDLDKVEGLTFQQNSLNWMKKLSPRTIHLTMPQLVLQGSYDLQDLLAQAELPAILHTELNLQKLSNDRIRVGEVLNSIFFELEADEREPTESTQQLNKPEVLEVTLNRPFLFAVYDQSATALHFLGRVANPLSTA

SEQ ID NO: 1226 - protein, 647 aa, Homo sapiens
MAAILGDTIMVAKGLVKLTQAAVETHLQHLGIGGELIMAARALQSTAVEQIGMFLGKVQGQDKHEEYFAENFGGPEGEFHFSVPHAAGASTDFSSASAPDQSAPPSLGHAHSEGPAPAYVASGPFREAGFPGQASSPLGRANGRLFANPRDSFSAMGFQRRFFHQDQSPVGGLTAEDIEKARQAKARPENKQHKQTLSEHARERKVPVTRIGRLANFGGLAVGLGFGALAEVAKKSLRSEDPSGKKAVLGSSPFLSEANAERIVRTLCKVRGAALKLGQMLSIQDDAFINPHLAKIFERVRQSADFMPLKQMMKTLNNDLGPNWRDKLEYFEERPFAAASIGQVHLARMKGGREVAMKIQYPGVAQSINSDVNNLMAVLNMSNMLPEGLFPEHLIDVLRRELALECDYQREAACARKFRDLLKGHPFFYVPEIVDELCSPHVLTTELVSGFPLDQAEGLSQEIRNEICYNILVLCLRELFEFHFMQTDPNWSNFFYDPQQHKVALLDFGATREYDRSFTDLYIQIIRAAADRDRETVRAKSIEMKFLTGYEVKVMEDAHLDAILILGEAFASDEPFDFGTQSTTEKIHNLIPVMLRHRLVPPPEETYSLHRKMGGSFLICSKLKARFPCKAMFEEAYSNYCKRQAQQ

SEQ ID NO: 1227 - protein, 595 aa, Homo sapiens
MFLGKVQGQDKHEEYFAENFGGPEGEFHFSVPHAAGASTDFSSASAPDQSAPPSLGHAHSEGPAPAYVASGPFREAGFPGQASSPLGRANGRLFANPRDSFSAMGFQRRFFHQDQSPVGGLTAEDIEKARQAKARPENKQHKQTLSEHARERKVPVTRIGRLANFGGLAVGLGFGALAEVAKKSLRSEDPSGKKAVLGSSPFLSEANAERIVRTLCKVRGAALKLGQMLSIQDDAFINPHLAKIFERVRQSADFMPLKQMMKTLNNDLGPNWRDKLEYFEERPFAAASIGQVHLARMKGGREVAMKIQYPGVAQSINSDVNNLMAVLNMSNMLPEGLFPEHLIDVLRRELALECDYQREAACARKFRDLLKGHPFFYVPEIVDELCSPHVLTTELVSGFPLDQAEGLSQEIRNEICYNILVLCLRELFEFHFMQTDPNWSNFFYDPQQHKVALLDFGATREYDRSFTDLYIQIIRAAADRDRETVRAKSIEMKFLTGYEVKVMEDAHLDAILILGEAFASDEPFDFGTQSTTEKIHNLIPVMLRHRLVPPPEETYSLHRKMGGSFLICSKLKARFPCKAMFEEAYSNYCKRQAQQ

SEQ ID NO: 1228 - protein, 644 aa, Homo sapiens
MAVYCYALNSLVIMNSANEMKSGGGPGPSGSETPPPPRRAVLSPGSVFSPGRGASFLFPPAESLSPEEPRSPGGWRSGRRRLNSSSGSGSGSSGSSVSSPSWAGRLRGDRQQVVAAGTLSPPGPEEAKRKLRILQRELQNVQVNQKVGMFEAHIQAQSSAIQAPRSPRLGRARSPSPCPFRSSSQPPGRVLVQGARSEERRTKSWGEQCPETSGTDSGRKGGPSLCSSQVKKGMPPLPGRAAPTGSEAQGPSAFVRMEKGIPASPRCGSPTAMEIDKRGSPTPGTRSCLAPSLGLFGASLTMATEVAARVTSTGPHRPQDLALTEPSGRARELEDLQPPEALVERQGQFLGSETSPAPERGGPRDGEPPGKMGKGYLPCGMPGSGEPEVGKRPEETTVSVQSAESSDSLSWSRLPRALASVGPEEARSGAPVGGGRWQLSDRVEGGSPTLGLLGGSPSAQPGTGNVEAGIPSGRMLEPLPCWDAAKDLKEPQCPPGDRVGVQPGNSRVWQGTMEKAGLAWTRGTGVQSEGTWESQRQDSDALPSPELLPQDPDKPFLRKACSPSNIPAVIITDMGTQEDGALEETQGSPRGNLPLRKLSSSSASSTGFSSSYEDSEEDISSDPERTLDPNSAFLHTLDQQKPRV

SEQ ID NO: 1229 - protein, 1172 aa, Homo sapiens
MVWRLVLLALWVWPSTQAGHQDKDTTFDLFSISNINRKTIGAKQFRGPDPGVPAYRFVRFDYIPPVNADDLSKITKIMRQKEGFFLTAQLKQDGKSRGTLLALEGPGLSQRQFEIVSNGPADTLDLTYWIDGTRHVVSLEDVGLADSQWKNVTVQVAGETYSLHVGCDLIDSFALDEPFYEHLQAEKSRMYVAKGSARESHFRGLLQNVHLVFENSVEDILSKKGCQQGQGAEINAISENTETLRLGPHVTTEYVGPSSERRPEVCERSCEELGNMVQELSGLHVLVNQLSENLKRVSNDNQFLWELIGGPPKTRNMSACWQDGRFFAENETWVVDSCTTCTCKKFKTICHQITCPPATCASPSFVEGECCPSCLHSVDGEEGWSPWAEWTQCSVTCGSGTQQRGRSCDVTSNTCLGPSIQTRACSLSKCDTRIRQDGGWSHWSPWSSCSVTCGVGNITRIRLCNSPVPQMGGKNCKGSGRETKACQGAPCPIDGRWSPWSPWSACTVTCAGGIRERTRVCNSPEPQYGGKACVGDVQERQMCNKRSCPVDGCLSNPCFPGAQCSSFPDGSWSCGSCPVGFLGNGTHCEDLDECALVPDICFSTSKVPRCVNTQPGFHCLPCPPRYRGNQPVGVGLEAAKTEKQVCEPENPCKDKTHNCHKHAECIYLGHFSDPMYKCECQTGYAGDGLICGEDSDLDGWPNLNLVCATNATYHCIKDNCPHLPNSGQEDFDKDGIGDACDDDDDNDGVTDEKDNCQLLFNPRQADYDKDEVGDRCDNCPYVHNPAQIDTDNNGEGDACSVDIDGDDVFNERDNCPYVYNTDQRDTDGDGVGDHCDNCPLVHNPDQTDVDNDLVGDQCDNNEDIDDDGHQNNQDNCPYISNANQADHDRDGQGDACDPDDDNDGVPDDRDNCRLVFNPDQEDLDGDGRGDICKDDFDNDNIPDIDDVCPENNAISETDFRNFQMVPLDPKGTTQIDPNWVIRHQGKELVQTANSDPGIAVGFDEFGSVDFSGTFYVNTDRDDDYAGFVFGYQSSSRFYVVMWKQVTQTYWEDQPTRAYGYSGVSLKVVNSTTGTGEHLRNALWHTGNTPGQVRTLWHDPRNIGWKDYTAYRWHLTHRPKTGYIRVLVHEGKQVMADSGPIYDQTYAGGRLGLFVFSQEMVYFSDLKYECRDI

SEQ ID NO: 1230 - protein, 337 aa, Homo sapiens
MGAAGSSALARFVLLAQSRPGWLGVAALGLTAVALGAVAWRRAWPTRRRRLLQQVGTVAQLWIYPVKSCKGVPVSEAECTAMGLRSGNLRDRFWLVINQEGNMVTARQEPRLVLISLTCDGDTLTLSAAYTKDLLLPIKTPTTNAVHKCRVHGLEIEGRDCGEATAQWITSFLKSQPYRLVHFEPHMRPRRPHQIADLFRPKDQIAYSDTSPFLILSEASLADLNSRLEKKVKATNFRPNIVISGCDVYAEDSWDELLIGDVELKRVMACSRCILTTVDPDTGVMSRKEPLETLKSYRQCDPSERKLYGKSPLFGQYFVLENPGTIKVGDPVYLLGQ

SEQ ID NO: 1231 - protein, 485 aa, Homo sapiens
MGRYSGKTCRLLFMLVLTVAFFVAELVSGYLGNSIALLSDSFNMLSDLISLCVGLSAGYIARRPTRGFSATYGYARAEVVGALSNAVFLTALCFTIFVEAVLRLARPERIDDPELVLIVGVLGLLVNVVGLLIFQDCAAWFACCLRGRSRRLQQRQQLAEGCVPGAFGGPQGAEDPRRAADPTAPGSDSAVTLRGTSVERKREKGATVFANVAGDSFNTQNEPEDMMKKEKKSEALNIRGVLLHVMGDALGSVVVVITAIIFYVLPLKSEDPCNWQCYIDPSLTVLMVIIILSSAFPLIKETAAILLQMVPKGVNMEELMSKLSAVPGISSVHEVHIWELVSGKIIATLHIKYPKDRGYQDASTKIREIFHHAGIHNVTIQFENVDLKEPLEQKDLLLLCNSPCISKGCAKQLCCPPGALPLAHVNGCAEHNGGPSLDTYGSDGLSRRDAREVAIEVSLDSCLSDHGQSLNKTQEDQCYVNRTHF

SEQ ID NO: 1232 - protein, 554 aa, Homo sapiens
MPTVDDILEQVGESGWFQKQAFLILCLLSAAFAPICVGIVFLGFTPDHHCQSPGVAELSQRCGWSPAEELNYTVPGLGPAGEAFLGQCRRYEVDWNQSALSCVDPLASLATNRSHLPLGPCQDGWVYDTPGSSIVTEFNLVCADSWKLDLFQSCLNAGFLFGSLGVGYFADRFGRKLCLLGTVLVNAVSGVLMAFSPNYMSMLLFRLLQGLVSKGNWMAGYTLITEFVGSGSRRTVAIMYQMAFTVGLVALTGLAYALPHWRWLQLAVSLPTFLFLLYYWCVPESPRWLLSQKRNTEAIKIMDHIAQKNGKLPPADLKMLSLEEDVTEKLSPSFADLFRTPRLRKRTFILMYLWFTDSVLYQGLILHMGATSGNLYLDFLYSALVEIPGAFIALITIDRVGRIYPMAMSNLLAGAACLVMIFISPDLHWLNIIIMCVGRMGITIAIQMICLVNAELYPTFVRNLGVMVCSSLCDIGGIITPFIVFRLREVWQALPLILFAVLGLLAAGVTLLLPETKGVALPETMKDAENLGRKAKPKENTIYLKVQTSEPSGT

SEQ ID NO: 1233 - protein, 273 aa, Homo sapiens
MRAAGVGLVDCHCHLSAPDFDRDLDDVLEKAKKANVVALVAVAEHSGEFEKIMQLSERYNGFVLPCLGVHPVQGLPPEDQRSVTLKDLDVALPIIENYKDRLLAIGEVGLDFSPRFAGTGEQKEEQRQVLIRQIQLAKRLNLPVNVHSRSAGRPTINLLQEQGAEKVLLHAFDGRPSVAMEGVRAGYFFSIPPSIIRSGQQKLVKQLPLTSICLETDSPALGPEKQVRNEPWNISISAEYIAQVKGISVEEVIEVTTQNALKLFPKLRHLLQK

SEQ ID NO: 1234 - protein, 274 aa, Homo sapiens
MRAAGVGLVDCHCHLSAPDFDRDLDDVLEKAKKANVVALVAVAEHSGEFEKIMQLSERYNGFVLPCLGVHPVQGLPPEDQRSVTLKDLDVALPIIENYKDRLLAIGEVGLDFSPRFAGTGEQKEEQRQVLIRQIQLAKRLNLPVNVHSRSAGRPTINLLQEQGAEKVLLHAFDGRPSVAMEGVRAGYFFSIPPSIIRSGQKQKLVKQLPLTSICLETDSPALGPEKQVRNEPWNISISAEYIAQVKGISVEEVIEVTTQNALKLFPKLRHLLQK

SEQ ID NO: 1235 - protein, 467 aa, Homo sapiens
MALHPRRVRLKPWLVAQVDSGLYPGLIWLHRDSKRFQIPWKHATRHSPQQEEENTIFKAWAVETGKYQEGVDDPDPAKWKAQLRCALNKSREFNLMYDGTKEVPMNPVKIYQVCDIPQPQGSIINPGSTGSAPWDEKDNDVDEEDEEDELDQSQHHVPIQDTFPFLNINGSPMAPASVGNCSVGNCSPEAVWPKTEPLEMEVPQAPIQPFYSSPELWISSLPMTDLDIKFQYRGKEYGQTMTVSNPQGCRLFYGDLGPMPDQEELFGPVSLEQVKFPGPEHITNEKQKLFTSKLLDVMDRGLILEVSGHAIYAIRLCQCKVYWSGPCAPSLVAPNLIERQKKVKLFCLETFLSDLIAHQKGQIEKQPPFEIYLCFGEEWPDGKPLERKLILVQVIPVVARMIYEMFSGDFTRSFDSGSVRLQISTPDIKDNIVAQLKQLYRILQTQESWQPMQPTPSMQLPPALPPQ

SEQ ID NO: 1236 - protein, 839 aa, Homo sapiens
MGGKAGNKGAVGIRFQFHSTSFCFICSHLTAGQSQVKERNEDYKEITQKLCFPMGRNVFSHDYVFWCGDFNYRIDLTYEEVFYFVKRQDWKKLLEFDQLQLQKSSGKIFKDFHEGAINFGPTYKYDVGSAAYDTSDKCRTPAWTDRVLWWRKKHPFDKTAGELNLLDSDLDVDTKVRHTWSPGALQYYGRAELQASDHRPVLAIVEVEVQEVDVGARERVFQEVSSFQGPLDATVVVNLQSPTLEEKNEFPEDLRTELMQTLGSYGTIVLVRINQGQMLVTFADSHSALSVLDVDGMKVKGRAVKIRPKTKDWLKGLREEIIRKRDSMAPVSPTANSCLLEENFDFTSLDYESEGDILEDDEDYLVDEFNQPGVSDSELGGDDLSDVPGPTALAPPSKSPALTKKKQHPTYKDDADLVELKRELEAVGEFRHRSPSRSLSVPNRPRPPQPPQRPPPPTGLMVKKSASDASISSGTHGQYSILQTARLLPGAPQQPPKARTGISKPYNVKQIKTTNAQEAEAAIRCLLEARGGASEEALSAVAPRDLEASSEPEPTPGAAKPETPQAPPLLPRRPPPRVPAIKKPTLRRTGKPLSPEEQFEQQTVHFTIGPPETSVEAPPVVTAPRVPPVPKPRTFQPGKAAERPSHRKPASDEAPPGAGASVPPPLEAPPLVPKVPPRRKKSAPAAFHLQVLQSNSQLLQGLTYNSSDSPSGHPPAAGTVFPQGDFLSTSSATSPDSDGTKAMKPEAAPLLGDYQDPFWNLLHHPKLLNNTWLSKSSDPLDSGTRSPKRDPIDPVSAGASAAKAELPPDHEHKTLGHWVTISDQEKRTALQVFDPLAKT

SEQ ID NO: 1237 - protein, 884 aa, Homo sapiens
MEGDGVPWGSEPVSGPGPGGGGMIRELCRGFGRYRRYLGRLRQNLRETQKFFRDIKCSHNHTCLSSLTGGGGAERGPAGDVAETGLQAGQLSCISFPPKEEKYLQQIVDCLPCILILGQDCNVKCQLLNLLLGVQVLPTTKLGSEESCKLRRLRFTYGTQTRVSLALPGQYELVHTLVAHQGNWETIPEEDLEVQENNEDAAHVLAELEVTMHHALLQEVDVVVAPCQGLRPTVDVLGDLVNDFLPVITYALHKDELSERDEQELQEIRKYFSFPVFFFKVPKLGSEIIDSSTRRMESERSPLYRQLIDLGYLSSSHWNCGAPGQDTKAQSMLVEQSEKLRHLSTFSHQVLQTRLVDAAKALNLVHCHCLDIFINQAFDMQRDLQITPKRLEYTRKKENELYESLMNIANRKQEEMKDMIVETLNTMKEELLDDATNMEFKDVIVPENGEPVGTREIKCCIRQIQELIISRLNQAVANKLISSVDYLRESFVGTLERCLQSLEKSQDVSVHITSNYLKQILNAAYHVEVTFHSGSSVTRMLWEQIKQIIQRITWVSPPAITLEWKRKVAQEAIESLSASKLAKSICSQFRTRLNSSHEAFAASLRQLEAGHSGRLEKTEDLWLRVRKDHAPRLARLSLESCSLQDVLLHRKPKLGQELGRGQYGVVYLCDNWGGHFPCALKSVVPPDEKHWNDLALEFHYMRSLPKHERLVDLHGSVIDYNYGGGSSIAVLLIMERLHRDLYTGLKAGLTLETRLQIALDVVEGIRFLHSQGLVHRDIKLKNVLLDKQNRAKITDLGFCKPEAMMSGSIVGTPIHMAPELFTGARPERLPVFDEECWQLMEACWDGDPLKRPLLGIVQPMLQGIMNRLCKSNSEQPNRGLDDST

SEQ ID NO: 1238 - protein, 929 aa, Homo sapiens
MEGDGVPWGSEPVSGPGPGGGGMIRELCRGFGRYRRYLGRLRQNLRETQKFFRDIKCSHNHTCLSSLTGGGGAERGPAGDVAETGLQAGQLSCISFPPKEEKYLQQIVDCLPCILILGQDCNVKCQLLNLLLGVQVLPTTKLGSEESCKLRRLRFTYGTQTRVSLALPGQYELVHTLVAHQGNWETIPEEDLEVQENNEDAAHVLAELEVTMHHALLQEVDVVVAPCQGLRPTVDVLGDLVNDFLPVITYALHKDELSERDEQELQEIRKYFSFPVFFFKVPKLGSEIIDSSTRRMESERSPLYRQLIDLGYLSSSHWNCGAPGQDTKAQSMLVEQSEKLRHLSTFSHQVLQTRLVDAAKALNLVHCHCLDIFINQAFDMQRDLQITPKRLEYTRKKENELYESLMNIANRKQEEMKDMIVETLNTMKEELLDDATNMEFKDVIVPENGEPVGTREIKCCIRQIQELIISRLNQAVANKLISSVDYLRESFVGTLERCLQSLEKSQDVSVHITSNYLKQILNAAYHVEVTFHSGSSVTRMLWEQIKQIIQRITWVSPPAITLEWKRKVAQEAIESLSASKLAKSICSQFRTRLNSSHEAFAASLRQLEAGHSGRLEKTEDLWLRVRKDHAPRLARLSLESCSLQDVLLHRKPKLGQELGRGQYGVVYLCDNWGGHFPCALKSVVPPDEKHWNDLALEFHYMRSLPKHERLVDLHGSVIDYNYGGGSSIAVLLIMERLHRDLYTGLKAGLTLETRLQIALDVVEGIRFLHSQGLVHRDIKLKNVLLDKQNRAKITDLGFCKPEAMMSGSIVGTPIHMAPELFTGKYDNSVDVYAFGILFWYICSGSVKLPEAFERCASKDHLWNNVRRGARPERLPVFDEECWQLMEACWDGDPLKRPLLGIVQPMLQGIMNRLCKSNSEQPNRGLDDST

SEQ ID NO: 1239 - protein, 713 aa, Homo sapiens
MRLLVAPLLLAWVAGATAAVPVVPWHVPCPPQCACQIRPWYTPRSSYREATTVDCNDLFLTAVPPALPAGTQTLLLQSNSIVRVDQSELGYLANLTELDLSQNSFSDARDCDFHALPQLLSLHLEENQLTRLEDHSFAGLASLQELYLNHNQLYRIAPRAFSGLSNLLRLHLNSNLLRAIDSRWFEMLPNLEILMIGGNKVDAILDMNFRPLANLRSLVLAGMNLREISDYALEGLQSLESLSFYDNQLARVPRRALEQVPGLKFLDLNKNPLQRVGPGDFANMLHLKELGLNNMEELVSIDKFALVNLPELTKLDITNNPRLSFIHPRAFHHLPQMETLMLNNNALSALHQQTVESLPNLQEVGLHGNPIRCDCVIRWANATGTRVRFIEPQSTLCAEPPDLQRLPVREVPFREMTDHCLPLISPRSFPPSLQVASGESMVLHCRALAEPEPEIYWVTPAGLRLTPAHAGRRYRVYPEGTLELRRVTAEEAGLYTCVAQNLVGADTKTVSVVVGRALLQPGRDEGQGLELRVQETHPYHILLSWVTPPNTVSTNLTWSSASSLRGQGATALARLPRGTHSYNITRLLQATEYWACLQVAFADAHTQLACVWARTKEATSCHRALGDRPGLIAILALAVLLLAAGLAAHLGTGQPRKGVGGRRPLPPAWAFWGWSAPSVRVVSAPLVLPWNPGRKLPRSSEGETLLPPLSQNS

SEQ ID NO: 1240 - protein, 235 aa, Homo sapiens
MRTQVYEGLCKNYFSLAVLQRDRIKLLFFDILVFLSVFLLFLLFLVDIMANNTTSLGSPWPENFWEDLIMSFTVSMAIGLVLGGFIWAVFICLSRRRRASAPISQWSSSRRSRSSYTHGLNRTGFYRHSGCERRSNLSLASLTFQRQASLEQANSFPRKSSFRASTFHPFLQCPPLPVETESQLVTLPSSNISPTISTSHSLSRPDYWSSNSLRVGLSTPPPPAYESIIKAFPDS

SEQ ID NO: 1241 - protein, 600 aa, Homo sapiens
MSRVAKYRRQVSEDPDIDSLLETLSPEEMEELEKELDVVDPDGSVPVGLRQRNQTEKQSTGVYNREAMLNFCEKETKKLMQREMSMDESKQVETKTDAKNGEERGRDASKKALGPRRDSDLGKEPKRGGLKKSFSRDRDEAGGKSGEKPKEEKIIRGIDKGRVRAAVDKKEAGKDGRGEERAVATKKEEEKKGSDRNTGLSRDKDKKREEMKEVAKKEDDEKVKGERRNTDTRKEGEKMKRAGGNTDMKKEDEKVKRGTGNTDTKKDDEKVKKNEPLHEKEAKDDSKTKTPEKQTPSGPTKPSEGPAKVEEEAAPSIFDEPLERVKNNDPEMTEVNVNNSDCITNEILVRFTEALEFNTVVKLFALANTRADDHVAFAIAIMLKANKTITSLNLDSNHITGKGILAIFRALLQNNTLTELRFHNQRHICGGKTEMEIAKLLKENTTLLKLGYHFELAGPRMTVTNLLSRNMDKQRQKRLQEQRQAQEAKGEKKDLLEVPKAGAVAKGSPKPSPQPSPKPSPKNSPKKGGAPAAPPPPPPPLAPPLIMENLKNSLSPATQRKMGDKVLPAQEKNSRDQLLAAIRSSNLKQLKKVEVPKLLQ

SEQ ID NO: 1242 - protein, 127 aa, Homo sapiens
MTAAATATVLKEGVLEKRSGGLLQLWKRKRCVLTERGLQLFEAKGTGGRPKELSFARIKAVECVESTGRHIYFTLVTEGGGEIDFRCPLEDPGWNAQITLGLVKFKNQQAIQTVRARQSLGTGTLVS

SEQ ID NO: 1243 - protein, 1231 aa, Homo sapiens
MRLLAKIICLMLWAICVAEDCNELPPRRNTEILTGSWSDQTYPEGTQAIYKCRPGYRSLGNVIMVCRKGEWVALNPLRKCQKRPCGHPGDTPFGTFTLTGGNVFEYGVKAVYTCNEGYQLLGEINYRECDTDGWTNDIPICEVVKCLPVTAPENGKIVSSAMEPDREYHFGQAVRFVCNSGYKIEGDEEMHCSDDGFWSKEKPKCVEISCKSPDVINGSPISQKIIYKENERFQYKCNMGYEYSERGDAVCTESGWRPLPSCEEKSCDNPYIPNGDYSPLRIKHRTGDEITYQCRNGFYPATRGNTAKCTSTGWIPAPRCTLKPCDYPDIKHGGLYHENMRRPYFPVAVGKYYSYYCDEHFETPSGSYWDHIHCTQDGWSPAVPCLRKCYFPYLENGYNQNHGRKFVQGKSIDVACHPGYALPKAQTTVTCMENGWSPTPRCIRVKTCSKSSIDIENGFISESQYTYALKEKAKYQCKLGYVTADGETSGSITCGKDGWSAQPTCIKSCDIPVFMNARTKNDFTWFKLNDTLDYECHDGYESNTGSTTGSIVCGYNGWSDLPICYERECELPKIDVHLVPDRKKDQYKVGEVLKFSCKPGFTIVGPNSVQCYHFGLSPDLPICKEQVQSCGPPPELLNGNVKEKTKEEYGHSEVVEYYCNPRFLMKGPNKIQCVDGEWTTLPVCIVEESTCGDIPELEHGWAQLSSPPYYYGDSVEFNCSESFTMIGHRSITCIHGVWTQLPQCVAIDKLKKCKSSNLIILEEHLKNKKEFDHNSNIRYRCRGKEGWIHTVCINGRWDPEVNCSMAQIQLCPPPPQIPNSHNMTTTLNYRDGEKVSVLCQENYLIQEGEEITCKDGRWQSIPLCVEKIPCSQPPQIEHGTINSSRSSQESYAHGTKLSYTCEGGFRISEENETTCYMGKWSSPPQCEGLPCKSPPEISHGVVAHMSDSYQYGEEVTYKCFEGFGIDGPAIAKCLGEKWSHPPSCIKTDCLSLPSFENAIPMGEKKDVYKAGEQVTYTCATYYKMDGASNVTCINSRWTGRPTCRDTSCVNPPTVQNAYIVSRQMSKYPSGERVRYQCRSPYEMFGDEEVMCLNGNWTEPPQCKDSTGKCGPPPPIDNGDITSFPLSVYAPASSVEYQCQNLYQLEGNKRITCRNGQWSEPPKCLHPCVISREIMENYNIALRWTAKQKLYSRTGESVEFVCKRGYRLSSRSHTLRTTCWDGKLEYPTCAKR

SEQ ID NO: 1244 - protein, 905 aa, Homo sapiens
MSREEKQKLGNQVLEMFDHAYGNYMEHAYPADELMPLTCRGRVRGQEPSRGDVDDALGKFSLTLIDSLDTLVVLNKTKEFEDAVRKVLRDVNLDNDVVVSVFETNIRVLGGLLGGHSLAIMLKEKGEYMQWYNDELLQMAKQLGYKLLPAFNTTSGLPYPRINLKFGIRKPEARTGTETDTCTACAGTLILEFAALSRFTGATIFEEYARKALDFLWEKRQRSSNLVGVTINIHTGDWVRKDSGVGAGIDSYYEYLLKAYVLLGDDSFLERFNTHYDAIMRYISQPPLLLDVHIHKPMLNARTWMDALLAFFPGLQVLKGDIRPAIETHEMLYQVIKKHNFLPEAFTTDFRVHWAQHPLRPEFAESTYFLYKATGDPYYLEVGKTLIENLNKYARVPCGFAAMKDVRTGSHEDRMDSFFLAEMFKYLYLLFADKEDIIFDIEDYIFTTEAHLLPLWLSTTNQSISKKNTTSEYTELDDSNFDWTCPNTQILFPNDPLYAQSIREPLKNVVDKSCPRGIIRVEESFRSGAKPPLRARDFMATNPEHLEILKKMGVSLIHLKDGRVQLVQHAIQAASSIDAEDGLRFMQEMIELSSQQQKEQQLPPRAVQIVSHPFFGRVVLTAGPAQFGLDLSKHKETRGFVASSKPSNGCSELTNPEAVMGKIALIQRGQCMFAEKARNIQNAGAIGGIVIDDNEGSSSDTAPLFQMAGDGKDTDDIKIPMLFLFSKEGSIILDAIREYEEVEVLLSDKAKDRAAILKGKMIPSYIINSNPEMENEEQPSSENDSQNQSGEQISSSSQEVDLVDQESSEENSLNSHPESLSLADMDNAASISPSEQTSNPTENHETTNLNGECTDLDNQLQEQSETEEDSNPNVSWGKKVQPIDSILADWNEDIEAFEMMEKDEL

SEQ ID NO: 1245 - protein, 331 aa, Homo sapiens
MRFRFGVVVPPAVAGARPELLVVGSRPELGRWEPRGAVRLRPAGTAAGDGALALQEPGLWLGEVELAAEEAAQDGAEPGRVDTFWYKFLKREPGGELSWEGNGPHHDRCCTYNENNLVDGVYCLPIGHWIEATGHTNEMKHTTDFYFNIAGHQAMHYSRILPNIWLGSCPRQVEHVTIKLKHELGITAVMNFQTEWDIVQNSSGCNRYPEPMTPDTMIKLYREEGLAYIWMPTPDMSTEGRVQMLPQAVCLLHALLEKGHIVYVHCNAGVGRSTAAVCGWLQYVMGWNLRKVQYFLMAKRPAVYIDEEALARAQEDFFQKFGKVRSSVCSL

SEQ ID NO: 1246 - protein, 526 aa, Homo sapiens
MSLVEAISLWNEGVLAADKKDWKGALDAFSAVQDPHSRICFNIGCMYTILKNMTEAEKAFTRSINRDKHLAVAYFQRGMLYYQTEKYDLAIKDLKEALIQLRGNQLIDYKILGLQFKLFACEVLYNIAFMYAKKEEWKKAEEQLALATSMKSEPRHSKIDKAMECVWKQKLYEPVVIPVGKLFRPNERQVAQLAKKDYLGKATVVASVVDQDSFSGFAPLQPQAAEPPPRPKTPEIFRALEGEAHRVLFGFVPETKEELQVMPGNIVFVLKKGNDNWATVMFNGQKGLVPCNYLEPVELRIHPQQQPQEESSPQSDIPAPPSSKAPGRPQLSPGQKQKEEPKEVKLSVPMPYTLKVHYKYTVVMKTQPGLPYSQVRDMVSKKLELRLEHTKLSYRPRDSNELVPLSEDSMKDAWGQVKNYCLTLWCENTVGDQGFPDEPKESEKADANNQTTEPQLKKGSQVEALFSYEATQPEDLEFQEGDIILVLSKVNEEWLEGECKGKVGIFPKVFVEDCATTDLESTRREV

SEQ ID NO: 1247 - protein, 1222 aa, Homo sapiens
MMFRSDRMWSCHWKWKPSPLLFLFALYIMCVPHSVWGCANCRVVLSNPSGTFTSPCYPNDYPNSQACMWTLRAPTGYIIQITFNDFDIEEAPNCIYDSLSLDNGESQTKFCGATAKGLSFNSSANEMHVSFSSDFSIQKKGFNASYIRVAVSLRNQKVILPQTSDAYQVSVAKSISIPELSAFTLCFEATKVGHEDSDWTAFSYSNASFTQLLSFGKAKSGYFLSISDSKCLLNNALPVKEKEDIFAESFEQLCLVWNNSLGSIGVNFKRNYETVPCDSTISKVIPGNGKLLLGSNQNEIVSLKGDIYNFRLWNFTMNAKILSNLSCNVKGNVVDWQNDFWNIPNLALKAESNLSCGSYLIPLPAAELASCADLGTLCQDGIIYRISVVIQNILRHPEVKVQSKVAEWLNSTFQNWNYTVYVVNISFHLSAGEDKIKVKRSLEDEPRLVLWALLVYNATNNTNLEGKIIQQKLLKNNESLDEGLRLHTVNVRQLGHCLAMEEPKGYYWPSIQPSEYVLPCPDKPGFSASRICFYNATNPLVTYWGPVDISNCLKEANEVANQILNLTADGQNLTSANITNIVEQVKRIVNKEENIDITLGSTLMNIFSNILSSSDSDLLESSSEALKTIDELAFKIDLNSTSHVNITTRNLALSVSSLLPGTNAISNFSIGLPSNNESYFQMDFESGQVDPLASVILPPNLLENLSPEDSVLVRRAQFTFFNKTGLFQDVGPQRKTLVSYVMACSIGNITIQNLKDPVQIKIKHTRTQEVHHPICAFWDLNKNKSFGGWNTSGCVAHRDSDASETVCLCNHFTHFGVLMDLPRSASQLDARNTKVLTFISYIGCGISAIFSAATLLTYVAFEKLRRDYPSKILMNLSTALLFLNLLFLLDGWITSFNVDGLCIAVAVLLHFFLLATFTWMGLEAIHMYIALVKVFNTYIRRYILKFCIIGWGLPALVVSVVLASRNNNEVYGKESYGKEKGDEFCWIQDPVIFYVTCAGYFGVMFFLNIAMFIVVMVQICGRNGKRSNRTLREEVLRNLRSVVSLTFLLGMTWGFAFFAWGPLNIPFMYLFSIFNSLQGLFIFIFHCAMKENVQKQWRQHLCCGRFRLADNSDWSKTATNIIKKSSDNLGKSLSSSSIGSNSTYLTSKSKSSSTTYFKRNSHTDSASMDKSLSKLAHADGDQTSIIPVHQVIDKVKGYCNAHSDNFYKNIIMSDTFSHSTKF

SEQ ID NO: 1248 - protein, 1250 aa, Homo sapiens
MMFRSDRMWSCHWKWKPSPLLFLFALYIMCVPHSVWGCANCRVVLSNPSGTFTSPCYPNDYPNSQACMWTLRAPTGYIIQITFNDFDIEEAPNCIYDSLSLDNGESQTKFCGATAKGLSFNSSANEMHVSFSSDFSIQKKGFNASYIRVAVSLRNQKVILPQTSDAYQVSVAKSISIPELSAFTLCFEATKVGHEDSDWTAFSYSNASFTQLLSFGKAKSGYFLSISDSKCLLNNALPVKEKEDIFAESFEQLCLVWNNSLGSIGVNFKRNYETVPCDSTISKVIPGNGKLLLGSNQNEIVSLKGDIYNFRLWNFTMNAKILSNLSCNVKGNVVDWQNDFWNIPNLALKAESNLSCGSYLIPLPAAELASCADLGTLCQATVNSPSTTPPTVTTNMPVTNRIDKQRNDGIIYRISVVIQNILRHPEVKVQSKVAEWLNSTFQNWNYTVYVVNISFHLSAGEDKIKVKRSLEDEPRLVLWALLVYNATNNTNLEGKIIQQKLLKNNESLDEGLRLHTVNVRQLGHCLAMEEPKGYYWPSIQPSEYVLPCPDKPGFSASRICFYNATNPLVTYWGPVDISNCLKEANEVANQILNLTADGQNLTSANITNIVEQVKRIVNKEENIDITLGSTLMNIFSNILSSSDSDLLESSSEALKTIDELAFKIDLNSTSHVNITTRNLALSVSSLLPGTNAISNFSIGLPSNNESYFQMDFESGQVDPLASVILPPNLLENLSPEDSVLVRRAQFTFFNKTGLFQDVGPQRKTLVSYVMACSIGNITIQNLKDPVQIKIKHTRTQEVHHPICAFWDLNKNKSFGGWNTSGCVAHRDSDASETVCLCNHFTHFGVLMDLPRSASQLDARNTKVLTFISYIGCGISAIFSAATLLTYVAFEKLRRDYPSKILMNLSTALLFLNLLFLLDGWITSFNVDGLCIAVAVLLHFFLLATFTWMGLEAIHMYIALVKVFNTYIRRYILKFCIIGWGLPALVVSVVLASRNNNEVYGKESYGKEKGDEFCWIQDPVIFYVTCAGYFGVMFFLNIAMFIVVMVQICGRNGKRSNRTLREEVLRNLRSVVSLTFLLGMTWGFAFFAWGPLNIPFMYLFSIFNSLQGLFIFIFHCAMKENVQKQWRQHLCCGRFRLADNSDWSKTATNIIKKSSDNLGKSLSSSSIGSNSTYLTSKSKSSSTTYFKRNSHTDSASMDKSLSKLAHADGDQTSIIPVHQVIDKVKGYCNAHSDNFYKNIIMSDTFSHSTKF

SEQ ID NO: 1249 - protein, 2819 aa, Homo sapiens
MSEKSGQSTKAKDGKKYATLSLFNTYKGKSLETQKTTVAARHGLQSLGKVGISRRMPPPANLPSLKAENKGNDPNVNIVPKDGTGWASKQEQHEEEKTPEVPPAQPKPGVAAPPEVAPAPKSWASNKQGGQGDGIQVNSQFQQEFPSLQAAGDQEKKEKETNDDNYGPGPSLRPPNVACWRDGGKAAGSPSSSDQDEKLPGQDESTAGTSEQNDILKVVEKRIACGPPQAKLNGQQAALASQYRAMMPPYMFQQYPRMTYPPLHGPMRFPPSLSETNKGLRGRGPPPSWASEPERPSILSASELKELDKFDNLDAEADEGWAGAQMEVDYTEQLNFSDDDEQGSNSPKENNSEDQGSKASENNENKKETDEVSNTKSSSQIPAQPSVAKVPYGKGPSFNQERGTSSHLPPPPKLLAQQHPPPDRQAVPGRPGPFPSKQQVADEDEIWKQRRRQQSEISAAVERARKRREEEERRMEEQRKAACAEKLKRLDEKLGILEKQPSPEEIREREREKEREREKELEKEQEQEREKEREKDRERQQEKEKELEKEQEKQREMEKERKQEKEKELERQKEKEKELQKMKEQEKECELEKEREKLEEKIEPREPNLEPMVEKQESENSCNKEEEPVFTRQDSNRSEKEATPVVHETEPESGSQPRPAVLSGYFKQFQKSLPPRFQRQQEQMKQQQWQQQQQQGVLPQTVPSQPSSSTVPPPPHRPLYQPMQPHPQHLASMGFDPRWLMMQSYMDPRMMSGRPAMDIPPIHPGMIPPKPLMRRDQMEGSPNSSESFEHIARSARDHAISLSEPRMLWGSDPYPHAEPQQATTPKATEEPEDVRSEAALDQEQITAAYSVEHNQLEAHPKADFIRESSEAQVQKFLSRSVEDVRPHHTDANNQSACFEAPDQKTLSAPQEERISAVESQPSRKRSVSHGSNHTQKPDEQRSEPSAGIPKVTSRCIDSKEPIERPEEKPKKEGFIRSSEGPKPEKVYKSKSETRWGPRPSSNRREEVNDRPVRRSGPIKKPVLRDMKEEREQRKEKEGEKAEKVTEKVVVKPEKTEKKDLPPPPPPPQPPAPIQPQSVPPPIQPEAEKFPSTETATLAQKPSQDTEKPLEPVSTVQVEPAVKTVNQQTMAAPVVKEEKQPEKVISKDLVIERPRPDSRPAVKKESTLPPRTYWKEARERDWFPDQGYRGRGRGEYYSRGRSYRGSYGGRGRGGRGHTRDYPQYRDNKPRAEHIPSGPLRQREESETRSESSDFEVVPKRRRQRGSETDTDSEIHESASDKDSLSKGKLPKREERPENKKPVKPHSSFKPDNHVRIDNRLLEKPYVRDDDKAKPGFLPKGEPTRRGRGGTFRRGGRDPGGRPSRPSTLRRPAYRDNQWNPRQSEVPKPEDGEPPRRHEQFIPIAADKRPPKFERKFDPARERPRRQRPTRPPRQDKPPRFRRLREREAASKSNEVVAVPTNGTVNNVAQEPVNTLGDISGNKTPDLSNQNSSDQANEEWETASESSDFNERRERDEKKNADLNAQTVVKVGENVLPPKREIAKRSFSSQRPVDRQNRRGNNGPPKSGRNFSGPRNERRSGPPSKSGKRGPFDDQPAGTTGVDLINGSSAHHQEGVPNGTGQKNSKDSTGKKREDPKPGPKKPKEKVDALSQFDLNNYASVVIIDDHPEVTVIEDPQSNLNDDGFTEVVSKKQQKRLQDEERRKKEEQVIQVWNKKNANEKGRSQTSKLPPRFAKKQATGIQQAQSSASVPPLASAPLPPSTSASVPASTSAPLPATLTPVPASTSAPVPASTLAPVLASTSAPVPASPLAPVSASASVSASVPASTSAAAITSSSAPASAPAPTPILASVSTPASVTILASASIPILASALASTSAPTPAPAASSPAAPVITAPTIPASAPTASVPLAPASASAPAPAPTPVSAPNPAPPAPAQTQAQTHKPVQNPLQTTSQSSKQPPPSIRLPSAQTPNGTDYVASGKSIQTPQSHGTLTAELWDNKVAPPAVLNDISKKLGPISPPQPPSVSAWNKPLTSFGSAPSSEGAKNGQESGLEIGTDTIQFGAPASNGNENEVVPVLSEKSADKIPEPKEQRQKQPRAGPIKAQKLPDLSPVENKEHKPGPIGKERSLKNRKVKDAQQVEPEGQEKPSPATVRSTDPVTTKETKAVSEMSTEIGTMISVSSAEYGTNAKESVTDYTTPSSSLPNTVATNNTKMEDTLVNNVPLPNTLPLPKRETIQQSSSLTSVPPTTFSLTFKMESARKAWENSPNVREKGSPVTSTAPPIATGVSSSASGPSTANYNSFSSASMPQIPVASVTPTASLSGAGTYTTSSLSTKSTTTSDPPNICKVKPQQLQTSSLPSASHFSQLSCMPSLIAQQQQNPQVYVSQSAAAQIPAFYMDTSHLFNTQHARLAPPSLAQQQGFQPGLSQPTSVQQIPIPIYAPLQGQHQAQLSLGAGPAVSQAQELFSSSLQPYRSQPAFMQSSLSQPSVVLSGTAIHNFPTVQHQELAKAQSGLAFQQTSNTQPIPILYEHQLGQASGLGGSQLIDTHLLQARANLTQASNLYSGQVQQPGQTNFYNTAQSPSALQQVTVPLPASQLSLPNFGSTGQPLIALPQTLQPPLQHTTPQAQAQSLSRPAQVSQPFRGLIPAGTQHSMIATTGKMSEMELKAFGSGIDIKPGTPPIAGRSTTPTSSPFRATSTSPNSQSSKMNSIVYQKQFQSAPATVRMTQPFPTQFAPQAKQRAEVLQSTQRFFSEQQQSKQIGGGKAQKVDSDSSKPPETLTDPPGVCQEKVEEKPPPAPSIATKPVRTGPIKPQAIKTEETKS

SEQ ID NO: 1250 - protein, 2229 aa, Homo sapiens
MFPGCPRLWVLVVLGTSWVGWGSQGTEAAQLRQFYVAAQGISWSYRPEPTNSSLNLSVTSFKKIVYREYEPYFKKEKPQSTISGLLGPTLYAEVGDIIKVHFKNKADKPLSIHPQGIRYSKLSEGASYLDHTFPAEKMDDAVAPGREYTYEWSISEDSGPTHDDPPCLTHIYYSHENLIEDFNSGLIGPLLICKKGTLTEGGTQKTFDKQIVLLFAVFDESKSWSQSSSLMYTVNGYVNGTMPDITVCAHDHISWHLLGMSSGPELFSIHFNGQVLEQNHHKVSAITLVSATSTTANMTVGPEGKWIISSLTPKHLQAGMQAYIDIKNCPKKTRNLKKITREQRRHMKRWEYFIAAEEVIWDYAPVIPANMDKKYRSQHLDNFSNQIGKHYKKVMYTQYEDESFTKHTVNPNMKEDGILGPIIRAQVRDTLKIVFKNMASRPYSIYPHGVTFSPYEDEVNSSFTSGRNNTMIRAVQPGETYTYKWNILEFDEPTENDAQCLTRPYYSDVDIMRDIASGLIGLLLICKSRSLDRRGIQRAADIEQQAVFAVFDENKSWYLEDNINKFCENPDEVKRDDPKFYESNIMSNFTLSAINGYVPESITTLGFCFDDTVQWHFCSVGTQNEILTIHFTGHSFIYGKRHEDTLTLFPMRGESVTVTMDNVGTWMLTSMNSSPRSKKLRLKFRDVKCIPDDDEDSYEIFEPPESTVMATRKMHDRLEPEDEESDADYDYQNRLAAALGIRSFRNSSLNQEEEEFNLTALALENGTEFVSSNTDIIVGSNYSSPSNISKFTVNNLAEPQKAPSHQQATTAGSPLRHLIGKNSVLNSSTAEHSSPYSEDPIEDPLQPDVTGIRLLSLGAGEFKSQEHAKHKGPKVERDQAAKHRFSWMKLLAHKVGRHLSQDTGSPSGMRPWEDLPSQDTGSPSRMRPWKDPPSDLLLLKQSNSSKILVGRWHLASEKGSYEIIQDTDEDTAVNNWLISPQNASRAWGESTPLANKPGKQSGHPKFPRVRHKSLQVRQDGGKSRLKKSQFLIKTRKKKKEKHTHHAPLSPRTFHPLRSEAYNTFSERRLKHSLVLHKSNETSLPTDLNQTLPSMDFGWIASLPDHNQNSSNDTGQASCPPGLYQTVPPEEHYQTFPIQDPDQMHSTSDPSHRSSSPELSEMLEYDRSHKSFPTDISQMSPSSEHEVWQTVISPDLSQVTLSPELSQTNLSPDLSHTTLSPELIQRNLSPALGQMPISPDLSHTTLSPDLSHTTLSLDLSQTNLSPELSQTNLSPALGQMPLSPDLSHTTLSLDFSQTNLSPELSHMTLSPELSQTNLSPALGQMPISPDLSHTTLSLDFSQTNLSPELSQTNLSPALGQMPLSPDPSHTTLSLDLSQTNLSPELSQTNLSPDLSEMPLFADLSQIPLTPDLDQMTLSPDLGETDLSPNFGQMSLSPDLSQVTLSPDISDTTLLPDLSQISPPPDLDQIFYPSESSQSLLLQEFNESFPYPDLGQMPSPSSPTLNDTFLSKEFNPLVIVGLSKDGTDYIEIIPKEEVQSSEDDYAEIDYVPYDDPYKTDVRTNINSSRDPDNIAAWYLRSNNGNRRNYYIAAEEISWDYSEFVQRETDIEDSDDIPEDTTYKKVVFRKYLDSTFTKRDPRGEYEEHLGILGPIIRAEVDDVIQVRFKNLASRPYSLHAHGLSYEKSSEGKTYEDDSPEWFKEDNAVQPNSSYTYVWHATERSGPESPGSACRAWAYYSAVNPEKDIHSGLIGPLLICQKGILHKDSNMPMDMREFVLLFMTFDEKKSWYYEKKSRSSWRLTSSEMKKSHEFHAINGMIYSLPGLKMYEQEWVRLHLLNIGGSQDIHVVHFHGQTLLENGNKQHQLGVWPLLPGSFKTLEMKASKPGWWLLNTEVGENQRAGMQTPFLIMDRDCRMPMGLSTGIISDSQIKASEFLGYWEPRLARLNNGGSYNAWSVEKLAAEFASKPWIQVDMQKEVIITGIQTQGAKHYLKSCYTTEFYVAYSSNQINWQIFKGNSTRNVMYFNGNSDASTIKENQFDPPIVARYIRISPTRAYNRPTLRLELQGCEVNGCSTPLGMENGKIENKQITASSFKKSWWGDYWEPFRARLNAQGRVNAWQAKANNNKQWLEIDLLKIKKITAIITQGCKSLSSEMYVKSYTIHYSEQGVEWKPYRLKSSMVDKIFEGNTNTKGHVKNFFNPPIISRFIRVIPKTWNQSIALRLELFGCDIY

SEQ ID NO: 1251 - protein, 2224 aa, Homo sapiens
MFPGCPRLWVLVVLGTSWVGWGSQGTEAAQLRQFYVAAQGISWSYRPEPTNSSLNLSVTSFKKIVYREYEPYFKKEKPQSTISGLLGPTLYAEVGDIIKVHFKNKADKPLSIHPQGIRYSKLSEGASYLDHTFPAEKMDDAVAPGREYTYEWSISEDSGPTHDDPPCLTHIYYSHENLIEDFNSGLIGPLLICKKGTLTEGGTQKTFDKQIVLLFAVFDESKSWSQSSSLMYTVNGYVNGTMPDITVCAHDHISWHLLGMSSGPELFSIHFNGQVLEQNHHKVSAITLVSATSTTANMTVGPEGKWIISSLTPKHLQAGMQAYIDIKNCPKKTRNLKKITREQRRHMKRWEYFIAAEEVIWDYAPVIPANMDKKYRSQHLDNFSNQIGKHYKKVMYTQYEDESFTKHTVNPNMKEDGILGPIIRAQVRDTLKIVFKNMASRPYSIYPHGVTFSPYEDEVNSSFTSGRNNTMIRAVQPGETYTYKWNILEFDEPTENDAQCLTRPYYSDVDIMRDIASGLIGLLLICKSRSLDRRGIQRAADIEQQAVFAVFDENKSWYLEDNINKFCENPDEVKRDDPKFYESNIMSTINGYVPESITTLGFCFDDTVQWHFCSVGTQNEILTIHFTGHSFIYGKRHEDTLTLFPMRGESVTVTMDNVGTWMLTSMNSSPRSKKLRLKFRDVKCIPDDDEDSYEIFEPPESTVMATRKMHDRLEPEDEESDADYDYQNRLAAALGIRSFRNSSLNQEEEEFNLTALALENGTEFVSSNTDIIVGSNYSSPSNISKFTVNNLAEPQKAPSHQQATTAGSPLRHLIGKNSVLNSSTAEHSSPYSEDPIEDPLQPDVTGIRLLSLGAGEFKSQEHAKHKGPKVERDQAAKHRFSWMKLLAHKVGRHLSQDTGSPSGMRPWEDLPSQDTGSPSRMRPWKDPPSDLLLLKQSNSSKILVGRWHLASEKGSYEIIQDTDEDTAVNNWLISPQNASRAWGESTPLANKPGKQSGHPKFPRVRHKSLQVRQDGGKSRLKKSQFLIKTRKKKKEKHTHHAPLSPRTFHPLRSEAYNTFSERRLKHSLVLHKSNETSLPTDLNQTLPSMDFGWIASLPDHNQNSSNDTGQASCPPGLYQTVPPEEHYQTFPIQDPDQMHSTSDPSHRSSSPELSEMLEYDRSHKSFPTDISQMSPSSEHEVWQTVISPDLSQVTLSPELSQTNLSPDLSHTTLSPELIQRNLSPALGQMPISPDLSHTTLSPDLSHTTLSLDLSQTNLSPELSQTNLSPALGQMPLSPDLSHTTLSLDFSQTNLSPELSHMTLSPELSQTNLSPALGQMPISPDLSHTTLSLDFSQTNLSPELSQTNLSPALGQMPLSPDPSHTTLSLDLSQTNLSPELSQTNLSPDLSEMPLFADLSQIPLTPDLDQMTLSPDLGETDLSPNFGQMSLSPDLSQVTLSPDISDTTLLPDLSQISPPPDLDQIFYPSESSQSLLLQEFNESFPYPDLGQMPSPSSPTLNDTFLSKEFNPLVIVGLSKDGTDYIEIIPKEEVQSSEDDYAEIDYVPYDDPYKTDVRTNINSSRDPDNIAAWYLRSNNGNRRNYYIAAEEISWDYSEFVQRETDIEDSDDIPEDTTYKKVVFRKYLDSTFTKRDPRGEYEEHLGILGPIIRAEVDDVIQVRFKNLASRPYSLHAHGLSYEKSSEGKTYEDDSPEWFKEDNAVQPNSSYTYVWHATERSGPESPGSACRAWAYYSAVNPEKDIHSGLIGPLLICQKGILHKDSNMPMDMREFVLLFMTFDEKKSWYYEKKSRSSWRLTSSEMKKSHEFHAINGMIYSLPGLKMYEQEWVRLHLLNIGGSQDIHVVHFHGQTLLENGNKQHQLGVWPLLPGSFKTLEMKASKPGWWLLNTEVGENQRAGMQTPFLIMDRDCRMPMGLSTGIISDSQIKASEFLGYWEPRLARLNNGGSYNAWSVEKLAAEFASKPWIQVDMQKEVIITGIQTQGAKHYLKSCYTTEFYVAYSSNQINWQIFKGNSTRNVMYFNGNSDASTIKENQFDPPIVARYIRISPTRAYNRPTLRLELQGCEVNGCSTPLGMENGKIENKQITASSFKKSWWGDYWEPFRARLNAQGRVNAWQAKANNNKQWLEIDLLKIKKITAIITQGCKSLSSEMYVKSYTIHYSEQGVEWKPYRLKSSMVDKIFEGNTNTKGHVKNFFNPPIISRFIRVIPKTWNQSIALRLELFGCDIY

SEQ ID NO: 1252 - protein, 951 aa, Homo sapiens
MSRGGSYPHLLWDVRKRSLGLEDPSRLRSRYLGRREFIQRLKLEATLNVHDGCVNTICWNDTGEYILSGSDDTKLVISNPYSRKVLTTIRSGHRANIFSAKFLPCTNDKQIVSCSGDGVIFYTNVEQDAETNRQCQFTCHYGTTYEIMTVPNDPYTFLSCGEDGTVRWFDTRIKTSCTKEDCKDDILINCRRAATSVAICPPIPYYLAVGCSDSSVRIYDRRMLGTRATGNYAGRGTTGMVARFIPSHLNNKSCRVTSLCYSEDGQEILVSYSSDYIYLFDPKDDTARELKTPSAEERREELRQPPVKRLRLRGDWSDTGPRARPESERERDGEQSPNVSLMQRMSDMLSRWFEEASEVAQSNRGRGRSRPRGGTSQSDISTLPTVPSSPDLEVSETAMEVDTPAEQFLQPSTSSTMSAQAHSTSSPTESPHSTPLLSSPDSEQRQSVEASGHHTHHQSEFLRGPEIALLRKRLQQLRLKKAEQQRQQELAAHTQQQPSTSDQSSHEGSSQDPHASDSPSSVVNKQLGSMSLDEQQDNNNEKLSPKPGTGEPVLSLHYSTEGTTTSTIKLNFTDEWSSIASSSRGIGSHCKSEGQEESFVPQSSVQPPEGDSETKAPEESSEDVTKYQEGVSAENPVENHINITQSDKFTAKPLDSNSGERNDLNLDRSCGVPEESASSEKAKEPETSDQTSTESATNENNTNPEPQFQTEATGPSAHEETSTRDSALQDTDDSDDDPVLIPGARYRAGPGDRFNIRGTTIGDRIMRRSAVARIQEFFRRRKERKEMEELDTLNIRRPLVKMVYKGHRNSRTMIKEANFWGANFVMSGSDCGHIFIWDRHTAEHLMLLEADNHVVNCLQPHPFDPILASSGIDYDIKIWSPLEESRIFNRKLADEVITRNELMLEETRNTITVPASFMLRMLASLNHIRADRLEGDRSEGSGQENENEDEE

SEQ ID NO: 1253 - protein, 880 aa, Homo sapiens
MSRGGSYPHLLWDVRKRSLGLEDPSRLRSRYLGRREFIQRLKLEATLNVHDGCVNTICWNDTGEYILSGSDDTKLVISNPYSRKVLTTIRSGHRANIFSAKFLPCTNDKQIVSCSGDGVIFYTNVEQDAETNRQCQFTCHYGTTYEIMTVPNDPYTFLSCGEDGTVRWFDTRIKTSCTKEDCKDDILINCRRAATSVAICPPIPYYLAVGCSDSSVRIYDRRMLGTRATGNYAGRGTTGMVARFIPSHLNNKSCRVTSLCYSEDGQEILVSYSSDYIYLFDPKDDTARELKTPSAEERREELRQPPVKRLRLRGDWSDTGPRARPESERERDGEQSPNVSLMQRMSDMLSRWFEEASEVAQSNRGRGRSRPRGGTSQSDISTLPTVPSSPDLEVSETAMEVDTPAEQFLQPSTSSTMSAQAHSTSSPTESPHSTPLLSSPDSEQRQSVEASGHHTHHQSDSPSSVVNKQLGSMSLDEQQDNNNEKLSPKPGTGEPVLSLHYSTEGTTTSTIKLNFTDEWSSIASSSRGIGSHCKSEGQEESFVPQSSVQPPEGDSETKAPEESSEDVTKYQEGVSAENPVENHINITQSDKFTAKPLDSNSGERNDLNLDRSCGVPEESASSEKAKEPETSDQTSTESATNENNTNPEPQFQTEATGPSAHEETSTRDSALQDTDDSDDDPVLIPGARYRAGPGDRRSAVARIQEFFRRRKERKEMEELDTLNIRRPLVKMVYKGHRNSRTMIKEANFWGANFVMSGSDCGHIFIWDRHTAEHLMLLEADNHVVNCLQPHPFDPILASSGIDYDIKIWSPLEESRIFNRKLADEVITRNELMLEETRNTITVPASFMLRMLASLNHIRADRLEGDRSEGSGQENENEDEE

SEQ ID NO: 1254 - protein, 347 aa, Homo sapiens
MDEQPRLMHSHAGVGMAGHPGLSQHLQDGAGGTEGEGGRKQDIGDILQQIMTITDQSLDEAQARKHALNCHRMKPALFNVLCEIKEKTVLSIRGAQEEEPTDPQLMRLDNMLLAEGVAGPEKGGGSAAAAAAAAASGGAGSDNSVEHSDYRAKLSQIRQIYHTELEKYEQACNEFTTHVMNLLREQSRTRPISPKEIERMVSIIHRKFSSIQMQLKQSTCEAVMILRSRFLDARRKRRNFNKQATEILNEYFYSHLSNPYPSEEAKEELAKKCGITVSQVSNWFGNKRIRYKKNIGKFQEEANIYAAKTAVTATNVSAHGSQANSPSTPNSAGGYPSPCYQPDRRIQ

SEQ ID NO: 1255 - protein, 316 aa, Homo sapiens
MTMETQMSQNVCPRNLWLLQPLTVLLLLASADSQAAPPKAVLKLEPPWINVLQEDSVTLTCQGARSPESDSIQWFHNGNLIPTHTQPSYRFKANNNDSGEYTCQTGQTSLSDPVHLTVLSEWLVLQTPHLEFQEGETIMLRCHSWKDKPLVKVTFFQNGKSQKFSHLDPTFSIPQANHSHSGDYHCTGNIGYTLFSSKPVTITVQVPSMGSSSPMGIIVAVVIATAVAAIVAAVVALIYCRKKRISANSTDPVKAAQFEPPGRQMIAIRKRQLEETNNDYETADGGYMTLNPRAPTDDDKNIYLTLPPNDHVNSNN

SEQ ID NO: 1256 - protein, 343 aa, Homo sapiens
MESKYKEILLLTGLDNITDEELDRFKFFLSDEFNIATGKLHTANRIQVATLMIQNAGAVSAVMKTIRIFQKLNYMLLAKRLQEEKEKVDKQYKSVTKPKPLSQAEMSPAASAAIRNDVAKQRAAPKVSPHVKPEQKQMVAQQESIREGFQKRCLPVMVLKAKKPFTFETQEGKQEMFHATVATEKEFFFVKVFNTLLKDKFIPKRIIIIARYYRHSGFLEVNSASRVLDAESDQKVNVPLNIIRKAGETPKINTLQTQPLGTIVNGLFVVQKVTEKKKNILFDLSDNTGKMEVLGVRNEDTMKCKEGDKVRLTFFTLSKNGEKLQLTSGVHSTIKVIKAKKKT

SEQ ID NO: 1257 - protein, 335 aa, Homo sapiens
MPQILIFTYLNMFYFFPPLQILAENLTMVTEFLLLGFSSLGEIQLALFVVFLFLYLVILSGNVTIISVIHLDKSLHTPMYFFLGILSTSETFYTFVILPKMLINLLSVARTISFNCCALQMFFFLGFAITNCLLLGVMGYDRYAAICHPLHYPTLMSWQVCGKLAAACAIGGFLASLTVVNLVFSLPFCSANKVNHYFCDISAVILLACTNTDVNEFVIFICGVLVLVVPFLFICVSYLCILRTILKIPSAEGRRKAFSTCASHLSVVIVHYGCASFIYLRPTANYVSNKDRLVTVTYTIVTPLLNPMVYSLRNKDVQLAIRKVLGKKGSLKLYN

SEQ ID NO: 1258 - protein, 1562 aa, Homo sapiens
MSVRLPQSIDRLSSLSSLGDSAPERKSPSHHRQPSDASETTGLVQRCVIIQKDQHGFGFTVSGDRIVLVQSVRPGGAAMKAGVKEGDRIIKVNGTMVTNSSHLEVVKLIKSGAYVALTLLGSSPSSMGISGLQQDPSPAGAPRITSVIPSPPPPPPLPPPQRITGPKPLQDPEVQKHATQILRNMLRQEEKELQRICEVYSRNPASLLEEQIEGARRRVTQLQLKIQQETGGSVDILPLYGDTSQRPSEGRLSLDSQEGDSGLDSGTERFPSLSESLMNRNSVLSDPGLDSPRTSPVIMARVAQHHRRQGSDAAVPSTGDQGVDQSPKPLIIGPEEDYDPGYFNNESDIIFQDLEKLKSRPAHLGVFLRYIFSQADPSPLLFYLCAEVYQQASPKDSRSLGKDIWNIFLEKNAPLRVKIPEMLQAEIDSRLRNSEDARGVLCEAQEAAMPEIQEQIHDYRTKRTLGLGSLYGENDLLDLDGDPLRERQVAEKQLAALGDILSKYEEDRSAPMDFALNTYMSHAGIRLREARPSNTAEKAQSAPDKDKWLPFFPKTKKSSNSKKEKDALEDKKRNPILKYIGKPKSSSQSTFHIPLSPVEVKPGNVRNIIQHFENNQQYDAPEPGTQRLSTGSFPEDLLESDSSRSEIRLGRSESLKGREEMKRSRKAENVPRSRSDVDMDAAAEATRLHQSASSSTSSLSTRSLENPTPPFTPKMGRRSIESPSLGFCTDTLLPHLLEDDLGQLSDLEPEPDAQNWQHTVGKDVVAGLTQREIDRQEVINELFVTEASHLRTLRVLDLIFYQRMKKENLMPREELARLFPNLPELIEIHNSWCEAMKKLREEGPIIKEISDLMLARFDGPAREELQQVAAQFCSYQSIALELIKTKQRKESRFQLFMQEAESHPQCRRLQLRDLIISEMQRLTKYPLLLESIIKHTEGGTSEHEKLCRARDQCREILKYVNEAVKQTENRHRLEGYQKRLDATALERASNPLAAEFKSLDLTTRKMIHEGPLTWRISKDKTLDLHVLLLEDLLVLLQKQDEKLLLKCHSKTAVGSSDSKQTFSPVLKLNAVLIRSVATDKRAFFIICTSKLGPPQIYELVALTSSDKNTWMELLEEAVRNATRHPGAAPMPVHPPPPGPREPAQQGPTPSRVELDDSDVFHGEPEPEELPGGTGSQQRVQGKHQVLLEDPEQEGSAEEEELGVLPCPSTSLDGENRGIRTRNPIHLAFPGPLFMEGLADSALEDVENLRHLILWSLLPGHTMETQAAQEPEDDLTPTPSVISVTSHPWDPGSPGQAPPGGEGDNTQLAGLEGERPEQEDMGLCSLEHLPPRTRNSGIWESPELDRNLAEDASSTEAAGGYKVVRKAEVAGSKVVPALPESGQSEPGPPEVEGGTKATGNCFYVSMPSGPPDSSTDHSEAPMSPPQPDSLPAGQTEPQPQLQGGNDDPRRPSRSPPSLALRDVGMIFHTIEQLTLKLNRLKDMELAHRELLKSLGGESSGGTTPVGSFHTEAARWTDGSLSPPAKEPLASDSRNSHELGPCPEDGSDAPLEDSTADAAASPGP

SEQ ID NO: 1259 - protein, 371 aa, Homo sapiens
MSPSTFQITDMTRRSCQNLGYTAASPQAPEAASNTGNAERAEEVPGEGSLFLQAETRAWFQKTQAHWLLQHGAAPAWFHGFITRREAERLLEPKPQGCYLVRFSESAVTFVLTYRSRTCCRHFLLAQLRDGRHVVLGEDSAHARLQDLLLHYTAHPLSPYGETLTEPLARQTPEPAGLSLRTEESNFGSKSQDPNPQYSPIIKQGQAPVPMQKEGAGEKEPSQLLRPKPPIPAKPQLPPEVYTIPVPRHRPAPRPKPSNPIYNEPDEPIAFYAMGRGSPGEAPSNIYVEVEDEGLPATLGHPVLRKSWSRPVPGGQNTGGSQLHSENSVIGQGPPLPHQPPPAWRHTLPHNLSRQVLQDRGQAWLPLGPPQ

SEQ ID NO: 1260 - protein, 389 aa, Homo sapiens
MEFPLAQICPQGSHEAPIPTFSTFQITDMTRRSCQNLGYTAASPQAPEAASNTGNAERAEEVPGEGSLFLQAETRAWFQKTQAHWLLQHGAAPAWFHGFITRREAERLLEPKPQGCYLVRFSESAVTFVLTYRSRTCCRHFLLAQLRDGRHVVLGEDSAHARLQDLLLHYTAHPLSPYGETLTEPLARQTPEPAGLSLRTEESNFGSKSQDPNPQYSPIIKQGQAPVPMQKEGAGEKEPSQLLRPKPPIPAKPQLPPEVYTIPVPRHRPAPRPKPSNPIYNEPDEPIAFYAMGRGSPGEAPSNIYVEVEDEGLPATLGHPVLRKSWSRPVPGGQNTGGSQLHSENSVIGQGPPLPHQPPPAWRHTLPHNLSRQVLQDRGQAWLPLGPPQ

SEQ ID NO: 1261 - protein, 139 aa, Homo sapiens
MGRKKIQIQRITDERNRQVTFTKRKFGLMKKAYELSVLCDCEIALIIFNHSNKLFQYASTDMDKVLLKYTEYNEPHESRTNADIIETLRKKGFNGCDSPEPDGEDSLEQSPLLEDKYRRASEELDGLFRRYGGPCWGVT

SEQ ID NO: 1262 - protein, 641 aa, Homo sapiens
MALSLEEFVHSLDLRTLPRVLEIQAGIYLEGSIYEMFGNECCFSTGEVIKITGLKVKKIIAEICEQIEGCESLQPFELPMNFPGLFKIVADKTPYLTMEEITRTIHIGPSRLGHPCFYHQKDIKLENLIIKQGEQIMLNSVEEIDGEIMVSCAVARNHQTHSFNLPLSQEGEFYECEDERIYTLKEIVEWKIPKNRTRTVNLTDFSNKWDSTNPFPKDFYGTLILKPVYEIQGVMKFRKDIIRILPSLDVEVKDITDSYDANWFLQLLSTEDLFEMTSKEFPIVTEVIEAPEGNHLPQSILQPGKTIVIHKKYQASRILASEIRSNFPKRHFLIPTSYKGKFKRRPREFPTAYDLEIAKSEKEPLHVVATKAFHSPHDKLSSVSVGDQFLVHQSETTEVLCEGIKKVVNVLACEKILKKSYEAALLPLYMEGGFVEVIHDKKQYPISELCKQFRLPFNVKVSVRDLSIEEDVLAATPGLQLEEDITDSYLLISDFANPTECWEIPVGRLNMTVQLVSNFSRDAEPFLVRTLVEEITEEQYYMMRRYESSASHPPPRPPKHPSVEETKLTLLTLAEERTVDLPKSPKRHHVDITKKLHPNQAGLDSKVLIGSQNDLVDEEKERSNRGATAIAETFKNEKHQK

SEQ ID NO: 1263 - protein, 220 aa, Homo sapiens
MAEASSANLGSGCEEKRHEGSSSESVPPGTTISRVKLLDTMVDTFLQKLVAAGSYQRFTDCYKCFYQLQPAMTQQIYDKFIAQLQTSIREEISDIKEEGNLEAVLNALDKIVEEGKVRKEPACNGTPCGAMCRNRRPRTSSWQMPSWQGGGRWRSCSYRSRPSSRPGRCEAQRCRVQQRCSLCVQAGGQRGSEETQALPVSMAGSPSPLPGSPGAQEGGV

SEQ ID NO: 1264 - protein, 205 aa, Homo sapiens
MAEASSANLGSGCEEKRHEGSSSESVPPGTTISRVKLLDTMVDTFLQKLVAAGSYQRFTDCYKCFYQLQPAMTQQIYDKFIAQLQTSIREEISDIKEEGNLEAVLNALDKIVEEGKVRKEPAWRPSGIPEKDLHSVMAPYFLQQRDTLRRHVQKQEAENQQLADAVLAGRRQVEELQLQVQAQQQAWQALHREQRELVAVLREPE

SEQ ID NO: 1265 - protein, 180 aa, Homo sapiens
MAEASSANLGSGCEEKRHEGSSSESVPPGTTISRVKLLDTMVDTFLQKLVAAGSYQRFTDCYKCFYQLQPAMTQQIYDKFIAQLQTSIREEISDIKEEGNLEAVLNALDKIVEEGKVRKEPACNGTPCGAMCRNRRPRTSSWQMPSWQGGGRWRSCSYRSRPSSRPGRLYTENRGSWLLC

SEQ ID NO: 1266 - protein, 601 aa, Homo sapiens
MAEPSGAETRPPIRVTVKTPKDKEEIVICDRASVKEFKEEISRRFKAQQDQLVLIFAGKILKDGDTLNQHGIKDGLTVHLVIKTPQKAQDPAAATASSPSTPDPASAPSTTPASPATPAQPSTSGSASSDAGSGSRRSSGGGPSPGAGEGSPSATASILSGFGGILGLGSLGLGSANFMELQQQMQRQLMSNPEMLSQIMENPLVQDMMSNPDLMRHMIMANPQMQQLMERNPEISHMLNNPELMRQTMELARNPAMMQEMMRNQDRALSNLESIPGGYNALRRMYTDIQEPMFSAAREQFGNNPFSSLAGNSDSSSSQPLRTENREPLPNPWSPSPPTSQAPGSGGEGTGGSGTSQVHPTVSNPFGINAASLGSGMFNSPEMQALLQQISENPQLMQNVISAPYMRSMMQTLAQNPDFAAQMMVNVPLFAGNPQLQEQLRLQLPVFLQQMQNPESLSILTNPRAMQALLQIQQGLQTLQTEAPGLVPSLGSFGISRTPAPSAGSNAGSTPEAPTSSPATPATSSPTGASSAQQQLMQQMIQLLAGSGNSQVQTPEVRFQQQLEQLNSMGFINREANLQALIATGGDINAAIERLLGSQLS

SEQ ID NO: 1267 - protein, 888 aa, Homo sapiens
MAGVGRSGGPWGRTRGGRSGRLGVSLGALSSLPLEELPRPLCCRRCRRHFGFALRGETIPVSVAGSASSQFAPLALHLSLLLSRISASRLTRWPPPDKREGSAVDPGKRRSLAATPSSSLPCTLIALGLRHEKEANELMEDLFETFQDEMGFSNMEDDGPEEEERVAEPQANFNTPQALRFEELLANLLNEQHQIAKELFEQLKMKKPSAKQQKEVEKVKPQCKEVHQTLILDPAQRKRLQQQMQQHVQLLTQIHLLATCNPNLNPEASSTRICLKELGTFAQSSIALHHQYNPKFQTLFQPCNLMGAMQLIEDFSTHVSIDCSPHKTVKKTANEFPCLPKQVAWILATSKVFMYPELLPVCSLKAKNPQDKILFTKAEDNLLALGLKHFEGTEFLNPLISKYLLTCKTARQLTVRIKNLNMNRAPDNIIKFYKKTKQLPVLGKCCEEIQPHQWKPPIEREEHRLPFWLKASLPSIQEELRHMADGAREVGNMTGTTEINSDQGLEKDNSELGSETRYPLLLPKGVVLKLKPVADRFPKKAWRQKRSSVLKPLLIQPSPSLQPSFNPGKTPAQSTHSEAPPSKMVLRIPHPIQPATVLQTVPGVPPLGVSGGESFESPAALPAMPPEARTSFPLSESQTLLSSAPVPKVMMPSPASSMFRKPYVRRRPSKRRGARAFRCIKPAPVIHPASVIFTVPATTVKIVSLGGGCNMIQPVNAAVAQSPQTIPIATLLVNPTSFPCPLNQPLVASSVSPLIVSGNSVNLPIPSTPEDKAHMNVDIACAVADGENAFQGLEPKLEPQELSPLSATVFPKVEHSPGPPPVDKQCQEGLSENSAYRWTVVKTEEGRQALEPLPQGIQESLNNSSPGDLEEVVKMEPEDATEEISGFL

SEQ ID NO: 1268 - protein, 868 aa, Homo sapiens
MAGVGRSGGPWGRTRGGRSGRLGVSLGALSSLPLEELPRPLCCRRCRRHFGFALRGETIPVSVAGSASSQFAPLALHLSLLLSRISASRLTRWPPPDKREGSAVDPGKRRSLAATPSSSLPCTLIALGLRHEKEANELMEDLFETFQDEMGFSNMEDDGPEEEERVAEPQANFNTPQALRFEELLANLLNEQHQIAKELFEQLKMKKPSAKQQKEVEKVKPQCKEVHQTLILDPAQRKRLQQQMQQHVQLLTQIHLLATCNPNLNPEASSTRICLKELGTFAQSSIALHHQYNPKFQTLFQPCNLMGAMQLIEDFSTHVSIDCSPHKTVKKTANEFPCLPKQVAWILATSKVFMYPELLPVCSLKAKNPQDKILFTKAEDNKYLLTCKTARQLTVRIKNLNMNRAPDNIIKFYKKTKQLPVLGKCCEEIQPHQWKPPIEREEHRLPFWLKASLPSIQEELRHMADGAREVGNMTGTTEINSDQGLEKDNSELGSETRYPLLLPKGVVLKLKPVADRFPKKAWRQKRSSVLKPLLIQPSPSLQPSFNPGKTPAQSTHSEAPPSKMVLRIPHPIQPATVLQTVPGVPPLGVSGGESFESPAALPAMPPEARTSFPLSESQTLLSSAPVPKVMMPSPASSMFRKPYVRRRPSKRRGARAFRCIKPAPVIHPASVIFTVPATTVKIVSLGGGCNMIQPVNAAVAQSPQTIPIATLLVNPTSFPCPLNQPLVASSVSPLIVSGNSVNLPIPSTPEDKAHMNVDIACAVADGENAFQGLEPKLEPQELSPLSATVFPKVEHSPGPPPVDKQCQEGLSENSAYRWTVVKTEEGRQALEPLPQGIQESLNNSSPGDLEEVVKMEPEDATEEISGFL

SEQ ID NO: 1269 - protein, 466 aa, Homo sapiens
MLLGGPPRSPRSGTSPKGPWSSTGHVQFGKSPQTWPRRTRPRSPEPAAPSGVRGSTWTRRRDSPRRAGPTALSRYVGHLWMGRRPPSPEARGPVPRSSAASRARRSLASPGISPGPLTATIGGAVAGGGPRQGRAEAHKEVFPGQRVGKMAAPMELFCWSGGWGLPSVDLDSLAVLTYARFTGAPLKVHKISNPWQSPSGTLPALRTSHGEVISVPHKIITHLRKEKYNADYDLSARQGADTLAFMSLLEEKLLPVLVHTFWIDTKNYVEVTRKWYAEAMPFPLNFFLPGRMQRQYMERLQLLTGEHRPEDEEELEKELYREARECLTLLSQRLGSQKFFFGDAPASLDAFVFSYLALLLQAKLPSGKLQVHLRGLHNLCAYCTHILSLYFPWDGAEVPPQRQTPAGPETEEEPYRRRNQILSVLAGLAAMVGYALLSGIVSIQRATPARAPGTRTLGMAEEDEEE

SEQ ID NO: 1270 - protein, 956 aa, Homo sapiens
METQELRGALALLLLCFFTSASQDLQVIDLLTVGESRQMVAVAEKIRTALLTAGDIYLLSTFRLPPKQGGVLFGLYSRQDNTRWLEASVVGKINKVLVRYQREDGKVHAVNLQQAGLADGRTHTVLLRLRGPSRPSPALHLYVDCKLGDQHAGLPALAPIPPAEVDGLEIRTGQKAYLRMQGFVESMKIILGGSMARVGALSECPFQGDESIHSAVTNALHSILGEQTKALVTQLTLFNQILVELRDDIRDQVKEMSLIRNTIMECQVCGFHEQRSHCSPNPCFRGVDCMEVYEYPGYRCGPCPPGLQGNGTHCSDINECAHADPCFPGSSCINTMPGFHCEACPRGYKGTQVSGVGIDYARASKQVCNDIDECNDGNNGGCDPNSICTNTVGSFKCGPCRLGFLGNQSQGCLPARTCHSPAHSPCHIHAHCLFERNGAVSCQCNVGWAGNGNVCGTDTDIDGYPDQALPCMDNNKHCKQDNCLLTPNSGQEDADNDGVGDQCDDDADGDGIKNVEDNCRLFPNKDQQNSDTDSFGDACDNCPNVPNNDQKDTDGNGEGDACDNDVDGDGIPNGLDNCPKVPNPLQTDRDEDGVGDACDSCPEMSNPTQTDADSDLVGDVCDTNEDSDGDGHQDTKDNCPQLPNSSQLDSDNDGLGDECDGDDDNDGIPDYVPPGPDNCRLVPNPNQKDSDGNGVGDVCEDDFDNDAVVDPLDVCPESAEVTLTDFRAYQTVVLDPEGDAQIDPNWVVLNQGMEIVQTMNSDPGLAVGYTAFNGVDFEGTFHVNTVTDDDYAGFLFSYQDSGRFYVVMWKQTEQTYWQATPFRAVAQPGLQLKAVTSVSGPGEHLRNALWHTGHTPDQVRLLWTDPRNVGWRDKTSYRWQLLHRPQVGYIRVKLYEGPQLVADSGVIIDTSMRGGRLGVFCFSQENIIWSNLQYRCNDTVPEDFEPFRRQLLQGRV

SEQ ID NO: 1271 - protein, 183 aa, Homo sapiens
MEFLWAPLLGLCCSLAAADRHTVFWNSSNPKFRNEDYTIHVQLNDYVDIICPHYEDHSVADAAMEQYILYLVEHEEYQLCQPQSKDQVRWQCNRPSAKHGPEKLSEKFQRFTPFTLGKEFKEGHSYYYISHSPQAHDNPQEKRLAADDPEVRVLHSIGHSAAPRLFPLAWTVLLLPLLLLQTP

SEQ ID NO: 1272 - protein, 205 aa, Homo sapiens
MEFLWAPLLGLCCSLAAADRHTVFWNSSNPKFRNEDYTIHVQLNDYVDIICPHYEDHSVADAAMEQYILYLVEHEEYQLCQPQSKDQVRWQCNRPSAKHGPEKLSEKFQRFTPFTLGKEFKEGHSYYYISKPIHQHEDRCLRLKVTVSGKITHSPQAHDNPQEKRLAADDPEVRVLHSIGHSAAPRLFPLAWTVLLLPLLLLQTP

SEQ ID NO: 1273 - protein, 238 aa, Homo sapiens
MAAAPLLLLLLLVPVPLLPLLAQGPGGALGNRHAVYWNSSNQHLRREGYTVQVNVNDYLDIYCPHYNSSGVGPGAGPGPGGGAEQYVLYMVSRNGYRTCNASQGFKRWECNRPHAPHSPIKFSEKFQRYSAFSLGYEFHAGHEYYYISTPTHNLHWKCLRMKVFVCCASTSHSGEKPVPTLPQFTMGPNVKINVLEDFEGENPQVPKLEKSISGTSPKREHLPLAVGIAFFLMTFLAS

SEQ ID NO: 1274 - protein, 468 aa, Homo sapiens
MLAVGCALLAALLAAPGAALAPRRCPAQEVARGVLTSLPGDSVTLTCPGVEPEDNATVHWVLRKPAAGSHPSRWAGMGRRLLLRSVQLHDSGNYSCYRAGRPAGTVHLLVDVPPEEPQLSCFRKSPLSNVVCEWGPRSTPSLTTKAVLLVRKFQNSPAEDFQEPCQYSQESQKFSCQLAVPEGDSSFYIVSMCVASSVGSKFSKTQTFQGCGILQPDPPANITVTAVARNPRWLSVTWQDPHSWNSSFYRLRFELRYRAERSKTFTTWMVKDLQHHCVIHDAWSGLRHVVQLRAQEEFGQGEWSEWSPEAMGTPWTESRSPPAENEVSTPMQALTTNKDDDNILFRDSANATSLPVQDSSSVPLPTFLVAGGSLAFGTLLCIAIVLRFKKTWKLRALKEGKTSMHPPYSLGQLVPERPRPTPVLVPLISPPVSPSSLGSDNTSSHNRPDARDPRSPYDISNTDYFFPR

SEQ ID NO: 1275 - protein, 387 aa, Homo sapiens
MAGKAAAPGTAVLLVTANVGSLFDDPENLQKNWLREFYQVVHTHKPHFMALHCQEFGGKNYEASMSHVDKFVKELLSSDAMKEYNRARVYLDENYKSQEHFTALGSFYFLHESLKNIYQFDFKAKKYRKVAGKEIYSDTLESTPMLEKEKFPQDYFPECKWSRKGFIRTRWCIADCAFDLVNIHLFHDASNLVAWETSPSVYSGIRHKALGYVLDRIIDQRFEKVSYFVFGDFNFRLDSKSVVETLCTKATMQTVRAADTNEVVKLIFRESDNDRKVMLQLEKKLFDYFNQEVFRDNNGTALLEFDKELSVFKDRLYELDISFPPSYPYSEDARQGEQYMNTRCPAWCDRILMSPSAKELVLRVSVCCPSPGHRGMWSAGSGLAQPW

SEQ ID NO: 1276 - protein, 412 aa, Homo sapiens
MAGKAAAPGTAVLLVTANVGSLFDDPENLQKNWLREFYQVVHTHKPHFMALHCQEFGGKNYEASMSHVDKFVKELLSSDAMKEYNRARVYLDENYKSQEHFTALGSFYFLHESLKNIYQFDFKAKKYRKVAGKEIYSDTLESTPMLEKEKFPQDYFPECKWSRKGFIRTRWCIADCAFDLVNIHLFHDASNLVAWETSPSVYSGIRHKALGYVLDRIIDQRFEKVSYFVFGDFNFRLDSKSVVETLCTKATMQTVRAADTNEVVKLIFRESDNDRKVMLQLEKKLFDYFNQEVFRDNNGTALLEFDKELSVFKDRLYELDISFPPSYPYSEDARQGEQYMNTRCPAWCDRILMSPSAKELVLRSESEEKVVTYDHIGPNVCMGDHKPVFLAFRIMPGAGKPHAHVHKCCVVQ

SEQ ID NO: 1277 - protein, 468 aa, Homo sapiens
MDINTYNNQLHLQRNALCVIPQDFFQLLPNLTWLDLRYNRIKALPSGIGAHQHLKTLLLERNPIKMLPVELGSVTTLKALNLRHCPLEFPPQLVVQKGLVAIQRFLRMWAVEHSLPRNPTSQEAPPVREMTLRDLPSPGLELSGDHASNQGAVNAQDPEGAVMKEKASFLPPVEKPDLSELRKSADSSENWPSEEEIRRFWKLRQEIVEHVKADVLGDQLLTRELPPNLKAALNIEKELPKPRHVFRRKTASSRSILPDLLSPYQMAIRAKRLEESRAAALRELQEKQALMEQQRREKRALQEWRERAQRMRKRKEELSKLLPPRRSMVASKIPSATDLIDNRKVPLNPPGKMKPSKEKSPQASKEMSALQERNLEEKIKQHVLQMREQRRFHGQAPLEEMRKAAEDLEIATELQDEVLKLKLGLTLNKDRRRAALTGNLSLGLPAAQPQNTFFNTKYGESGNVRRYQ

SEQ ID NO: 1278 - protein, 530 aa, Homo sapiens
MEGSSSYEVPSVAAADLEEGAGQTRSLPATPSKDVHKGVGGIIFSSSPILDLSESGLCRLEEVFRIPSLQQLHLQRNALCVIPQDFFQLLPNLTWLDLRYNRIKALPSGIGAHQHLKTLLLERNPIKMLPVELGSVTTLKALNLRHCPLEFPPQLVVQKGLVAIQRFLRMWAVEHSLPRNPTSQEAPPVREMTLRDLPSPGLELSGDHASNQGAVNAQDPEGAVMKEKASFLPPVEKPDLSELRKSADSSENWPSEEEIRRFWKLRQEIVEHVKADVLGDQLLTRELPPNLKAALNIEKELPKPRHVFRRKTASSRSILPDLLSPYQMAIRAKRLEESRAAALRELQEKQALMEQQRREKRALQEWRERAQRMRKRKEELSKLLPPRRSMVASKIPSATDLIDNRKVPLNPPGKMKPSKEKSPQASKEMSALQERNLEEKIKQHVLQMREQRRFHGQAPLEEMRKAAEDLEIATELQDEVLKLKLGLTLNKDRRRAALTGNLSLGLPAAQPQNTFFNTKYGESGNVRRYQ

SEQ ID NO: 1279 - protein, 1061 aa, Homo sapiens
MPGPRRPAGSRLRLLLLLLLPPLLLLLRGSHAGNLTVAVVLPLANTSYPWSWARVGPAVELALAQVKARPDLLPGWTVRTVLGSSENALGVCSDTAAPLAAVDLKWEHNPAVFLGPGCVYAAAPVGRFTAHWRVPLLTAGAPALGFGVKDEYALTTRAGPSYAKLGDFVAALHRRLGWERQALMLYAYRPGDEEHCFFLVEGLFMRVRDRLNITVDHLEFAEDDLSHYTRLLRTMPRKGRVIYICSSPDAFRTLMLLALEAGLCGEDYVFFHLDIFGQSLQGGQGPAPRRPWERGDGQDVSARQAFQAAKIITYKDPDNPEYLEFLKQLKHLAYEQFNFTMEDGLVNTIPASFHDGLLLYIQAVTETLAHGGTVTDGENITQRMWNRSFQGVTGYLKIDSSGDRETDFSLWDMDPENGAFRVVLNYNGTSQELVAVSGRKLNWPLGYPPPDIPKCGFDNEDPACNQDHLSTLEVLALVGSLSLLGILIVSFFIYRKMQLEKELASELWRVRWEDVEPSSLERHLRSAGSRLTLSGRGSNYGSLLTTEGQFQVFAKTAYYKGNLVAVKRVNRKRIELTRKVLFELKHMRDVQNEHLTRFVGACTDPPNICILTEYCPRGSLQDILENESITLDWMFRYSLTNDIVKGMLFLHNGAICSHGNLKSSNCVVDGRFVLKITDYGLESFRDLDPEQGHTVYAKKLWTAPELLRMASPPVRGSQAGDVYSFGIILQEIALRSGVFHVEGLDLSPKEIIERVTRGEQPPFRPSLALQSHLEELGLLMQRCWAEDPQERPPFQQIRLTLRKFNRENSSNILDNLLSRMEQYANNLEELVEERTQAYLEEKRKAEALLYQILPHSVAEQLKRGETVQAEAFDSVTIYFSDIVGFTALSAESTPMQVVTLLNDLYTCFDAVIDNFDVYKVETIGDAYMVVSGLPVRNGRLHACEVARMALALLDAVRSFRIRHRPQEQLRLRIGIHTGPVCAGVVGLKMPRYCLFGDTVNTASRMESNGEALKIHLSSETKAVLEEFGGFELELRGDVEMKGKGKVRTYWLLGERGSSTRG

SEQ ID NO: 1280 - protein, 565 aa, Homo sapiens
MNRSIPVEVDESEPYPSQLLKPIPEYSPEEESEPPAPNIRNMAPNSLSAPTMLHNSSGDFSQAHSTLKLANHQRPVSRQVTCLRTQVLEDSEDSFCRRHPGLGKAFPSGCSAVSEPASESVVGALPAEHQFSFMEKRNQWLVSQLSAASPDTGHDSDKSDQSLPNASADSLGGSQEMVQRPQPHRNRAGLDLPTIDTGYDSQPQDVLGIRQLERPLPLTSVCYPQDLPRPLRSREFPQFEPQRYPACAQMLPPNLSPHAPWNYHYHCPGSPDHQVPYGHDYPRAAYQQVIQPALPGQPLPGASVRGLHPVQKVILNYPSPWDHEERPAQRDCSFPGLPRHQDQPHHQPPNRAGAPGESLECPAELRPQVPQPPSPAAVPRPPSNPPARGTLKTSNLPEELRKVFITYSMDTAMEVVKFVNFLLVNGFQTAIDIFEDRIRGIDIIKWMERYLRDKTVMIIVAISPKYKQDVEGAESQLDEDEHGLHTKYIHRMMQIEFIKQGSMNFRFIPVLFPNAKKEHVPTWLQNTHVYSWPKNKKNILLRLLREEEYVAPPRGPLPTLQVVPL

SEQ ID NO: 1281 - protein, 250 aa, Homo sapiens
MCDQQKQPQFPPSCVKGSGLGAGQGSNGASVKCPVPCQTQTVCVTGPAPCPTQTYVKYQVPCQTQTYVKCPAPCQRTYVKYPTPCQTYVKCPAPCQTTYVKCPTPCQTYVKCPAPCQMTYIKSPAPCQTQTCYVQGASPCQSYYVQAPASGSTSQYCVTDPCSAPCSTSYCCLAPRTFGVSPLRRWIQRPQNCNTGSSGCCENSGSSGCCGSGGCGCSCGCGSSGCCCLGIIPMRSRGPACCDHEDDCCC

SEQ ID NO: 1282 - protein, 4061 aa, Homo sapiens
MSTLLENIFAIINLFKQYSKKDKNTDTLSKKELKELLEKEFRQILKNPDDPDMVDVFMDHLDIDHNKKIDFTEFLLMVFKLAQAYYESTRKENLPISGHKHRKHSHHDKHEDNKQEENKENRKRPSSLERRNNRKGNKGRSKSPRETGGKRHESSSEKKERKGYSPTHREEEYGKNHHNSSKKEKNKTENTRLGDNRKRLSERLEEKEDNEEGVYDYENTGRMTQKWIQSGHIATYYTIQDEAYDTTDSLLEENKIYERSRSSDGKSSSQVNRSRHENTSQVPLQESRTRKRRGSRVSQDRDSEGHSEDSERHSGSASRNHHGSAWEQSRDGSRHPRSHDEDRASHGHSADSSRQSGTRHAETSSRGQTASSHEQARSSPGERHGSGHQQSADSSRHSATGRGQASSAVSDRGHRGSSGSQASDSEGHSENSDTQSVSGHGKAGLRQQSHQESTRGRSGERSGRSGSSLYQVSTHEQPDSAHGRTGTSTGGRQGSHHEQARDSSRHSASQEGQDTIRGHPGSSRGGRQGSHHEQSVNRSGHSGSHHSHTTSQGRSDASHGQSGSRSASRQTRNEEQSGDGTRHSGSRHHEASSQADSSRHSQVGQGQSSGPRTSRNQGSSVSQDSDSQGHSEDSERWSGSASRNHHGSAQEQSRDGSRHPRSHHEDRAGHGHSADSSRKSGTRHTQNSSSGQAASSHEQARSSAGERHGSRHQLQSADSSRHSGTGHGQASSAVRDSGHRGSSGSQATDSEGHSEDSDTQSVSGHGQAGHHQQSHQESARDRSGERSRRSGSFLYQVSTHKQSESSHGWTGPSTGVRQGSHHEQARDNSRHSASQDGQDTIRGHPGSSRRGRQGSHHEQSVDRSGHSGSHHSHTTSQGRSDASRGQSGSRSASRTTRNEEQSRDGSRHSGSRHHEASSHADISRHSQAGQGQSEGSRTSRRQGSSVSQDSDSEGHSEDSERWSGSASRNHRGSAQEQSRHGSRHPRSHHEDRAGHGHSADSSRQSGTPHAETSSGGQAASSHEQARSSPGERHGSRHQQSADSSRHSGIPRRQASSAVRDSGHWGSSGSQASDSEGHSEESDTQSVSGHGQDGPHQQSHQESARDWSGGRSGRSGSFIYQVSTHEQSESAHGRTRTSTGRRQGSHHEQARDSSRHSASQEGQDTIRAHPGSRRGGRQGSHHEQSVDRSGHSGSHHSHTTSQGRSDASHGQSGSRSASRQTRKDKQSGDGSRHSGSRHHEAASWADSSRHSQVGQEQSSGSRTSRHQGSSVSQDSDSERHSDDSERLSGSASRNHHGSSREQSRDGSRHPGFHQEDRASHGHSADSSRQSGTHHTESSSHGQAVSSHEQARSSPGERHGSRHQQSADSSRHSGIGHRQASSAVRDSGHRGSSGSQVTNSEGHSEDSDTQSVSAHGQAGPHQQSHKESARGQSGESSGRSRSFLYQVSSHEQSESTHGQTAPSTGGRQGSRHEQARNSSRHSASQDGQDTIRGHPGSSRGGRQGSYHEQSVDRSGHSGYHHSHTTPQGRSDASHGQSGPRSASRQTRNEEQSGDGSRHSGSRHHEPSTRAGSSRHSQVGQGESAGSKTSRRQGSSVSQDRDSEGHSEDSERRSESASRNHYGSAREQSRHGSRNPRSHQEDRASHGHSAESSRQSGTRHAETSSGGQAASSQEQARSSPGERHGSRHQQSADSSTDSGTGRRQDSSVVGDSGNRGSSGSQASDSEGHSEESDTQSVSAHGQAGPHQQSHQESTRGQSGERSGRSGSFLYQVSTHEQSESAHGRTGPSTGGRQRSRHEQARDSSRHSASQEGQDTIRGHPGSSRGGRQGSHYEQSVDSSGHSGSHHSHTTSQERSDVSRGQSGSRSVSRQTRNEKQSGDGSRHSGSRHHEASSRADSSRHSQVGQGQSSGPRTSRNQGSSVSQDSDSQGHSEDSERWSGSASRNHLGSAWEQSRDGSRHPGSHHEDRAGHGHSADSSRQSGTRHTESSSRGQAASSHEQARSSAGERHGSHHQLQSADSSRHSGIGHGQASSAVRDSGHRGYSGSQASDSEGHSEDSDTQSVSAQGKAGPHQQSHKESARGQSGESSGRSGSFLYQVSTHEQSESTHGQSAPSTGGRQGSHYDQAQDSSRHSASQEGQDTIRGHPGPSRGGRQGSHQEQSVDRSGHSGSHHSHTTSQGRSDASRGQSGSRSASRKTYDKEQSGDGSRHSGSHHHEASSWADSSRHSLVGQGQSSGPRTSRPRGSSVSQDSDSEGHSEDSERRSGSASRNHHGSAQEQSRDGSRHPRSHHEDRAGHGHSAESSRQSGTHHAENSSGGQAASSHEQARSSAGERHGSHHQQSADSSRHSGIGHGQASSAVRDSGHRGSSGSQASDSEGHSEDSDTQSVSAHGQAGPHQQSHQESTRGRSAGRSGRSGSFLYQVSTHEQSESAHGRTGTSTGGRQGSHHKQARDSSRHSTSQEGQDTIHGHPGSSSGGRQGSHYEQLVDRSGHSGSHHSHTTSQGRSDASHGHSGSRSASRQTRNDEQSGDGSRHSGSRHHEASSRADSSGHSQVGQGQSEGPRTSRNWGSSFSQDSDSQGHSEDSERWSGSASRNHHGSAQEQLRDGSRHPRSHQEDRAGHGHSADSSRQSGTRHTQTSSGGQAASSHEQARSSAGERHGSHHQQSADSSRHSGIGHGQASSAVRDSGHRGYSGSQASDNEGHSEDSDTQSVSAHGQAGSHQQSHQESARGRSGETSGHSGSFLYQVSTHEQSESSHGWTGPSTRGRQGSRHEQAQDSSRHSASQDGQDTIRGHPGSSRGGRQGYHHEHSVDSSGHSGSHHSHTTSQGRSDASRGQSGSRSASRTTRNEEQSGDGSRHSGSRHHEASTHADISRHSQAVQGQSEGSRRSRRQGSSVSQDSDSEGHSEDSERWSGSASRNHHGSAQEQLRDGSRHPRSHQEDRAGHGHSADSSRQSGTRHTQTSSGGQAASSHEQARSSAGERHGSHHQQSADSSRHSGIGHGQASSAVRDSGHRGYSGSQASDNEGHSEDSDTQSVSAHGQAGSHQQSHQESARGRSGETSGHSGSFLYQVSTHEQSESSHGWTGPSTRGRQGSRHEQAQDSSRHSASQYGQDTIRGHPGSSRGGRQGYHHEHSVDSSGHSGSHHSHTTSQGRSDASRGQSGSRSASRTTRNEEQSGDSSRHSVSRHHEASTHADISRHSQAVQGQSEGSRRSRRQGSSVSQDSDSEGHSEDSERWSGSASRNHRGSVQEQSRHGSRHPRSHHEDRAGHGHSADRSRQSGTRHAETSSGGQAASSHEQARSSPGERHGSRHQQSADSSRHSGIPRGQASSAVRDSRHWGSSGSQASDSEGHSEESDTQSVSGHGQAGPHQQSHQESARDRSGGRSGRSGSFLYQVSTHEQSESAHGRTRTSTGRRQGSHHEQARDSSRHSASQEGQDTIRGHPGSSRRGRQGSHYEQSVDRSGHSGSHHSHTTSQGRSDASRGQSGSRSASRQTRNDEQSGDGSRHSWSHHHEASTQADSSRHSQSGQGQSAGPRTSRNQGSSVSQDSDSQGHSEDSERWSGSASRNHRGSAQEQSRDGSRHPTSHHEDRAGHGHSAESSRQSGTHHAENSSGGQAASSHEQARSSAGERHGSHHQQSADSSRHSGIGHGQASSAVRDSGHRGSSGSQASDSEGHSEDSDTQSVSAHGQAGPHQQSHQESTRGRSAGRSGRSGSFLYQVSTHEQSESAHGRAGPSTGGRQGSRHEQARDSSRHSASQEGQDTIRGHPGSRRGGRQGSYHEQSVDRSGHSGSHHSHTTSQGRSDASHGQSGSRSASRETRNEEQSGDGSRHSGSRHHEASTQADSSRHSQSGQGESAGSRRSRRQGSSVSQDSDSEAYPEDSERRSESASRNHHGSSREQSRDGSRHPGSSHRDTASHVQSSPVQSDSSTAKEHGHFSSLSQDSAYHSGIQSRGSPHSSSSYHYQSEGTERQKGQSGLVWRHGSYGSADYDYGESGFRHSQHGSVSYNSNPVVFKERSDICKASAFGKDHPRYYATYINKDPGLCGHSSDISKQLGFSQSQRYYYYE

SEQ ID NO: 1283 - protein, 2850 aa, Homo sapiens
MPKLLQGVITVIDVFYQYATQHGEYDTLNKAELKELLENEFHQILKNPNDPDTVDIILQSLDRDHNKKVDFTEYLLMIFKLVQARNKIIGKDYCQVSGSKLRDDTHQHQEEQEETEKEENKRQESSFSHSSWSAGENDSYSRNVRGSLKPGTESISRRLSFQRDFSGQHNSYSGQSSSYGEQNSDSHQSSGRGQCGSGSGQSPNYGQHGSGSGQSSSNDTHGSGSGQSSGFSQHKSSSGQSSGYSQHGSGSGHSSGYGQHGSRSGQSSRGERHRSSSGSSSSYGQHGSGSRQSLGHGRQGSGSRQSPSHVRHGSGSGHSSSHGQHGSGSSYSYSRGHYESGSGQTSGFGQHESGSGQSSGYSKHGSGSGHSSSQGQHGSTSGQASSSGQHGSSSRQSSSYGQHESASRHSSGRGQHSSGSGQSPGHGQRGSGSGQSPSSGQHGTGFGRSSSSGPYVSGSGYSSGFGHHESSSEHSSGYTQHGSGSGHSSGHGQHGSRSGQSSRGERQGSSAGSSSSYGQHGSGSRQSLGHSRHGSGSGQSPSPSRGRHESGSRQSSSYGPHGYGSGRSSSRGPYESGSGHSSGLGHQESRSGQSSGYGQHGSSSGHSSTHGQHGSTSGQSSSCGQHGATSGQSSSHGQHGSGSSQSSRYGQQGSGSGQSPSRGRHGSDFGHSSSYGQHGSGSGWSSSNGPHGSVSGQSSGFGHKSGSGQSSGYSQHGSGSSHSSGYRKHGSRSGQSSRSEQHGSSSGLSSSYGQHGSGSHQSSGHGRQGSGSGHSPSRVRHGSSSGHSSSHGQHGSGTSCSSSCGHYESGSGQASGFGQHESGSGQGYSQHGSASGHFSSQGRHGSTSGQSSSSGQHDSSSGQSSSYGQHESASHHASGRGRHGSGSGQSPGHGQRGSGSGQSPSYGRHGSGSGRSSSSGRHGSGSGQSSGFGHKSSSGQSSGYTQHGSGSGHSSSYEQHGSRSGQSSRSEQHGSSSGSSSSYGQHGSGSRQSLGHGQHGSGSGQSPSPSRGRHGSGSGQSSSYGPYRSGSGWSSSRGPYESGSGHSSGLGHRESRSGQSSGYGQHGSSSGHSSTHGQHGSTSGQSSSCGQHGASSGQSSSHGQHGSGSSQSSGYGRQGSGSGQSPGHGQRGSGSRQSPSYGRHGSGSGRSSSSGQHGSGLGESSGFGHHESSSGQSSSYSQHGSGSGHSSGYGQHGSRSGQSSRGERHGSSSGSSSHYGQHGSGSRQSSGHGRQGSGSGHSPSRGRHGSGLGHSSSHGQHGSGSGRSSSRGPYESRSGHSSVFGQHESGSGHSSAYSQHGSGSGHFCSQGQHGSTSGQSSTFDQEGSSTGQSSSYGHRGSGSSQSSGYGRHGAGSGQSPSRGRHGSGSGHSSSYGQHGSGSGWSSSSGRHGSGSGQSSGFGHHESSSWQSSGCTQHGSGSGHSSSYEQHGSRSGQSSRGERHGSSSGSSSSYGQHGSGSRQSLGHGQHGSGSGQSPSPSRGRHGSGSGQSSSYSPYGSGSGWSSSRGPYESGSSHSSGLGHRESRSGQSSGYGQHGSSSGHSSTHGQHGSTSGQSSSCGQHGASSGQSSSHGQHGSGSSQSSGYGRQGSGSGQSPGHGQRGSGSRQSPSYGRHGSGSGRSSSSGQHGSGLGESSGFGHHESSSGQSSSYSQHGSGSGHSSGYGQHGSRSGQSSRGERHGSSSRSSSRYGQHGSGSRQSSGHGRQGSGSGQSPSRGRHGSGLGHSSSHGQHGSGSGRSSSRGPYESRSGHSSVFGQHESGSGHSSAYSQHGSGSGHFCSQGQHGSTSGQSSTFDQEGSSTGQSSSHGQHGSGSSQSSSYGQQGSGSGQSPSRGRHGSGSGHSSSYGQHGSGSGWSSSSGRHGSGSGQSSGFGHHESSSWQSSGYTQHGSGSGHSSSYEQHGSRSGQSSRGEQHGSSSGSSSSYGQHGSGSRQSLGHGQHGSGSGQSPSPSRGRHGSGSGQSSSYGPYGSGSGWSSSRGPYESGSGHSSGLGHRESRSGQSSGYGQHGSSSGHSSTHGQHGSASGQSSSCGQHGASSGQSSSHGQHGSGSSQSSGYGRQGSGSGQSPGHGQRGSGSRQSPSYGRHGSGSGRSSSSGQHGPGLGESSGFGHHESSSGQSSSYSQHGSGSGHSSGYGQHGSRSGQSSRGERHGSSSGSSSRYGQHGSGSRQSSGHGRQGSGSGHSPSRGRHGSGSGHSSSHGQHGSGSGRSSSRGPYESRSGHSSVFGQHESGSGHSSAYSQHGSGSGHFCSQGQHGSTSGQSSTFDQEGSSTGQSSSHGQHGSGSSQSSSYGQQGSGSGQSPSRGRHGSGSGHSSSYGQHGSGSGWSSSSGRHGSGSGQSSGFGHHESSSWQSSGYTQHGSGSGHSSSYEQHGSRSGQSSRGERHGSSSGSSSSYGQHGSGSRQSLGHGQHGSGSGQSPSPSRGRHGSGSGQSSSYSPYGSGSGWSSSRGPYESGSGHSSGLGHRESRSGQSSGYGQHGSSSGHSSTHGQHGSTSGQSSSCGQHGASSGQSSSHGQHGSGSSQSSGYGRQGSGSGQSPGHGQRGSGSRQSPSYGRHGSGSGRSSSSGQHGSGLGESSGFGHHESSSGQSSSYSQHGSGSGHSSGYGQHGSRSGQSSRGERHGSSSGSSSHYGQHGSGSRQSSGHGRQGSGSGQSPSRGRHGSGLGHSSSHGQHGSGSGRSSSRGPYESRLGHSSVFGQHESGSGHSSAYSQHGSGSGHFCSQGQHGSTSGQSSTFDQEGSSTGQSSSYGHRGSGSSQSSGYGRHGAGSGQSLSHGRHGSGSGQSSSYGQHGSGSGQSSGYSQHGSGSGQDGYSYCKGGSNHDGGSSGSYFLSFPSSTSPYEYVQEQRCYFYQ

SEQ ID NO: 1284 - protein, 1943 aa, Homo sapiens
MSPLLRSICDITEIFNQYVSHDCDGAALTKKDLKNLLEREFGAVLRRPHDPKTVDLILELLDLDSNGRVDFNEFLLFIFKVAQACYYALGQATGLDEEKRARCDGKESLLQDRRQEEDQRRFEPRDRQLEEEPGQRRRQKRQEQERELAEGEEQSEKQERLEQRDRQRRDEELWRQRQEWQEREERRAEEEQLQSCKGHETEEFPDEEQLRRRELLELRRKGREEKQQQRRERQDRVFQEEEEKEWRKRETVLRKEEEKLQEEEPQRQRELQEEEEQLRKLERQELRRERQEEEQQQQRLRREQQLRRKQEEERREQQEERREQQERREQQEERREQQLRREQEERREQQLRREQEEERREQQLRREQEEERREQQLRREQQLRREQQLRREQQLRREQQLRREQQLRREQQLRREQQLRREQQLRREQEEERHEQKHEQERREQRLKREQEERRDWLKREEETERHEQERRKQQLKRDQEEERRERWLKLEEEERREQQERREQQLRREQEERREQRLKRQEEEERLQQRLRSEQQLRREQEERREQLLKREEEKRLEQERREQRLKREQEERRDQLLKREEERRQQRLKREQEERLEQRLKREEVERLEQEERREQRLKREEPEEERRQQLLKSEEQEERRQQQLRREQQERREQRLKREEEEERLEQRLKREHEEERREQELAEEEQEQARERIKSRIPKWQWQLESEADARQSKVYSRPRKQEGQRRRQEQEEKRRRRESELQWQEEERAHRQQQEEEQRRDFTWQWQAEEKSERGRQRLSARPPLREQRERQLRAEERQQREQRFLPEEEEKEQRRRQRREREKELQFLEEEEQLQRRERAQQLQEEEDGLQEDQERRRSQEQRRDQKWRWQLEEERKRRRHTLYAKPALQEQLRKEQQLLQEEEEELQREEREKRRRQEQERQYREEEQLQQEEEQLLREEREKRRRQERERQYRKDKKLQQKEEQLLGEEPEKRRRQEREKKYREEEELQQEEEQLLREEREKRRRQEWERQYRKKDELQQEEEQLLREEREKRRLQERERQYREEEELQQEEEQLLGEERETRRRQELERQYRKEEELQQEEEQLLREEPEKRRRQERERQCREEEELQQEEEQLLREEREKRRRQELERQYREEEEVQQEEEQLLREEPEKRRRQELERQYREEEELQQEEEQLLREEQEKRRQERERQYREEEELQRQKRKQRYRDEDQRSDLKWQWEPEKENAVRDNKVYCKGRENEQFRQLEDSQLRDRQSQQDLQHLLGEQQERDREQERRRWQQRDRHFPEEEQLEREEQKEAKRRDRKSQEEKQLLREEREEKRRRQETDRKFREEEQLLQEREEQPLRRQERDRKFREEELRHQEQGRKFLEEEQRLRRQERERKFLKEEQQLRCQEREQQLRQDRDRKFREEEQQLSRQERDRKFREEEQQVRRQERERKFLEEEQQLRQERHRKFREEEQLLQEREEQQLHRQERDRKFLEEEQQLRRQERDRKFREQELRSQEPERKFLEEEQQLHRQQRQRKFLQEEQQLRRQERGQQRRQDRDRKFREEEQLRQEREEQQLSRQERDRKFRLEEQKVRRQEQERKFMEDEQQLRRQEGQQQLRQERDRKFREDEQLLQEREEQQLHRQERDRKFLEEEPQLRRQEREQQLRHDRDRKFREEEQLLQEGEEQQLRRQERDRKFREEEQQLRRQERERKFLQEEQQLRRQELERKFREEEQLRQETEQEQLRRQERYRKILEEEQLRPEREEQQLRRQERDRKFREEEQLRQEREEQQLRSQESDRKFREEEQLRQEREEQQLRPQQRDGKYRWEEEQLQLEEQEQRLRQERDRQYRAEEQFATQEKSRREEQELWQEEEQKRRQERERKLREEHIRRQQKEEQRHRQVGEIKSQEGKGHGRLLEPGTHQFASVPVRSSPLYEYIQEQRSQYRP

SEQ ID NO: 1285 - protein, 94 aa, Homo sapiens
MPVIAGGILAALLLLIVVVLCLYFKIHNALKAAKEPEAVAVKNHNPDKVWWAKNSQAKTIATESCPALQCCEGYRMCASFDSLPPCCCDINEGL

SEQ ID NO: 1286 - protein, 577 aa, Homo sapiens
MGSRHFEGIYDHVGHFGRFQRVLYFICAFQNISCGIHYLASVFMGVTPHHVCRPPGNVSQVVFHNHSNWSLEDTGALLSSGQKDYVTVQLQNGEIWELSRCSRNKRENTSSLGYEYTGSKKEFPCVDGYIYDQNTWKSTAVTQWNLVCDRKWLAMLIQPLFMFGVLLGSVTFGYFSDRLGRRVVLWATSSSMFLFGIAAAFAVDYYTFMAARFFLAMVASGYLVVGFVYVMEFIGMKSRTWASVHLHSFFAVGTLLVALTGYLVRTWWLYQMILSTVTVPFILCCWVLPETPFWLLSEGRYEEAQKIVDIMAKWNRASSCKLSELLSLDLQGPVSNSPTEVQKHNLSYLFYNWSITKRTLTVWLIWFTGSLGFYSFSLNSVNLGGNEYLNLFLLGVVEIPAYTFVCIAMDKVGRRTVLAYSLFCSALACGVVMVIPQKHYILGVVTAMVGKFAIGAAFGLIYLYTAELYPTIVRSLAVGSGSMVCRLASILAPFSVDLSSIWIFIPQLFVGTMALLSGVLTLKLPETLGKRLATTWEEAAKLESENESKSSKLLLTTNNSGLEKTEAITPRDSGLGE

SEQ ID NO: 1287 - protein, 345 aa, Homo sapiens
MSVTGGKMAPSLTQEILSHLGLASKTAAWGTLGTLRTFLNFSVDKDAQRLLRAITGQGVDRSAIVDVLTNRSREQRQLISRNFQERTQQDLMKSLQAALSGNLERIVMALLQPTAQFDAQELRTALKASDSAVDVAIEILATRTPPQLQECLAVYKHNFQVEAVDDITSETSGILQDLLLALAKGGRDSYSGIIDYNLAEQDVQALQRAEGPSREETWVPVFTQRNPEHLIRVFDQYQRSTGQELEEAVQNRFHGDAQVALLGLASVIKNTPLYFADKLHQALQETEPNYQVLIRILISRCETDLLSIRAEFRKKFGKSLYSSLQDAVKGDCQSALLALCRAEDM

SEQ ID NO: 1288 - protein, 304 aa, Homo sapiens
MLQTLYDYFWWERLWLPVNLTWADLEDRDGRVYAKASDLYITLPLALLFLIVRYFFELYVATPLAALLNIKEKTRLRAPPNATLEHFYLTSGKQPKQVEVELLSRQSGLSGRQVERWFRRRRNQDRPSLLKKFREASWRFTFYLIAFIAGMAVIVDKPWFYDMKKVWEGYPIQSTIPSQYWYYMIELSFYWSLLFSIASDVKRKDFKEQIIHHVATIILISFSWFANYIRAGTLIMALHDSSDYLLESAKMFNYAGWKNTCNNIFIVFAIVFIITRLVILPFWILHCTLVYPLELYPAFFGYYF

SEQ ID NO: 1289 - protein, 331 aa, Homo sapiens
MKRLVCVLLVCSSAVAQLHKDPTLDHHWHLWKKTYGKQYKEKNEEAVRRLIWEKNLKFVMLHNLEHSMGMHSYDLGMNHLGDMTSEEVMSLMSSLRVPSQWQRNITYKSNPNRILPDSVDWREKGCVTEVKYQGSCGACWAFSAVGALEAQLKLKTGKLVSLSAQNLVDCSTEKYGNKGCNGGFMTTAFQYIIDNKGIDSDASYPYKAMDQKCQYDSKYRAATCSKYTELPYGREDVLKEAVANKGPVSVGVDARHPSFFLYRSGVYYEPSCTQNVNHGVLVVGYGDLNGKEYWLVKNSWGHNFGEEGYIRMARNKGNHCGIASFPSYPEI

SEQ ID NO: 1290 - protein, 404 aa, Homo sapiens
MPYVDRQNRICGFLDIEENENSGKFLRRYFILDTREDSFVWYMDNPQNLPSGSSRVGAIKLTYISKVSDATKLRPKAEFCFVMNAGMRKYFLQANDQQDLVEWVNVLNKAIKITVPKQSDSQPNSDNLSRHGECGKKQVSYRTDIVGGVPIITPTQKEEVNECGESIDRNNLKRSQSHLPYFTPKPPQDSAVIKAGYCVKQGAVMKNWKRRYFQLDENTIGYFKSELEKEPLRVIPLKEVHKVQECKQSDIMMRDNLFEIVTTSRTFYVQADSPEEMHSWIKAVSGAIVAQRGPGRSASSEHPPGPSESKHAFRPTNAATATSHSTASRSNSLVSTFTMEKRGFYESLAKVKPGNFKVQTVSPREPASKVTEQALLRPQSKNGPQEKDCDLVDLDDASLPVSDV

SEQ ID NO: 1291 - protein, 350 aa, Homo sapiens
MFGLKRNAVIGLNLYCGGAGLGAGSGGATRPGGRLLATEKEASARREIGGGEAGAVIGGSAGASPPSTLTPDSRRVARPPPIGAEVPDVTATPARLLFFAPTRRAAPLEEMEAPAADAIMSPEEELDGYEPEPLGKRPAVLPLLELVGESGNNTSTDGSLPSTPPPAEEEEDELYRQSLEIISRYLREQATGAKDTKPMGRSGATSRKALETLRRVGDGVQRNHETAFQGMLRKLDIKNEDDVKSLSRVMIHVFSDGVTNWGRIVTLISFGAFVAKHLKTINQESCIEPLAESITDVLVRTKRDWLVKQRGWDGFVEFFHVEDLEGGIRNVLLAFAGVAGVGAGLAYLIR

SEQ ID NO: 1292 - protein, 1723 aa, Homo sapiens
MEKRSSGRRSGRRRGSQKSTDSPGADAELPESAARDDAVFDDEVAPNAASDNASAEKKVKSPRAALDGGVASAASPESKPSPGTKGQLRGESDRSKQPPPASSPTKRKGRSRALEAVPAPPASGPRAPAKESPPKRVPDPSPVTKGTAAESGEEAARAIPRELPVKSSSLLPEIKPEHKRGPLPNHFNGRAEGGRSRELGRAAGAPGASDADGLKPRNHFGVGRSTVTTKVTLPAKPKHVELNLKTPKNLDSLGNEHNPFSQPVHKGNTATKISLFENKRTNSSPRHTDIRGQRNTPASSKTFVGRAKLNLAKKAKEMEQPEKKVMPNSPQNGVLVKETAIETKVTVSEEEILPATRGMNGDSSENQALGPQPNQDDKADVQTDAGCLSEPVASALIPVKDHKLLEKEDSEAADSKSLVLENVTDTAQDIPTTVDTKDLPPTAMPKPQHTFSDSQSPAESSPGPSLSLSAPAPGDVPKDTCVQSPISSFPCTDLKVSENHKGCVLPVSRQNNEKMPLLELGGETTPPLSTERSPEAVGSECPSRVLVQVRSFVLPVESTQDVSSQVIPESSEVREVQLPTCHSNEPEVVSVASCAPPQEEVLGNEHSHCTAELAAKSGPQVIPPASEKTLPIQAQSQGSRTPLMAESSPTNSPSSGNHLATPQRPDQTVTNGQDSPASLLNISAGSDDSVFDSSSDMEKFTEIIKQMDSAVCMPMKRKKARMPNSPAPHFAMPPIHEDHLEKVFDPKVFTFGLGKKKESQPEMSPALHLMQNLDTKSKLRPKRASAEQSVLFKSLHTNTNGNSEPLVMPEINDKENRDVTNGGIKRSRLEKSALFSSLLSSLPQDKIFSPSVTSVNTMTTAFSTSQNGSLSQSSVSQPTTEGAPPCGLNKEQSNLLPDNSLKVFNFNSSSTSHSSLKSPSHMEKYPQKEKTKEDLDSRSNLHLPETKFSELSKLKNDDMEKANHIESVIKSNLPNCANSDTDFMGLFKSSRYDPSISFSGMSLSDTMTLRGSVQNKLNPRPGKVVIYSEPDVSEKCIEVFSDIQDCSSWSLSPVILIKVVRGCWILYEQPNFEGHSIPLEEGELELSGLWGIEDILERHEEAESDKPVVIGSIRHVVQDYRVSHIDLFTEPEGLGILSSYFDDTEEMQGFGVMQKTCSMKVHWGTWLIYEEPGFQGVPFILEPGEYPDLSFWDTEEAYIGSMRPLKMGGRKVEFPTDPKVVVYEKPFFEGKCVELETGMCSFVMEGGETEEATGDDHLPFTSVGSMKVLRGIWVAYEKPGFTGHQYLLEEGEYRDWKAWGGYNGELQSLRPILGDFSNAHMIMYSEKNFGSKGSSIDVLGIVANLKETGYGVKTQSINVLSGVWVAYENPDFTGEQYILDKGFYTSFEDWGGKNCKISSVQPICLDSFTGPRRRNQIHLFSEPQFQGHSQSFEETTSQIDDSFSTKSCRVSGGSWVVYDGENFTGNQYVLEEGHYPCLSAMGCPPGATFKSLRFIDVEFSEPTIILFEREDFKGKKIELNAETVNLRSLGFNTQIRSVQVIGGIWVTYEYGSYRGRQFLLSPAEVPNWYEFSGCRQIGSLRPFVQKRIYFRLRNKATGLFMSTNGNLEDLKLLRIQVMEDVGADDQIWIYQEGCIKCRIAEDCCLTIVGSLVTSGSKLGLALDQNADSQFWSLKSDGRIYSKLKPNLVLDIKGGTQYDQNHIILNTVSKEKFTQVWEAMVLYT

SEQ ID NO: 1293 - protein, 1000 aa, Homo sapiens
MAERKPNGGSGGASTSSSGTNLLFSSSATEFSFNVPFIPVTQASASPASLLLPGEDSTDVGEEDSFLGQTSIHTSAPQTFSYFSQVSSSSDPFGNIGQSPLTTAATSVGQSGFPKPLTALPFTTGSQDVSNAFSPSISKAQPGAPPSSLMGINSYLPSQPSSLPPSYFGNQPQGIPQPGYNPYRHTPGSSRANPYIAPPQLQQCQTPGPPAHPPPSGPPVQMYQMPPGSLPPVPSSVQSPAQQQVPARPGAPSVQVPSPFLLQNQYEPVQPHWFYCKEVEYKQLWMPFSVFDSLNLEEIYNSVQPDPESVVLGTDGGRYDVYLYDRIRKAAYWEEEPAEVRRCTWFYKGDTDSRFIPYTEEFSEKLEAEYKKAVTTNQWHRRLEFPSGETIVMHNPKVIVQFQPSSVPDEWGTTQDGQTRPRVVKRGIDDNLDEIPDGEMPQVDHLVFVVHGIGPVCDLRFRSIIECVDDFRVVSLKLLRTHFKKSLDDGKVSRVEFLPVHWHSSLGGDATGVDRNIKKITLPSIGRFRHFTNETLLDILFYNSPTYCQTIVEKVGMEINHLHALFMSRNPDFKGGVSVAGHSLGSLILFDILSNQKDLNLSKCPGPLAVANGVVKQLHFQEKQMPEEPKLTLDESYDLVVENKEVLTLQETLEALSLSEYFSTFEKEKIDMESLLMCTVDDLKEMGIPLGPRKKIANFVEHKAAKLKKAASEKKAVAATSTKGQEQSAQKTKDMASLPSESNEPKRKLPVGACVSSVCVNYESFEVGAGQVSVAYNSLDFEPEIFFALGSPIAMFLTIRGVDRIDENYSLPTCKGFFNIYHPLDPVAYRLEPMIVPDLDLKAVLIPHHKGRKRLHLELKESLSRMGSDLKQGFISSLKSAWQTLNEFARAHTSSTQLQEELEKVANQIKEEEEKQVVEAEKVVESPDFSKDEDYLGKVGMLNGGRRIDYVLQEKPIESFNEYLFALQSHLCYWESEDTALLLLKEIYRTMNISPEQPQH

SEQ ID NO: 1294 - protein, 575 aa, Homo sapiens
MSAATHSPMMQVASGNGDRDPLPPGWEIKIDPQTGWPFFVDHNSRTTTWNDPRVPSEGPKETPSSANGPSREGSRLPPAREGHPVYPQLRPGYIPIPVLHEGAENRQVHPFHVYPQPGMQRFRTEAAAAAPQRSQSPLRGMPETTQPDKQCGQVAAAAAAQPPASHGPERSQSPAASDCSSSSSSASLPSSGRSSLGSHQLPRGYISIPVIHEQNVTRPAAQPSFHQAQKTHYPAQQGEYQTHQPVYHKIQGDDWEPRPLRAASPFRSSVQGASSREGSPARSSTPLHSPSPIRVHTVVDRPQQPMTHRETAPVSQPENKPESKPGPVGPELPPGHIPIQVIRKEVDSKPVSQKPPPPSEKVEVKVPPAPVPCPPPSPGPSAVPSSPKSVATEERAAPSTAPAEATPPKPGEAEAPPKHPGVLKVEAILEKVQGLEQAVDNFEGKKTDKKYLMIEEYLTKELLALDSVDPEGRADVRQARRDGVRKVQTILEKLEQKAIDVPGQVQVYELQPSNLEADQPLQAIMEMGAVAADKGKKNAGNAEDPHTETQQPEATAAATSNPSSMTDTPGNPAAP

SEQ ID NO: 1295 - protein, 640 aa, Homo sapiens
MPPRVTFQPCGWQWNQDTPLNSEYDFALVNIGRLEAVSGLSRVQLLRPGSLHKFIPEEILIHGRDFRLLRVGFEAGGLEPQAFQVTMAIVQARAQSNQAQQYSGITLSKAGQGSGSRKPPIPLMETAEDWETERKKQAARGWRVSTVNERFDVATSLPRYFWVPNRILDSEVRRAFGHFHQGRGPRLSWHHPGGSDLLRCGGFYTASDPNKEDIRAVELMLQAGHSDVVLVDTMDELPSLADVQLAHLRLRALCLPDSSVAEDKWLSALEGTRWLDYVRACLRKASDISVLVTSRVRSVILQERGDRDLNGLLSSLVQLLSAPEARTLFGFQSLVQREWVAAGHPFLTRLGGTGASEEAPVFLLFLDCVWQLLQQFPADFEFSEFFLLALHDSVRVPDTLTFLRNTPWERGKQSGQLNSYTQVYTPGYSQPPAGNSFNLQLSVWDWDLRYSNAQILQFQNPGYDPEHCPDSWLPRPQPSFMVPGPPSSVWLFSRGALTPLNQLCPWRDSPSLLAVSSRWLPRPAISSESLADQEWGLPSHWGACPLPPGLLLPGYLGPQIRLWRRCYLRGRPEVQMGLSAPTISGLQDELSHLQELLRKWTPRISPEDHSKKRDPHTILNPTEIAGILKGQSHPFWITRC

SEQ ID NO: 1296 - protein, 477 aa, Homo sapiens
MGAGVLVLGASEPGNLSSAAPLPDGAATAARLLVPASPPASLLPPASESPEPLSQQWTAGMGLLMALIVLLIVAGNVLVIVAIAKTPRLQTLTNLFIMSLASADLVMGLLVVPFGATIVVWGRWEYGSFFCELWTSVDVLCVTASIETLCVIALDRYLAITSPFRYQSLLTRARARGLVCTVWAISALVSFLPILMHWWRAESDEARRCYNDPKCCDFVTNRAYAIASSVVSFYVPLCIMAFVYLRVFREAQKQVKKIDSCERRFLGGPARPPSPSPSPVPAPAPPPGPPRPAAAAATAPLANGRAGKRRPSRLVALREQKALKTLGIIMGVFTLCWLPFFLANVVKAFHRELVPDRLFVFFNWLGYANSAFNPIIYCRSPDFRKAFQGLLCCARRAARRRHATHGDRPRASGCLARPGPPPSPGAASDDDDDDVVGATPPARLLEPWAGCNGGAAADSDSSLDEPCRPGFASESKV

SEQ ID NO: 1297 - protein, 388 aa, Homo sapiens
MRAGTRVALGSSTPAERTTPSQGRCKPRPALPRAAPPSAAPRLLVSLSLKGPQTLAAERRRETVPVPAALPPWERWQMIRAVLKSRGLRIQQMKIQWMLSQTGPRLYRPSSAPDSGTLYFTSKKKKNVTMRSIKTTRDRVPTYQYNMNFEKLGKCIIINNKNFDKVTGMGVRNGTDKDAEALFKCFRSLGFDVIVYNDCSCAKMQDLLKKASEEDHTNAACFACILLSHGEENVIYGKDGVTPIKDLTAHFRGDRCKTLLEKPKLFFIQACRGTELDDGIQADSGPINDTDANPRYKIPVEADFLFAYSTVPGYYSWRSPGRGSWFVQALCSILEEHGKDLEIMQILTRVNDRVARHFESQSDDPHFHEKKQIPCVVSMLTKELYFSQ

SEQ ID NO: 1298 - protein, 2346 aa, Homo sapiens
MSNGYRTLSQHLNDLKKENFSLKLRIYFLEERMQQKYEASREDIYKRNIELKVEVESLKRELQDKKQHLDKTWADVENLNSQNEAELRRQFEERQQETEHVYELLENKIQLLQEESRLAKNEAARMAALVEAEKECNLELSEKLKGVTKNWEDVPGDQVKPDQYTEALAQRDKRIEELNQSLAAQERLVEQLSREKQQLLHLLEEPTSMEVQPMTEELLKQQKLNSHETTITQQSVSDSHLAELQEKIQQTEATNKILQEKLNEMSYELKCAQESSQKQDGTIQNLKETLKSRERETEELYQVIEGQNDTMAKLREMLHQSQLGQLHSSEGTSPAQQQVALLDLQSALFCSQLEIQKLQRVVRQKERQLADAKQCVQFVEAAAHESEQQKEASWKHNQELRKALQQLQEELQNKSQQLRAWEAEKYNEIRTQEQNIQHLNHSLSHKEQLLQEFRELLQYRDNSDKTLEANEMLLEKLRQRIHDKAVALERAIDEKFSALEEKEKELRQLRLAVRERDHDLERLRDVLSSNEATMQSMESLLRAKGLEVEQLSTTCQNLQWLKEEMETKFSRWQKEQESIIQQLQTSLHDRNKEVEDLSATLLCKLGPGQSEIAEELCQRLQRKERMLQDLLSDRNKQVLEHEMEIQGLLQSVSTREQESQAAAEKLVQALMERNSELQALRQYLGGRDSLMSQAPISNQQAEVTPTGRLGKQTDQGSMQIPSRDDSTSLTAKEDVSIPRSTLGDLDTVAGLEKELSNAKEELELMAKKERESQMELSALQSMMAVQEEELQVQAADMESLTRNIQIKEDLIKDLQMQLVDPEDIPAMERLTQEVLLLREKVASVESQGQEISGNRRQQLLLMLEGLVDERSRLNEALQAERQLYSSLVKFHAHPESSERDRTLQVELEGAQVLRSRLEEVLGRSLERLNRLETLAAIGGAAAGDDTEDTSTEFTDSIEEEAAHHSHQQLVKVALEKSLATVETQNPSFSPPSPMGGDSNRCLQEEMLHLRAEFHQHLEEKRKAEEELKELKAQIEEAGFSSVSHIRNTMLSLCLENAELKEQMGEAMSDGWEIEEDKEKGEVMVETVVTKEGLSESSLQAEFRKLQGKLKNAHNIINLLKEQLVLSSKEGNSKLTPELLVHLTSTIERINTELVGSPGKHQHQEEGNVTVRPFPRPQSLDLGATFTVDAHQLDNQSQPRDPGPQSAFSLPGSTQHLRSQLSQCKQRYQDLQEKLLLSEATVFAQANELEKYRVMLTGESLVKQDSKQIQVDLQDLGYETCGRSENEAEREETTSPECEEHNSLKEMVLMEGLCSEQGRRGSTLASSSERKPLENQLGKQEEFRVYGKSENILVLRKDIKDLKAQLQNANKVIQNLKSRVRSLSVTSDYSSSLERPRKLRAVGTLEGSSPHSVPDEDEGWLSDGTGAFYSPGLQAKKDLESLIQRVSQLEAQLPKNGLEEKLAEELRSASWPGKYDSLIQDQARELSYLRQKIREGRGICYLITRHAKDTVKSFEDLLRSNDIDYYLGQSFREQLAQGSQLTERLTSKLSTKDHKSEKDQAGLEPLALRLSRELQEKEKVIEVLQAKLDARSLTPSSSHALSDSHRSPSSTSFLSDELEACSDMDIVSEYTHYEEKKASPSHSDSIHHSSHSAVLSSKPSSTSASQGAKAESNSNPISLPTPQNTPKEANQAHSGFHFHSIPKLASLPQAPLPSAPSSFLPFSPTGPLLLGCCETPVVSLAEAQQELQMLQKQLGESASTVPPASTATLLSNDLEADSSYYLNSAQPHSPPRGTIELGRILEPGYLGSSGKWDVMRPQKGSVSGDLSSGSSVYQLNSKPTGADLLEEHLGEIRNLRQRLEESICINDRLREQLEHRLTSTARGRGSTSNFYSQGLESIPQLCNENRVLREDNRRLQAQLSHVSREHSQETESLREALLSSRSHLQELEKELEHQKVERQQLLEDLREKQQEVLHFREERLSLQENDSRLQHKLVLLQQQCEEKQQLFESLQSELQIYEALYGNSKKGLKAYSLDACHQIPLSSDLSHLVAEVRALRGQLEQSIQGNNCLRLQLQQQLESGAGKASLSPSSINQNFPASTDPGNKQLLLQDSAVSPPVRDVGMNSPALVFPSSASSTPGSETPIINRANGLGLDTSPVMKTPPKLEGDATDGSFANKHGRHVIGHIDDYSALRQQIAEGKLLVKKIVSLVRSACSFPGLEAQGTEVLGSKGIHELRSSTSALHHALEESASLLTMFWRAALPSTHIPVLPGKVGESTERELLELRTKVSKQERLLQSTTEHLKNANQQKESMEQFIVSQLTRTHDVLKKARTNLEVKSLRALPCTPAL

SEQ ID NO: 1299 - protein, 2362 aa, Homo sapiens
MSNGYRTLSQHLNDLKKENFSLKLRIYFLEERMQQKYEASREDIYKRNIELKVEVESLKRELQDKKQHLDKTWADVENLNSQNEAELRRQFEERQQETEHVYELLENKIQLLQEESRLAKNEAARMAALVEAEKECNLELSEKLKGVTKNWEDVPGDQVKPDQYTEALAQRDKRIEELNQSLAAQERLVEQLSREKQQLLHLLEEPTSMEVQPMTEELLKQQKLNSHETTITQQSVSDSHLAELQEKIQQTEATNKILQEKLNEMSYELKCAQESSQKQDGTIQNLKETLKSRERETEELYQVIEGQNDTMAKLREMLHQSQLGQLHSSEGTSPAQQQVALLDLQSALFCSQLEIQKLQRVVRQKERQLADAKQCVQFVEAAAHESEQQKEASWKHNQELRKALQQLQEELQNKSQQLRAWEAEKYNEIRTQEQNIQHLNHSLSHKEQLLQEFRELLQYRDNSDKTLEANEMLLEKLRQRIHDKAVALERAIDEKFSALEEKEKELRQLRLAVRERDHDLERLRDVLSSNEATMQSMESLLRAKGLEVEQLSTTCQNLQWLKEEMETKFSRWQKEQESIIQQLQTSLHDRNKEVEDLSATLLCKLGPGQSEIAEELCQRLQRKERMLQDLLSDRNKQVLEHEMEIQGLLQSVSTREQESQAAAEKLVQALMERNSELQALRQYLGGRDSLMSQAPISNQQAEVTPTGRLGKQTDQGSMQIPSRDDSTSLTAKEDVSIPRSTLGDLDTVAGLEKELSNAKEELELMAKKERESQMELSALQSMMAVQEEELQVQAADMESLTRNIQIKEDLIKDLQMQLVDPEDIPAMERLTQEVLLLREKVASVESQGQEISGNRRQQLLLMLEGLVDERSRLNEALQAERQLYSSLVKFHAHPESSERDRTLQVELEGAQVLRSRLEEVLGRSLERLNRLETLAAIGGAAAGDDTEDTSTEFTDSIEEEAAHHSHQQLVKVALEKSLATVETQNPSFSPPSPMGGDSNRCLQEEMLHLRAEFHQHLEEKRKAEEELKELKAQIEEAGFSSVSHIRNTMLSLCLENAELKEQMGEAMSDGWEIEEDKEKGEVMVETVVTKEGLSESSLQAEFRKLQGKLKNAHNIINLLKEQLVLSSKEGNSKLTPELLVHLTSTIERINTELVGSPGKHQHQEEGNVTVRPFPRPQSLDLGATFTVDAHQLDNQSQPRDPGPQSAFSLPGSTQHLRSQLSQCKQRYQDLQEKLLLSEATVFAQANELEKYRVMLTGESLVKQDSKQIQVDLQDLGYETCGRSENEAEREETTSPECEEHNSLKEMVLMEGLCSEQGRRGSTLASSSERKPLENQLGKQEEFRVYGKSENILVLRKDIKDLKAQLQNANKVIQNLKSRVRSLSVTSDYSSSLERPRKLRAVGTLEGSSPHSVPDEDEGWLSDGTGAFYSPGLQAKKDLESLIQRVSQLEAQLPKNGLEEKLAEELRSASWPGKYDSLIQDQARELSYLRQKIREGRGICYLITRHAKDTVKSFEDLLRSNDIDYYLGQSFREQLAQGSQLTERLTSKLSTKDHKSEKDQAGLEPLALRLSRELQEKEKVIEVLQAKLDARSLTPSSSHALSDSHRSPSSTSFLSDELEACSDMDIVSEYTHYEEKKASPSHSDSIHHSSHSAVLSSKPSSTSASQGAKAESNSNPISLPTPQNTPKEANQAHSGFHFHSIPKLASLPQAPLPSAPSSFLPFSPTGPLLLGCCETPVVSLAEAQQELQMLQKQLGESASTVPPASTATLLSNDLEADSSYYLNSAQPHSPPRGTIELGRILEPGYLGSSGKWDVMRPQKGSVSGDLSSGSSVYQLNSKPTGADLLEEHLGEIRNLRQRLEESICINDRLREQLEHRLTSTARGRGSTSNFYSQGLESIPQLCNENRVLREDNRRLQAQLSHVSREHSQETESLREALLSSRSHLQELEKELEHQKVERQQLLEDLREKQQEVLHFREERLSLQENDSRLQHKLVLLQQQCEEKQQLFESLQSELQIYEALYGNSKKGLKAYSLDACHQIPLSSDLSHLVAEVRALRGQLEQSIQGNNCLRLQLQQQLESGAGKASLSPSSINQNFPASTDPGNKQLLLQDSAVSPPVRDVGMNSPALVFPSSASSTPGSETPIINRANGLGLDTSPVMKTPPKLEGDATDGSFANKHGRHVIGHIDDYSALRQQIAEGKLLVKKIVSLVRSACSFPGLEAQGTEVLGSKGIHELRSSTSALHHALEESASLLTMFWRAALPSTHIPVLPGKVGESTERELLELRTKVSKQERLLQSTTEHLKNANQQKESMEQFIVSQLTRTHDVLKKARTNLEEPCKKRSHQKSLKQQERWACPPFVQLPIC

SEQ ID NO: 1300 - protein, 1731 aa, Homo sapiens
MNVQPCSRCGYGVYPAEKISCIDQIWHKACFHCEVCKMMLSVNNFVSHQKKPYCHAHNPKNNTFTSVYHTPLNLNVRTFPEAISGIHDQEDGEQCKSVFHWDMKSKDKEGAPNRQPLANERAYWTGYGEGNAWCPGALPDPEIVRMVEARKSLGEEYTEDYEQPRGKGSFPAMITPAYQRAKKANQLASQVEYKRGHDERISRFSTVVDTPELLRSKAGAQLQSDVRYTEDYEQQRGKGSFPAMITPAYQIAKRANELASDVRYHQQYQKEMRGMAGPAIGAEGILTRECADQYGQGYPEEYEEHRGKGSFPAMITPAYQNAKKAHELASDIKYRQDFNKMKGAAHYHSLPAQDNLVLKQAQSVNKLVSEVEYKKDLESSRGHSINYCETPQFRNVSKISKFTSDNKYKENYQNHMRGRYEGVGMDRRTLHAMKVGSLASNVAYKADYKHDIVDYNYPATLTPSYQTAMKLVPLKDANYRQSIDKLKYSSVTDTPQIVQAKINAQQLSHVNYRADYEKNKLNYTLPQDVPQLVKAKTNAKLFSEVKYKEGWEKTKGKGFEMKLDAMSLLAAKASGELASNIKYKEEYEKTKGKAMGTADSRLLHSLQIAKMSSEVEYKKGFEESKTRFHLPMDMVNIRHAKKAQTLASDLDYRKKLHEYTVLPEDMKTQWAKKAYGLQSELQYKADLAWMKGVGWLTEGSLNLEQAKKAGQLVSEKNYRQRVDELKFTSVTDSSQMEHAKKSQELQSGVAYKAGNEQSVHQYTISKDEPLFLQARANAANLSEKLYKSSWENQKAKGFELRLDSLTFLAAKAKRDLASEVKYKEDYERSRGKLIGAKDVQGDSQMSHSLQMSKLQSELEYKKGFEDTKSQCHVSLDMVHLVHARKAQHLATDVGYKTAEHHFTALPTDMKVEWAKKAYGLQSDNQYRADVKWMKGMGWVATGSLNVEQAKKAGELISEKKYRQHPDALKFTSIKDTPEMVQARISYTQAVDRLYREQGENIKHHYTPTADLPEVLLAKLNAMNISETRYKESWSKLRDGGYKLRLDALPFQAAKASGEIISDYKYKEAFEKMKGQMLGSRSLEDDISLAHSVYATSLQSDVNYKKGFEHSKAQFHLPLDMAALVHAKKAQTLASNQDYKHPLPQYTSLAEDLRLSCAKKAHKLQSENLYRSDLNFMRGVACVIPGTLEIEGRKKASELISESKYRQHPHSFKYTAVTDTPNLLHAKFSNQITNERLYKAAGEDARHEYTMTLGLPEFIRAKTNAANLSDARYKESWRNLRAQGYKLTIEALPFQAARASGDIASDFLYRHDFVKERGKLIGPQSVRDDPRIQHCRRMGQLQSELQYRRGATSSQAQFHLPMDMVHLVHAKNAQALASDHDYRTQYHKFTALPEDLKMAWAKKAHALQSELRYKSDLIGMKGIGWLALRSPQMESAKKAGELISETKYRKKPDSIKFTTVVDSPDLVHAKNSYMHCNERMYRSGDAESLHRYTLIPDHPDFTRARLNALHLSDKVYRNSWEQTRAGSYDFRLDAIPFQTARASREIASDFRYKEAFLRDRGLQIGYRSVDDDPRMKHFLNVGRLQSDNEYKKDFAKSRSQFHSSTDQPGLLQAKRSQQLASDVHYRQPLPQPTCDPEQLGLRHAQKAHQLQSDVKYKSDLNLTRGVGWTPPGSYKVEMARRAAELANARGLGLQGAYQRGAEAVEAGDHQSGEVNPDATEILHVKKKKALLL

SEQ ID NO: 1301 - protein, 1703 aa, Homo sapiens
MNVQPCSRCGYGVYPAEKISCIDQIWHKACFHCEVCKMMLSVNNFVSHQKKPYCHAHNPKNNTFTSVYHTPLNLNVRTFPEAISGIHDQEDGEQCKSVFHWDMKSKDKEGAPNRQPLANERAYWTGYGEGNAWCPGALPDPEIVRMVEARKSLGEEYTEDYEQPRGKGSFPAMITPAYQRAKKANQLASQVEYKRGHDERISRFSTVVDTPELLRSKAGAQLQSDVRYTEDYEQQRGKGSFPAMITPAYQIAKRANELASDVRYHQQYQKEMRGMAGPAIGAEGILTRECADQYGQGYPEEYEEHRGKGSFPAMITPAYQNAKKAHELASDIKYRQDFNKMKGAAHYHSLPAQDNLVLKQAQSVNKLVSENKYKENYQNHMRGRYEGVGMDRRTLHAMKVGSLASNVAYKADYKHDIVDYNYPATLTPSYQTAMKLVPLKDANYRQSIDKLKYSSVTDTPQIVQAKINAQQLSHVNYRADYEKNKLNYTLPQDVPQLVKAKTNAKLFSEVKYKEGWEKTKGKGFEMKLDAMSLLAAKASGELASNVHLLLSLKIKYKEEYEKTKGKAMGTADSRLLHSLQIAKMSSEVEYKKGFEESKTRFHLPMDMVNIRHAKKAQTLASDLDYRKKLHEYTVLPEDMKTQWAKKAYGLQSELQYKADLAWMKGVGWLTEGSLNLEQAKKAGQLVSEKNYRQRVDELKFTSVTDSSQMEHAKKSQELQSGVAYKAGNEQSVHQYTISKDEPLFLQARANAANLSEKLYKSSWENQKAKGFELRLDSLTFLAAKAKRDLASEVKYKEDYERSRGKLIGAKDVQGDSQMSHSLQMSKLQSELEYKKGFEDTKSQCHVSLDMVHLVHARKAQHLATDVGYKTAEHHFTALPTDMKVEWAKKAYGLQSDNQYRADVKWMKGMGWVATGSLNVEQAKKAGELISEKKYRQHPDALKFTSIKDTPEMVQARISYTQAVDRLYREQGENIKHHYTPTADLPEVLLAKLNAMNISETRYKESWSKLRDGGYKLRLDALPFQAAKASGEIISDYKYKEAFEKMKGQMLGSRSLEDDISLAHSVYATSLQSDVNYKKGFEHSKAQFHLPLDMAALVHAKKAQTLASNQDYKHPLPQYTSLAEDLRLSCAKKAHKLQSENLYRSDLNFMRGVACVIPGTLEIEGRKKASELISESKYRQHPHSFKYTAVTDTPNLLHAKFSNQITNERLYKAAGEDARHEYTMTLGLPEFIRAKTNAANLSDARYKESWRNLRAQGYKLTIEALPFQAARASGDIASDFLYRHDFVKERGKLIGPQSVRDDPRIQHCRRMGQLQSELQYRRGATSSQAQFHLPMDMVHLVHAKNAQALASDHDYRTQYHKFTALPEDLKMAWAKKAHALQSELRYKSDLIGMKGIGWLALRSPQMESAKKAGELISETKYRKKPDSIKFTTVVDSPDLVHAKNSYMHCNERMYRSGDAESLHRYTLIPDHPDFTRARLNALHLSDKVYRNSWEQTRAGSYDFRLDAIPFQTARASREIASDFRYKEAFLRDRGLQIGYRSVDDDPRMKHFLNVGRLQSDNEYKKDFAKSRSQFHSSTDQPGLLQAKRSQQLASDVHYRQPLPQPTCDPEQLGLRHAQKAHQLQSDVKYKSDLNLTRGVGWTPPGSYKVEMARRAAELANARGLGLQGAYRGAEAVEAGDHQSGEVNPDATEILHVKKKKALLL

SEQ ID NO: 1302 - protein, 790 aa, Homo sapiens
MRSVQIFLSQCRLLLLLVPTMLLKSLGEDVIFHPEGEFDSYEVTIPEKLSFRGEVQGVVSPVSYLLQLKGKKHVLHLWPKRLLLPRHLRVFSFTEHGELLEDHPYIPKDCNYMGSVKESLDSKATISTCMGGLRGVFNIDAKHYQIEPLKASPSFEHVVYLLKKEQFGNQVCGLSDDEIEWQMAPYENKARLRDFPGSYKHPKYLELILLFDQSRYRFVNNNLSQVIHDAILLTGIMDTYFQDVRMRIHLKALEVWTDFNKIRVGYPELAEVLGRFVIYKKSVLNARLSSDWAHLYLQRKYNDALAWSFGKVCSLEYAGSVSTLLDTNILAPATWSAHELGHAVGMSHDEQYCQCRGRLNCIMGSGRTGFSNCSYISFFKHISSGATCLNNIPGLGYVLKRCGNKIVEDNEECDCGSTEECQKDRCCQSNCKLQPGANCSIGLCCHDCRFRPSGYVCRQEGNECDLAEYCDGNSSSCPNDVYKQDGTPCKYEGRCFRKGCRSRYMQCQSIFGPDAMEAPSECYDAVNLIGDQFGNCEITGIRNFKKCESANSICGRLQCINVETIPDLPEHTTIISTHLQAENLMCWGTGYHLSMKPMGIPDLGMINDGTSCGEGRVCFKKNCVNSSVLQFDCLPEKCNTRGVCNNRKNCHCMYGWAPPFCEEVGYGGSIDSGPPGLLRGAIPSSIWVVSIIMFRLILLILSVVFVFFRQVIGNHLKPKQEKMPLSKAKTEQEESKTKTVQEESKTKTGQEESEAKTGQEESKAKTGQEESKANIESKRPKAKSVKKQKK

SEQ ID NO: 1303 - protein, 547 aa, Homo sapiens
MEVEEAFQAVGEMGIYQMYLCFLLAVLLQLYVATEAILIALVGATPSYHWDLAELLPNQSHGNQSAGEDQAFGDWLLTANGSEIHKHVHFSSSFTSIASEWFLIANRSYKVSAASSFFFSGVFVGVISFGQLSDRFGRKKVYLTGFALDILFAIANGFSPSYEFFAVTRFLVGMMNGGMSLVAFVLLNECVGTAYWALAGSIGGLFFAVGIAQYALLGYFIRSWRTLAILVNLQGTVVFLLSLFIPESPRWLYSQGRLSEAEEALYLIAKRNRKLKCTFSLTHPANRSCRETGSFLDLFRYRVLLGHTLILMFIWFVCSLVYYGLTLSAGDLGGSIYANLALSGLIEIPSYPLCIYLINQKWFGRKRTLSAFLCLGGLACLIVMFLPEKKDTGVFAVVNSHSLSLLGKLTISAAFNIVYIYTSELYPTVIRNVGLGTCSMFSRVGGIIAPFIPSLKYVQWSLPFIVFGATGLTSGLLSLLLPETLNSPLLETFSDLQVYSYRRLGEEALSLQALDPQQCVDKESSLGSESEEEEEFYDADEETQMIK

SEQ ID NO: 1304 - protein, 776 aa, Homo sapiens
MNVRIFYSVSQSPHSLLSLLFYCAILESRISATMPLFKLPEIDDAMRNFAEKVFASEVKDEGGRQEISPFDVDEICPISHHEMQAHIFHLETLSTSTEARRKKRFQGRKTVNLSIPLSETSSTKLSHIDEYISSSPTYQTVPDFQRVQITGDYASGVTVEDFEIVCKGLYRALCIREKYMQKSFQRFPKTPSKYLRNIDGEAWVANESFYPVFTPPVKKGEDPFRTDNLPENLGYHLKMKDGVVYVYPNEAAVSKDEPKPLPYPNLDTFLDDMNFLLALIAQGPVKTYTHRRLKFLSSKFQVHQMLNEMDELKELKNNPHRDFYNCRKVDTHIHAAACMNQKHLLRFIKKSYQIDADRVVYSTKEKNLTLKELFAKLKMHPYDLTVDSLDVHAGRQTFQRFDKFNDKYNPVGASELRDLYLKTDNYINGEYFATIIKEVGADLVEAKYQHAEPRLSIYGRSPDEWSKLSSWFVCNRIHCPNMTWMIQVPRIYDVFRSKNFLPHFGKMLENIFMPVFEATINPQADPELSVFLKHITGFDSVDDESKHSGHMFSSKSPKPQEWTLEKNPSYTYYAYYMYANIMVLNSLRKERGMNTFLFRPHCGEAGALTHLMTAFMIADDISHGLNLKKSPVLQYLFFLAQIPIAMSPLSNNSLFLEYAKNPFLDFLQKGLMISLSTDDPMQFHFTKEPLMEEYAIAAQVFKLSTCDMCEVARNSVLQCGISHEEKVKFLGDNYLEEGPAGNDIRRTNVAQIRMAYRYETWCYELNLIAEGLKSTE

SEQ ID NO: 1305 - protein, 1110 aa, Homo sapiens
MAENKGGGEAESGGGGSGSAPVTAGAAGPAAQEAEPPLTAVLVEEEEEEGGRAGAEGGAAGPDDGGVAAASSGSAQAASSPAASVGTGVAGGAVSTPAPAPASAPAPGPSAGPPPGPPASLLDTCAVCQQSLQSRREAEPKLLPCLHSFCLRCLPEPERQLSVPIPGGSNGDIQQVGVIRCPVCRQECRQIDLVDNYFVKDTSEAPSSSDEKSEQVCTSCEDNASAVGFCVECGEWLCKTCIEAHQRVKFTKDHLIRKKEDVSESVGASGQRPVFCPVHKQEQLKLFCETCDRLTCRDCQLLEHKEHRYQFLEEAFQNQKGAIENLLAKLLEKKNYVHFAATQVQNRIKEVNETNKRVEQEIKVAIFTLINEINKKGKSLLQQLENVTKERQMKLLQQQNDITGLSRQVKHVMNFTNWAIASGSSTALLYSKRLITFQLRHILKARCDPVPAANGAIRFHCDPTFWAKNVVNLGNLVIESKPAPGYTPNVVVGQVPPGTNHISKTPGQINLAQLRLQHMQQQVYAQKHQQLQQMRMQQPPAPVPTTTTTTQQHPRQAAPQMLQQQPPRLISVQTMQRGNMNCGAFQAHQMRLAQNAARIPGIPRHSGPQYSMMQPHLQRQHSNPGHAGPFPVVSVHNTTINPTSPTTATMANANRGPTSPSVTAIELIPSVTNPENLPSLPDIPPIQLEDAGSSSLDNLLSRYISGSHLPPQPTSTMNPSPGPSALSPGSSGLSNSHTPVRPPSTSSTGSRGSCGSSGRTAEKTSLSFKSDQVKVKQEPGTEDEICSFSGGVKQEKTEDGRRSACMLSSPESSLTPPLSTNLHLESELDALASLENHVKIEPADMNESCKQSGLSSLVNGKSPIRSLMHRSARIGGDGNNKDDDPNEDWCAVCQNGGDLLCCEKCPKVFHLTCHVPTLLSFPSGDWICTFCRDIGKPEVEYDCDNLQHSKKGKTAQGLSPVDQRKCERLLLYLYCHELSIEFQEPVPASIPNYYKIIKKPMDLSTVKKKLQKKHSQHYQIPDDFVADVRLIFKNCERFNEADSEVAQAGKAVALYFEDKLTEIYSDRTFAPLPEFEQEEDDGEVTEDSDEDFIQPRRKRLKSDERPVHIK

SEQ ID NO: 1306 - protein, 2723 aa, Homo sapiens
MADEEAEQERLSCGEGGCVAELQRLGERLQELELQLRESRVPAVEAATDYCQQLCQTLLEYAEKWKTSEDPLPLLEVYTVAIQSYVKARPYLTSECENVALVLERLALSCVELLLCLPVELSDKQWEQFQTLVQVAHEKLMENGSCELHFLATLAQETGVWKNPVLCTILSQEPLDKDKVNEFLAFEGPILLDMRIKHLIKTNQLSQATALAKLCSDHPEIGIKGSFKQTYLVCLCTSSPNGKLIEEISEVDCKDALEMICNLESEGDEKSALVLCTAFLSRQLQQGDMYCAWELTLFWSKLQQRVEPSIQVYLERCRQLSLLTKTVYHIFFLIKVINSETEGAGLATCIELCVKALRLESTENTEVKISICKTISCLLPDDLEVKRACQLSEFLIEPTVDAYYAVEMLYNQPDQKYDEENLPIPNSLRCELLLVLKTQWPFDPEFWDWKTLKRQCLALMGEEASIVSSIDELNDSEVYEKVVDYQEESKETSMNGLSGGVGANSGLLKDIGDEKQKKREIKQLRERGFISARFRNWQAYMQYCVLCDKEFLGHRIVRHAQKHYKDGIYSCPICAKNFNSKETFVPHVTLHVKQSSKERLAAMKPLRRLGRPPKITTTNENQKTNTVAKQEQRPIKKNSLYSTDFIVFNDNDGSDDENDDKDKSYEPEVIPVQKPVPVNEFNCPVTFCKKGFKYFKNLIAHVKGHKDNEDAKRFLEMQSKKVICQYCRRHFVSVTHLNDHLQMHCGSKPYICIQMKCKAGFNSYAELLTHRKEHQVFRAKCMFPKCGRIFSEAYLLYDHEAQHYNTYTCKFTGCGKVYRSQGELEKHLDDHSTPPEKVLPPEAQLNSSGDSIQPSEVNQNTAENIEKERSMLPSENNIENSLLADRSDAWDKSKAESAVTKQDQISASELRQANGPLSNGLENPATTPLLQSSEVAVSIKVSLNQGIEDNFGKQENSTVEGSGEALVTDLHTPVEDTCNDLCHPGFQERKEQDCFNDAHVTQNSLVNSETLKIGDLTPQNLERQVNNLMTFSVQNQAAFQNNLPTSKFECGDNVKTSSNLYNLPLKTLESIAFVPPQSDLSNSLGTPSVPPKAPVQKFSCQVEGCTRTYNSSQSIGKHMKTAHPDQYAAFKMQRKSKKGQKANNLNTPNNGKFVYFLPSPVNSSNPFFTSQTKANGNPACSAQLQHVSPPIFPAHLASVSTPLLSSMESVINPNITSQDKNEQGGMLCSQMENLPSTALPAQMEDLTKTVLPLNIDSGSDPFLPLPAESSSMSLFPSPADSGTNSVFSQLENNTNHYSSQIEGNTNSSFLKGGNGENAVFPSQVNVANNFSSTNAQQSAPEKVKKDRGRGPNGKERKPKHNKRAKWPAIIRDGKFICSRCYRAFTNPRSLGGHLSKRSYCKPLDGAEIAQELLQSNGQPSLLASMILSTNAVNLQQPQQSTFNPEACFKDPSFLQLLAENRSPAFLPNTFPRSGVTNFNTSVSQEGSEIIKQALETAGIPSTFEGAEMLSHVSTGCVSDASQVNATVMPNPTVPPLLHTVCHPNTLLTNQNRTSNSKTSSIEECSSLPVFPTNDLLLKTVENGLCSSSFPNSGGPSQNFTSNSSRVSVISGPQNTRSSHLNKKGNSASKRRKKVAPPLIAPNASQNLVTSDLTTMGLIAKSVEIPTTNLHSNVIPTCEPQSLVENLTQKLNNVNNQLFMTDVKENFKTSLESHTVLAPLTLKTENGDSQMMALNSCTTSINSDLQISEDNVIQNFEKTLEIIKTAMNSQILEVKSGSQGAGETSQNAQINYNIQLPSVNTVQNNKLPDSSPFSSFISVMPTKSNIPQSEVSHKEDQIQEILEGLQKLKLENDLSTPASQCVLINTSVTLTPTPVKSTADITVIQPVSEMINIQFNDKVNKPFVCQNQGCNYSAMTKDALFKHYGKIHQYTPEMILEIKKNQLKFAPFKCVVPTCTKTFTRNSNLRAHCQLVHHFTTEEMVKLKIKRPYGRKSQSENVPASRSTQVKKQLAMTEENKKESQPALELRAETQNTHSNVAVIPEKQLVEKKSPDKTESSLQVITVTSEQCNTNALTNTQTKGRKIRRHKKEKEEKKRKKPVSQSLEFPTRYSPYRPYRCVHQGCFAAFTIQQNLILHYQAVHKSDLPAFSAEVEEESEAGKESEETETKQTLKEFRCQVSDCSRIFQAITGLIQHYMKLHEMTPEEIESMTASVDVGKFPCDQLECKSSFTTYLNYVVHLEADHGIGLRASKTEEDGVYKCDCEGCDRIYATRSNLLRHIFNKHNDKHKAHLIRPRRLTPGQENMSSKANQEKSKSKHRGTKHSRCGKEGIKMPKTKRKKKNNLENKNAKIVQIEENKPYSLKRGKHVYSIKARNDALSECTSRFVTQYPCMIKGCTSVVTSESNIIRHYKCHKLSKAFTSQHRNLLIVFKRCCNSQVKETSEQEGAKNDVKDSDTCVSESNDNSRTTATVSQKEVEKNEKDEMDELTELFITKLINEDSTSVETQANTSSNVSNDFQEDNLCQSERQKASNLKRVNKEKNVSQNKKRKVEKAEPASAAELSSVRKEEETAVAIQTIEEHPASFDWSSFKPMGFEVSFLKFLEESAVKQKKNTDKDHPNTGNKKGSHSNSRKNIDKTAVTSGNHVCPCKESETFVQFANPSQLQCSDNVKIVLDKNLKDCTELVLKQLQEMKPTVSLKKLEVHSNDPDMSVMKDISIGKATGRGQY

SEQ ID NO: 1307 - protein, 824 aa, Homo sapiens
MAAAFEASGALAAVATAMPAEHVAVQVPAPEPTPGPVRILRTAQDLSSPRTRTGDVLLAEPADFESLLLSRPVLEGLRAAGFERPSPVQLKAIPLGRCGLDLIVQAKSGTGKTCVFSTIALDSLVLENLSTQILILAPTREIAVQIHSVITAIGIKMEGLECHVFIGGTPLSQDKTRLKKCHIAVGSPGRIKQLIELDYLNPGSIRLFILDEADKLLEEGSFQEQINWIYSSLPASKQMLAVSATYPEFLANALTKYMRDPTFVRLNSSDPSLIGLKQYYKVVNSYPLAHKVFEEKTQHLQELFSRIPFNQALVFSNLHSRAQHLADILSSKGFPAECISGNMNQNQRLDAMAKLKHFHCRVLISTDLTSRGIDAEKVNLVVNLDVPLDWETYMHRIGRAGRFGTLGLTVTYCCRGEEENMMMRIAQKCNINLLPLPDPIPSGLMEECVDWDVEVKAAVHTYGIASVPNQPLKKQIQKIERTLQIQKAHGDHMASSRNNSVSGLSVKSKNNTKQKLPVKSHSECGIIEKATSPKELGCDRQSEEQMKNSVQTPVENSTNSQHQVKEALPVSLPQIPCLSSFKIHQPYTLTFAELVEDYEHYIKEGLEKPVEIIRHYTGPGDQTVNPQNGFVRNKVIEQRVPVLASSSQSGDSESDSDSYSSRTSSQSKGNKSYLEGSSDNQLKDSESTPVDDRISLEQPPNGSDTPNPEKYQESPGIQMKTRLKEGASQRAKQSRRNLPRRSSFRLQTEAQEDDWYDCHREIRLSFSDTYQDYEEYWRAYYRAWQEYYAAASHSYYWNAQRHPSWMAAYHMNTIYLQEMMHSNQ

SEQ ID NO: 1308 - protein, 333 aa, Homo sapiens
MQAAGHPEPLDSRGSFSLPTMGANVSQDNGTGHNATFSEPLPFLYVLLPAVYSGICAVGLTGNTAVILVILRAPKMKTVTNVFILNLAVADGLFTLVLPVNIAEHLLQYWPFGELLCKLVLAVDHYNIFSSIYFLAVMSVDRYLVVLATVRSRHMPWRTYRGAKVASLCVWLGVTVLVLPFFSFAGVYSNELQVPSCGLSFPWPEQVWFKASRVYTLVLGFVLPVCTICVLYTDLLRRLRAVRLRSGAKALGKARRKVTVLVLVVLAVCLLCWTPFHLASVVALTTDLPQTPLVISMSYVITSLSYANSCLNPFLYAFLDDNFRKNFRSILRC

SEQ ID NO: 1309 - protein, 344 aa, Homo sapiens
MDKFRMLFQHFQSSSESVMNGICLLLAAVTVKLYSSFDFNCPCLVHYNALYGLGLLLTPPLALFLCGLLANRQSVVMVEEWRRPAGHRRKDPGIIRYMCSSVLQRALAAPLVWILLALLDGKCFVCAFSSSVDPEKFLDFANMTPSQVQLFLAKVPCKEDELVRDSPARKAVSRYLRCLSQAIGWSVTLLLIIAAFLARCLRPCFDQTVFLQRRYWSNYVDLEQKLFDETCCEHARDFAHRCVLHFFASMRSELQARGLRRGNAGRRLELPAVPEPPEGLDSGSGKAHLRAISSREQVDRLLSTWYSSKPPLDLAASPGLCGGGLSHRAPTLALGTRLSQHTDV

SEQ ID NO: 1310 - protein, 594 aa, Homo sapiens
MSRPSSRAIYLHRKEYSQNLTSEPTLLQHRVEHLMTCKQGSQRVQGPEDALQKLFEMDAQGRVWSQDLILQVRDGWLQLLDIETKEELDSYRLDSIQAMNVALNTCSYNSILSITVQEPGLPGTSTLLFQCQEVGAERLKTSLQKALEEELEQSRPRLGGLQPGQDRWRGPAMERPLPMEQARYLEPGIPPEQPHQRTLEHSLPPSPRPLPRHTSAREPSAFTLPPPRRSSSPEDPERDEEVLNHVLRDIELFMGKLEKAQAKTSRKKKFGKKNKDQGGLTQAQYIDCFQKIKHSFNLLGRLATWLKETSAPELVHILFKSLNFILARCPEAGLAAQVISPLLTPKAINLLQSCLSPPESNLWMGLGPAWTTSRADWTGDEPLPYQPTFSDDWQLPEPSSQAPLGYQDPVSLRRGSHRLGSTSHFPQEKTHNHDPQPGDPNSRPSSPKPAQPALKMQVLYEFEARNPRELTVVQGEKLEVLDHSKRWWLVKNEAGRSGYIPSNILEPLQPGTPGTQGQSPSRVPMLRLSSRPEEVTDWLQAENFSTATVRTLGSLTGSQLLRIRPGELQMLCPQEAPRILSRLEAVRRMLGISP

SEQ ID NO: 1311 - protein, 237 aa, Homo sapiens
MPMILGYWDIRGLAHAIRLLLEYTDSSYEEKKYTMGDAPDYDRSQWLNEKFKLGLDFPNGMLGSLVAQLSFAGFPSIQLPYLIDGAHKITQSNAILCYIARKHNLCGETEEEKIRVDILENQTMDNHMQLGMICYNPEFEKLKPKYLEELPEKLKLYSEFLGKRPWFAGNKITFVDFLVYDVLDLHRIFEPKCLDAFPNLKDFISRFEGLEKISAYMKSSRFLPRPVFSKMAVWGNK

SEQ ID NO: 1312 - protein, 493 aa, Homo sapiens
MHPHRDPRGLWLLLPSLSLLLFEVARAGRAVVSCPAACLCASNILSCSKQQLPNVPHSLPSYTALLDLSHNNLSRLRAEWTPTRLTQLHSLLLSHNHLNFISSEAFSPVPNLRYLDLSSNQLRTLDEFLFSDLQVLEVLLLYNNHIMAVDRCAFDDMAQLQKLYLSQNQISRFPLELVKEGAKLPKLTLLDLSSNKLKNLPLPDLQKLPAWIKNGLYLHNNPLNCDCELYQLFSHWQYRQLSSVMDFQEDLYCMNSKKLHNVFNLSFLNCGEYKERAWEAHLGDTLIIKCDTKQQGMTKVWVTPSNERVLDEVTNGTVSVSKDGSLLFQQVQVEDGGVYTCYAMGETFNETLSVELKVHNFTLHGHHDTLNTAYTTLVGCILSVVLVLIYLYLTPCRCWCRGVEKPSSHQGDSLSSSMLSTTPNHDPMAGGDKDDGFDRRVAFLEPAGPGQGQNGKLKPGNTLPVPEATGKGQRRMSDPESVSSVFSDTPIVV

SEQ ID NO: 1313 - protein, 272 aa, Homo sapiens
MSSTESAGRTADKSPRQQVDRLLVGLRWRRLEEPLGFIKVLQWLFAIFAFGSCGSYSGETGAMVRCNNEAKDVSSIIVAFGYPFRLHRIQYEMPLCDEESSSKTMHLMGDFSAPAEFFVTLGIFSFFYTMAALVIYLRFHNLYTENKRFPLVDFCVTVSFTFFWLVAAAAWGKGLTDVKGATRPSSLTAAMSVCHGEEAVCSAGATPSMGLANISVLFGFINFFLWAGNCWFVFKETPWHGQGQGQDQDQDQDQGQGPSQESAAEQGAVEKQ

SEQ ID NO: 1314 - protein, 342 aa, Homo sapiens
MPFLLGLRQDKEACVGTNNQSYICDTGHCCGQSQCCNYYYELWWFWLVWTIIIILSCCCVCHHRRAKHRLQAQQRQHEINLIAYREAHNYSALPFYFRFLPNYLLPPYEEVVNRPPTPPPPYSAFQLQQQQLLPPQCGPAGGSPPGIDPTRGSQGAQSSPLSEPSRSSTRPPSIADPDPSDLPVDRAATKAPGMEPSGSVAGLGELDPGAFLDKDAECREELLKDDSSEHGAPDSKEKTPGRHRRFTGDSGIEVCVCNRGHHDDDLKEFNTLIDDALDGPLDFCDSCHVRPPGDEEEGLCQSSEEQAREPGHPHLPRPPACLLLNTINEQDSPNSQSSSSPS

SEQ ID NO: 1315 - protein, 1013 aa, Homo sapiens
MAEPGHSHHLSARVRGRTERRIPRLWRLLLWAGTAFQVTQGTGPELHACKESEYHYEYTACDSTGSRWRVAVPHTPGLCTSLPDPIKGTECSFSCNAGEFLDMKDQSCKPCAEGRYSLGTGIRFDEWDELPHGFASLSANMELDDSAAESTGNCTSSKWVPRGDYIASNTDECTATLMYAVNLKQSGTVNFEYYYPDSSIIFEFFVQNDQCQPNADDSRWMKTTEKGWEFHSVELNRGNNVLYWRTTAFSVWTKVPKPVLVRNIAITGVAYTSECFPCKPGTYADKQGSSFCKLCPANSYSNKGETSCHQCDPDKYSEKGSSSCNVRPACTDKDYFYTHTACDANGETQLMYKWAKPKICSEDLEGAVKLPASGVKTHCPPCNPGFFKTNNSTCQPCPYGSYSNGSDCTRCPAGTEPAVGFEYKWWNTLPTNMETTVLSGINFEYKGMTGWEVAGDHIYTAAGASDNDFMILTLVVPGFRPPQSVMADTENKEVARITFVFETLCSVNCELYFMVGVNSRTNTPVETWKGSKGKQSYTYIIEENTTTSFTWAFQRTTFHEASRKYTNDVAKIYSINVTNVMNGVASYCRPCALEASDVGSSCTSCPAGYYIDRDSGTCHSCPTNTILKAHQPYGVQACVPCGPGTKNNKIHSLCYNDCTFSRNTPTRTFNYNFSALANTVTLAGGPSFTSKGLKYFHHFTLSLCGNQGRKMSVCTDNVTDLRIPEGESGFSKSITAYVCQAVIIPPEVTGYKAGVSSQPVSLADRLIGVTTDMTLDGITSPAELFHLESLGIPDVIFFYRSNDVTQSCSSGRSTTIRVRCSPQKTVPGSLLLPGTCSDGTCDGCNFHFLWESAAACPLCSVADYHAIVSSCVAGIQKTTYVWREPKLCSGGISLPEQRVTICKTIDFWLKVGISAGTCTAILLTVLTCYFWKKNQKLEYKYSKLVMNATLKDCDLPAADSCAIMEGEDVEDDLIFTSKKSLFGKIKSFTSKRTPDGFDSVPLKTSSGGLDMDL

SEQ ID NO: 1316 - protein, 339 aa, Homo sapiens
MAGGPGPGEPAAPGAQHFLYEVPPWVMCRFYKVMDALEPADWCQFGGWRRAAGGREARGLLAPTPDAPRPAAALIVRDQTELRLCERSGQRTASVLWPWINRNARVADLVHILTHLQLLRARDIITAWHPPAPLPSPGTTAPRPSSIPAPAEAEAWSPRKLPSSASTFLSPAFPGSQTHSGPELGLVPSPASLWPPPPSPAPSSTKPGPESSVSLLQGARPFPFCWPLCEISRGTHNFSEELKIGEGGFGCVYRAVMRNTVYAVKRLKENADLEWTAVKQSFLTEVEQLSRPRPAHLSPGLSDWTSFWVQPGQFSFYIRTAPASSMETSRVPTSFWMRG

SEQ ID NO: 1317 - protein, 633 aa, Homo sapiens
MAGGPGPGEPAAPGAQHFLYEVPPWVMCRFYKVMDALEPADWCQFAALIVRDQTELRLCERSGQRTASVLWPWINRNARVADLVHILTHLQLLRARDIITAWHPPAPLPSPGTTAPRPSSIPAPAEAEAWSPRKLPSSASTFLSPAFPGSQTHSGPELGLVPSPASLWPPPPSPAPSSTKPGPESSVSLLQGARPFPFCWPLCEISRGTHNFSEELKIGEGGFGCVYRAVMRNTVYAVKRLKENADLEWTAVKQSFLTEVEQLSRFRHPNIVDFAGYCAQNGFYCLVYGFLPNGSLEDRLHCQTQACPPLSWPQRLDILLGTARAIQFLHQDSPSLIHGDIKSSNVLLDERLTPKLGDFGLARFSRFAGSSPSQSSMVARTQTVRGTLAYLPEEYIKTGRLAVDTDTFSFGVVVLETLAGQRAVKTHGARTKYLVYERLEKLQAVVAGVPGHSEAASCIPPSPQENSYVSSTGRAHSGAAPWQPLAAPSGASAQAAEQLQRGPNQPVESDESLGGLSAALRSWHLTPSCPLDPAPLREAGCPQGDTAGESSWGSGPGSRPTAVEGLALGSSASSSSEPPQIIINPARQKMVQKLALYEDGALDSLQLLSSSSLPGLGLEQDRQGPEESDEFQS

SEQ ID NO: 1318 - protein, 712 aa, Homo sapiens
MAGGPGPGEPAAPGAQHFLYEVPPWVMCRFYKVMDALEPADWCQFAALIVRDQTELRLCERSGQRTASVLWPWINRNARVADLVHILTHLQLLRARDIITAWHPPAPLPSPGTTAPRPSSIPAPAEAEAWSPRKLPSSASTFLSPAFPGSQTHSGPELGLVPSPASLWPPPPSPAPSSTKPGPESSVSLLQGARPFPFCWPLCEISRGTHNFSEELKIGEGGFGCVYRAVMRNTVYAVKRLKENADLEWTAVKQSFLTEVEQLSRFRHPNIVDFAGYCAQNGFYCLVYGFLPNGSLEDRLHCQTQACPPLSWPQRLDILLGTARAIQFLHQDSPSLIHGDIKSSNVLLDERLTPKLGDFGLARFSRFAGSSPSQSSMVARTQTVRGTLAYLPEEYIKTGRLAVDTDTFSFGVVVLETLAGQRAVKTHGARTKYLKDLVEEEAEEAGVALRSTQSTLQAGLAADAWAAPIAMQIYKKHLDPRPGPCPPELGLGLGQLACCCLHRRAKRRPPMTQVYERLEKLQAVVAGVPGHSEAASCIPPSPQENSYVSSTGRAHSGAAPWQPLAAPSGASAQAAEQLQRGPNQPVESDESLGGLSAALRSWHLTPSCPLDPAPLREAGCPQGDTAGESSWGSGPGSRPTAVEGLALGSSASSSSEPPQIIINPARQKMVQKLALYEDGALDSLQLLSSSSLPGLGLEQDRQGPEESDEFQS

SEQ ID NO: 1319 - protein, 300 aa, Homo sapiens
MRALEGPGLSLLCLVLALPALLPVPAVRGVAETPTYPWRDAETGERLVCAQCPPGTFVQRPCRRDSPTTCGPCPPRHYTQFWNYLERCRYCNVLCGEREEEARACHATHNRACRCRTGFFAHAGFCLEHASCPPGAGVIAPGTPSQNTQCQPCPPGTFSASSSSSEQCQPHRNCTALGLALNVPGSSSHDTLCTSCTGFPLSTRVPGAEECERAVIDFVAFQDISIKRLQRLLQALEAPEGWGPTPRAGRAALQLKLRRRLTELLGAQDGALLVRLLQALRVARMPGLERSVRERFLPVH

SEQ ID NO: 1320 - protein, 1219 aa, Homo sapiens
MPKIVLNGVTVDFPFQPYKCQQEYMTKVLECLQQKVNGILESPTGTGKTLCLLCTTLAWREHLRDGISARKIAERAQGELFPDRALSSWGNAAAAAGDPIACYTDIPKIIYASRTHSQLTQVINELRNTSYRPKVCVLGSREQLCIHPEVKKQESNHLQIHLCRKKVASRSCHFYNNVEEKSLEQELASPILDIEDLVKSGSKHRVCPYYLSRNLKQQADIIFMPYNYLLDAKSRRAHNIDLKGTVVIFDEAHNVEKMCEESASFDLTPHDLASGLDVIDQVLEEQTKAAQQGEPHPEFSADSPSPGLNMELEDIAKLKMILLRLEGAIDAVELPGDDSGVTKPGSYIFELFAEAQITFQTKGCILDSLDQIIQHLAGRAGVFTNTAGLQKLADIIQIVFSVDPSEGSPGSPAGLGALQSYKVHIHPDAGHRRTAQRSDAWSTTAARKRGKVLSYWCFSPGHSMHELVRQGVRSLILTSGTLAPVSSFALEMQIPFPVCLENPHIIDKHQIWVGVVPRGPDGAQLSSAFDRRFSEECLSSLGKALGNIARVVPYGLLIFFPSYPVMEKSLEFWRARDLARKMEALKPLFVEPRSKGSFSETISAYYARVAAPGSTGATFLAVCRGKASEGLDFSDTNGRGVIVTGLPYPPRMDPRVVLKMQFLDEMKGQGGAGGQFLSGQEWYRQQASRAVNQAIGRVIRHRQDYGAVFLCDHRFAFADARAQLPSWVRPHVRVYDNFGHVIRDVAQFFRVAERTMPAPAPRATAPSVRGEDAVSEAKSPGPFFSTRKAKSLDLHVPSLKQRSSGSPAAGDPESSLCVEYEQEPVPARQRPRGLLAALEHSEQRAGSPGEEQAHSCSTLSLLSEKRPAEEPRGGRKKIRLVSHPEEPVAGAQTDRAKLFMVAVKQELSQANFATFTQALQDYKGSDDFAALAACLGPLFAEDPKKHNLLQGFYQFVRPHHKQQFEEVCIQLTGRGCGYRPEHSIPRRQRAQPVLDPTGRTAPDPKLTVSTAAAQQLDPQEHLNQGRPHLSPRPPPTGDPGSQPQWGSGVPRAGKQGQHAVSAYLADARRALGSAGCSQLLAALTAYKQDDDLDKVLAVLAALTTAKPEDFPLLHRFSMFVRPHHKQRFSQTCTDLTGRPYPGMEPPGPQEERLAVPPVLTHRAPQPGPSRSEKTGKTQSKISSFLRQRPAGTVGAGGEDAGPSQSSGPPHGPAASEWGL

SEQ ID NO: 1321 - protein, 435 aa, Homo sapiens
MCGGVRGVGTGGIVSTAFCLLYKLFTLKLTRKQVMGLITHTDSPYIRALGFMYIRYTQPPTDLWDWFESFLDDEEDLDVKAGGGCVMTIGEMLRSFLTKLEWFSTLFPRIPVPVQKNIDQQIKTRPRKIKKDGKEGAEEIDRHVERRRSRSPRRSLSPRRSPRRSRSRSHHREGHGSSSFDRELEREKERQRLEREAKEREKERRRSRSIDRGLERRRSRSRERHRSRSRSRDRKGDRRDRDREREKENERGRRRDRDYDKERGNEREKERERSRERSKEQRSRGEVEEKKHKEDKDDRRHRDDKRDSKKEKKHSRSRSRERKHRSRSRSRNAGKRSRSRSKEKSSKHKNESKEKSNKRSRSGSQGRTDSVEKSKKREHSPSKEKSRKRSRSKERSHKRDHSDSKDQSDKHDRRRSQSIEQESQEKQHKNKDETV

SEQ ID NO: 1322 - protein, 546 aa, Homo sapiens
MANNSPALTGNSQPQHQAAAAAAQQQQQCGGGGATKPAVSGKQGNVLPLWGNEKTMNLNPMILTNILSSPYFKVQLYELKTYHEVVDEIYFKVTHVEPWEKGSRKTAGQTGMCGGVRGVGTGGIVSTAFCLLYKLFTLKLTRKQVMGLITHTDSPYIRALGFMYIRYTQPPTDLWDWFESFLDDEEDLDVKAGGGCVMTIGEMLRSFLTKLEWFSTLFPRIPVPVQKNIDQQIKTRPRKIKKDGKEGAEEIDRHVERRRSRSPRRSLSPRRSPRRSRSRSHHREGHGSSSFDRELEREKERQRLEREAKEREKERRRSRSIDRGLERRRSRSRERHRSRSRSRDRKGDRRDRDREREKENERGRRRDRDYDKERGNEREKERERSRERSKEQRSRGEVEEKKHKEDKDDRRHRDDKRDSKKEKKHSRSRSRERKHRSRSRSRNAGKRSRSRSKEKSSKHKNESKEKSNKRSRSGSQGRTDSVEKSKKREHSPSKEKSRKRSRSKERSHKRDHSDSKDQSDKHDRRRSQSIEQESQEKQHKNKDETV

SEQ ID NO: 1323 - protein, 375 aa, Homo sapiens
MSQPKKRKLESGGGGEGGEGTEEEDGAEREAALERPRRTKRERDQLYYECYSDVSVHEEMIADRVRTDAYRLGILRNWAALRGKTVLDVGAGTGILSIFCAQAGARRVYAVEASAIWQQAREVVRFNGLEDRVHVLPGPVETVELPEQVDAIVSEWMGYGLLHESMLSSVLHARTKWLKEGGLLLPASAELFIAPISDQMLEWRLGFWSQVKQHYGVDMSCLEGFATRCLMGHSEIVVQGLSGEDVLARPQRFAQLELSRAGLEQELEAGVGGRFRCSCYGSAPMHGFAIWFQVTFPGGESEKPLVLSTSPFHPATHWKQALLYLNEPVQVEQDTDVSGEITLLPSRDNPRRLRVLLRYKVGDQEEKTKDFAMED

SEQ ID NO: 1324 - protein, 1806 aa, Homo sapiens
MEPWSSRWKTKRWLWDFTVTTLALTFLFQAREVRGAAPVDVLKALDFHNSPEGISKTTGFCTNRKNSKGSDTAYRVSKQAQLSAPTKQLFPGGTFPEDFSILFTVKPKKGIQSFLLSIYNEHGIQQIGVEVGRSPVFLFEDHTGKPAPEDYPLFRTVNIADGKWHRVAISVEKKTVTMIVDCKKKTTKPLDRSERAIVDTNGITVFGTRILDEEVFEGDIQQFLITGDPKAAYDYCEHYSPDCDSSAPKAAQAQEPQIDEYAPEDIIEYDYEYGEAEYKEAESVTEGPTVTEETIAQTEANIVDDFQEYNYGTMESYQTEAPRHVSGTNEPNPVEEIFTEEYLTGEDYDSQRKNSEDTLYENKEIDGRDSDLLVDGDLGEYDFYEYKEYEDKPTSPPNEEFGPGVPAETDITETSINGHGAYGEKGQKGEPAVVEPGMLVEGPPGPAGPAGIMGPPGLQGPTGPPGDPGDRGPPGRPGLPGADGLPGPPGTMLMLPFRYGGDGSKGPTISAQEAQAQAILQQARIALRGPPGPMGLTGRPGPVGGPGSSGAKGESGDPGPQGPRGVQGPPGPTGKPGKRGRPGADGGRGMPGEPGAKGDRGFDGLPGLPGDKGHRGERGPQGPPGPPGDDGMRGEDGEIGPRGLPGEAGPRGLLGPRGTPGAPGQPGMAGVDGPPGPKGNMGPQGEPGPPGQQGNPGPQGLPGPQGPIGPPGEKGPQGKPGLAGLPGADGPPGHPGKEGQSGEKGALGPPGPQGPIGYPGPRGVKGADGVRGLKGSKGEKGEDGFPGFKGDMGLKGDRGEVGQIGPRGEDGPEGPKGRAGPTGDPGPSGQAGEKGKLGVPGLPGYPGRQGPKGSTGFPGFPGANGEKGARGVAGKPGPRGQRGPTGPRGSRGARGPTGKPGPKGTSGGDGPPGPPGERGPQGPQGPVGFPGPKGPPGPPGKDGLPGHPGQRGETGFQGKTGPPGPGGVVGPQGPTGETGPIGERGHPGPPGPPGEQGLPGAAGKEGAKGDPGPQGISGKDGPAGLRGFPGERGLPGAQGAPGLKGGEGPQGPPGPVGSPGERGSAGTAGPIGLPGRPGPQGPPGPAGEKGAPGEKGPQGPAGRDGVQGPVGLPGPAGPAGSPGEDGDKGEIGEPGQKGSKGDKGENGPPGPPGLQGPVGAPGIAGGDGEPGPRGQQGMFGQKGDEGARGFPGPPGPIGLQGLPGPPGEKGENGDVGPMGPPGPPGPRGPQGPNGADGPQGPPGSVGSVGGVGEKGEPGEAGNPGPPGEAGVGGPKGERGEKGEAGPPGAAGPPGAKGPPGDDGPKGNPGPVGFPGDPGPPGEPGPAGQDGVGGDKGEDGDPGQPGPPGPSGEAGPPGPPGKRGPPGAAGAEGRQGEKGAKGEAGAEGPPGKTGPVGPQGPAGKPGPEGLRGIPGPVGEQGLPGAAGQDGPPGPMGPPGLPGLKGDPGSKGEKGHPGLIGLIGPPGEQGEKGDRGLPGTQGSPGAKGDGGIPGPAGPLGPPGPPGLPGPQGPKGNKGSTGPAGQKGDSGLPGPPGSPGPPGEVIQPLPILSSKKTRRHTEGMQADADDNILDYSDGMEEIFGSLNSLKQDIEHMKFPMGTQTNPARTCKDLQLSHPDFPDGEYWIDPNQGCSGDSFKVYCNFTSGGETCIYPDKKSEGVRISSWPKEKPGSWFSEFKRGKLLSYLDVEGNSINMVQMTFLKLLTASARQNFTYHCHQSAAWYDVSSGSYDKALRFLGSNDEEMSYDNNPFIKTLYDGCASRKGYEKTVIEINTPKIDQVPIVDVMINDFGDQNQKFGFEVGPVCFLG

SEQ ID NO: 1325 - protein, 1025 aa, Homo sapiens
MAPVLSKDSADIESILALNPRTQTHATLCSTSAKKLDKKHWKRNPDKNCFNCEKLENNFDDIKHTTLGERGALREAMRCLKCADAPCQKSCPTNLDIKSFITSIANKNYYGAAKMIFSDNPLGLTCGMVCPTSDLCVGGCNLYATEEGPINIGGLQQFATEVFKAMSIPQIRNPSLPPPEKMSEAYSAKIALFGAGPASISCASFLARLGYSDITIFEKQEYVGGLSTSEIPQFRLPYDVVNFEIELMKDLGVKIICGKSLSVNEMTLSTLKEKGYKAAFIGIGLPEPNKDAIFQGLTQDQGFYTSKDFLPLVAKGSKAGMCACHSPLPSIRGVVIVLGAGDTAFDCATSALRCGARRVFIVFRKGFVNIRAVPEEMELAKEEKCEFLPFLSPRKVIVKGGRIVAMQFVRTEQDETGKWNEDEDQMVHLKADVVISAFGSVLSDPKVKEALSPIKFNRWGLPEVDPETMQTSEAWVFAGGDVVGLANTTVESVNDGKQASWYIHKYVQSQYGASVSAKPELPLFYTPIDLVDISVEMAGLKFINPFGLASATPATSTSMIRRAFEAGWGFALTKTFSLDKDIVTNVSPRIIRGTTSGPMYGPGQSSFLNIELISEKTAAYWCQSVTELKADFPDNIVIASIMCSYNKNDWTELAKKSEDSGADALELNLSCPHGMGERGMGLACGQDPELVRNICRWVRQAVQIPFFAKLTPNVTDIVSIARAAKEGGANGVTATNTVSGLMGLKSDGTPWPAVGIAKRTTYGGVSGTAIRPIALRAVTSIARALPGFPILATGGIDSAESGLQFLHSGASVLQVCSAIQNQDFTVIEDYCTGLKALLYLKSIEELQDWDGQSPATVSHQKGKPVPRIAELMDKKLPSFGPYLEQRKKIIAENKIRLKEQNVAFSPLKRNCFIPKRPIPTIKDVIGKALQYLGTFGELSNVEQVVAMIDEEMCINCGKCYMTCNDSGYQAIQFDPETHLPTITDTCTGCTLCLSVCPIVDCIKMVSRTTPYEPKRGVPLSVNPVC

SEQ ID NO: 1326 - protein, 304 aa, Homo sapiens
MLPPPRPAAALALPVLLLLLVVLTPPPTGARPSPGPDYLRRGWMRLLAEGEGCAPCRPEECAAPRGCLAGRVRDACGCCWECANLEGQLCDLDPSAHFYGHCGEQLECRLDTGGDLSRGEVPEPLCACRSQSPLCGSDGHTYSQICRLQEAARARPDANLTVAHPGPCESGPQIVSHPYDTWNVTGQDVIFGCEVFAYPMASIEWRKDGLDIQLPGDDPHISVQFRGGPQRFEVTGWLQIQAVRPSDEGTYRCLGRNALGQVEAPASLTVLTPDQLNSTGIPQLRSLNLVPEEEAESEENDDYY

SEQ ID NO: 1327 - protein, 734 aa, Homo sapiens
MPKECSAFHALSAALCCFYHRKSFIGVKFSKERHIMDRTPEKLKKELEEELLLSSEDLRSHAWYHGRIPRQVSENLVQRDGDFLVRDSLSSPGNFVLTCQWKNLAQHFKINRTVLRLSEAYSRVQYQFEMESFDSIPGLVRCYVGNRRPISQQSGAIIFQPINRTVPLRCLEEHYGTSPGQAREGSLTKGRPDVAKRLSLTMGGVQAREQNLPRGNLLRNKEKSGSQPACLDHMQDRRALSLKAHQSESYLPIGCKLPPQSSGVDTSPCPNSPVFRTGSEPALSPAVVRRVSSDARAGEALRGSDSQLCPKPPPKPCKVPFLKVPSSPSAWLNSEANYCELNPAFATGCGRGAKLPSCAQGSHTELLTAKQNEAPGPRNSGVNYLILDDDDRERPWEPAAAQMEKGQWDKGEFVTPLLETVSSFRPNEFESKFLPPENKPLETAMLKRAKELFTNNDPKVIAQHVLSMDCRVARILGVSEEMRRNMGVSSGLELITLPHGHQLRLDIIERHNTMAIGIAVDILGCTGTLEDRAATLSKIIQVAVELKDSMGDLYSFSALMKALEMPQITRLEKTWTALRHQYTQTAILYEKQLKPFSKLLHEGRESTCVPPNNVSVPLLMPLVTLMERQAVTFEGTDMWEKNDQSCEIMLNHLATARFMAEAADSYRMNAERILAGFQPDEEMNEICKTEFQMRLLWGSKGAQVNQTERYEKFNQILTALSRKLEPPPVKQAEL

SEQ ID NO: 1328 - protein, 838 aa, Homo sapiens
MWGRLWPLLLSILTATAVPGPSLRRPSRELDATPRMTIPYEELSGTRHFKGQAQNYSTLLLEEASARLLVGARGALFSLSANDIGDGAHKEIHWEASPEMQSKCHQKGKNNQTECFNHVRFLQRLNSTHLYACGTHAFQPLCAAIDAEAFTLPTSFEEGKEKCPYDPARGFTGLIIDGGLYTATRYEFRSIPDIRRSRHPHSLRTEETPMHWLNDAEFVFSVLVRESKASAVGDDDKVYYFFTERATEEGSGSFTQSRSSHRVARVARVCKGDLGGKKILQKKWTSFLKARLICHIPLYETLRGVCSLDAETSSRTHFYAAFTLSTQWKTLEASAICRYDLAEIQAVFAGPYMEYQDGSRRWGRYEGGVPEPRPGSCITDSLRSQGYNSSQDLPSLVLDFVKLHPLMARPVVPTRGRPLLLKRNIRYTHLTGTPVTTPAGPTYDLLFLGTADGWIHKAVVLGSGMHIIEETQVFRESQSVENLVISLLQHSLYVGAPSGVIQLPLSSCSRYRSCYDCILARDPYCGWDPGTHACAAATTIANRTALIQDIERGNRGCESSRDTGPPPPLKTRSVLRGDDVLLPCDQPSNLARALWLLNGSMGLSDGQGGYRVGVDGLLVTDAQPEHSGNYGCYAEENGLRTLLASYSLTVRPATPAPAPKAPATPGAQLAPDVRLLYVLAIAALGGLCLILASSLLYVACLREGRRGRRRKYSLGRASRAGGSAVQLQTVSGQCPGEEDEGDDEGAGGLEGSCLQIIPGEGAPAPPPPPPPPPPAELTNGLVALPSRLRRMNGNSYVLLRQSNNGVPAGPCSFAEELSRILEKRKHTQLVEQLDESSV

SEQ ID NO: 1329 - protein, 1507 aa, Homo sapiens
FEFCAAGVRWFSELCPRLPRAGARERVRGFLTQTRVRSAQSPGGSLPSDDLGEMESSSSDYYNKDNEEESLLANVASLRHELKITEWSLQSLGEELSSVSPSENSDYAPNPSRSEKLILDVQPSHPGLLNYSPYENVCKISGSSTDFQKKPRDKMFSSSAPVDQEIKSLREKLNKLRQQNACLVTQNHSLMTKFESIHFELTQSRAKVSMLESAQQQAASVPILEEQIINLEAEVSAQDKVLREAENKLEQSQKMVIEKEQSLQESKEECIKLKVDLLEQTKQGKRAERQRNEALYNAEELSKAFQQYKKKVAEKLEKVQAEEEILERNLTNCEKENKRLQERCGLYKSELEILKEKLRQLKEENNNGKEKLRIMAVKNSEVMAQLTESRQSILKLESELENKDEILRDKFSLMNENRELKVRVAAQNERLDLCQQEIESSRVELRSLEKIISQLPLKRELFGFKSYLSKYQMSSFSNKEDRCIGCCEANKLVISELRIKLAIKEAEIQKLHANLTANQLSQSLITCNDSQESSKLSSLETEPVKLGGHQVESVKDQNQHTMNKQYEKERQRLVTGIEELRTKLIQIEAENSDLKVNMAHRTSQFQLIQEELLEKASNSSKLESEMTKKCSQLLTLEKQLEEKIVAYSSIAAKNAELEQELMEKNEKIRSLETNINTEHEKICLAFEKAKKIHLEQHKEMEKQIERLEAQLEKKDQQFKEQEKTMSMLQQDIICKQHHLESLDRLLTESKGEMKKENMKKDEALKALQNQVSEETIKVRQLDSALEICKEELVLHLNQLEGNKEKFEKQLKKKSEEVYCLQKELKIKNHSLQETSEQNVILQHTLQQQQQMLQQETIRNGELEDTQTKLEKQVSKLEQELQKQRESSAEKLRKMEEKCESAAHEADLKRQKVIELTGTARQVKIEMDQYKEELSKMEKEIMHLKRDGENKAMHLSQLDMILDQTKTELEKKTNAVKELEKLQHSTETELTEALQKREVLETELQNAHGELKSTLRQLQELRDVLQKAQLSLEEKYTTIKDLTAELRECKMEIEDKKQELLEMDQALKERNWELKQRAAQVTHLDMTIREHRGEMEQKIIKLEGTLEKSELELKECNKQIESLNDKLQNAKEQLREKEFIMLQNEQEISQLKKEIERTQQRMKEMESVMKEQEQYIATQYKEAIDLGQELRLTREQVQNSHTELAEARHQQVQAQREIERLSSELEDMKQLSKEKDAHGNHLAEELGASKVREAHLEARMQAEIKKLSAEVESLKEAYHMEMISHQENHAKWKISADSQKSSVQQLNEQLEKAKLELEEAQDTVSNLHQQVQDRNEVIEAANEALLTKESELTRLQAKISGHEKAEDIKFLPAPFTSPTEIMPDVQDPKFAKCFHTSFSKCTKLRRSISASDLTFKIHGDEDLSEELLQDLKKMQLEQPSTLEESHKNLTYTQPDSFKPLTYNLEADSSENNDFNTLSGMLRYINKEVRLLKKSSMQTGAGLNQGENV

SEQ ID NO: 1330 - protein, 810 aa, Homo sapiens
MVTNKMTAAFRNPSGKQVATDKVAEKLSSTLSWVKNTVSHTVSQMASQVASPSTSLHTTSSSTTLSTPALSPSSPSQLSPDDLELLAKLEEQNRLLETDSKSLRSVNGSRRNSGSSLVSSSSASSNLSHLEEDSWILWGRIVNEWEDVRKKKEKQVKELVHKGIPHHFRAIVWQLLCSAQSMPIKDQYSELLKMTSPCEKLIRRDIARTYPEHNFFKEKDSLGQEVLFNVMKAYSLVDREVGYCQGSAFIVGLLLMQMPEEEAFCVFVKLMQDYRLRELFKPSMAELGLCMYQFECMIQEHLPELFVHFQSQSFHTSMYASSWFLTIFLTTFPLPIATRIFDIFMSEGLEIVFRVGLALLQMNQAELMQLDMEGMLQHFQKVIPHQFDGVPDKLIQAAYQVKYNSKKMKKLEKEYTTIKTKEMEEQVEIKRLRTENRLLKQRIETLEKHKCSSNYNEDFVLQLEKELVQARLSEAESQCALKEMQDKVLDIEKRNNSLPDENNIARLQEELIAVKLREAEAIMGLKELRQQVKDLEEHWQRHLARTTGRWKDPPKKNAMNELQDELMTIRLREAETQAEIREIKQRMMEMETQNQINSNHLRRAEQEVISLQEKVQYLSAQNKGLLTQLSEAKRKQAEIECKNKEEVMAVRLREADSIAAVAELRQHIAELEIQKEEGKLQGQLNKSDSNQYIGELKDQIAELNHELRCLKGQRGFSGQPPFDGIHIVNHLIGDDESFHSSDEDFIDNSLQETGVGFPLHGKSGSMSLDPAVADGSESETEDSVLETRESNQVVQKERPPRRRESYSTTV

SEQ ID NO: 1331 - protein, 108 aa, Homo sapiens
MTPSRLPWLLSWVSATAWRAARSPLLCHSLRKTSSSQGGKSELVKQSLKKPKLPEGRFDAPEDSHLEKEPLEKFPDDVNPVTKEKGGPRGPEPTRYGDWERKGRCIDF

SEQ ID NO: 1332 - protein, 581 aa, Homo sapiens
MAASGRGLCKAVAASPFPAWRRDNTEARGGLKPEYDAVVIGAGHNGLVAAAYLQRLGVNTAVFERRHVIGGAAVTEEIIPGFKFSRASYLLSLLRPQIYTDLELKKHGLRLHLRNPYSFTPMLEEGAGSKVPRCLLLGTDMAENQKQIAQFSQKDAQVFPKYEEFMHRLALAIDPLLDAAPVDMAAFQHGSLLQRMRSLSTLKPLLKAGRILGAQLPRYYEVLTAPITKVLDQWFESEPLKATLATDAVIGAMTSPHTPGSGYVLLHHVMGGLEGMQGAWGYVQGGMGALSDAIASSATTHGASIFTEKTVAKVQVNSEGCVQGVVLEDGTEVRSKMVLSNTSPQITFLKLTPQEWLPEEFLERISQLDTRSPVTKINVAVDRLPSFLAAPNAPRGQPLPHHQCSIHLNCEDTLLLHQAFEDAMDGLPSHRPVIELCIPSSLDPTLAPPGCHVVSLFTQYMPYTLAGGKAWDEQERDAYADRVFDCIEVYAPGFKDSVVGRDILTPPDLERIFGLPGGNIFHCAMSLDQLYFARPVPLHSGYRCPLQGLYLCGSGAHPGGGVMGAAGRNAAHVAFRDLKSM

SEQ ID NO: 1333 - protein, 3165 aa, Homo sapiens
MTDKSIVILSLMVFHSSFINGKTCRRQLVEEWHPQPSSYVVNWTLTENICLDFYRDCWFLGVNTKIDTSGNQAVPQICPLQIQLGDILVISSEPSLQFPEINLMNVSETSFVGCVQNTTTEDQLLFGCRLKGMHTVNSKWLSVGTHYFITVMASGPSPCPLGLRLNVTVKQQFCQESLSSEFCSGHGKCLSEAWSKTYSCHCQPPFSGKYCQELDACSFKPCKNNGSCINKRENWDEQAYECVCHPPFTGKNCSEIIGQCQPHVCFHGNCSNITSNSFICECDEQFSGPFCEVSAKPCVSLLFWKRGICPNSSSAYTYECPKGSSSQNGETDVSEFSLVPCQNGTDCIKISNDVMCICSPIFTDLLCKSIQTSCESFPLRNNATCKKCEKDYPCSCISGFTEKNCEKAIDHCKLLSINCLNEEWCFNIIGRFKYVCIPGCTKNPCWFLKNVYLIHQHLCYCGVTFHGICQDKGPAQFEYVWQLGFAGSEGEKCQGVIDAYFFLAANCTEDATYVNDPEDNNSSCWFPHEGTKEICANGCSCLSEEDSQEYRYLCFLRWAGNMYLENTTDDQENECQHEAVCKDEINRPRCSCSLSYIGRLCVVNVDYCLGNHSISVHGLCLALSHNCNCSGLQRYERNICEIDTEDCKSASCKNGTTSTHLRGYFFRKCVPGFKGTQCEIDIDECASHPCKNGATCIDQPGNYFCQCVPPFKVVDGFSCLCNPGYVGIRCEQDIDDCILNACEHNSTCKDLHLSYQCVCLSDWEGNFCEQESNECKMNPCKNNSTCTDLYKSYRCECTSGWTGQNCSEEINECDSDPCMNGGLCHESTIPGQFVCLCPPLYTGQFCHQRYNLCDLLHNPCRNNSTCLALVDANQHCICREEFEGKNCEIDVKDCLFLSCQDYGDCEDMVNNFRCICRPGFSGSLCEIEINECSSEPCKNNGTCVDLTNRFFCNCEPEYHGPFCELDVNKCKISPCLDEENCVYRTDGYNCLCAPGYTGINCEINLDECLSEPCLHDGVCIDGINHYTCDCKSGFFGTHCETNANDCLSNPCLHGRCTELINEYPCSCDADGTSTQCKIKINDCTSIPCMNEGFCQKSAHGFTCICPRGYTGAYCEKSIDNCAEPELNSVICLNGGICVDGPGHTFDCRCLPGFSGQFCEININECSSSPCLHGADCEDHINGYVCKCQPGWSGHHCENELECIPNSCVHELCMENEPGSTCLCTPGFMTCSIGLLCGDEIRRITCLTPIFQRTDPISTQTYTIPPSETLVSSFPSIKATRIPAIMDTYPVDQGPKQTGIVKHDILPTTGLATLRISTPLESYLLQELIVTRELSAKHSLLSSADVSSSRFLNFGIRDPAQIVQDKTSVSHMPIRTSAATLGFFFPDRRARTPFIMSSLMSDFIFPTQSLLFENCQTVALSATPTTSVIRSIPGADIELNRQSLLSRGFLLIAASISATPVVSRGAQEDIEEYSADSLISRREHWRLLSPSMSPIFPAKVIISKQVTILNSSALHRFSTKAFNPSEYQAITEASSNQRLTNIKSQAADSLRELSQTCATCSMTEIKSSREFSDQVLHSKQSHFYETFWMNSAILASWYALMGAQTITSGHSFSSATEITPSVAFTEVPSLFPSKKSAKRTILSSSLEESITLSSNLDVNLCLDKTCLSIVPSQTISSDLMNSDLTSKMTTDELSVSENILKLLKIRQYGITMGPTEVLNQESLLDMEKSKGSHTLFKLHPSDSSLDFELNLQIYPDVTLKTYSEITHANDFKNNLPPLTGSVPDFSEVTTNVAFYTVSATPALSIQTSSSMSVIRPDWPYFTDYMTSLKKEVKTSSEWSKWELQPSVQYQEFPTASRHLPFTRSLTLSSLESILAPQRLMISDFSCVRYYGDSYLEFQNVALNPQNNISLEFQTFSSYGLLLYVKQDSNLVDGFFIQLFIENGTLKYHFYCPGEAKFKSINTTVRVDNGQKYTLLIRQELDPCNAELTILGRNTQICESINHVLGKPLPKSGSVFIGGFPDLHGKIQMPVPVKNFTGCIEVIEINNWRSFIPSKAVKNYHINNCRSQGFMLSPTASFVDASDVTQGVDTMWTSVSPSVAAPSVCQQDVCHNGGTCHAIFLSSGIVSFQCDCPLHFTGRFCEKDAGLFFPSFNGNSYLELPFLKFVLEKEHNRTVTIYLTIKTNSLNGTILYSNGNNCGKQFLHLFLVEGRPSVKYGCGNSQNILTVSANYSINTNAFTPITIRYTTPVGSPGVVCMIEMTADGKPPVQKKDTEISHASQAYFESMFLGHIPANVQIHKKAGPVYGFRGCILDLQVNNKEFFIIDEARHGKNIENCHVPWCAHHLCRNNGTCISDNENLFCECPRLYSGKLCQFASCENNPCGNGATCVPKSGTDIVCLCPYGRSGPLCTDAINITQPRFSGTDAFGYTSFLAYSRISDISFHYEFHLKFQLANNHSALQNNLIFFTGQKGHGLNGDDFLAVGLLNGSVVYSYNLGSGIASIRSEPLNLSLGVHTVHLGKFFQEGWLKVDDHKNKSIIAPGRLVGLNVFSQFYVGGYSEYTPDLLPNGADFKNGFQGCIFTLQVRTEKDGHFRGLGNPEGHPNAGRSVGQCHASPCSLMKCGNGGTCIESGTSVYCNCTTGWKGSFCTETVSTCDPEHDPPHHCSRGATCISLPHGYTCFCPLGTTGIYCEQALILIVILEKPKPAERKVKKEALSISDPSFRSNELSWMSFASFHVRKKTHIQLQFQPLAADGILFYAAQHLKAQSGDFLCISLVNSSVQLRYNLGDRTIILETLQKVTINGSTWHIIKAGRVGAEGYLDLDGINVTEKASTKMSSLDTNTDFYIGGVSSLNLVNPMAIENEPVGFQGCIRQVIINNQELQLTEFGAKGGSNVGDCDGTACGYNTCRNGGECTVNGTTFSCRCLPDWAGNTCNQSVSCLNNLCLHQSLCIPDQSFSYSCLCTLGWVGRYCENKTSFSTAKFMGNSYIKYIDPNYRMRNLQFTTISLNFSTTKTEGLIVWMGIAQNEENDFLAIGLHNQTLKIAVNLGERISVPMSYNNGTFCCNKWHHVVVIQNQTLIKAYINNSLILSEDIDPHKNFVALNYDGICYLGGFEYGRKVNIVTQEIFKTNFVGKIKDVVFFQEPKNIELIKLEGYNVYDGDEQNEVT

SEQ ID NO: 1334 - protein, 509 aa, Homo sapiens
MNNEEDLLQEDSTRDEGNETEANSMNTLRRTRKKVTKPYVCSTEVGETDMSNSNDCMRDSSQILTPPQLSSRMKHIRQAMAKNRLQFVRFEATDLHGVSRSKTIPAHFFQEKVSHGVCMPRGYLEVIPNPKDNEMNNIRATCFNSDIVLMPELSTFRVLPWADRTARVICDTFTVTGEPLLTSPRYIAKRQLSHLQASGFSLLSAFIYDFCIFGVPEILNSKIISFPALTFLNNHDQPFMQELVDGLYHTGANVESFSSSTRPGQMEISFLPEFGISSADNAFTLRTGVKEVARKYNYIASFFIETGFCDSGILSHSLWDVDRKKNMFCSTSGTEQLTITGKKWLAGLLKHSAALSCLMAPSVSCRKRYSKDRKDLKKSVPTTWGYNDNSCIFNIKCHGEKGTRIENKLGSATANPYLVLAATVAAGLDGLHSSNEVLAGPDESTDFYQVEPSEIPLKLEDALVALEEDQCLRQALGETFIRYFVAMKKYELENEEIAAERNKFLEYFI

SEQ ID NO: 1335 - protein, 452 aa, Homo sapiens
MEVTTRLTWNDENHLRKLLGNVSLSLLYKSSVHGGSIEDMVERCSRQGCTITMAYIDYNMIVAFMLGNYINLHESSTEPNDSLWFSLQKKNDTTEIETLLLNTAPKIIDEQLVCRLSKTDIFIICRDNKIYLDKMITRNLKLRFYGHRQYLECEVFRVEGIKDNLDDIKRIIKAREHRNRLLADIRDYRPYADLVSEIRILLVGPVGSGKSSFFNSVKSIFHGHVTGQAVVGSDITSITERYRIYSVKDGKNGKSLPFMLCDTMGLDGAEGAGLCMDDIPHILKGCMPDRYQFNSRKPITPEHSTFITSPSLKDRIHCVAYVLDINSIDNLYSKMLAKVKQVHKEVLNCGIAYVALLTKVDDCSEVLQDNFLNMSRSMTSQSRVMNVHKMLGIPISNILMVGNYASDLELDPMKDILILSALRQMLRAADDFLEDLPLEETGAIERALQPCI

SEQ ID NO: 1336 - protein, 315 aa, Homo sapiens
MPLKLRGKKKAKSKETAGLVEGEPTGAGGGSLSASRAPARRLVFHAQLAHGSATGRVEGFSSIQELYAQIAGAFEISPSEILYCTLNTPKIDMERLLGGQLGLEDFIFAHVKGIEKEVNVYKSEDSLGLTITDNGVGYAFIKRIKDGGVIDSVKTICVGDHIESINGENIVGWRHYDVAKKLKELKKEELFTMKLIEPKKAFEIELRSKAGKSSGEKIGCGRATLRLRSKGPATVEEMPSETKAKAIEKIDDVLELYMGIRDIDLATTMFEAGKDKVNPDEFAVALDETLGDFAFPDEFVFDVWGVIGDAKRRGL

SEQ ID NO: 1337 - protein, 400 aa, Homo sapiens
MAEKILEKLDVLDKQAEIILARRTKINRLQSEGRKTTMAIPLTFDFQLEFEEALATSASKAISKIKEDKSCSITKSKMHVSFKCEPEPRKSNFEKSNLRPFFIQTNVKNKESESTAQIEKKPRKPLDSVGLLEGDRNKRKKSPQMNDFNIKENKSVRNYQLSKYRSVRKKSLLPLCFEDELKNPHAKIVNVSPTKTVTSHMEQKDTNPIIFHDTEYVRMLLLTKNRFSSHPLENENIYPHKRTNFILERNCEILKSIIGNQSISLFKPQKTMPTVQRKDIQIPMSFKAGHTTVDDKLKKKTNKQTLENRSWNTLYNFSQNFSSLTKQFVGYLDKAVIHEMSAQTGKFERMFSAGKPTSIPTSSALPVKCYSKPFKYIYELNNVTPLDNLLNLSNEILNAS

SEQ ID NO: 1338 - protein, 4074 aa, Homo sapiens
MTAWLISLMSIEVLLLAVRHLSLHIEPEEGSLAGGTWITVIFDGLELGVLYPNNGSQLEIHLVNVNMVVPALRSVPCDVFPVFLDLPVVTCRTRSVLSEAHEGLYFLEAYFGGQLVSSPNPGPRDSCTFKFSKAQTPIVHQVYPPSGVPGKLIHVYGWIITGRLETFDFDAEYIDSPVILEAQGDKWVTPCSLINRQMGSCYPIQEDHGLGTLQCHVEGDYIGSQNVSFSVFNKGKSMVHKKAWLISAKQDLFLYQTHSEILSVFPETGSLGGRTNITITGDFFDNSAQVTIAGIPCDIRHVSPRKIECTTRAPGKDVRLTTPQPGNRGLLFEVGDAVEGLELTEATPGYRWQIVPNASSPFGFWSQEGQPFRARLSGFFVAPETNNYTFWIQADSQASLHFSWSEEPRTKVKVASISVGTADWFDSWEQNRDEGTWQQKTPKLELLGGAMYYLEAEHHGIAPSRGMRIGVQIHNTWLNPDVVTTYLREKHQIRVRAQRLPEVQVLNVSGRGNFFLTWDNVSSQPIPANATAHLIQTTIEELLAVKCKLEPLWSNILLRLGFERGPEVSNSDGDLTSGTEPFCGRFSLRQPRHLVLTPPAAQKGYRLDQYTHLCLAYKGHMNKILKMIVSFTIGFQNMVKNTTCDWSLTRTSPESWQFDCTDLWETCVRCFGDLQPPPANSPVLVHQINLLPLAQETGLFYVDEIIIADTNVTVSQADSGTARPGGNLVESVSVVGSPPVYSVTSWLAGCGTELPLITARSVPTEGTEEGSGLVLVTTQRRQRTSPPLGGHFRIQLPNTVISDVPVQISAHHLHQLLQNNADDFTSRYLNASDFTVKEDLYTCYEHVWTLSWSTQIGDLPNFIRVSDENLTGVNPAAATRVVYDGGVFLGPIFGDMLATANQHTQVVVRVNDVPAHCPGSCSFQYLQGSTPCVHSVWYSIDGDINLMIYITGTGFSGDSQFLQVTVNKTSCKVIFSNQTNVVCQTDLLPVGMHRILMLVRPSGLAISATGEDLFLNVKPRLDMVEPSRAADIGGLWATIRGSSLEGVSLILFGSYSCAINVATSNSSRIQCKVPPRGKDGRIVNVTVIRGDYSAVLPRAFTYVSSLNPVIVTLSRNISNIAGGETLVIGVARLMNYTDLDVEVHVQDALAPVHTQSAWGLEVALPPLPAGLHRISVSINGVSIHSQGVDLHIQYLTEVFSIEPCCGSLLGGTILSISGIGFSRDPALVWVLVGNRSCDIVNLTEASIWCETLPAPQIPDAGAPTVPAAVEVWAGNRFFARGPSPSLVGKGFTFMYEAAATPVVTAMQGEITNSSLSLHVGGSNLSNSVILLGNLNCDVETQSFQGNVSLSGCSIPLHSLEAGIYPLQVRQKQMGFANMSVVLQQFAVMPRIMAIFPSQGSACGGTILTVRGLLLNSRRRSVRVDLSGPFTCVILSLGDHTILCQVSLEGDPLPGASFSLNVTVLVNGLTSECQGNCTLFIREEASPVMDALSTNTSGSLTTVLIRGQRLATTADEPMVFVDDQLPCNVTFFNASHVVCQTRDLAPGPHYLSVFYTRNGYACSGNVSRHFYIMPQVFHYFPKNFSLHGGSLLTIEGTGLRGQNTTSVYIDQQTCLTVNIGAELIRCIVPTGNGSVALEIEVDGLWYHIGVIGYNKAFTPELISISQSDDILTFAVAQISGAANIDIFIGMSPCVGVSGNHTVLQCVVPSLPAGEYHVRGYDCIRGWASSALVFTSRVIITAVTENFGCLGGRLVHVFGAGFSPGNVSAAVCGAPCRVLANATVSAFSCLVLPLDVSLAFLCGLKREEDSCEAARHTYVQCDLTVAMATEQLLESWPYLYICEESSQCLFVPDHWAESMFPSFSGLFISPKLERDEVLIYNSSCNITMETEAEMECETPNQPITVKITEIRKRWGQNTQGNFSLQFCRRWSRTHSWFPERLPQDGDNVTVENGQLLLLDTNTSILNLLHIKGGKLIFMAPGPIELRAHAILVSDGGELRIGSEDKPFQGRAQITLYGSSYSTPFFPYGVKFLAVRNGTLSLHGSLPEVIVTCLRATAHALDTVLALEDAVDWNPGDEVVIISGTGVKGAKPMEEIVTVETVQDTDLYLKSPLRYSHNFTENWVAGEHHILKATVALLSRSITIQGNLTNEREKLLVSCQEANAPEGNLQHCLYSMSEKMLGSRDMGARVIVQSFPEEPSQVQLKGVQFQVLGQAFHKHLSSLTLVGAMRESFIQGCTVRNSFSRGLSMCGTLGLKVDSNVFYNILGHALLVGTCTEMRYISWEAIHGRKDDWSGHGNIIRNNVIIQVSGAEGLSNPEMLTPSGIYICSPTNVIEGNRVCGAGYGYFFHLMTNQTSQAPLLSFTQNIAHSCTRYGLFVYPKFQPPWDNVTGTTLFQSFTVWESAGGAQIFRSSNLRLKNFKVYSCRDFGIDVLESDANTSVTDSLLLGHFAHKGSLCMSSGIKTPKRWELMVSNTTFVNFDLINCVAIRTCSDCSQGQGGFTVKTSQLKFTNSSNLVAFPFPHAAILEDLDGSLSGKNRSHILASMETLSASCLVNSSFGRVVHGSACGGGVLFHRMSIGLANTPEVSYDLTMTDSRNKTTTVNYVRDTLSNPRGWMALLLDQETYSLQSENLWINRSLQYSATFDNFAPGNYLLLVHTDLPPYPDILLRCGSRVGLSFPFLPSPGQNQGCDWFFNSQLRQLTYLVSGEGQVQVILRVKEGMPPTISASTSAPESALKWSLPETWQGVEEGWGGYNNTIPGPGDDVLILPNRTVLVDTDLPFFKGLYVMGTLDFPVDRSNVLSVACMVIAGGELKVGTLENPLEKEQKLLILLRASEGVFCDRMNGIHIDPGTIGVYGKVHLYSAYPKNSWTHLGADIASGNERIIVEDAVDWRPHDKIVLSSSSYEPHEAEVLTVKEVKGHHVRIYERLKHRHIGSVHVTEDGRHIRLAAEVGLLTRNIQIQPDVSCRGRLFVGSFRKSSREEFSGVLQLLNVEIQNFGSPLYSSVEFSNVSAGSWIISSTLHQSCGGGIHAAASHGVLLNDNIVFGTAGHGIDLEGQAYTVTNNLVVLMTQPAWSTIWVAGIKVNQVKDINLHGNVVAGSERLGFHIRGHKCSSCELLWSDNVAHSSLHGLHLYKESGLDNCTRISGFLAFKNFDYGAMLHVENSVEIENITLVDNTIGLLAVVYVFSAPQNSVKKVQIVLRNSVIVATSSSFDCIQDKVKPHSANLTSTDRAPSNPRGGRIGILWPVFTSEPNQWPQEPWHKVRNDHSISGIMKLQDVTFSSFVKSCYSDDLDVCILPNAENSGIMHPITAERTRMLKIKDKNKFYFPSLQPRKDLGKVVCPELDCASPRKYLFKDLDGRALGLPPPVSVFPKTEAEWTASFFNAGTFREEQKCTYQFLMQGFICKQTDQVVLILDSADAIWAIQKLYPVVSVTSGFVDVFSSVNANIPCSTSGSVSTFYSILPIRQITKVCFMDQTPQVLRFFLLGNKSTSKLLLAVFYHELQSPHVFLGESFIPPTLVQSASLLLNESIGANYFNIMDNLLYVVLQGEEPIEIRSGVSIHLALTVMVSVLEKGWEIVILERLTNFLQIGQNQIRFIHEMPGHEETLKAIADSRAKRKRNCPTVTCTSHYRRVGQRRPLMMEMNSHRASPPMTVETISKVIVIEIGDSPTVRSTGMISSLSSNKLQNLAHRVITAQQTGVLENVLNMTIGALLVTQSKGVIGYGNTSSFKTGNLIYIRPYALSILVQPSDGEVGNELPVQPQLVFLDEQNRRVESLGPPSEPWTISASLEGASDSVLKGCTQAETQDGYVSFYNLAVLISGSNWHFIFTVTSPPGVNFTARSKPFAVLPVTRKEKSTIILAASLSSVASWLALSCLVCCWLKRSKSRKTKPEEIPESQTNNQNIHIHISSKRRESQGPKKEDTVVGEDMRMKVMLGKVNQCPHQLMNGVSRRKVSRHIVREEEAAVPAPGTTGITSHGHICAPGAPAQQVYLQETGNWKEGQEQLLRYQLAGQNQLLLLCPDFRQERQQLPGQSRLSKQSGSLGLSQEKKASCGATEAFCLHSVHPETIQEQL

SEQ ID NO: 1339 - protein, 460 aa, Homo sapiens
MFTIKLLLFIVPLVISSRIDQDNSSFDSLSPEPKSRFAMLDDVKILANGLLQLGHGLKDFVHKTKGQINDIFQKLNIFDQSFYDLSLQTSEIKEEEKELRRTTYKLQVKNEEVKNMSLELNSKLESLLEEKILLQQKVKYLEEQLTNLIQNQPETPEHPEVTSLKTFVEKQDNSIKDLLQTVEDQYKQLNQQHSQIKEIENQLRRTSIQEPTEISLSSKPRAPRTTPFLQLNEIRNVKHDGIPAECTTIYNRGEHTSGMYAIRPSNSQVFHVYCDVISGSPWTLIQHRIDGSQNFNETWENYKYGFGRLDGEFWLGLEKIYSIVKQSNYVLRIELEDWKDNKHYIEYSFYLGNHETNYTLHLVAITGNVPNAIPENKDLVFSTWDHKAKGHFNCPEGYSGGWWWHDECGENNLNGKYNKPRAKSKPERRRGLSWKSQNGRLYSIKSTKMLIHPTDSESFE

SEQ ID NO: 1340 - protein, 1801 aa, Homo sapiens
MPENPATDKLQVLQVLDRLKMKLQEKGDTSQNEKLSMFYETLKSPLFNQILTLQQSIKQLKGQLNHIPSDCSANFDFSRKGLLVFTDGSITNGNVHRPSNNSTVSGLFPWTPKLGNEDFNSVIQQMAQGRQIEYIDIERPSTGGLGFSVVALRSQNLGKVDIFVKDVQPGSVADRDQRLKENDQILAINHTPLDQNISHQQAIALLQQTTGSLRLIVAREPVHTKSSTSSSLNDTTLPETVCWGHVEEVELINDGSGLGFGIVGGKTSGVVVRTIVPGGLADRDGRLQTGDHILKIGGTNVQGMTSEQVAQVLRNCGNSVRMLVARDPAGDISVTPPAPAALPVALPTVASKGPGSDSSLFETYNVELVRKDGQSLGIRIVGYVGTSHTGEASGIYVKSIIPGSAAYHNGHIQVNDKIVAVDGVNIQGFANHDVVEVLRNAGQVVHLTLVRRKTSSSTSPLEPPSDRGTVVEPLKPPALFLTGAVETETNVDGEDEEIKERIDTLKNDNIQALEKLEKVPDSPENELKSRWENLLGPDYEVMVATLDTQIADDAELQKYSKLLPIHTLRLGVEVDSFDGHHYISSIVSGGPVDTLGLLQPEDELLEVNGMQLYGKSRREAVSFLKEVPPPFTLVCCRRLFDDEASVDEPRRTETSLPETEVDHNMDVNTEEDDDGELALWSPEVKIVELVKDCKGLGFSILDYQDPLDPTRSVIVIRSLVADGVAERSGGLLPGDRLVSVNEYCLDNTSLAEAVEILKAVPPGLVHLGICKPLVEDNEEESCYILHSSSNEDKTEFSGTIHDINSSLILEAPKGFRDEPYFKEELVDEPFLDLGKSFHSQQKEIEQSKEAWEMHEFLTPRLQEMDEEREILVDEEYELYQDPSPSMELYPLSHIQEATPVPSVNELHFGTQWLHDNEPSESQEARTGRTVYSQEAQPYGYCPENVMKENFVMESLPSVPSTEGNSQQGRFDDLENLNSLAKTSLDLGMIPNDVQGPSLLIDLPVVAQRREQEDLPLYQHQATRVISKASAYTGMLSSRYATDTCELPEREEGEGEETPNFSHWGPPRIVEIFREPNVSLGISIVGGQTVIKRLKNGEELKGIFIKQVLEDSPAGKTNALKTGDKILEVSGVDLQNASHSEAVEAIKNAGNPVVFIVQSLSSTPRVIPNVHNKANKITGNQNQDTQEKKEKRQGTAPPPMKLPPPYKALTDDSDENEEEDAFTDQKIRQRYADLPGELHIIELEKDKNGLGLSLAGNKDRSRMSIFVVGINPEGPAAADGRMRIGDELLEINNQILYGRSHQNASAIIKTAPSKVKLVFIRNEDAVNQMAVTPFPVPSSSPSSIEDQSGTEPISSEEDGSVEVGIKQLPESESFKLAVSQMKQQKYPTKVSFSSQEIPLAPASSYHSTDADFTGYGGFQAPLSVDPATCPIVPGQEMIIEISKGRSGLGLSIVGGKDTPLNAIVIHEVYEEGAAARDGRLWAGDQILEVNGVDLRNSSHEEAITALRQTPQKVRLVVYRDEAHYRDEENLEIFPVDLQKKAGRGLGLSIVGKRNGSGVFISDIVKGGAADLDGRLIQGDQILSVNGEDMRNASQETVATILKCAQGLVQLEIGRLRAGSWTSARTTSQNSQGSQQSAHSSCHPSFAPVITGLQNLVGTKRVSDPSQKNSGTDMEPRTVEINRELSDALGISIAGGRGSPLGDIPVFIAMIQASGVAARTQKLKVGDRIVSINGQPLDGLSHADVVNLLKNAYGRIILQVVADTNISAIAAQLENMSTGYHLGSPTAEHHPEDTEEQLQMTAD

SEQ ID NO: 1341 - protein, 429 aa, Homo sapiens
MAQAPADPGREGHLEQRILQVLTEAGSPVKLAQLVKECQAPKRELNQVLYRMKKELKVSLTSPATWCLGGTDPEGEGPAELALSSPAERPQQHAATIPETPGPQFSQQREEDIYRFLKDNGPQRALVIAQALGMRTAKDVNRDLYRMKSRHLLDMDEQSKAWTIYRPEDSGRRAKSASIIYQHNPINMICQNGPNSWISIANSEAIQIGHGNIITRQTVSREDGSAGPRHLPSMAPGDSSTWGTLVDPWGPQDIHMEQSILRRVQLGHSNEMRLHGVPSEGPAHIPPGSPPVSATAAGPEASFEARIPSPGTHPEGEAAQRIHMKSCFLEDATIGNSNKMSISPGVAGPGGVAGSGEGEPGEDAGRRPADTQSRSHFPRDIGQPITPSHSKLTPKLETMTLGNRSHKAAEGSHYVDEASHEGSWWGGGI

SEQ ID NO: 1342 - protein, 449 aa, Homo sapiens
MLAEWGACLLLAVALLGPGLQAQAMEGVKCGGVLSAPSGNFSSPNFPRLYPYNTECSWLIVVAEGSSVLLTFHAFDLEYHDTCSFDFLEIYNGASPDKGNLLGRFCGKVPPPPFTSSWHVMSVIFHSDKHVASHGFSAGYQKDVCGGVLTGLSGVLTSPEYPNNYPNSMECHWVIRAAGPAHVKLVFVDFQVEGNEECTYDYVAVLGGPGPTRGHHYCGSTRPPTLVSLGHELQVVFKSDFNIGGRGFKAYYFSGECQEVYMAMRGNFSSPQYPSSYPNNIRCHWTIRLPPGYQVKVFFLDLDLEEPNSLTKTCDFDHLAAFDGASEEAPLLGNWCGHHLPPPVTSSHNQLLLLLHTDRSTTRRGFSVAYIGGQLGCGSGSTEGEGEALQPQSLQSPSSIPPVCPAPPMNGLLQLLLHWLHPCPLSGPLRLDGTAPACFHYCRASFPSF

SEQ ID NO: 1343 - protein, 1994 aa, Homo sapiens
MVSEGSAAGRDFAGMEEVRQLHVRFCKGIKIWHQAWFLCSLLGREPQEREAGCQLWLCTLSAVLKVGWLFPLSEVPNFTLLKDGCGCWRLKEDQIYNAVRREETENTVGSLLHFLTKLPASETAHGRISVGPCLKQCVRDTVCEYRATLQRTSISQYITGSLLEATTSLGARSGLLSTFGGSTGRMMLKERQPGPSVANSNALPSSSAGISKELIDLQPLIQFPEEVASILMEQEQTIYRRVLPVDYLCFLTRDLGTPECQSSLPCLKASISASILTTQNGEHNALEDLVMRFNEVSSWVTWLILTAGSMEEKREVFSYLVHVAKCCWNMGNYNAVMEFLAGLRSRKVLKMWQFMDQSDIETMRSLKDAMAQHESSCEYRKVVTRALHIPGCKVVPFCGVFLKELCEVLDGASGLMKLCPRYNSQEETLEFVADYSGQDNFLQRVGQNGLKNSEKESTVNSIFQVIRSCNRSLETDEEDSPSEGNSSRKSSLKDKSRWQFIIGDLLDSDNDIFEQSKEYDSHGSEDSQKAFDHGTELIPWYVLSIQADVHQFLLQGATVIHYDQDTHLSARCFLQLQPDNSTLTWVKPTTASPASSKAKLGVLNNTAEPGKFPLLGNAGLSSLTEGVLDLFAVKAVYMGHPGIDIHTVCVQNKLGSMFLSETGVTLLYGLQTTDNRLLHFVAPKHTAKMLFSGLLELTRAVRKMRKFPDQRQQWLRKQYVSLYQEDGRYEGPTLAHAVELFGGRRWSARNPSPGTSAKNAEKPNMQRNNTLGISTTKKKKKILMRGESGEVTDDEMATRKAKMHKECRSRSGSDPQDINEQEESEVNAIANPPNPLPSRRAHSLTTAGSPNLAAGTSSPIRPVSSPVLSSSNKSPSSAWSSSSWHGRIKGGMKGFQSFMVSDSNMSFVEFVELFKSFSVRSRKDLKDLFDVYAVPCNRSGSESAPLYTNLTIDENTSDLQPDLDLLTRNVSDLGLFIKSKQQLSDNQRQISDAIAAASIVTNGTGIESTSLGIFGVGILQLNDFLVNCQGEHCTYDEILSIIQKFEPSISMCHQGLMSFEGFARFLMDKENFASKNDESQENIKELQLPLSYYYIESSHNTYLTGHQLKGESSVELYSQVLLQGCRSVELDCWDGDDGMPIIYHGHTLTTKIPFKEVVEAIDRSAFINSDLPIIISIENHCSLPQQRKMAEIFKTVFGEKLVTKFLFETDFSDDPMLPSPDQLRKKVLLKNKKLKAHQTPVDILKQKAHQLASMQVQAYNGGNANPRPANNEEEEDEEDEYDYDYESLSDDNILEDRPENKSCNDKLQFEYNEEIPKRIKKADNSACNKGKVYDMELGEEFYLDQNKKESRQIAPELSDLVIYCQAVKFPGLSTLNASGSSRGKERKSRKSIFGNNPGRMSPGETASFNKTSGKSSCEGIRQTWEESSSPLNPTTSLSAIIRTPKCYHISSLNENAAKRLCRRYSQKLTQHTACQLLRTYPAATRIDSSNPNPLMFWLHGIQLVALNYQTDDLPLHLNAAMFEANGGCGYVLKPPVLWDKNCPMYQKFSPLERDLDSMDPAVYSLTIVSGQNVCPSNSMGSPCIEVDVLGMPLDSCHFRTKPIHRNTLNPMWNEQFLFHVHFEDLVFLRFAVVENNSSAVTAQRIIPLKALKRGYRHLQLRNLHNEVLEISSLFINSRRMEENSSGNTMSASSMFNTEERKCLQTHRVTVHGVPGPEPFTVFTINGGTKAKQLLQQILTNEQDIKPVTTDYFLMEEKYFISKEKNECRKQPFQRAIGPEEEIMQILSSWFPEEGYMGRIVLKTQQENLEEKNIVQDDKEVILSSEEESFFVQVHDVSPEQPRTVIKAPRVSTAQDVIQQTLCKAKYSYSILSNPNPSDYVLLEEVVKDTTNKKTTTPKSSQRVLLDQECVFQAQSKWKGAGKFILKLKEQVQASREDKKKGISFASELKKLTKSTKQPRGLTSPSQLLTSESIQTKEEKPVGGLSSSDTMDYRQ

SEQ ID NO: 1344 - protein, 2302 aa, Homo sapiens
MTSEEMTASVLIPVTQRKVVSAQSAADESSEKVSDINISKAHTVRRSGETSHTISQLNKLKEEPSGSNLPKILSIAREKIVSDENSNEKCWEKIMPDSAKNLNINCNNILRNHQHGLPQRQFYEMYNSVAEEDLCLETGIPSPLERKVFPGIQLELDRPSMGISPLGNQSVIIETGRAHPDSRRAVFHFHYEVDRRMSDTFCTLSENLILDDCGNCVPLPGGEEKQKKNYVAYTCKLMELAKNCDNKNEQLQCDHCDTLNDKYFCFEGSCEKVDMVYSGDSFCRKDFTDSQAAKTFLSHFEDFPDNCDDVEEDAFKSKKERSTLLVRRFCKNDREVKKSVYTGTRAIVRTLPSGHIGLTAWSYIDQKRNGPLLPCGRVMEPPSTVEIRQDGSQRLSEAQWYPIYNAVRREETENTVGSLLHFLTKLPASETAHGRISVGPCLKQCVRDTVCEYRATLQRTSISQYITGSLLEATTSLGARSGLLSTFGGSTGRMMLKERQPGPSVANSNALPSSSAGISKELIDLQPLIQFPEEVASILMEQEQTIYRRVLPVDYLCFLTRDLGTPECQSSLPCLKASISASILTTQNGEHNALEDLVMRFNEVSSWVTWLILTAGSMEEKREVFSYLVHVAKCCWNMGNYNAVMEFLAGLRSRKVLKMWQFMDQSDIETMRSLKDAMAQHESSCEYRKVVTRALHIPGCKVVPFCGVFLKELCEVLDGASGLMKLCPRYNSQEETLEFVADYSGQDNFLQRVGQNGLKNSEKESTVNSIFQVIRSCNRSLETDEEDSPSEGNSSRKSSLKDKSRWQFIIGDLLDSDNDIFEQSKEYDSHGSEDSQKAFDHGTELIPWYVLSIQADVHQFLLQGATVIHYDQDTHLSARCFLQLQPDNSTLTWVKPTTASPASSKAKLGVLNNTAEPGKFPLLGNAGLSSLTEGVLDLFAVKAVYMGHPGIDIHTVCVQNKLGSMFLSETGVTLLYGLQTTDNRLLHFVAPKHTAKMLFSGLLELTRAVRKMRKFPDQRQQWLRKQYVSLYQEDGRYEGPTLAHAVELFGGRRWSARNPSPGTSAKNAEKPNMQRNNTLGISTTKKKKKILMRGESGEVTDDEMATRKAKMHKECRSRSGSDPQDINEQEESEVNAIANPPNPLPSRRAHSLTTAGSPNLAAGTSSPIRPVSSPVLSSSNKSPSSAWSSSSWHGRIKGGMKGFQSFMVSDSNMSFVEFVELFKSFSVRSRKDLKDLFDVYAVPCNRSGSESAPLYTNLTIDENTSDLQPDLDLLTRNVSDLGLFIKSKQQLSDNQRQISDAIAAASIVTNGTGIESTSLGIFGVGILQLNDFLVNCQGEHCTYDEILSIIQKFEPSISMCHQGLMSFEGFARFLMDKENFASKNDESQENIKELQLPLSYYYIESSHNTYLTGHQLKGESSVELYSQVLLQGCRSVELDCWDGDDGMPIIYHGHTLTTKIPFKEVVEAIDRSAFINSDLPIIISIENHCSLPQQRKMAEIFKTVFGEKLVTKFLFETDFSDDPMLPSPDQLRKKVLLKNKKLKAHQTPVDILKQKAHQLASMQVQAYNGGNANPRPANNEEEEDEEDEYDYDYESLSDDNILEDRPENKSCNDKLQFEYNEEIPKRIKKADNSACNKGKVYDMELGEEFYLDQNKKESRQIAPELSDLVIYCQAVKFPGLSTLNASGSSRGKERKSRKSIFGNNPGRMSPGETASFNKTSGKSSCEGIRQTWEESSSPLNPTTSLSAIIRTPKCYHISSLNENAAKRLCRRYSQKLTQHTACQLLRTYPAATRIDSSNPNPLMFWLHGIQLVALNYQTDDLPLHLNAAMFEANGGCGYVLKPPVLWDKNCPMYQKFSPLERDLDSMDPAVYSLTIVSGQNVCPSNSMGSPCIEVDVLGMPLDSCHFRTKPIHRNTLNPMWNEQFLFHVHFEDLVFLRFAVVENNSSAVTAQRIIPLKALKRGYRHLQLRNLHNEVLEISSLFINSRRMEENSSGNTMSASSMFNTEERKCLQTHRVTVHGVPGPEPFTVFTINGGTKAKQLLQQILTNEQDIKPVTTDYFLMEEKYFISKEKNECRKQPFQRAIGPEEEIMQILSSWFPEEGYMGRIVLKTQQENLEEKNIVQDDKEVILSSEEESFFVQVHDVSPEQPRTVIKAPRVSTAQDVIQQTLCKAKYSYSILSNPNPSDYVLLEEVVKDTTNKKTTTPKSSQRVLLDQECVFQAQSKWKGAGKFILKLKEQVQASREDKKKGISFASELKKLTKSTKQPRGLTSPSQLLTSESIQTKEEKPVGGLSSSDTMDYRQ

SEQ ID NO: 1345 - protein, 506 aa, Homo sapiens
MGNQMSVPQRVEDQENEPEAETYQDNASALNGVPVVVSTHTVQHLEEVDLGISVKTDNVATSSPETTEISAVADANGKNLGKEAKPEAPAAKSRFFLMLSRPVPGRTGDQAADSSLGSVKLDVSSNKAPANKDPSESWTLPVAAGPGQDTDKTPGHAPAQDKVLSAARDPTLLPPETGGAGGEAPSKPKDSSFFDKFFKLDKGQEKVPGDSQQEAKRAEHQDKVDEVPGLSGQSDDVPAGKDIVDGKEKEGQELGTADCSVPGDPEGLETAKDDSQAAAIAENNNSIMSFFKTLVSPNKAETKKDPEDTGAEKSPTTSADLKSDKANFTSQETQGAGKNSKGCNPSGHTQSVTTPEPAKEGTKEKSGPTSLPLGKLFWKKSVKEDSVPTGAEENTSDSTEKTITPPEPEPTGAPQKGKEGSSKDKKSAAEMNKQKSNKQEAKEPAQCTEQATVDTNSLQNGDKLQKRPEKRQQSLGGFFKGLGPKRMLDAQVQTDPVSIGPVGKSK

SEQ ID NO: 1346 - protein, 2134 aa, Homo sapiens
MPGLDRPLSRQNPHDGVVTPAASPSLPQPGLQMPGQWGPVQGGPQPSGQHRSPCPEGPVPSGVPCATSVPHFPTPSILHQGPGHEQHSPLVAPPAALPSDGRDEVSHLQSGSHLANNSDPESTFRQNPRIVNHWASPELRQNPGVKNEHRPASALVNPLARGDSPENRTHHPLGAGAGSGCAPLEADSGASGALAMFFQGGETENEENLSSEKAGLSGQADFDDFCSSPGLGRPPAPTHVGAGSLCQALLPGPSNEAAGDVWGDTASTGVPDASGSQYENVENLEFVQNQEVLPSEPLNLDPSSPSDQFRYGPLPGPAVPRHGAVCHTGAPDATLHTVHPDSVSSSYSSRSHGRLSGSARPQELVGTFIQQEVGKPEDEASGSFFKQIDSSPVGGETDETTVSQNYRGSVSQPSTPSPPKPTGIFQTSANSSFEPVKSHLVGVKPFEADRANVVGEVRETCVRQKQCRPAAALPDASPGNLEQPPDNMETLCAPQVCPLPLNSTTEAVHMLPHAGAPPLDTVYPAPEKRPSARTQGPVKCESPATTLWAQSELPDFGGNVLLAPAAPALYVCAKPQPPVVQPPEEAMSGQQSRNPSSAAPVQSRGGIGASENLENPPKMGEEEALQSQASSGYASLLSSPPTESLQNPPVLIAQPDHSYNLAQPINFSVSLSNSHEKNQSWREALVGDRPAVSSWALGGDSGENTSLSGIPTSSVLSLSLPSSVAQSNFPQGSGASEMVSNQPANLLVQPPSQPVPENLVPESQKDRKAGSALPGFANSPAGSTSVVLVPPAHGTLVPDGNKANHSSHQEDTYGALDFTLSRTLENPVNVYNPSHSDSLASQQSVASHPRQSGPGAPNLDRFYQQVTKDAQGQPGLERAQQELVPPQQQASPPQLPKAMFSELSNPESLPAQGQAQNSAQSPASLVLVDAGQQLPPRPPQSSSVSLVSSGSGQAAVPSEQPWPQPVPALAPGPPPQDLAAYYYYRPLYDAYQPQYSLPYPPEPGAASLYYQDVYSLYEPRYRPYDGAASAYAQNYRYPEPERPSSRASHSSERPPPRQGYPEGYYSSKSGWSSQSDYYASYYSSQYDYGDPGHWDRYHYSARVRDPRTYDRRYWCDAEYDAYRREHSAFGDRPEKRDNNWRYDPRFTGSFDDDPDPHRDPYGEEVDRRSVHSEHSARSLHSAHSLASRRSSLSSHSHQSQIYRSHNVAAGSYEAPLPPGSFHGDFAYGTYRSNFSSGPGFPEYGYPADTVWPAMEQVSSRPTSPEKFSVPHVCARFGPGGQLIKVIPNLPSEGQPALVEVHSMEALLQHTSEQEEMRAFPGPLAKDDTHKVDVINFAQNKAMKCLQNENLIDKESASLLWNFIVLLCRQNGTVVGTDIAELLLRDHRTVWLPGKSPNEANLIDFTNEAVEQVEEEESGEAQLSFLTGGPAAAASSLERETERFRELLLYGRKKDALESAMKNGLWGHALLLASKMDSRTHARVMTRFANSLPINDPLQTVYQLMSGRMPAASTCCGDEKWGDWRPHLAMVLSNLNNNMDVESRTMATMGDTLASRGLLDAAHFCYLMAQAGFGVYTKKTTKLVLIGSNHSLPFLKFATNEAIQRTEAYEYAQSLGAETCPLPSFQVFKFIYSCRLAEMGLATQAFHYCEAIAKSILTQPHLYSPVLISQLVQMASQLRLFDPQLKEKPEEESLAAPTWLVHLQQVERQIKEGAGVWHQDGALPQQCPGTPSSEMEQLDRPGLSQPGALGIANPLLAVPAPSPEHSSPSVRLLPSAPQTLPDGPLASPARVPMFPVPLPPGPLEPGPGCVTPGPALGFLEPSGPGLPPGVPPLQERRHLLQEARSPDPGIVPQEAPVGNSLSELSEENFDGKFANLTPSRTVPDSEAPPGWDRADSGPTQPPLSLSPAPETKRPGQAAKKETKEPKKGESWFFRWLPGKKKTEAYLPDDKNKSIVWDEKKNQWVNLNEPEEEKKAPPPPPTSMPKTVQAAPPALPGPPGAPVNMYSRRAAGTRARYVDVLNPSGTQRSEPALAPADFVAPLAPLPIPSNLFVPTPDAEEPQLPDGTGREGPAAARGLANPEPAPEPKAPGDLPAAGGPPSGAMPFYNPAQLAQACATSGSSRLGRIGQRKHLVLN

SEQ ID NO: 1347 - protein, 536 aa, Homo sapiens
MSDYENDDECWSVLEGFRVTLTSVIDPSRITPYLRQCKVLNPDDEEQVLSDPNLVIRKRKVGVLLDILQRTGHKGYVAFLESLELYYPQLYKKVTGKEPARVFSMIIDASGESGLTQLLMTEVMKLQKKVQDLTALLSSKDDFIKELRVKDSLLRKHQERVQRLKEECEAGSRELKRCKEENYDLAMRLAHQSEEKGAALMRNRDLQLEIDQLKHSLMKAEDDCKVERKHTLKLRHAMEQRPSQELLWELQQEKALLQARVQELEASVQEGKLDRSSPYIQVLEEDWRQALRDHQEQANTIFSLRKDLRQGEARRLRCMEEKEMFELQCLALRKDSKMYKDRIEAILLQMEEVAIERDQAIATREELHAQHARGLQEKDALRKQVRELGEKADELQLQVFQCEAQLLAVEGRLRRQQLETLVLSSDLEDGSPRRSQELSLPQDLEDTQLSDKGCLAGGGSPKQPFAALHQEQVLRNPHDAGLSSGEPPEKERRRLKESFENYRRKRALRKMQKGWRQGEEDRENTTGSDNTDTEGS

SEQ ID NO: 1348 - protein, 492 aa, Homo sapiens
MSDYENDDECWSVLEGFRVTLTSVIDPSRITPYLRQCKVLNPDDEEQVLSDPNLVIRKRKVGVLLDILQRTGHKGYVAFLESLELYYPQLYKKVTGKEPARVFSMIIDASGESGLTQLLMTEVMKLQKKVQDLTALLSSKDDFIKELRVKDSLLRKHQERVQRLKEECEAGSRELKRCKEENYDLAMRLAHQSEEKGAALMRNRDLQLEIDQLKHSLMKAEDDCKVERKHTLKLRHAMEQRPSQELLWELQQEKALLQARVQELEASVQEGKLDRSSPYIQVLEEDWRQALRDHQEQANTIFSLRKDLRQGEARRLRCMEEKEMFELQCLALRKDSKMYKDRIEAILLQMEEVAIERDQAIATREELHAQHARGLQEKDALRKQVRELGEKADELQLQVFQCEAQLLAVEGRLRRQQLETLVLSSDLEDGSPRRSQELSLPQDLEDTQLSDKGCLAGGGSPKQPFAALHQEQVLRNPHDAGPAGLPGIGAVC

SEQ ID NO: 1349 - protein, 421 aa, Homo sapiens
MYAFVRFLEDNVCYALPVSCVRDFSPRSRLDFDNQKVYAVYRGPEELGAGPESPPRAPRDWGALLLHKAQILALAEDKSDLENSVMQKKIKIPKLSLNHVEEDGEVKDYGEEDLQLRHIKRPEGRKPSEVAHKSIEAVVARLEKQNGLSLGHSTCPEEVFVEASPGTEDMDSLEDAVVPRALYEELLRNYQQQQEEMRHLQQELERTRRQLVQQAKKLKEYGALVSEMKELRDLNRRLQDVLLLRLGSGPAIDLEKVKSECLEPEPELRSTFSEEANTSSYYPAPAPVMDKYILDNGKVHLGSGIWVDEEKWHQLQVTQGDSKYTKNLAVMIWGTDVLKNRSVTGVATKKKKDAVPKPPLSPHKLSIVRECLYDRIAQETVDETEIAQRLSKVNKYICEKIMDINKSCKNEERREAKYNLQ

SEQ ID NO: 1350 - protein, 472 aa, Homo sapiens
MPKVKALQCALALEISSVTCPGVVLKDKEDIYLSICVFGQYKKTQCVPATFPLVFNARMVFEKVFPDAVDPGDVVTQLEYDTAVFELIQLVPPVGETLSTYDENTRDFMFPGPNQMSGHHDSNRQVTMRRISGLRGNAPRLEFSTTSVITECLISSRKCHTQDKFIYHLAPVEKSHGRLQNRTSRSQKKKSKSPERSKYCINAKNYEQPTISSKSHSPSPYTKRRMCELSEDTRRRLAHLNLGPYEFKKETDKPPFVIRHVDPPSPRADTLLGSSGRDCERDGWSRVHNDHSHLGCCRPKDYKVIRTPHGRDFDDSLEKCEEYLSPRSCSKPRHSARTLLVHSAPSTMPKHSPSPVLNRASLRERFHSDWCSPSNCDEIHDRDERDLEKDDELELKRSLLCRDSAYDSDPEYSSCQQPRGTFHLDDGEYWSNRAASYKGKSHRPIFENSMDKMYRNLYKKACSSASHTQESF

SEQ ID NO: 1351 - protein, 488 aa, Homo sapiens
MPKVKALQCALALEISSVTCPGVVLKDKEDIYLSICVFGQYKKTQCVPATFPLVFNARMVFEKVFPDAVDPGDVVTQLEYDTAVFELIQLVPPVGETLSTYDENTRDFMFPGPNQMSGHHDSNRQVTMRRISGLRGNAPRLEFSTTSVITECLISSRKCHTQDKFIYHLAPVEKSHGRLQNRTSRSQKKKSKSPERSKYCINAKNYEQPTISSKSHSPSPYTKRRMCELSEDTRRRLAHLNLGPYEFKKETDKPPFVIRHVDPPSPRADTLLGSSGRDCERDGWSRVHNDHSHLGCCRPKDYKVIRTPHGRDFDDSLEKCEEYLSPRSCSKPRHSARTLLVHSAPSTMPKHSPSPVLNRASLRERFHSDWCSPSNCDEIHDRVKNVLKSHQAHQRHLYDERDLEKDDELELKRSLLCRDSAYDSDPEYSSCQQPRGTFHLDDGEYWSNRAASYKGKSHRPIFENSMDKMYRNLYKKACSSASHTQESF

SEQ ID NO: 1352 - protein, 680 aa, Homo sapiens
MLGPGSNRRRPTQGERGPGSPGEPMEKYQVLYQLNPGALGVNLVVEEMETKVKHVIKQVECMDDHYASQALEELMPLLKLRHAHISVYQELFITWNGEISSLYLCLVMEFNELSFQEVIEDKRKAKKIIDSEWMQNVLGQVLDALEYLHHLDIIHRNLKPSNIILISSDHCKLQDLSSNVLMTDKAKWNIRAEEDPFRKSWMAPEALNFSFSQKSDIWSLGCIILDMTSCSFMDGTEAMHLRKSLRQSPGSLKAVLKTMEEKQIPDVETFRNLLPLMLQIDPSDRITIKDVVHITFLRGSFKSSCVSLTLHRQMVPASITDMLLEGNVASILEVMQKFSGWPEVQLRAMKRLLKMPADQLGLPWPPELVEVVVTTMELHDRVLDVQLCACSLLLHLLGQALVHHPEAKAPCNQAITSTLLSALQSHPEEEPLLVMVYSLLAITTTQESESLSEELQNAGLLEHILEHLNSSLESRDVCASGLGLLWALLLDGIIVNKAPLEKVPDLISQVLATYPADGEMAEASCGVFWLLSLLGCIKEQQFEQVVALLLQSIRLCQDRALLVNNAYRGLASLVKVSELAAFKVVVQEEGGSGLSLIKETYQLHRDDPEVVENVGMLLVHLASYEEILPELVSSSMKALLQEIKERFTSSLVSDSSAFSKPGLPPGGSPQLGCTTSGGLE

SEQ ID NO: 1353 - protein, 361 aa, Homo sapiens
MASLLAKDAYLQSLAKKICSHSAPEQQARTRAGKTQGSETAGPPKKKRKKTQKKFRKREEKAAEHKAKSLGEKSPAASGARRPEAAKEEAAWASSSAGNPADGLATEPESVFALDVLRQRLHEKIQEARGQGSAKELSPAALEKRRRRKQERDRKKRKRKELRAKEKARKAEEATEAQEVVEATPEGACTEPREPPGLIFNKVEVSEDEPASKAQRRKEKRQRVKGNLTPLTGRNYRQLLERLQARQSRLDELRGQDEGKAQELEAKMKWTNLLYKAEGVKIRDDERLLQEALKRKEKRRAQRQRRWEKRTAGVVEKMQQRQDRRRQNLRRKKAARAERRLLRARKKGRILPQDLERAGLV

SEQ ID NO: 1354 - protein, 170 aa, Homo sapiens
MKTLFLGVTLGLAAALSFTLEEEDITGTWYVKAMVVDKDFPEDRRPRKVSPVKVTALGGGKLEATFTFMREDRCIQKKILMRKTEEPGKYSAYGGRKLMYLQELPRRDHYIFYCKDQHHGGLLHMGKLVGRNSDTNREALEEFKKLVQRKGLSEEDIFTPLQTGSCVPEH

SEQ ID NO: 1355 - protein, 412 aa, Homo sapiens
LTDRQTDTAPSPSYHLLPGRRRTVDAAASRGQGPEPAPGGGVEGVGARGVALKLFVQLLGCSRFGGAVVRAGEAEPSGAARSASSGREEPQPEEGEEEEEKEEERGPQWRLGARKPGSWTGEAAVCADSAPAARAPQALARASGRGGRVARRGAEESGPPHSPSRRGSASRAGPGRASETMNFLLSWVHWSLALLLYLHHAKWSQAAPMAEGGGQNHHEVVKFMDVYQRSYCHPIETLVDIFQEYPDEIEYIFKPSCVPLMRCGGCCNDEGLECVPTEESNITMQIMRIKPHQGQHIGEMSFLQHNKCECRPKKDRARQEKKSVRGKGKGQKRKRKKSRYKSWSVYVGARCCLMPWSLPGPHPCGPCSERRKHLFVQDPQTCKCSCKNTDSRCKARQLELNERTCRCDKPRR

SEQ ID NO: 1356 - protein, 550 aa, Homo sapiens
MASVFHYFLLVLVFLDTHAAQPFCLPGCTCSEESFGRTLQCTSVSLGKIPGNLSEEFKQVRIENSPLFEMPQGSFINMSTLEYLWLNFNNISVIHLGALEHLPELRELRLEGNKLCSVPWTAFRATPLLRVLDLKRNKIDALPELALQFLVSLTYLDLSSNRLTVVSKSVFLNWPAYQKCRQPDCGAEILSSLVVALHDNPWVCDCRLRGLVQFVKSITLPVILVNSYLICQGPLSKAGQLFHETELSACMKPQISTPSANITIRAGQNVTLRCLAQASPSPSIAWTYPLSMWREFDVLTSSTGEDTALSELAIPAAHLVDSGNYTCMASNSIGKSNLVISLHVQPAQALHAPDSLSIPSEGNAYIDLRVVKQTVHGILLEWLAVADTSKEEWFTLYIASDEAFRKEVVHIGPGINTYAVDDLLPGTKYEACLSLEGQPPHQGQCVAFVTGRDAGGLEAREHLLHVTVVLCVVLLAVPVGAYAWAAQGPCSCSKWVLRGCLHRRKAPSCTPAAPQSKDGSFREHPAVCDDGEGHIDTEGDKEKGGTEDNS

SEQ ID NO: 1357 - protein, 274 aa, Homo sapiens
MAAPEAEVLSSAAVPDLEWYEKSEETHASQIELLETSSTQEPLNASEAFCPRDCMVPVVFPGPVSQEGCCQFTCELLKHIMYQRQQLPLPYEQLKHFYRKPSPQAEEMLKKKPRATTEVSSRKCQQALAELESVLSHLEDFFARTLVPRVLILLGGNALSPKEFYELDLSLLAPYSVDQSLSTAACLRRLFRAIFMADAFSELQAPPLMGTVVMAQGHRNCGEDWFRPKLNYRVPSRGHKLTVTLSCGRPSIRTTAWEDYIWFQAPVTFKGFRE

SEQ ID NO: 1358 - protein, 505 aa, Homo sapiens
MSYPGYPPPPGGYPPAAPGGGPWGGAAYPPPPSMPPIGLDNVATYAGQFNQDYLSGMAANMSGTFGGANMPNLYPGAPGAGYPPVPPGGFGQPPSAQQPVPPYGMYPPPGGNPPSRMPSYPPYPGAPVPGQPMPPPGQQPPGAYPGQPPVTYPGQPPVPLPGQQQPVPSYPGYPGSGTVTPAVPPTQFGSRGTITDAPGFDPLRDAEVLRKAMKGFGTDEQAIIDCLGSRSNKQRQQILLSFKTAYGKDLIKDLKSELSGNFEKTILALMKTPVLFDIYEIKEAIKGVGTDEACLIEILASRSNEHIRELNRAYKAEFKKTLEEAIRSDTSGHFQRLLISLSQGNRDESTNVDMSLAQRDAQELYAAGENRLGTDESKFNAVLCSRSRAHLVAVFNEYQRMTGRDIEKSICREMSGDLEEGMLAVVKCLKNTPAFFAERLNKAMRGAGTKDRTLIRIMVSRSETDLLDIRSEYKRMYGKSLYHDISGDTSGDYRKILLKICGGND

SEQ ID NO: 1359 - protein, 375 aa, Homo sapiens
MLLFLLSALVLLTQPLGYLEAEMKTYSHRTMPSACTLVMCSSVESGLPGRDGRDGREGPRGEKGDPGLPGAAGQAGMPGQAGPVGPKGDNGSVGEPGPKGDTGPSGPPGPPGVPGPAGREGPLGKQGNIGPQGKPGPKGEAGPKGEVGAPGMQGSAGARGLAGPKGERGVPGERGVPGNTGAAGSAGAMGPQGSPGARGPPGLKGDKGIPGDKGAKGESGLPDVASLRQQVEALQGQVQHLQAAFSQYKKVELFPNGQSVGEKIFKTAGFVKPFTEAQLLCTQAGGQLASPRSAAENAALQQLVVAKNEAAFLSMTDSKTEGKFTYPTGESLVYSNWAPGEPNDDGGSEDCVEIFTNGKWNDRACGEKRLVVCEF

SEQ ID NO: 1360 - protein, 707 aa, Homo sapiens
MSLWQPLVLVLLVLGCCFAAPRQRQSTLVLFPGDLRTNLTDRQLAEEYLYRYGYTRVAEMRGESKSLGPALLLLQKQLSLPETGELDSATLKAMRTPRCGVPDLGRFQTFEGDLKWHHHNITYWIQNYSEDLPRAVIDDAFARAFALWSAVTPLTFTRVYSRDADIVIQFGVAEHGDGYPFDGKDGLLAHAFPPGPGIQGDAHFDDDELWSLGKGVVVPTRFGNADGAACHFPFIFEGRSYSACTTDGRSDGLPWCSTTANYDTDDRFGFCPSERLYTQDGNADGKPCQFPFIFQGQSYSACTTDGRSDGYRWCATTANYDRDKLFGFCPTRADSTVMGGNSAGELCVFPFTFLGKEYSTCTSEGRGDGRLWCATTSNFDSDKKWGFCPDQGYSLFLVAAHEFGHALGLDHSSVPEALMYPMYRFTEGPPLHKDDVNGIRHLYGPRPEPEPRPPTTTTPQPTAPPTVCPTGPPTVHPSERPTAGPTGPPSAGPTGPPTAGPSTATTVPLSPVDDACNVNIFDAIAEIGNQLYLFKDGKYWRFSEGRGSRPQGPFLIADKWPALPRKLDSVFEERLSKKLFFFSGRQVWVYTGASVLGPRRLDKLGLGADVAQVTGALRSGRGKMLLFSGRRLWRFDVKAQMVDPRSASEVDRMFPGVPLDTHDVFQYREKAYFCQDRFYWRVSSRSELNQVDQVGYVTYDILQCPED

SEQ ID NO: 1361 - protein, 1064 aa, Homo sapiens
MASESETLNPSARIMTFYPTMEEFRNFSRYIAYIESQGAHRAGLAKVVPPKEWKPRASYDDIDDLVIPAPIQQLVTGQSGLFTQYNIQKKAMTVREFRKIANSDKYCTPRYSEFEELERKYWKNLTFNPPIYGADVNGTLYEKHVDEWNIGRLRTILDLVEKESGITIEGVNTPYLYFGMWKTSFAWHTEDMDLYSINYLHFGEPKSWYSVPPEHGKRLERLAKGFFPGSAQSCEAFLRHKMTLISPLMLKKYGIPFDKVTQEAGEFMITFPYGYHAGFNHGFNCAESTNFATRRWIEYGKQAVLCSCRKDMVKISMDVFVRKFQPERYKLWKAGKDNTVIDHTLPTPEAAEFLKESELPPRAGNEEECPEEDMEGVEDGEEGDLKTSLAKHRIGTKRHRVCLEIPQEVSQSELFPKEDLSSEQYEMTECPAALAPVRPTHSSVRQVEDGLTFPDYSDSTEVKFEELKNVKLEEEDEEEEQAAAALDLSVNPASVGGRLVFSGSKKKSSSSLGSGSSRDSISSDSETSEPLSCRAQGQTGVLTVHSYAKGDGRVTVGEPCTRKKGSAARSFSERELAEVADEYMFSLEENKKSKGRRQPLSKLPRHHPLVLQECVSDDETSEQLTPEEEAEETEAWAKPLSQLWQNRPPNFEAEKEFNETMAQQAPHCAVCMIFQTYHQVEFGGFNQNCGNASDLAPQKQRTKPLIPEMCFTSTGCSTDINLSTPYLEEDGTSILVSCKKCSVRVHASCYGVPPAKASEDWMCSRCSANALEEDCCLCSLRGGALQRANDDRWVHVSCAVAILEARFVNIAERSPVDVSKIPLPRFKLKCIFCKKRRKRTAGCCVQCSHGRCPTAFHVSCAQAAGVMMQPDDWPFVVFITCFRHKIPNLERAKGALQSITAGQKVISKHKNGRFYQCEVVRLTTETFYEVNFDDGSFSDNLYPEDIVSQDCLQFGPPAEGEVVQVRWTDGQVYGAKFVASHPIQMYQVEFEDGSQLVVKRDDVYTLDEELPKRVKSRLSVASDMRFNEIFTEKEVKQEKKRQRVINSRYREDYIEPALYRAIME

SEQ ID NO: 1362 - protein, 1250 aa, Homo sapiens
MSAVVAQTLHVFGLRSHVANNIFYFDEQIIIFPSGNHCVKYNVDQKWQKFIPGSEKSQGMLALSISPNRRYLAISETVQEKPAITIYELSSIPCRKRKVLNNFDFQVQKFISMAFSPDSKYLLAQTSPPESNLVYWLWEKQKVMAIVRIDTQNNPVYQVSFSPQDNTQVCVTGNGMFKLLRFAEGTLKQTSFQRGEPQNYLAHTWVADDKIVVGTDTGKLFLFESGDQRWETSIMVKEPTNGSKSLDVIQESESLIEFPPVSSPLPSYEQMVAASSHSQMSMPQVFAIAAYSKGFACSAGPGRVLLFEKMEEKDFYRESREIRIPVDPQSNDPSQSDKQDVLCLCFSPSEETLVASTSKNQLYSITMSLTEISKGEPAHFEYLMYPLHSAPITGLATCIRKPLIATCSLDRSIRLWNYETNTLELFKEYQEEAYSISLHPSGHFIVVGFADKLRLMNLLIDDIRSFKEYSVRGCGECSFSNGGHLFAAVNGNVIHVYTTTSLENISSLKGHTGKIRSIVWNADDSKLISGGTDGAVYEWNLSTGKRETECVLKSCSYNCVTVSPDAKIIFAVGSDHTLKEIADSLILREISAFDVTYTAIVISHSGRMMFVGTSVGTIRAMKYPLPLQKEFNEYQAHAGPITKMLLTFDDQFLLTAAEDGCLFTWKVFDKDGRGIKREREVGFAEEVLVTKTDMEEKAQVMLELKTRVEELKMENEYQLRLKDMNYSEKIKELTDKFIQEMESLKTKNQVLRTEKEKQDVYHHEHIEDLLDKQSRELQDMECCNNQKLLLEYEKYQELQLKSQRMQEEYEKQLRDNDETKSQALEELTEFYEAKLQEKTTLLEEAQEDVRQQLREFEETKKQIEEDEDREIQDIKTKYEKKLRDEKESNLRLKGETGIMRKKFSSLQKEIEERTNDIETLKGEQMKLQGVIKSLEKDIQGLKREIQERDETIQDKEKRIYDLKKKNQELGKFKFVLDYKIKELKKQIEPRENEIRVMKEQIQEMEAELENFHKQNTQLELNITELWQKLRATDQEMRRERQKERDLEALVKRFKTDLHNCVAYIQEPRLLKEKVRGLFEKYVQRADMVEIAGLNTDLQQEYTRQREHLERNLATLKKKVVKEGELHRTDYVRIMQENVSLIKEINELRRELKFTRSQVYDLEAALKLTKKVRPQEVSETEPSRDMLSTAPTARLNEQEETGRIIEMQRLEIQRLRDQIQEQEQVTGFHTLAGVRLPSLSNSEVDLEVKTN

SEQ ID NO: 1363 - protein, 204 aa, Homo sapiens
MSWTCPRCQQPVFFAEKVSSLGKNWHRFCLKCERCHSILSPGGHAEHNGRPYCHKPCYGALFGPRGVNIGGVGSYLYNPPTPSPGCTTPLSPSSFSPPRPRTGLPQGKKSPPHMKTFTGETSLCPGCGEPVYFAEKVMSLGRNWHRPCLRCQRCHKTLTAGSHAEHDGVPYCHVPCYGYLFGPKGVNIGDVGCYIYDPVKIKFK

SEQ ID NO: 1364 - protein, 267 aa, Homo sapiens
MAPWALLSPGVLVRTGHTVLTWGITLVLFLHDTELRQWEEQGELLLPLTFLLLVLGSLLLYLAVSLMDPGYVNVQPQPQEELKEEQTAMVPPAIPLRRCRYCLVLQPLRARHCRECRRCVRRYDHHCPWMENCVGERNHPLFVVYLALQLVVLLWGLYLAWSGLRFFQPWGQWLRSSGLLFATFLLLSLFSLVASLLLVSHLYLVASNTTTWEFISSHRIAYLRQRPSNPFDRGLTRNLAHFFCGWPSGSWETLWAEEEEEGSSPAV

SEQ ID NO: 1365 - protein, 281 aa, Homo sapiens
MAPWALLSPGVLVRTGHTVLTWGITLVLFLHDTGEPDPERPRTHPIPQLRQWEEQGELLLPLTFLLLVLGSLLLYLAVSLMDPGYVNVQPQPQEELKEEQTAMVPPAIPLRRCRYCLVLQPLRARHCRECRRCVRRYDHHCPWMENCVGERNHPLFVVYLALQLVVLLWGLYLAWSGLRFFQPWGQWLRSSGLLFATFLLLSLFSLVASLLLVSHLYLVASNTTTWEFISSHRIAYLRQRPSNPFDRGLTRNLAHFFCGWPSGSWETLWAEEEEEGSSPAV

SEQ ID NO: 1366 - protein, 248 aa, Homo sapiens
MAETSLPELGGEDKATPCPSILELEELLRAGKSSCSRVDEVWPNLFIGDAMDSLQKQDLRRPKIHGAVQASPYQPPTLASLQRLLWVRQAATLNHIDEVWPSLFLGDAYAARDKSKLIQLGITHVVNAAAGKFQVDTGAKFYRGMSLEYYGIEADDNPFFDLSVYFLPVARYIRAALSVPQGRVLVHCAMGVSRSATLVLAFLMICENMTLVEAIQTVQAHRNICPNSGFLRQLQVLDNRLGRETGRF

SEQ ID NO: 1367 - protein, 431 aa, Homo sapiens
MRALLARLLLCVLVVSDSKGSNELHQVPSNCDCLNGGTCVSNKYFSNIHWCNCPKKFGGQHCEIDKSKTCYEGNGHFYRGKASTDTMGRPCLPWNSATVLQQTYHAHRSDALQLGLGKHNYCRNPDNRRRPWCYVQVGLKLLVQECMVHDCADGKKPSSPPEELKFQCGQKTLRPRFKIIGGEFTTIENQPWFAAIYRRHRGGSVTYVCGGSLISPCWVISATHCFIDYPKKEDYIVYLGRSRLNSNTQGEMKFEVENLILHKDYSADTLAHHNDIALLKIRSKEGRCAQPSRTIQTICLPSMYNDPQFGTSCEITGFGKENSTDYLYPEQLKMTVVKLISHRECQQPHYYGSEVTTKMLCAADPQWKTDSCQGDSGGPLVCSLQGRMTLTGIVSWGRGCALKDKPGVYTRVSHFLPWIRSHTKEENGLAL

SEQ ID NO: 1368 - protein, 1914 aa, Homo sapiens
MADGKGDAAAVAGAGAEAPAVAGAGDGVETESMVRGHRPVSPAPGASGLRPCLWQLETELREQEVSEVSSLNYCRSFCQTLLQYASNKNASEHIVYLLEVYRLAIQSFASARPYLTTECEDVLLVLGRLVLSCFELLLSVSESELPCEVWLPFLQSLQESHDALLEFGNNNLQILVHVTKEGVWKNPVLLKILSQQPVETEEVNKLIAQEGPSFLQMRIKHLLKSNCIPQATALSKLCAESKEISNVSSFQQAYITCLCSMLPNEDAIKEIAKVDCKEVLDIICNLESEGQDNTAFVLCTTYLTQQLQTASVYCSWELTLFWSKLQRRIDPSLDTFLERCRQFGVIAKTQQHLFCLIRVIQTEAQDAGLGVSILLCVRALQLRSSEDEEMKASVCKTIACLLPEDLEVRRACQLTEFLIEPSLDGFNMLEELYLQPDQKFDEENAPVPNSLRCELLLALKAHWPFDPEFWDWKTLKRHCHQLLGQEASDSDDDLSGYEMSINDTDVLESFLSDYDEGKEDKQYRRRDLTDQHKEKRDKKPIGSSERYQRWLQYKFFCLLCKRECIEARILHHSKMHMEDGIYTCPVCIKKFKRKEMFVPHVMEHVKMPPSRRDRSKKKLLLKGSQKGICPKSPSAIPEQNHSLNDQAKGESHEYVTFSKLEDCHLQDRDLYPCPGTDCSRVFKQFKYLSVHLKAEHQNNDENAKHYLDMKNRREKCTYCRRHFMSAFHLREHEQVHCGPQPYMCVSIDCYARFGSVNELLNHKQKHDDLRYKCELNGCNIVFSDLGQLYHHEAQHFRDASYTCNFLGCKKFYYSKIEYQNHLSMHNVENSNGDIKKSVKLEESATGEKQDCINQPHLLNQTDKSHLPEDLFCAESANSQIDTETAENLKENSDSNSSDQLSHSSSASMNEELIDTLDHSETMQDVLLSNEKVFGPSSLKEKCSSMAVCFDGTKFTCGFDGCGSTYKNARGMQKHLRKVHPYHFKPKKIKTKDLFPSLGNEHNQTTEKLDAEPKPCSDTNSDSPDEGLDHNIHIKCKREHQGYSSESSICASKRPCTEDTMLELLLRLKHLSLKNSITHGSFSGSLQGYPSSGAKSLQSVSSISDLNFQNQDENMPSQYLAQLAAKPFFCELQGCKYEFVTREALLMHYLKKHNYSKEKVLQLTMFQHRYSPFQCHICQRSFTRKTHLRIHYKNKHQIGSDRATHKLLDNEKCDHEGPCSVDRLKGDCSAELGGDPSSNSEKPHCHPKKDECSSETDLESSCEETESKTSDISSPIGSHREEQEGREGRGSRRTVAKGNLCYILNKYHKPFHCIHKTCNSSFTNLKGLIRHYRTVHQYNKEQLCLEKDKARTKRELVKCKKIFACKYKECNKRFLCSKALAKHCSDSHNLDHIEEPKVLSEAGSAARFSCNQPQCPAVFYTFNKLKHHLMEQHNIEGEIHSDYEIHCDLNGCGQIFTHRSNYSQHVYYRHKDYYDDLFRSQKVANERLLRSEKVCQTADTQGHEHQTTRRSFNAKSKKCGLIKEKKAPISFKTRAEALHMCVEHSEHTQYPCMVQGCLSVVKLESSIVRHYKRTHQMSSAYLEQQMENLVVCVKYGTKIKEEPPSEADPCIKKEENRSCESERTEHSHSPGDSSAPIQNTDCCHSSERDGGQKGCIESSSVFDADTLLYRGTLKCNHSSKTTSLEQCNIVQPPPPCKIENSIPNPNGTESGTYFTSFQLPLPRIKESETRQHSSGQENTVKNPTHVPKENFRKHSQPRSFDLKTYKPMGFESSFLKFIQESEEKEDDFDDWEPSEHLTLSNSSQSSNDLTGNVVANNMVNDSEPEVDIPHSSSDSTIHENLTAIPPLIVAETTTVPSLENLRVVLDKALTDCGELALKQLHYLRPVVVLERSKFSTPILDLFPTKKTDELCVGSS

SEQ ID NO: 1369 - protein, 595 aa, Homo sapiens
MRAARAAPLLQLLLLLGPWLEAAGVAESPLPAVVLAILARNAEHSLPHYLGALERLDYPRARMALWCATDHNVDNTTEMLQEWLAAVGDDYAAVVWRPEGEPRFYPDEEGPKHWTKERHQFLMELKQEALTFARNWGADYILFADTDNILTNNQTLRLLMGQGLPVVAPMLDSQTYYSNFWCGITPQGYYRRTAEYFPTKNRQRRGCFRVPMVHSTFLASLRAEGADQLAFYPPHPNYTWPFDDIIVFAYACQAAGVSVHVCNEHRYGYMNVPVKSHQGLEDERVNFIHLILEALVDGPRMQASAHVTRPSKRPSKIGFDEVFVISLARRPDRRERMLASLWEMEISGRVVDAVDGWMLNSSAIRNLGVDLLPGYQDPYSGRTLTKGEVGCFLSHYSIWEEVVARGLARVLVFEDDVRFESNFRGRLERLMEDVEAEKLSWDLIYLGRKQVNPEKETAVEGLPGLVVAGYSYWTLAYALRLAGARKLLASQPLRRMLPVDEFLPIMFDQHPNEQYKAHFWPRDLVAFSAQPLLAAPTHYAGDAEWLSDTETSSPWDDDSGRLISWSGSQKTLRSPRLDLTGSSGHSLQPQPRDEL

SEQ ID NO: 1370 - protein, 517 aa, Homo sapiens
MLQEWLAAVGDDYAAVVWRPEGEPRFYPDEEGPKHWTKERHQFLMELKQEALTFARNWGADYILFADTDNILTNNQTLRLLMGQGLPVVAPMLDSQTYYSNFWCGITPQGYYRRTAEYFPTKNRQRRGCFRVPMVHSTFLASLRAEGADQLAFYPPHPNYTWPFDDIIVFAYACQAAGVSVHVCNEHRYGYMNVPVKSHQGLEDERVNFIHLILEALVDGPRMQASAHVTRPSKRPSKIGFDEVFVISLARRPDRRERMLASLWEMEISGRVVDAVDGWMLNSSAIRNLGVDLLPGYQDPYSGRTLTKGEVGCFLSHYSIWEEVVARGLARVLVFEDDVRFESNFRGRLERLMEDVEAEKLSWDLIYLGRKQVNPEKETAVEGLPGLVVAGYSYWTLAYALRLAGARKLLASQPLRRMLPVDEFLPIMFDQHPNEQYKAHFWPRDLVAFSAQPLLAAPTHYAGDAEWLSDTETSSPWDDDSGRLISWSGSQKTLRSPRLDLTGSSGHSLQPQPRDEL

SEQ ID NO: 1371 - protein, 1755 aa, Homo sapiens
MASELEPEVQAIDRSLLECSAEEIAGKWLQATDLTREVYQHLAHYVPKIYCRGPNPFPQKEDMLAQHVLLGPMEWYLCGEDPAFGFPKLEQANKPSHLCGRVFKVGEPTYSCRDCAVDPTCVLCMECFLGSIHRDHRYRMTTSGGGGFCDCGDTEAWKEGPYCQKHELNTSEIEEEEDPLVHLSEDVIARTYNIFAITFRYAVEILTWEKESELPADLEMVEKSDTYYCMLFNDEVHTYEQVIYTLQKAVNCTQKEAIGFATTVDRDGRRSVRYGDFQYCEQAKSVIVRNTSRQTKPLKVQVMHSSIVAHQNFGLKLLSWLGSIIGYSDGLRRILCQVGLQEGPDGENSSLVDRLMLSDSKLWKGARSVYHQLFMSSLLMDLKYKKLFAVRFAKNYQQLQRDFMEDDHERAVSVTALSVQFFTAPTLARMLITEENLMSIIIKTFMDHLRHRDAQGRFQFERYTALQAFKFRRVQSLILDLKYVLISKPTEWSDELRQKFLEGFDAFLELLKCMQGMDPITRQVGQHIEMEPEWEAAFTLQMKLTHVISMMQDWCASDEKVLIEAYKKCLAVLMQCHGGYTDGEQPITLSICGHSVETIRYCVSQEKVSIHLPVSRLLAGLHVLLSKSEVAYKFPELLPLSELSPPMLIEHPLRCLVLCAQVHAGMWRRNGFSLVNQIYYYHNVKCRREMFDKDVVMLQTGVSMMDPNHFLMIMLSRFELYQIFSTPDYGKRFSSEITHKDVVQQNNTLIEEMLYLIIMLVGERFSPGVGQVNATDEIKREIIHQLSIKPMAHSELVKSLPEDENKETGMESVIEAVAHFKKPGLTGRGMYELKPECAKEFNLYFYHFSRAEQSKAEEAQRKLKRQNREDTALPPPVLPPFCPLFASLVNILQSDVMLCIMGTILQWAVEHNGYAWSESMLQRVLHLIGMALQEEKQHLENVTEEHVVTFTFTQKISKPGEAPKNSPSILAMLETLQNAPYLEVHKDMIRWILKTFNAVKKMRESSPTSPVAETEGTIMEESSRDKDKAERKRKAEIARLRREKIMAQMSEMQRHFIDENKELFQQTLELDASTSAVLDHSPVASDMTLTALGPAQTQVPEQRQFVTCILCQEEQEVKVESRAMVLAAFVQRSTVLSKNRSKFIQDPEKYDPLFMHPDLSCGTHTSSCGHIMHAHCWQRYFDSVQAKEQRRQQRLRLHTSYDVENGEFLCPLCECLSNTVIPLLLPPRNIFNNRLNFSDQPNLTQWIRTISQQIKALQFLRKEESTPNNASTKNSENVDELQLPEGFRPDFRPKIPYSESIKEMLTTFGTATYKVGLKVHPNEEDPRVPIMCWGSCAYTIQSIERILSDEDKPLFGPLPCRLDDCLRSLTRFAAAHWTVASVSVVQGHFCKLFASLVPNDSHEELPCILDIDMFHLLVGLVLAFPALQCQDFSGISLGTGDLHIFHLVTMAHIIQILLTSCTEENGMDQENPPCEEESAVLALYKTLHQYTGSALKEIPSGWHLWRSVRAGIMPFLKCSALFFHYLNGVPSPPDIQVPGTSHFEHLCSYLSLPNNLICLFQENSEIMNSLIESWCRNSEVKRYLEGERDAIRYPRESNKLINLPEDYSSLINQASNFSCPKSGGDKSRAPTLCLVCGSLLCSQSYCCQTELEGEDVGACTAHTYSCGSGVGIFLRVRECQVLFLAGKTKGCFYSPPYLDDYGETDQGLRRGNPLHLCKERFKKIQKLWHQHSVTEEIGHAQEANQTLVGIDWQHL

SEQ ID NO: 1372 - protein, 1755 aa, Homo sapiens
MASELEPEVQAIDRSLLECSAEEIAGKWLQATDLTREVYQHLAHYVPKIYCRGPNPFPQKEDMLAQHVLLGPMEWYLCGEDPAFGFPKLEQANKPSHLCGRVFKVGEPTYSCRDCAVDPTCVLCMECFLGSIHRDHRYRMTTSGGGGFCDCGDTEAWKEGPYCQKHELNTSEIEEEEDPLVHLSEDVIARTYNIFAITFRYAVEILTWEKESELPADLEMVEKSDTYYCMLFNDEVHTYEQVIYTLQKAVNCTQKEAIGFATTVDRDGRRSVRYGDFQYCEQAKSVIVRNTSRQTKPLKVQVMHSSIVAHQNFGLKLLSWLGSIIGYSDGLRRILCQVGLQEGPDGENSSLVDRLMLSDSKLWKGARSVYHQLFMSSLLMDLKYKKLFAVRFAKNYERLQSDYVTDDHDREFSVADLSVQIFTVPSLARMLITEENLMSIIIKTFMDHLRHRDAQGRFQFERYTALQAFKFRRVQSLILDLKYVLISKPTEWSDELRQKFLEGFDAFLELLKCMQGMDPITRQVGQHIEMEPEWEAAFTLQMKLTHVISMMQDWCASDEKVLIEAYKKCLAVLMQCHGGYTDGEQPITLSICGHSVETIRYCVSQEKVSIHLPVSRLLAGLHVLLSKSEVAYKFPELLPLSELSPPMLIEHPLRCLVLCAQVHAGMWRRNGFSLVNQIYYYHNVKCRREMFDKDVVMLQTGVSMMDPNHFLMIMLSRFELYQIFSTPDYGKRFSSEITHKDVVQQNNTLIEEMLYLIIMLVGERFSPGVGQVNATDEIKREIIHQLSIKPMAHSELVKSLPEDENKETGMESVIEAVAHFKKPGLTGRGMYELKPECAKEFNLYFYHFSRAEQSKAEEAQRKLKRQNREDTALPPPVLPPFCPLFASLVNILQSDVMLCIMGTILQWAVEHNGYAWSESMLQRVLHLIGMALQEEKQHLENVTEEHVVTFTFTQKISKPGEAPKNSPSILAMLETLQNAPYLEVHKDMIRWILKTFNAVKKMRESSPTSPVAETEGTIMEESSRDKDKAERKRKAEIARLRREKIMAQMSEMQRHFIDENKELFQQTLELDASTSAVLDHSPVASDMTLTALGPAQTQVPEQRQFVTCILCQEEQEVKVESRAMVLAAFVQRSTVLSKNRSKFIQDPEKYDPLFMHPDLSCGTHTSSCGHIMHAHCWQRYFDSVQAKEQRRQQRLRLHTSYDVENGEFLCPLCECLSNTVIPLLLPPRNIFNNRLNFSDQPNLTQWIRTISQQIKALQFLRKEESTPNNASTKNSENVDELQLPEGFRPDFRPKIPYSESIKEMLTTFGTATYKVGLKVHPNEEDPRVPIMCWGSCAYTIQSIERILSDEDKPLFGPLPCRLDDCLRSLTRFAAAHWTVASVSVVQGHFCKLFASLVPNDSHEELPCILDIDMFHLLVGLVLAFPALQCQDFSGISLGTGDLHIFHLVTMAHIIQILLTSCTEENGMDQENPPCEEESAVLALYKTLHQYTGSALKEIPSGWHLWRSVRAGIMPFLKCSALFFHYLNGVPSPPDIQVPGTSHFEHLCSYLSLPNNLICLFQENSEIMNSLIESWCRNSEVKRYLEGERDAIRYPRESNKLINLPEDYSSLINQASNFSCPKSGGDKSRAPTLCLVCGSLLCSQSYCCQTELEGEDVGACTAHTYSCGSGVGIFLRVRECQVLFLAGKTKGCFYSPPYLDDYGETDQGLRRGNPLHLCKERFKKIQKLWHQHSVTEEIGHAQEANQTLVGIDWQHL

SEQ ID NO: 1373 - protein, 439 aa, Homo sapiens
MASELEPEVQAIDRSLLECSAEEIAGKWLQATDLTREVYQHLAHYVPKIYCRGPNPFPQKEDMLAQHVLLGPMEWYLCGEDPAFGFPKLEQANKPSHLCGRVFKVGEPTYSCRDCAVDPTCVLCMECFLGSIHRDHRYRMTTSGGGGFCDCGDTEAWKEGPYCQKHELNTSEIEEEEDPLVHLSEDVIARTYNIFAITFRYAVEILTWEKESELPADLEMVEKSDTYYCMLFNDEVHTYEQVIYTLQKAVNCTQKEAIGFATTVDRDGRRSVRYGDFQYCEQAKSVIVRNTSRQTKPLKVQVMHSSIVAHQNFGLKLLSWLGSIIGYSDGLRRILCQVGLQEGPDGENSSLVDRLMLSDSKLWKGARSVYHQLFMSSLLMDLKYKKLFAVRFAKNYERLQSDYVTDDHDREFSVADLSVQIFTVPSLFSISAGRSGSPL

SEQ ID NO: 1374 - protein, 7388 aa, Homo sapiens
MSSSDEETLSERSCRSERSCRSERSYRSERSGSLSPCPPGDTLPWNLPLHEQKKRKSQDSVLDPAERAVVRVADERDRVQKKTFTKWVNKHLMKVRKHINDLYEDLRDGHNLISLLEVLSGIKLPREKGRMRFHRLQNVQIALDFLKQRQVKLVNIRNDDITDGNPKLTLGLIWTIILHFQISDIYISGESGDMSAKEKLLLWTQKVTAGYTGIKCTNFSSCWSDGKMFNALIHRYRPDLVDMERVQIQSNRENLEQAFEVAERLGVTRLLDAEDVDVPSPDEKSVITYVSSIYDAFPKVPEGGEGISATEVDSRWQEYQSRVDSLIPWIKQHTILMSDKTFPQNPVELKALYNQYIHFKETEILAKEREKGRIEELYKLLEVWIEFGRIKLPQGYHPNDVEEEWGKLIIEMLEREKSLRPAVERLELLLQIANKIQNGALNCEEKLTLAKNTLQADAAHLESGQPVQCESDVIMYIQECEGLIRQLQVDLQILRDENYYQLEELAFRVMRLQDELVTLRLECTNLYRKGHFTSLELVPPSTLTTTHLKAEPLTKATHSSSTSWFRKPMTRAELVAISSSEDEGNLRFVYELLSWVEEMQMKLERAEWGNDLPSVELQLETQQHIHTSVEELGSSVKEARLYEGKMSQNFHTSYAETLGKLETQYCKLKETSSFRMRHLQSLHKFVSRATAELIWLNEKEEEELAYDWSDNNSNISAKRNYFSELTMELEEKQDVFRSLQDTAELLSLENHPAKQTVEAYSAAVQSQLQWMKQLCLCVEQHVKENTAYFQFFSDARELESFLRNLQDSIKRKYSCDHNTSLSRLEDLLQDSMDEKEQLIQSKSSVASLVGRSKTIVQLKPRSPDHVLKNTISVKAVCDYRQIEITICKNDECVLEDNSQRTKWKVISPTGNEAMVPSVCFLIPPPNKDAIEMASRVEQSYQKVMALWHQLHVNTKSLISWNYLRKDLDLVQTWNLEKLRSSAPGECHQIMKNLQAHYEDFLQDSRDSVLFSVADRLRLEEEVEACKARFQHLMKSMENEDKEETVAKMYISELKNIRLRLEEYEQRVVKRIQSLASSRTDRDAWQDNALRIAEQEHTQEDLQQLRSDLDAVSMKCDSFLHQSPSSSSVPTLRSELNLLVEKMDHVYGLSTVYLNKLKTVDVIVRSIQDAELLVKGYEIKLSQEEVVLADLSALEAHWSTLRHWLSDVKDKNSVFSVLDEEIAKAKVVAEQMSRLTPERNLDLERYQEKGSQLQERWHRVIAQLEIRQSELESIQEVLGDYRACHGTLIKWIEETTAQQEMMKPGQAEDSRVLSEQLSQQTALFAEIERNQTKLDQCQKFSQQYSTIVKDYELQLMTYKAFVESQQKSPGKRRRMLSSSDAITQEFMDLRTRYTALVTLTTQHVKYISDALRRLEEEEKVVEEEKQEHVEKVKELLGWVSTLARNTQGKATSSETKESTDIEKAILEQQVLSEELTTKKEQVSEAIKTSQIFLAKHGHKLSEKEKKQISEQLNALNKAYHDLCDGSANQLQQLQSQLAHQTEQKECRAVAGVIDLGTVEIFPIFKAMQKGLLDQDTGLVLLESQVIMSGLIAPETGENLSLEEGIARNLINPQMYQQLRELQDALALISRLTESRGPLSVVEAIEKRIISETVGLKILEAHLATGGFSLSPSENCINLEEAFHQGLISAWLHSVLESYLRTSKNLIDPNTAEKIGLLDLMQRCIVHQESGFKLLPVKQLAGGMVSLKSGRKVSIFRAVQEGLIDRQVTVRLLEAQLFAGGIVDPRTGHRLTVEEAVRHNLIDQDMACAILIRQLQTGGIIDTVTGQRLTIDEAVSNDLVAAKIALVILESLWSFMGLLWPESGEILPITDALEQGIVSTELAHKILSNRQHIKALFLPATTEILSWKKAIESGILDRDLANNLKSICIPDVMPHMQLADSAEQNINPGAAVLPCSKSHPKATASQSENLLFQLMTHSYINVQNGQRLLLLDKELMETLTSRDEYQTSPPKVVEIGHQRQKTPEGLQESANVKISGTFSSGWTVRLPEFQFSSQNKEYPDREDCTTEKGKKTTVETEDSSVENPEQDLFVEQKERNPNIDALKVINKVKLEVQRQLIGTQREDQTAVSVRENASRGHLLTIPPAEAEGVPLVVDKDVFSVETPKKEHQPLRNTSFTCQNEQAHTLETEYIHDETGGSHIKPQSKKLQVQVKKTLGIKLELKSETDGNVHPLDKKEMLKKTFLAKDDHKESQEAQNIAGGSMMMSEKTDEEDSGREIFLSCSHPLELLEEATLNVLSAQLLDGGIFHEQTGQKLLLNEAISRGIVPSHTAVKLMEKLNMFQGFFDSQTCESLTTEEVINEGLMDEKLLHNVLMADKAISGVLDPRTQTLCSVKDAVTVGLLDKETATRILERQVVTGGIIDLKRGKKVSVTLASTLGLVDVADQPELINLEKASKGRDAEKTVRERLISLQMETTGLIDPDSKAPLTVVQSIDRGLLEREEAVRLLTKQVVDGGIIHHISGMRLSVDNAFRHGLIGEDLAEKLKRVENLNIHQIFNPETKENISLPKAIKLDLITSDLKREIQEVQAFTGNFVDLISGQRLTLAEAKKEGLLTNEAVLSPGMMHGIVDPENCRIVPYSELVKKCKIDIESGQRYLEVIPFSDIKDGVSDKVLTLSQAIQLGKVDFASTLKVLEAQANTGGIIDTATGKRLTLASALEEKLVDENMVRIIASHQVLNGGIVDIFSDQRVTLVEAIEKRLISPELANMIQIDSSEFSDHRAQIEKQEGIEVCALQNEFLGKDMLIACNQTAEMSCNKVEESERLFQVENQSAQEKVKVRVSDGEQAKKSREISLKEFGCKDQRKPRMSSDAKEFISIINPHNLKGKSLGQVSLTHPYSECDFKLKEVARNNMGNDTNEEQEKAVTKIEIISHMKQSTSCLDSEEIRENQGEVILEVQETYCETSGKLPSEQVLQQPMNARVKSKREKREVIVEESIRTCKPAFLSEEKLYQETAIRDEHDSHIKSQPREMTSSEKGKEADTEMGFSITFKIEESSSQVVPQGISVKHLDALTLFSSKQANEGKVNNLSLCLTLKPEENLSREIACGAQSEPFPCMTPRPEGLHYQESDGKAQVTGPSQISKTDKSFQGTTRQETNYQDSWVTSKTKETKHQISSSNECKEKSYQEVSFDPARGLKLEEITVSRPDSKEVRYLEFSDRKDLHHQGSKSDDKLCGTLKSEIATQELTGEKFLEMANPNVAGLEAGSIEDIVTQRGSRVLGSFLPEKLFKGVSQKENTGQQNAIISPTVLETSEEKTVSLTVCSAVKTEKTPQEKLRESPGSEQTPFMTAPEGKGNGGVNPEPFRATQNVFTRQLCLEHDEKLVSYLSLLRNIEMRTKQIQPLELNLAELQDLLCQAKVLERELKDLTTLVSQELECVNQIIISQPQEVPAQLLKALEKDAKNLQKSLSSVSDTWNSRLLHFQNAVEIEKTKVLNQHTQLEGRLQDLRAWVGNKNLILNSKGSNSEIDVDSLNLCLQQYEDLKQPMAERKAQLDALAFDIQFFISEHAQDLSPQQNRQMLRLLNELQRSFQDILEQTAAQVDALQGHLQQMEQEALVKTLQKQQNTCHQQLEDLCSWVGQAERALAGHQGRTTQQDLSALQKNQSDLKDLQDDIQNRATSFATVVKDIEGFMEENQTKLSPRELTALREKLHQAKEQYEALQEETRVAQKELEEAVTSALQQETEKSKAAKELAENKKKIDALLDWVTSVGSSGGQLLTNLPGMEQLSGASLEKGALDTTDGYMGVNQAPEKLDKQCEMMKARHQELLSQQQNFILATQSAQAFLDQHGHNLTPEEQQMLQQKLGELKEQYSTSLAQSEAELKQVQTLQDELQKFLQDHKEFESWLERSEKELENMHKGGSSPETLPSLLKRQGSFSEDVISHKGDLRFVTISGQKVLDMENSFKEGKEPSEIGNLVKDKLKDATERYTALHSKCTRLGSHLNMLLGQYHQFQNSADSLQAWMQACEANVEKLLSDTVASDPGVLQEQLATTKQLQEELAEHQVPVEKLQKVARDIMEIEGEPAPDHRHVQETTDSILSHFQSLSYSLAERSSLLQKAIAQSQSVQESLESLLQSIGEVEQNLEGKQVSSLSSGVIQEALATNMKLKQDIARQKSSLEATREMVTRFMETADSTTAAVLQGKLAEVSQRFEQLCLQQQEKESSLKKLLPQAEMFEHLSGKLQQFMENKSRMLASGNQPDQDITHFFQQIQELNLEMEDQQENLDTLEHLVTELSSCGFALDLCQHQDRVQNLRKDFTELQKTVKEREKDASSCQEQLDEFRKLVRTFQKWLKETEGSIPPTETSMSAKELEKQIEHLKSLLDDWASKGTLVEEINCKGTSLENLIMEITAPDSQGKTGSILPSVGSSVGSVNGYHTCKDLTEIQCDMSDVNLKYEKLGGVLHERQESLQAILNRMEEVHKEANSVLQWLESKEEVLKSMDAMSSPTKTETVKAQAESNKAFLAELEQNSPKIQKVKEALAGLLVTYPNSQEAENWKKIQEELNSRWERATEVTVARQRQLEESASHLACFQAAESQLRPWLMEKELMMGVLGPLSIDPNMLNAQKQQVQFMLKEFEARRQQHEQLNEAAQGILTGPGDVSLSTSQVQKELQSINQKWVELTDKLNSRSSQIDQAIVKSTQYQELLQDLSEKVRAVGQRLSVQSAISTQPEAVKQQLEETSEIRSDLEQLDHEVKEAQTLCDELSVLIGEQYLKDELKKRLETVALPLQGLEDLAADRINRLQAALASTQQFQQMFDELRTWLDDKQSQQAKNCPISAKLERLQSQLQENEEFQKSLNQHSGSYEVIVAEGESLLLSVPPGEEKRTLQNQLVELKNHWEELSKKTADRQSRLKDCMQKAQKYQWHVEDLVPWIEDCKAKMSELRVTLDPVQLESSLLRSKAMLNEVEKRRSLLEILNSAADILINSSEADEDGIRDEKAGINQNMDAVTEELQAKTGSLEEMTQRLREFQESFKNIEKKVEGAKHQLEIFDALGSQACSNKNLEKLRAQQEVLQALEPQVDYLRNFTQGLVEDAPDGSDASQLLHQAEVAQQEFLEVKQRVNSGCVMMENKLEGIGQFHCRVREMFSQLADLDDELDGMGAIGRDTDSLQSQIEDVRLFLNKIHVLKLDIEASEAECRHMLEEEGTLDLLGLKRELEALNKQCGKLTERGKARQEQLELTLGRVEDFYRKLKGLNDATTAAEEAEALQWVVGTEVEIINQQLADFKMFQKEQVDPLQMKLQQVNGLGQGLIQSAGKDCDVQGLEHDMEEINARWNTLNKKVAQRIAQLQEALLHCGKFQDALEPLLSWLADTEELIANQKPPSAEYKVVKAQIQEQKLLQRLLDDRKATVDMLQAEGGRIAQSAELADREKITGQLESLESRWTELLSKAAARQKQLEDILVLAKQFHETAEPISDFLSVTEKKLANSEPVGTQTAKIQQQIIRHKALNEEIVNRKKNVDQAIKNGQALLKQTTGEEVLLIQEKLDGIKTRYADITVTSSKALRTLEQARQLATKFQSTYEELTGWLREVEEELATSGGQSPTGEQIPQFQQRQKELKKEVMEHRLVLDTVNEVSRALLELVPWRAREGLDKLVSDANEQYKLVSDTIGQRVDEIDAAIQRSQQYEQAADAELAWVAETKRKLMALGPIRLEQDQTTAQLQVQKAFSIDIIRHKDSMDELFSHRSEIFGTCGEEQKTVLQEKTESLIQQYEAISLLNSERYARLERAQVLVNQFWETYEELSPWIEETRALIAQLPSPAIDHEQLRQQQEEMRQLRESIAEHKPHIDKLLKIGPQLKELNPEEGEMVEEKYQKAENMYAQIKEEVRQRALALDEAVSQSTQITEFHDKIEPMLETLENLSSRLRMPPLIPAEVDKIRECISDNKSATVELEKLQPSFEALKRRGEELIGRSQGADKDLAAKEIQDKLDQMVFFWEDIKARAEEREIKFLDVLELAEKFWYDMAALLTTIKDTQDIVHDLESPGIDPSIIKQQVEAAETIKEETDGLHEELEFIRILGADLIFACGETEKPEVRKSIDEMNNAWENLNKTWKERLEKLEDAMQAAVQYQDTLQAMFDWLDNTVIKLCTMPPVGTDLNTVKDQLNEMKEFKVEVYQQQIEMEKLNHQGELMLKKATDETDRDIIREPLTELKHLWENLGEKIAHRQHKLEGALLALGQFQHALEELMSWLTHTEELLDAQRPISGDPKVIEVELAKHHVLKNDVLAHQATVETVNKAGNELLESSAGDDASSLRSRLEAMNQCWESVLQKTEEREQQLQSTLQQAQGFHSEIEDFLLELTRMESQLSASKPTGGLPETAREQLDTHMELYSQLKAKEETYNQLLDKGRLMLLSRDDSGSGSKTEQSVALLEQKWHVVSSKMEERKSKLEEALNLATEFQNSLQEFINWLTLAEQSLNIASPPSLILNTVLSQIEEHKVFANEVNAHRDQIIELDQTGNQLKFLSQKQDVVLIKNLLVSVQSRWEKVVQRSIERGRSLDDARKRAKQFHEAWKKLIDWLEDAESHLDSELEISNDPDKIKLQLSKHKEFQKTLGGKQPVYDTTIRTGRALKEKTLLPEDSQKLDNFLGEVRDKWDTVCGKSVERQHKLEEALLFSGQFMDALQALVDWLYKVEPQLAEDQPVHGDLDLVMNLMDAHKVFQKELGKRTGTVQVLKRSGRELIENSRDDTTWVKGQLQELSTRWDTVCKLSVSKQSRLEQALKQAEVFRDTVHMLLEWLSEAEQTLRFRGALPDDTEALQSLIDTHKEFMKKVEEKRVDVNSAVAMGEVILAVCHPDCITTIKHWITIIRARFEEVLTWAKQHQQRLETALSELVANAELLEELLAWIQWAETTLIQRDQEPIPQNIDRVKALIAEHQTFMEEMTRKQPDVDRVTKTYKRKNIEPTHAPFIEKSRSGGRKSLSQPTPPPMPILSQSEAKNPRINQLSARWQQVWLLALERQRKLNDALDRLEELKEFANFDFDVWRKKYMRWMNHKKSRVMDFFRRIDKDQDGKITRQEFIDGILASKFPTTKLEMTAVADIFDRDGDGYIDYYEFVAALHPNKDAYRPTTDADKIEDEVTRQVAQCKCAKRFQVEQIGENKYRFGDSQQLRLVRILRSTVMVRVGGGWMALDEFLVKNDPCRARGRTNIELREKFILPEGASQGMTPFRSRGRRSKPSSRAASPTRSSSSASQSNHSCTSMPSSPATPASGTKVIPSSGSKLKRPTPTFHSSRTSLAGDTSNSSSPASTGAKTNRADPKKSASRPGSRAGSRAGSRASSRRGSDASDFDLLETQSACSDTSESSAAGGQGNSRRGLNKPSKIPTMSKKTTTASPRTPGPKR

SEQ ID NO: 1375 - protein, 4433 aa, Homo sapiens
KNTISVKAVCDYRQIEITICKNDECVLEDNSQRTKWKVISPTGNEAMVPSVCFLIPPPNKDAIEMASRVEQSYQKVMALWHQLHVNTKSLISWNYLRKDLDLVQTWNLEKLRSSAPGECHQIMKNLQAHYEDFLQDSRDSVLFSVADRLRLEEEVEACKARFQHLMKSMENEDKEETVAKMYISELKNIRLRLEEYEQRVVKRIQSLASSRTDRDAWQDNALRIAEQEHTQEDLQQLRSDLDAVSMKCDSFLHQSPSSSSVPTLRSELNLLVEKMDHVYGLSTVYLNKLKTVDVIVRSIQDAELLVKGYEIKLSQEEVVLADLSALEAHWSTLRHWLSDVKDKNSVFSVLDEEIAKAKVVAEQMSRLTPERNLDLERYQEKGSQLQERWHRVIAQLEIRQSELESIQEVLGDYRACHGTLIKWIEETTAQQEMMKPGQAEDSRVLSEQLSQQTALFAEIERNQTKLDQCQKFSQQYSTIVKDYELQLMTYKAFVESQQKSPGKRRRMLSSSDAITQEFMDLRTRYTALVTLTTQHVKYISDALRRLEEEEKVVEEEKQEHVEKVKELLGWVSTLARNTQGKATSSETKESTDIEKAILEQQVLSEELTTKKEQVSEAIKTSQIFLAKHGHKLSEKEKKQISEQLNALNKAYHDLCDGSANQLQQLQSQLAHQTEQKTLQKQQNTCHQQLEDLCSWVGQAERALAGHQGRTTQQDLSALQKNQSDLKDLQDDIQNRATSFATVVKDIEGFMEENQTKLSPRELTALREKLHQAKEQYEALQEETRVAQKELEEAVTSALQQETEKSKAAKELAENKKKIDALLDWVTSVGSSGGQLLTNLPGMEQLSGASLEKGALDTTDGYMGVNQAPEKLDKQCEMMKARHQELLSQQQNFILATQSAQAFLDQHGHNLTPEEQQMLQQKLGELKEQYSTSLAQSEAELKQVQTLQDELQKFLQDHKEFESWLERSEKELENMHKGGSSPETLPSLLKRQGSFSEDVISHKGDLRFVTISGQKVLDMENSFKEGKEPSEIGNLVKDKLKDATERYTALHSKCTRLGSHLNMLLGQYHQFQNSADSLQAWMQACEANVEKLLSDTVASDPGVLQEQLATTKQLQEELAEHQVPVEKLQKVARDIMEIEGEPAPDHRHVQETTDSILSHFQSLSYSLAERSSLLQKAIAQSQSVQESLESLLQSIGEVEQNLEGKQVSSLSSGVIQEALATNMKLKQDIARQKSSLEATREMVTRFMETADSTTAAVLQGKLAEVSQRFEQLCLQQQEKESSLKKLLPQAEMFEHLSGKLQQFMENKSRMLASGNQPDQDITHFFQQIQELNLEMEDQQENLDTLEHLVTELSSCGFALDLCQHQDRVQNLRKDFTELQKTVKEREKDASSCQEQLDEFRKLVRTFQKWLKETEGSIPPTETSMSAKELEKQIEHLKSLLDDWASKGTLVEEINCKGTSLENLIMEITAPDSQGKTDLTEIQCDMSDVNLKYEKLGGVLHERQESLQAILNRMEEVHKEANSVLQWLESKEEVLKSMDAMSSPTKTETVKAQAESNKAFLAELEQNSPKIQKVKEALAGLLVTYPNSQEAENWKKIQEELNSRWERATEVTVARQRQLEESASHLACFQAAESQLRPWLMEKELMMGVLGPLSIDPNMLNAQKQQVQFMLKEFEARRQQHEQLNEAAQGILTGPGDVSLSTSQVQKELQSINQKWVELTDKLNSRSSQIDQAIVKSTQYQELLQDLSEKVRAVGQRLSVQSAISTQPEAVKQQLEETSEIRSDLEQLDHEVKEAQTLCDELSVLIGEQYLKDELKKRLETVALPLQGLEDLAADRINRLQAALASTQQFQQMFDELRTWLDDKQSQQAKNCPISAKLERLQSQLQENEEFQKSLNQHSGSYEVIVAEGESLLLSVPPGEEKRTLQNQLVELKNHWEELSKKTADRQSRLKDCMQKAQKYQWHVEDLVPWIEDCKAKMSELRVTLDPVQLESSLLRSKAMLNEVEKRRSLLEILNSAADILINSSEADEDGIRDEKAGINQNMDAVTEELQAKTGSLEEMTQRLREFQESFKNIEKKVEGAKHQLEIFDALGSQACSNKNLEKLRAQQEVLQALEPQVDYLRNFTQGLVEDAPDGSDASQLLHQAEVAQQEFLEVKQRVNSGCVMMENKLEGIGQFHCRVREMFSQLADLDDELDGMGAIGRDTDSLQSQIEDVRLFLNKIHVLKLDIEASEAECRHMLEEEGTLDLLGLKRELEALNKQCGKLTERGKARQEQLELTLGRVEDFYRKLKGLNDATTAAEEAEALQWVVGTEVEIINQQLADFKMFQKEQVDPLQMKLQQVNGLGQGLIQSAGKDCDVQGLEHDMEEINARWNTLNKKVAQRIAQLQEALLHCGKFQDALEPLLSWLADTEELIANQKPPSAEYKVVKAQIQEQKLLQRLLDDRKATVDMLQAEGGRIAQSAELADREKITGQLESLESRWTELLSKAAARQKQLEDILVLAKQFHETAEPISDFLSVTEKKLANSEPVGTQTAKIQQQIIRHKALNEEIVNRKKNVDQAIKNGQALLKQTTGEEVLLIQEKLDGIKTRYADITVTSSKALRTLEQARQLATKFQSTYEELTGWLREVEEELATSGGQSPTGEQIPQFQQRQKELKKEVMEHRLVLDTVNEVSRALLELVPWRAREGLDKLVSDANEQYKLVSDTIGQRVDEIDAAIQRSQQYEQAADAELAWVAETKRKLMALGPIRLEQDQTTAQLQVQKAFSIDIIRHKDSMDELFSHRSEIFGTCGEEQKTVLQEKTESLIQQYEAISLLNSERYARLERAQVLVNQFWETYEELSPWIEETRALIAQLPSPAIDHEQLRQQQEEMRQLRESIAEHKPHIDKLLKIGPQLKELNPEEGEMVEEKYQKAENMYAQIKEEVRQRALALDEAVSQSTQITEFHDKIEPMLETLENLSSRLRMPPLIPAEVDKIRECISDNKSATVELEKLQPSFEALKRRGEELIGRSQGADKDLAAKEIQDKLDQMVFFWEDIKARAEEREIKFLDVLELAEKFWYDMAALLTTIKDTQDIVHDLESPGIDPSIIKQQVEAAETIKEETDGLHEELEFIRILGADLIFACGETEKPEVRKSIDEMNNAWENLNKTWKERLEKLEDAMQAAVQYQDTLQAMFDWLDNTVIKLCTMPPVGTDLNTVKDQLNEMKEFKVEVYQQQIEMEKLNHQGELMLKKATDETDRDIIREPLTELKHLWENLGEKIAHRQHKLEGALLALGQFQHALEELMSWLTHTEELLDAQRPISGDPKVIEVELAKHHVLKNDVLAHQATVETVNKAGNELLESSAGDDASSLRSRLEAMNQCWESVLQKTEEREQQLQSTLQQAQGFHSEIEDFLLELTRMESQLSASKPTGGLPETAREQLDTHMELYSQLKAKEETYNQLLDKGRLMLLSRDDSGSGSKTEQSVALLEQKWHVVSSKMEERKSKLEEALNLATEFQNSLQEFINWLTLAEQSLNIASPPSLILNTVLSQIEEHKVFANEVNAHRDQIIELDQTGNQLKFLSQKQDVVLIKNLLVSVQSRWEKVVQRSIERGRSLDDARKRAKQFHEAWKKLIDWLEDAESHLDSELEISNDPDKIKLQLSKHKEFQKTLGGKQPVYDTTIRTGRALKEKTLLPEDSQKLDNFLGEVRDKWDTVCGKSVERQHKLEEALLFSGQFMDALQALVDWLYKVEPQLAEDQPVHGDLDLVMNLMDAHKVFQKELGKRTGTVQVLKRSGRELIENSRDDTTWVKGQLQELSTRWDTVCKLSVSKQSRLEQALKQAEVFRDTVHMLLEWLSEAEQTLRFRGALPDDTEALQSLIDTHKEFMKKVEEKRVDVNSAVAMGEVILAVCHPDCITTIKHWITIIRARFEEVLTWAKQHQQRLETALSELVANAELLEELLAWIQWAETTLIQRDQEPIPQNIDRVKALIAEHQTFMEEMTRKQPDVDRVTKTYKRKNIEPTHAPFIEKSRSGGRKSLSQPTPPPMPILSQSEAKNPRINQLSARWQQVWLLALERQRKLNDALDRLEELKEFANFDFDVWRKKYMRWMNHKKSRVMDFFRRIDKDQDGKITRQEFIDGILASKFPTTKLEMTAVADIFDRDGDGYIDYYEFVAALHPNKDAYRPTTDADKIEDEVTRQVAQCKCAKRFQVEQIGENKYRFGDSQQLRLVRILRSTVMVRVGGGWMALDEFLVKNDPCRARGRTNIELREKFILPEGASQGMTPFRSRGRRSKPSSRAASPTRSSSSASQSNHSCTSMPSSPATPASGTKVIPSSGSKLKRPTPTFHSSRTSLAGDTSNSSSPASTGAKTNRADPKKSASRPGSRAGSRAGSRASSRRGSDASDFDLLETQSACSDTSESSAAGGQGNSRRGLNKPSKIPTMSKKTTTASPRTPGPKR

SEQ ID NO: 1376 - protein, 319 aa, Homo sapiens
MDQSVAIQETLAEGEYCVIAVQGVLCEGDSRQSRLLGLVRYRLEHGGQEHALFLYTHRRMAITGDDVSLDQIVPVSRDFTLEEVSPDGELYILGSDVTVQLDTAELSLVFQLPFGSQTRMFLHEVARACPGFDSATRDPEFLWLSRYRCAELELEMPTPRGCNSALVTWPGYATIGGGRYPSRKKRWGLEEARPQGAGSVLFWGGAMEKTGFRLMERAHGGGFVWGRSARDGRRDEELEEAGREMSAAAGSRERNTAGSAGGGKLGWGAGPGAAVRPALGWAGSAVWPVDARGEDQSPGGPLEAGTLGQKFCDVLLRRA

SEQ ID NO: 1377 - protein, 993 aa, Homo sapiens
MDQSVAIQETLAEGEYCVIAVQGVLCEGDSRQSRLLGLVRYRLEHGGQEHALFLYTHRRMAITGDDVSLDQIVPVSRDFTLEEVSPDGELYILGSDVTVQLDTAELSLVFQLPFGSQTRMFLHEVARACPGFDSATRDPEFLWLSRYRCAELELEMPTPRGCNSALVTWPGYATIGGGRYPSRKKRWGLEEARPQGAGSVLFWGGAMEKTGFRLMERAHGGGFVWGRSARDGRRDEELEEAGREMSAAAGSRERNTAGGSNFDGLRPNGKGVPMDQSSRGQDKPESLQPRQNKSKSEITDMVRSSTITVSDKAHILSMQKFGLRDTIVKSHLLQKEEDYTYIQNFRFFAGTYNVNGQSPKECLRLWLSNGIQAPDVYCVGFQELDLSKEAFFFHDTPKEEEWFKAVSEGLHPDAKYAKVKLIRLVGIMLLLYVKQEHAAYISEVEAETVGTGIMGRMGNKGGVAIRFQFHNTSICVVNSHLAAHIEEYERRNQDYKDICSRMQFCQPDPSLPPLTISNHDVILWLGDLNYRIEELDVEKVKKLIEEKDFQMLYAYDQLKIQVAAKTVFEGFTEGELTFQPTYKYDTGSDDWDTSEKCRAPAWCDRILWKGKNITQLSYQSHMALKTSDHKPVSSVFDIGVRVVNDELYRKTLEEIVRSLDKMENANIPSVSLSKREFCFQNVKYMQLKVESFTIHNGQVPCHFEFINKPDEESYCKQWLNANPSRGFLLPDSDVEIDLELFVNKMTATKLNSGEDKIEDILVLHLDRGKDYFLSVSGNYLPSCFGSPIHTLCYMREPILDLPLETISELTLMPVWTGDDGSQLDSPMEIPKELWMMVDYLYRNAVQQEDLFQQPGLRSEFEHIRDCLDTGMIDNLSASNHSVAEALLLFLESLPEPVICYSTYHNCLECSGNYTASKQVISTLPIFHKNVFHYLMAFLRELLKNSAKNHLDENILASIFGSLLLRNPAGHQKLDMTEKKKAQEFIHQFLCNPL

SEQ ID NO: 1378 - protein, 749 aa, Homo sapiens
MSAAAGSRERNTAGGSNFDGLRPNGKGVPMDQSSRGQDKPESLQPRQNKSKSEITDMVRSSTITVSDKAHILSMQKFGLRDTIVKSHLLQKEEDYTYIQNFRFFAGTYNVNGQSPKECLRLWLSNGIQAPDVYCVGFQELDLSKEAFFFHDTPKEEEWFKAVSEGLHPDAKYAKVKLIRLVGIMLLLYVKQEHAAYISEVEAETVGTGIMGRMGNKGGVAIRFQFHNTSICVVNSHLAAHIEEYERRNQDYKDICSRMQFCQPDPSLPPLTISNHDVILWLGDLNYRIEELDVEKVKKLIEEKDFQMLYAYDQLKIQVAAKTVFEGFTEGELTFQPTYKYDTGSDDWDTSEKCRAPAWCDRILWKGKNITQLSYQSHMALKTSDHKPVSSVFDIGVRVVNDELYRKTLEEIVRSLDKMENANIPSVSLSKREFCFQNVKYMQLKVESFTIHNGQVPCHFEFINKPDEESYCKQWLNANPSRGFLLPDSDVEIDLELFVNKMTATKLNSGEDKIEDILVLHLDRGKDYFLSVSGNYLPSCFGSPIHTLCYMREPILDLPLETISELTLMPVWTGDDGSQLDSPMEIPKELWMMVDYLYRNAVQQEDLFQQPGLRSEFEHIRDCLDTGMIDNLSASNHSVAEALLLFLESLPEPVICYSTYHNCLECSGNYTASKQVISTLPIFHKNVFHYLMAFLRELLKNSAKNHLDENILASIFGSLLLRNPAGHQKLDMTEKKKAQEFIHQFLCNPL

SEQ ID NO: 1379 - protein, 230 aa, Homo sapiens
MEPLRLLILLFVTELSGAHNTTVFQGVAGQSLQVSCPYDSMKHWGRRKAWCRQLGEKGPCQRVVSTHNLWLLSFLRRWNGSTAITDDTLGGTLTITLRNLQPHDAGLYQCQSLHGSEADTLRKVLVEVLADPLDHRDAGDLWFPGESESFEDAHVEHSISRSLLEGEIPFPPTSILLLLACIFLIKILAASALWAAAWHGQKPGTHPPSELDCGHDPGYQLQTLPGLRDT

SEQ ID NO: 1380 - protein, 479 aa, Homo sapiens
MEKGLTLPQDCRDFVHSLKMRSKYALFLVFVVIVFVFIEKENKIISRVSDKLKQIPQALADANSTDPALILAENASLLSLSELDSAFSQLQSRLRNLSLQLGVEPAMEAAGEEEEEQRKEEEPPRPAVAGPRRHVLLMATTRTGSSFVGEFFNQQGNIFYLFEPLWHIERTVSFEPGGANAAGSALVYRDVLKQLFLCDLYVLEHFITPLPEDHLTQFMFRRGSSRSLCEDPVCTPFVKKVFEKYHCKNRRCGPLNVTLAAEACRRKEHMALKAVRIRQLEFLQPLAEDPRLDLRVIQLVRDPRAVLASRMVAFAGKYKTWKKWLDDEGQDGLREEEVQRLRGNCESIRLSAELGLRQPAWLRGRYMLVRYEDVARGPLQKAREMYRFAGIPLTPQVEDWIQKNTQAAHDGSGIYSTQKNSSEQFEKWRFSMPFKLAQVVQAACGPAMRLFGYKLARDAAALTNRSVSLLEERGTFWVT

SEQ ID NO: 1381 - protein, 222 aa, Homo sapiens
MEPLRLLILLFVTELSGAHNTTVFQGVAGQSLQVSCPYDSMKHWGRRKAWCRQLGEKGPCQRVVSTHNLWLLSFLRRWNGSTAITDDTLGGTLTITLRNLQPHDAGLYQCQSLHGSEADTLRKVLVEVLADPLDHRDAGDLWFPGESESFEDAHVEHSISRPSQGSHLPSCLSKEPLGRRNPLPTHFHPSPPGLHLSHQDSSSQRPLGCSLAWTEARDTSTQ

SEQ ID NO: 1382 - protein, 557 aa, Homo sapiens
IGRALLWTTENLFPETPYLRKHKVIFVVSAGENYERKEFVKMMALRAKCQGYVIFVISLGSTRKDDMEELASYPLDQHLIQLGRIHKPDLNYIAKFLKPFLYSVRRGFNQYPPPMLEDACRLINLGGENIQNDGFQFVTELQEDFLGGNGFIGQELNSGRESPFVKTEDNGSDYLVYLPSQMFEPQKLMINYEKDQKSAEIASLTSGHENYGRKEEPDHTYEPGDVSLQEYYMDVAFLIDASQRVGSDEFKEVKAFITSVLDYFHIAPTPLTSTLGDRVAVLSYSPPGYMPNTEECPVYLEFDLVTYNSIHQMKHHLQDSQQLNGDVFIGHALQWTIDNVFVGTPNLRKNKVIFVISAGETNSLDKDVLRNVSLRAKCQGYSIFVFSFGPKHNDKELEELASHPLDHHLVQLGRTHKPDWNYIIKFVKPFVHLIRRAINKYPTEDMKATCVNMTSPNPENGGTENTVLLLPGIYEIKTENGDLFDEFDSQAQHLLVLGNNHSSGSETATDLMQKLYLLFSTEKLAMKDKEKAHLEEISALVVDKQQEKEDGEDTRSS

SEQ ID NO: 1383 - protein, 475 aa, Homo sapiens
MAVVSEDDFQHSSNSTYRTTSSSLRADQEALLEKLLDRPPPGLQRPEDRFCGTYIIFFSLGIGSLLPWNFFITAKEYWMFKLRNSSSPATGEDPEGSDILNYFESYLAVASTVPSMLCLVANFLLVNRVAVHIRVLASLTVILAIFMVITALVKVDTSSWTRGFFAVTIVCMVILSGASTVFSSSIYGMTGSFPMRNSQALISGGAMGGTVSAVASLVDLAASSDVRNSALAFFLTATVFLVLCMGLYLLLSRLEYARYYMRPVLAAHVFSGEEELPQDSLSAPSVASRFIDSHTPPLRPILKKTASLGFCVTYVFFITSLIYPAICTNIESLNKGSGSLWTTKFFIPLTTFLLYNFADLCGRQLTAWIQVPGPNSKALPGFVLLRTCLIPLFVLCNYQPRVHLKTVVFQSDVYPALLSSLLGLSNGYLSTLALLYGPKIVPRELAEATGVVMSFYVCLGLTLGSACSTLLVHLI

SEQ ID NO: 1384 - protein, 332 aa, Homo sapiens
MYRPRARAAPEGRVRGCAVPSTVLLLLAYLAYLALGTGVFWTLEGRAAQDSSRSFQRDKWELLQNFTCLDRPALDSLIRDVVQAYKNGASLLSNTTSMGRWELVGSFFFSVSTITTIGYGNLSPNTMAARLFCIFFALVGIPLNLVVLNRLGHLMQQGVNHWASRLGGTWQDPDKARWLAGSGALLSGLLLFLLLPPLLFSHMEGWSYTEGFYFAFITLSTVGFGDYVIGMNPSQRYPLWYKNMVSLWILFGMAWLALIIKLILSQLETPGRVCSCCHHSSKEDFKSQSWRQGPDREPESHSPQQGCYPEGPMGIIQHLEPSAHAAGCGKDS

SEQ ID NO: 1385 - protein, 2715 aa, Homo sapiens
MKMKIQKKEKQLSNLKVLNHSPMSDASVNFDYKSPSPFDCSTDQEEKIEDVASHCLPQKDLYTAEEEAATLFPRKMTSHNGMEDSGGGGTGVKKKRKKKEPGDQEGAAKGSKDREPKPKRKREPKEPKEPRKAKEPKKAKEHKEPKQKDGAKKARKPREASGTKEAKEKRSCTDSAARTKSRKASKEQGPTPVEKKKKGKRKSETTVESLELDQGLTNPSLRSPEESTESTDSQKRRSGRQVKRRKYNEDLDFKVVDDDGETIAVLGAGRTSALSASTLAWQAEEPPEDDANIIEKILASKTVQEVHPGEPPFDLELFYVKYRNFSYLHCKWATMEELEKDPRIAQKIKRFRNKQAQMKHIFTEPDEDLFNPDYVEVDRILEVAHTKDAETGEEVTHYLVKWCSLPYEESTWELEEDVDPAKVKEFESLQVLPEIKHVERPASDSWQKLEKSREYKNSNQLREYQLEGMNWLLFNWYNRKNCILADEMGLGKTIQSITFLSEIFLRGIHGPFLIIAPLSTITNWEREFRTWTEMNAIVYHGSQISRQMIQQYEMVYRDAQGNPLSGVFKFHVVITTFEMILADCPELKKIHWSCVIIDEAHRLKNRNCKLLEGLKLMALEHKVLLTGTPLQNSVEELFSLLNFLEPSQFPSETAFLEEFGDLKTEEQVKKLQSILKPMMLRRLKDDVEKNLAPKQETIIEVELTNIQKKYYRAILEKNFSFLTKGANQHNMPNLINTMMELRKCCNHPYLINGAEEKILEDFRKTHSPDAPDFQLQAMIQAAGKLVLIDKLLPKLIAGGHKVLIFSQMVRCLDILEDYLIQRRYTYERIDGRVRGNLRQAAIDRFCKPDSDRFVFLLCTRAGGLGINLTAADTCIIFDSDWNPQNDLQAQARCHRIGQSKAVKVYRLITRNSYEREMFDKASLKLGLDKAVLQDINRKGGTNGVQQLSKMEVEDLLRKGAYGALMDEEDEGSKFCEEDIDQILQRRTHTITIQSEGKGSTFAKASFVASGNRTDISLDDPNFWQKWAKIAELDTEAKNEKESLVIDRPRVRKQTKHYNSFEEDELMEFSELDSDSDERPTRSRRLNDKARRYLRAECFRVEKNLLIFGWGRWKDILTHGRFKWHLNEKDMEMICRALLVYCVKHYKGDEKIKSFIWELITPTKDGQAQTLQNHSGLSAPVPRGRKGKKTKNQLLIPELKDADWLATCNPEVVLHDDGYKKHLKQHCNKVLLRVRMLYYLKAEILGEAAEKAFEGSPARELDVPLPDIDYMEIPVDWWDAEADKSLLIGVFKHGYERYNAMRADPALCFLEKVGMPDEKSLSAEQGVTDGTSDIPERGNTDKEDNAEDKVDGLQKQTESSSDGGDGVFSEKKDDSRAAQDGSDPDKSPWPVSSALTARLRRLVTVYQRCNRKELCRPEILGPGNQGYWVQEEMFRRTSEMDLINKEAQKRWTRREQADFYRTVSSFGVVYDQEKKTFDWTQFRIISRLDKKSDESLEQYFYSFVAMCRNVCRLPTWKDGGPPDTTIYVEPITEERAARTLYRIELLRKVREQVLKCPQLHERLQLCRPSLYLPVWWECGKHDRDLLIGTAKHGLNRTDCYIMNDPQLSFLDAYRNYAQHKRSGTQAPGNLCCLYQTNSKLYESLTYSQMSRTSESLENEPENLVRVESRDDHLSLPDVTCENFISKVQDVISINHDESLLPESLESMMYGKKVLSQEPSSFQESPSTNTESRKDVITISISKDGNCQSGGPEAEIASGPTFMGSLEAGGVAQANIKNGKHLLMSISKEGELCCSEAGQRPENIGQLEAKCLASPSLNPGNESGFVDMCSLSVCDSKRNLSSDQQLIDLLENKSLESKLILSQNHSDEEEEEEENEEENLAMAVGMGERPEVLHLTEPTTNISREKNQGFQDETKKGSLEVANQTPGLQRAFPAPAACQCHCKHMERWMHGLENDEFEIEKPKAYIPDLFKSKTNTIAMEGEPTAIPSQPFKVKHELLKEPWKESAEGQNVFPTYPLEGSELKSEDMDFENKDDYDRDGNCHSQDYPGKYSEEESKSSTSGITGDIGDELQEARAPTIAQLLQEKTLYSFSEWPKDRVIINRLDNICHVVLKGKWPSSQQYEPSGTLPTPVLTSSAGSRTSLSEPEAAEHSFSNGAALAAQIHKESFLAPVFTKDEQKHRRPYEFEVERDAKARGLEQFSATHGHTPIILNGWHGESAMDLSCSSEGSPGATSPFPVSASTPKIGAISSLQGALGMDLSGILQAGLIHPVTGQIVNGSLRRDDAATRRRRGRRKHVEGGMDLIFLKEQTLQAGILEVHEDPGQATLSTTHPEGPGPATSAPEPATAASSQAEKSIPSKSLLDWLRQQADYSLEVPGFGANFSDKPKQRRPRCKEPGKLDVSSLSGEERVPAIPKEPGLRGFLPENKFNHTLAEPILRDTGPRRRGRRPRSELLKAPSIVADSPSGMGPLFMNGLIAGMDLVGLQNMRNMPGIPLTGLVGFPAGFATMPTGEEVKSTLSMLPMMLPGMAAVPQMFGVGGLLSPPMATTCTSTAPASLSSTTKSGTAVTEKTAEDKPSSHDVKTDTLAEDKPGPGPFSDQSEPAITTSSPVAFNPFLIPGVSPGLIYPSMFLSPGMGMALPAMQQARHSEIVGLESQKRKKKKTKGDNPNSHPEPAPSCEREPSGDENCAEPSAPLPAEREHGAQAGEGALKDSNNDTN

SEQ ID NO: 1386 - protein, 463 aa, Homo sapiens
MAGAPGPLRLALLLLGMVGRAGPRPQGATVSLWETVQKWREYRRQCQRSLTEDPPPATDLFCNRTFDEYACWPDGEPGSFVNVSCPWYLPWASSVPQGHVYRFCTAEGLWLQKDNSSLPWRDLSECEESKRGERSSPEEQLLFLYIIYTVGYALSFSALVIASAILLGFRHLHCTRNYIHLNLFASFILRALSVFIKDAALKWMYSTAAQQHQWDGLLSYQDSLSCRLVFLLMQYCVAANYYWLLVEGVYLYTLLAFSVLSEQWIFRLYVSIGWGVPLLFVVPWGIVKYLYEDEGCWTRNSNMNYWLIIRLPILFAIGVNFLIFVRVICIVVSKLKANLMCKTDIKCRLAKSTLTLIPLLGTHEVIFAFVMDEHARGTLRFIKLFTELSFTSFQGLMVAILYCFVNNEVQLEFRKSWERWRLEHLHIQRDSSMKPLKCPTSSLSSGATAGSSMYTATCQASCS

SEQ ID NO: 1387 - protein, 1290 aa, Homo sapiens
MAGAASPCANGCGPGAPSDAEVLHLCRSLEVGTVMTLFYSKKSQRPERKTFQVKLETRQITWSRGADKIEGAIDIREIKEIRPGKTSRDFDRYQEDPAFRPDQSHCFVILYGMEFRLKTLSLQATSEDEVNMWIKGLTWLMEDTLQAPTPLQIERWLRKQFYSVDRNREDRISAKDLKNMLSQVNYRVPNMRFLRERLTDLEQRSGDITYGQFAQLYRSLMYSAQKTMDLPFLEASTLRAGERPELCRVSLPEFQQFLLDYQGELWAVDRLQVQEFMLSFLRDPLREIEEPYFFLDEFVTFLFSKENSVWNSQLDAVCPDTMNNPLSHYWISSSHNTYLTGDQFSSESSLEAYARCLRMGCRCIELDCWDGPDGMPVIYHGHTLTTKIKFSDVLHTIKEHAFVASEYPVILSIEDHCSIAQQRNMAQYFKKVLGDTLLTKPVEISADGLPSPNQLKRKILIKHKKLAEGSAYEEVPTSMMYSENDISNSIKNGILYLEDPVNHEWYPHYFVLTSSKIYYSEETSSDQGNEDEEEPKEVSSSTELHSNEKWFHGKLGAGRDGRHIAERLLTEYCIETGAPDGSFLVRESETFVGDYTLSFWRNGKVQHCRIHSRQDAGTPKFFLTDNLVFDSLYDLITHYQQVPLRCNEFEMRLSEPVPQTNAHESKEWYHASLTRAQAEHMLMRVPRDGAFLVRKRNEPNSYAISFRAEGKIKHCRVQQEGQTVMLGNSEFDSLVDLISYYEKHPLYRKMKLRYPINEEALEKIGTAEPDYGALYEGRNPGFYVEANPMPTFKCAVKALFDYKAQREDELTFIKSAIIQNVEKQEGGWWRGDYGGKKQLWFPSNYVEEMVNPVALEPEREHLDENSPLGDLLRGVLDVPACQIAIRPEGKNNRLFVFSISMASVAHWSLDVAADSQEELQDWVKKIREVAQTADARLTEGKIMERRKKIALELSELVVYCRPVPFDEEKIGTERACYRDMSSFPETKAEKYVNKAKGKKFLQYNRLQLSRIYPKGQRLDSSNYDPLPMWICGSQLVALNFQTPDKPMQMNQALFMTGRHCGYVLQPSTMRDEAFDPFDKSSLRGLEPCAISIEVLGARHLPKNGRGIVCPFVEIEVAGAEYDSTKQKTEFVVDNGLNPVWPAKPFHFQISNPEFAFLRFVVYEEDMFSDQNFLAQATFPVKGLKTGYRAVPLKNNYSEDLELASLLIKIDIFPAKENGDLSPFSGTSLRERGSDASGQLFHGRAREGSFESRYQQPFEDFRISQEHLADHFDSRERRAPRRTRVNGDNRL

SEQ ID NO: 1388 - protein, 647 aa, Homo sapiens
MGEIEGTYRVLQTAGMRLGAQTPVGVSTLEPGQTLLPRMQEKHLHLRVKLLDNTMEIFDIEPKCDGQVLLTQVWKRLNLVECDYFGMEFQNTQSYWIWLEPMKPIIRQIRRPKNVVLRLAVKFFPPDPGQLQEEYTRYLFALQLKRDLLEERLTCADTTAALLTSHLLQSEIGDYDETLDREHLKVNEYLPGQQHCLEKILEFHQKHVGQTPAESDFQVLEIARKLEMYGIRFHMASDREGTKIQLAVSHMGVLVFQGTTKINTFNWSKVRKLSFKRKRFLIKLHPEVHGPYQDTLEFLLGSRDECKNFWKICVEYHTFFRLLDQPKPKAKAVFFSRGSSFRYSGRTQKQLVDYFKDSGMKRIPYERRHSKTHTSVRALTADLPKQSISFPEGLRTPASPSSANAFYSLSPSTLVPSGLPEFKDSSSSLTDPQVSYVKSPAAERRSGAVAGGPDTPSAQPLGPPALQPGPGLSTKSPQPSPSSRKSPLSLSPAFQVPLGPAEQGSSPLLSPVLSDAGGAGMDCEEPRHKRVPADEAYFIVKEILATERTYLKDLEVITVWFRSAVVKEDAMPATLMTLLFSNIDPIYEFHRGFLREVEQRLALWEGPSKAHTKGSHQRIGDILLRNMRQLKVFQLHEGHVAGVTKME

SEQ ID NO: 1389 - protein, 972 aa, Homo sapiens
GLSIMVSGKLDAVMKARKDIVARLQTQASATVAIPKEHHRFVIGKNGEKLQDLELKTATKIQIPRPDDPSNQIKITGTKEGIEKARHEVLLISAEQDKRAVERLEVEKAFHPFIAGPYNRLVGEIMQETGTRINIPPPSVNRTEIVFTGEKEQLAQAVARIKKIYEEKANSFTVSSVAAPSWLHRFIIGKKGQNLAKITQQMPKVHIEFTEGEDKITLEGPTEDVNVAQEQIEGMVKDLINRMDYVEINIDHKFHRHLIGKSGANINRIKDQYKVSVRIPPDSEKSNLIRIEGDPQGVQQAKRELLELASRMENERTKDLIIEQRFHRTIIGQKGERIREIRDKFPEVIINFPDPAQKSDIVQLRGPKNEVEKCTKYMQKMVADLVENSYSISVPIFKQFHKNIIGKGGANIKKIREESNTKIDLPAENSNSETIIITGKRANCEAARSRILSIQKDLANIAEVEVSIPAKLHNSLIGTKGRLIRSIMEECGGVHIHFPVEGSGSDTVVIRGPSSDVEKAKKQLLHLAEEKQTKSFTVDIRAKPEYHKFLIGKGGGKIRKVRDSTGARVIFPAAEDKDQDLITIIGKEDAVREAQKELEALIQNLDNVVEDSMLVDPKHHRHFVIRRGQVLREIAEEYGGVMVSFPRSGTQSDKVTLKGAKDCVEAAKKRIQEIIEDLEAQVTLECAIPQKFHRSVMGPKGSRIQQITRDFSVQIKFPDREENAVHSTEPVVQENGDEAGEGREAKDCDPGSPRRCDIIIISGRKEKCEAAKEALEALVPVTIEVEVPFDLHRYVIGQKGSGIRKMMDEFEVNIHVPAPELQSDIIAITGLAANLDRAKAGLLERVKELQAEQEDRALRSFKLSVTVDPKYHPKIIGRKGAVITQIRLEHDVNILNLEEEYLADVVDSEALQVYMKPPAHEEAKAPSRGFVVRDAPWTASSSEKAPDMSSSEEFPSFGAQVAPKTLPWGPKR

SEQ ID NO: 1390 - protein, 214 aa, Homo sapiens
MAFQQLSGVNAVMFYAETIFEEAKFKDSSLASVVVGVIQVLFTAVAALIMDRAGRRLLLVLSGVVMVFSTSAFGAYFKLTQGGPGNSSHVAISAPVSAQPVDASVGLAWLAVGSMCLFIAGFAVGWGPIPWLLMSEIFPLHVKGVATGICVLTNWLMAFLVTKEFSSLMEVLRPYGAFWLASAFCIFSVLFTLFCVPETKGKTLEQITAHFEGR

SEQ ID NO: 1391 - protein, 477 aa, Homo sapiens
MTPEDPEETQPLLGPPGGSAPRGRRVFLAAFAAALGPLSFGFALGYSSPAIPSLQRAAPPAPRLDDAAASWFGAVVTLGAAAGGVLGGWLVDRAGRKLSLLLCSVPFVAGFAVITAAQDVWMLLGGRLLTGLACGVASLVAPVYISEIAYPAVRGLLGSCVQLMVVVGILLAYLAGWVLEWRWLAVLGCVPPSLMLLLMCFMPETPRFLLTQHRRQEAMAALRFLWGSEQGWEDPPIGAEQSFHLALLRQPGIYKPFIIGVSLMAFQQLSGVNAVMFYAETIFEEAKFKDSSLASVVVGVIQVLFTAVAALIMDRAGRRLLLVLSGVVMVFSTSAFGAYFKLTQGGPGNSSHVAISAPVSAQPVDASVGLAWLAVGSMCLFIAGFAVGWGPIPWLLMSEIFPLHVKGVATGICVLTNWLMAFLVTKEFSSLMEVLRPYGAFWLASAFCIFSVLFTLFCVPETKGKTLEQITAHFEGR

SEQ ID NO: 1392 - protein, 408 aa, Homo sapiens
MPVISSRQDCDSATSTVTDILCAAEVKSSKGTEDRGRILGDSNLQVSKLLSQFPLKSTETSKVPDNKNVLDKTRVTKDFLQDNLFSGPGPKEPTGLSPFLLLPPRPPPARPDKLPELPAQKRQLPVFAKICSKPKADPAVERHHLMEWSPGTKEPKKGQGSLFLSQWPQSQKDACGEEGCCDAVGTASLTLPPKKPTCPAEKNLLYEFLGATKNPSGQPRLRNKVEVDGPELKFNAPVTVADKNNPKYTGNVFTPHFPTAMTSATLNQPLWLNLNYPPPPVFTNHSTFLQYQGLYPQQAARMPYQQALHPQLGCYSQQVMPYNPQQMGQQIFRSSYTPLLSYIPFVQPNYPYPQRTPPKMSANPRDPPLMAGDGPQYLFPQGYGFGSTSGGPLMHSPYFSSSGNGINF

SEQ ID NO: 1393 - protein, 534 aa, Homo sapiens
MATGLQVPLPQLATGLLLLLSVQPWAESGKVLVVPTDGSHWLSMREALRDLHARGHQVVVLTLEVNMYIKEENFFTLTTYAISWTQDEFDRLLLGHTQSFFETEHLLMKFSRRMAIMNNMSLIIHRSCVELLHNEALIRHLHATSFDVVLTDPFHLCAAVLAKYLSIPAVFFLRNIPCDLDFKGTQCPNPSSYIPRLLTTNSDHMTFLQRVKNMLYPLALSYLCHAVSAPYASLASELFQREVSVVDLVSHASVWLFRGDFVMDYPRPIMPNMVFIGGINCANGKPLSQEFEAYINASGEHGIVVFSLGSMVSEIPEKKAMAIADALGKIPQTVLWRYTGTRPSNLANNTILVKWLPQNDLLGHPMTRAFITHAGSHGVYESICNGVPMVMMPLFGDQMDNAKRMETKGAGVTLNVLEMTSEDLENALKAVINDKSYKENIMRLSSLHKDRPVEPLDLAVFWVEFVMRHKGAPHLRPAAHDLTWYQYHSLDVIGFLLAVVLTVAFITFKCCAYGYRKCLGKKGRVKKAHKSKTH

SEQ ID NO: 1394 - protein, 530 aa, Homo sapiens
MARAGWTGLLPLYVCLLLTCGFAKAGKLLVVPMDGSHWFTMQSVVEKLILRGHEVVVVMPEVSWQLGRSLNCTVKTYSTSYTLEDQDREFMVFADARWTAPLRSAFSLLTSSSNGIFDLFFSNCRSLFNDRKLVEYLKESCFDAVFLDPFDACGLIVAKYFSLPSVVFARGIFCHYLEEGAQCPAPLSYVPRLLLGFSDAMTFKERVWNHIMHLEEHLFCPYFFKNVLEIASEILQTPVTAYDLYSHTSIWLLRTDFVLEYPKPVMPNMIFIGGINCHQGKPVPMEFEAYINASGEHGIVVFSLGSMVSEIPEKKAMAIADALGKIPQTVLWRYTGTRPSNLANNTILVKWLPQNDLLGHPMTRAFITHAGSHGVYESICNGVPMVMMPLFGDQMDNAKRMETKGAGVTLNVLEMTSEDLENALKAVINDKSYKENIMRLSSLHKDRPVEPLDLAVFWVEFVMRHKGAPHLRPAAHDLTWYQYHSLDVIGFLLAVVLTVAFITFKCCAYGYRKCLGKKGRVKKAHKSKTH

SEQ ID NO: 1395 - protein, 428 aa, Homo sapiens
MSSGLRAADFPRWKRHISEQLRRRDRLQRQAFEEIILQYNKLLEKSDLHSVLAQKLQAEKHDVPNRHEIRRRQARLQKELAEAAKEPLPVEQDDDIEVIVDETSDHTEETSPVRAISRAATKRLSQPAGGLLDSITNIFGRRSVSSFPVPQDNVDTHPGSGKEVRVPATALCVFDAHDGEVNAVQFSPGITSIEFDSAGSYLLAASNDFASRIWTVDDYRLRHTLTGHSGKVLSAKFLLDNARIVSGSHDRTLKLWDLRSKVCIKTVFAGSSCNDIVCTEQCVMSGHFDKKIRFWDIRSESIVREMELLGKITALDLNPERTELLSCSRDDLLKVIDLRTNAIKQTFSAPGFKCGSDWTRVVFSPDGSYVAAGSAEGSLYIWSVLTGKVEKVLSKQHSSSINAVAWSPSGSHVVSVDKGCKAVLWAQY

SEQ ID NO: 1396 - protein, 652 aa, Homo sapiens
MAAAALPPRPLLLLPLVLLLSGRPTRADSKVFGDLDQVRMTSEGSDCRCKCIMRPLSKDACSRVRSGRARVEDFYTVETVSSGTDCRCSCTAPPSSLNPCENEWKMEKLKKQAPELLKLQSMVDLLEGTLYSMDLMKVHAYVHKVASQMNTLEESIKANLSRENEVVKDSVRHLSEQLRHYENHSAIMLGIKKELSRLGLQLLQKDAAAAPATPATGTGSKAQDTARGKGKDISKYGSVQKSFADRGLPKPPKEKLLQVEKLRKESGKGSFLQPTAKPRALAQQQAVIRGFTYYKAGKQEVTEAVADNTLQGTSWLEQLPPKVEGRSNSAEPNSAEQDEAEPRSSERVDLASGTPTSIPATTTTATTTPTPTTSLLPTEPPSGPEVSSQGREASCEGTLRAVDPPVRHHSYGRHEGAWMKDPAARDDRIYVTNYYYGNSLVEFRNLENFKQGRWSNMYKLPYNWIGTGHVVYQGAFYYNRAFTKNIIKYDLRQRFVASWALLPDVVYEDTTPWKWRGHSDIDFAVDESGLWVIYPAVDDRDEAQPEVIVLSRLDPGDLSVHRETTWKTRLRRNSYGNCFLVCGILYAVDTYNQQEGQVAYAFDTHTGTDARPQLPFLNEHAYTTQIDYNPKERVLYAWDNGHQLTYTLHFVV

SEQ ID NO: 1397 - protein, 1285 aa, Homo sapiens
MALARPGTPDPQALASVLLLLLWAPALSLLAGTVPSEPPSACASDPCAPGTECQATESGGYTCGPMEPRGCATQPCHHGALCVPQGPDPTGFRCYCVPGFQGPRCELDIDECASRPCHHGATCRNLADRYECHCPLGYAGVTCEMEVDECASAPCLHGGSCLDGVGSFRCVCAPGYGGTRCQLDLDECQSQPCAHGGTCHDLVNGFRCDCAGTGYEGTHCEREVLECASAPCEHNASCLEGLGSFRCLCWPGYSGELCEVDEDECASSPCQHGGRCLQRSDPALYGGVQAAFPGAFSFRHAAGFLCHCPPGFEGADCGVEVDECASRPCLNGGHCQDLPNGFQCHCPDGYAGPTCEEDVDECLSDPCLHGGTCSDTVAGYICRCPETWGGRDCSVQLTGCQGHTCPLAATCIPIFESGVHSYVCHCPPGTHGPFCGQNTTFSVMAGSPIQASVPAGGPLGLALRFRTTLPAGTLATRNDTKESLELALVAATLQATLWSYSTTVLVLRLPDLALNDGHWHQVEVVLHLATLELRLWHEGCPARLCVASGPVALASTASATPLPAGISSAQLGDATFAGCLQDVRVDGHLLLPEDLGENVLLGCERREQCRPLPCVHGGSCVDLWTHFRCDCARPHRGPTCADEIPAATFGLGGAPSSASFLLQELPGPNLTVSFLLRTRESAGLLLQFANDSAAGLTVFLSEGRIRAEVPGSPAVVLPGRWDDGLRHLVMLSFGPDQLQDLGQHVHVGGRLLAADSQPWGGPFRGCLQDLRLDGCHLPFFPLPLDNSSQPSELGGRQSWNLTAGCVSEDMCSPDPCFNGGTCLVTWNDFHCTCPANFTGPTCAQQLWCPGQPCLPPATCEEVPDGFVCVAEATFREGPPAAFSGHNASSGRLLGGLSLAFRTRDSEAWLLRAAAGALEGVWLAVRNGSLAGGVRGGHGLPGAVLPIPGPRVADGAWHRVRLAMERPAATTSRWLLWLDGAATPVALRGLASDLGFLQGPGAVRILLAENFTGCLGRVALGGLPLPLARPRPGAAPGAREHFASWPGTPAPILGCRGAPVCAPSPCLHDGACRDLFDAFACACGPGWEGPRCEAHVDPCHSAPCARGRCHTHPDGRFECRCPPGFGGPRCRLPVPSKECSLNVTCLDGSPCEGGSPAANCSCLEGLAGQRCQVPTLPCEANPCLNGGTCRAAGGVSECICNARFSGQFCEVAKGLPLPLPFPLLEVAVPAACACLLLLLLGLLSGILAARKRRQSEGTYSPSQQEVAGARLEMDSVLKVPPEERLI

SEQ ID NO: 1398 - protein, 966 aa, Homo sapiens
MWVSWAPGLWLLGLWATFGHGANTGAQCPPSQQEGLKLEHSSSLPANVTGFNLIHRLSLMKTSAIKKIRNPKGPLILRLGAAPVTQPTRRVFPRGLPEEFALVLTLLLKKHTHQKTWYLFQVTDANGYPQISLEVNSQERSLELRAQGQDGDFVSCIFPVPQLFDLRWHKLMLSVAGRVASVHVDCSSASSQPLGPRRPMRPVGHVFLGLDAEQGKPVSFDLQQVHIYCDPELVLEEGCCEILPAGCPPETSKARRDTQSNELIEINPQSEGKVYTRCFCLEEPQNSEVDAQLTGRISQKAERGAKVHQETAADECPPCVHGARDSNVTLAPSGPKGGKGERGLPGPPGSKGEKGARGNDCVRISPDAPLQCAEGPKGEKGESGALGPSGLPGSTGEKGQKGEKGDGGIKGVPGKPGRDGRPGEICVIGPKGQKGDPGFVGPEGLAGEPGPPGLPGPPGIGLPGTPGDPGGPPGPKGDKGSSGIPGKEGPGGKPGKPGVKGEKGDPCEVCPTLPEGFQNFVGLPGKPGPKGEPGDPVPARGDPGIQGIKGEKGEPCLSCSSVVGAQHLVSSTGASGDVGSPGFGLPGLPGRAGVPGLKGEKGNFGEAGPAGSPGPPGPVGPAGIKGAKGEPCEPCPALSNLQDGDVRVVALPGPSGEKGEPGPPGFGLPGKQGKAGERGLKGQKGDAGNPGDPGTPGTTGRPGLSGEPGVQGPAGPKGEKGDGCTACPSLQGTVTDMAGRPGQPGPKGEQGPEGVGRPGKPGQPGLPGVQGPPGLKGVQGEPGPPGRGVQGPQGEPGAPGLPGIQGLPGPRGPPGPTGEKGAQGSPGVKGATGPVGPPGASVSGPPGRDGQQGQTGLRGTPGEKGPRGEKGEPGECSCPSQGDLIFSGMPGPPGIPGPPGPPGVPGLQVKGEKRMRSLGGRAHGSGWLLPAGPQGCCSPTPKTQTCHFSLLCLPASQGGKEGPLSL

SEQ ID NO: 1399 - protein, 1604 aa, Homo sapiens
MWVSWAPGLWLLGLWATFGHGANTGAQCPPSQQEGLKLEHSSSLPANVTGFNLIHRLSLMKTSAIKKIRNPKGPLILRLGAAPVTQPTRRVFPRGLPEEFALVLTLLLKKHTHQKTWYLFQVTDANGYPQISLEVNSQERSLELRAQGQDGDFVSCIFPVPQLFDLRWHKLMLSVAGRVASVHVDCSSASSQPLGPRRPMRPVGHVFLGLDAEQGKPVSFDLQQVHIYCDPELVLEEGCCEILPAGCPPETSKARRDTQSNELIEINPQSEGKVYTRCFCLEEPQNSEVDAQLTGRISQKAERGAKVHQETAADECPPCVHGARDSNVTLAPSGPKGGKGERGLPGPPGSKGEKGARGNDCVRISPDAPLQCAEGPKGEKGESGALGPSGLPGSTGEKGQKGEKGDGGIKGVPGKPGRDGRPGEICVIGPKGQKGDPGFVGPEGLAGEPGPPGLPGPPGIGLPGTPGDPGGPPGPKGDKGSSGIPGKEGPGGKPGKPGVKGEKGDPCEVCPTLPEGFQNFVGLPGKPGPKGEPGDPVPARGDPGIQGIKGEKGEPCLSCSSVVGAQHLVSSTGASGDVGSPGFGLPGLPGRAGVPGLKGEKGNFGEAGPAGSPGPPGPVGPAGIKGAKGEPCEPCPALSNLQDGDVRVVALPGPSGEKGEPGPPGFGLPGKQGKAGERGLKGQKGDAGNPGDPGTPGTTGRPGLSGEPGVQGPAGPKGEKGDGCTACPSLQGTVTDMAGRPGQPGPKGEQGPEGVGRPGKPGQPGLPGVQGPPGLKGVQGEPGPPGRGVQGPQGEPGAPGLPGIQGLPGPRGPPGPTGEKGAQGSPGVKGATGPVGPPGASVSGPPGRDGQQGQTGLRGTPGEKGPRGEKGEPGECSCPSQGDLIFSGMPGAPGLWMGSSWQPGPQGPPGIPGPPGPPGVPGLQGVPGNNGLPGQPGLTAELGSLPIEQHLLKSICGDCVQGQRAHPGYLVEKGEKGDQGIPGVPGLDNCAQCFLSLERPRAEEARGDNSEGDPGCVGSPGLPGPPGLPGQRGEEGPPGMRGSPGPPGPIGPPGFPGAVGSPGLPGLQGERGLTGLTGDKGEPGPPGQPGYPGATGPPGLPGIKGERGYTGSAGEKGEPGPPGSEGLPGPPGPAGPRGERGPQGNSGEKGDQGFQGQPGFPGPPGPPGFPGKVGSPGPPGPQAEKGSEGIRGPSGLPGSPGPPGPPGIQGPAGLDGLDGKDGKPGLRGDPGPAGPPGLMGPPGFKGKTGHPGLPGPKGDCGKPGPPGSTGRPGAEGEPGAMGPQGRPGPPGHVGPPGPPGQPGPAGISAVGLKGDRGATGERGLAGLPGQPGPPGHPGPPGEPGTDGAAGKEGPPGKQGFYGPPGPKGDPGAAGQKGQAGEKGRAGMPGGPGKSGSMGPVGPPGPAGERGHPGAPGPSGSPGLPGVPGSMGDMVNYDEIKRFIRQEIIKMFDERMAYYTSRMQFPMEMAAAPGRPGPPGKDGAPGRPGAPGSPGLPGQIGREGRQGLPGVRGLPGTKGEKGDIGIGIAGENGLPGPPGPQGPPGYGKMGATGPMGQQGIPGIPGPPGPMGQPGKAGHCNPSDCFGAMPMEQQYPPMKTMKGPFG

SEQ ID NO: 1400 - protein, 166 aa, Homo sapiens
MAAIPPDSWQPPNVYLETSMGIIVLELYWKHAPKTCKNFAELARRGYYNGTKFHRIIKDFMIQGGDPTGTGRGGASIYGKQFEDELHPDLKFTGAGILAMANAGPDTNGSQFFVTLAPTQWLDGKHTIFGRVCQGIGMVNRVGMVETNSQDRPVDDVKIIKAYPSG

SEQ ID NO: 1401 - protein, 425 aa, Homo sapiens
MEPSATPGAQMGVPPGSREPSPVPPDYEDEFLRYLWRDYLYPKQYEWVLIAAYVAVFVVALVGNTLVCLAVWRNHHMRTVTNYFIVNLSLADVLVTAICLPASLLVDITESWLFGHALCKVIPYLQAVSVSVAVLTLSFIALDRWYAICHPLLFKSTARRARGSILGIWAVSLAIMVPQAAVMECSSVLPELANRTRLFSVCDERWADDLYPKIYHSCFFIVTYLAPLGLMAMAYFQIFRKLWGRQIPGTTSALVRNWKRPSDQLGDLEQGLSGEPQPRARAFLAEVKQMRARRKTAKMLMVVLLVFALCYLPISVLNVLKRVFGMFRQASDREAVYACFTFSHWLVYANSAANPIIYNFLSGKFREQFKAAFSCCLPGLGPCGSLKAPSPRSSASHKSLSLQSRCSISKISEHVVLTSVTTVLP

SEQ ID NO: 1402 - protein, 270 aa, Homo sapiens
MPRDNMASLIQRIARQACLTFRGSGGGRGASDRDAASGPEAPMQPGFPENLSKLKSLLTQLRAEDLNIAPRKATLQPLPPNLPPVTYMHIYETDGFSLGVFLLKSGTSIPLHDHPGMHGMLKVLYGTVRISCMDKLDAGGGQRPRALPPEQQFEPPLQPREREAVRPGVLRSRAEYTEASGPCILTPHRDNLHQIDAVEGPAAFLDILAPPYDPDDGRDCHYYRVLEPVRPKEASSSACDLPREVWLLETPQADDFWCEGEPYPGPKVFP

SEQ ID NO: 1403 - protein, 609 aa, Homo sapiens
MEGPSLRGPALRLAGLPTQQDCNIQEKIDLEIRMREGIWKLLSLSTQKDQVLHAVKNLMVCNARLMAYTSELQKLEEQIANQTGRCDVKFESKERTACKGKIAISDIRIPLMWKDSDHFSNKERSRRYAIFCLFKMGANVFDTDVVNVDKTITDICFENVTIFNEAGPDFQIKVEVYSCCTEESSITNTPKKLAKKLKTSISKATGKKISSVLQEEDDEMCLLLSSAVFGVKYNLLAHTTLTLESAEDSFKTHNLSINGNEESSFWLPLYGNMCCRLVAQPACMAEDAFAGFLNQQQMVEGLISWRRLYCVLRGGKLYCFYSPEEIEAKVEPALVVPINKETRIRAMDKDAKKRIHNFSVINPVPGQAITQIFAVDNREDLQKWMEAFWQHFFDLSQWKHCCEELMKIEIMSPRKPPLFLTKEATSVYHDMSIDSPMKLESLTDIIQKKIEETNGQFLIGQHEESLPPPWATLFDGNHQMVIQKKVLYPASEPLHDEKGKKRQAPLPPSDKLPFSLKSQSNTDQLVKDNWGKTSVSQTSSLDTKLSTLMHHLQKPMAAPRKLLPARRNRLSDGEHTDTKTNFEAKPVPAPRQKSIKDILDPRSWLQAQV

SEQ ID NO: 1404 - protein, 974 aa, Homo sapiens
MAAQGEPGYLAAQSDPGSNSERSTDSPVPGSEDDLVAGATLHSPEWSEERFRVDRKKLEAMLQAAAEGKGRSGEDFFQKIMEETNTQIAWPSKLKIGAKSKKDPHIKVSGKKEDVKEAKEMIMSVLDTKSNRVTLKMDVSHTEHSHVIGKGGNNIKKVMEETGCHIHFPDSNRNNQAEKSNQVSIAGQPAGVESARVRIRELLPLVLMFELPIAGILQPVPDPNSPSIQHISQTYNISVSFKQRSRMYGATVIVRGSQNNTSAVKEGTAMLLEHLAGSLASAIPVSTQLDIAAQHHLFMMGRNGSNIKHIMQRTGAQIHFPDPSNPQKKSTVYLQGTIESVCLARQYLMGCLPLVLMFDMKEEIEVDPQFIAQLMEQLDVFISIKPKPKQPSKSVIVKSVERNALNMYEARKCLLGLESSGVTIATSPSPASCPAGLACPSLDILASAGLGLTGLGLLGPTTLSLNTSTTPNSLLNALNSSVSPLQSPSSGTPSPTLWAPPLANTSSATGFSAIPHLMIPSTAQATLTNILLSGVPTYGHTAPSPPPGLTPVDVHINSMQTEGKKISAALNGHAQSPDIKYGAISTSSLGEKVLSANHGDPSIQTSGSEQTSPKSSPTEGCNDAFVEVGMPRSPSHSGNAGDLKQMMCPSKVSCAKRQTVELLQGTKNSHLHSTDRLLSDPELSATESPLADKKAPGSERAAERAAAAQQNSERAHLAPRSSYVNMQAFDYEQKKLLATKAMLKKPVVTEVRTPTNTWSGLGFSKSMPAETIKELRRANHVSYKPTMTTTYEGSSMSLSRSNSREHLGGGSESDNWRDRNGIGPGSHSEFAASIGSPKRKQNKSTEHYLSSSNYMDCISSLTGSNGCNLNSSFKGSDLPELFSKLGLGKYTDVFQQQEIDLQTFLTLTDQDLKELGITTFGARRKMLLAISELNKNRRKLFESPNARTSFLEGGASGRLPRQYHSDIASVSGRW

SEQ ID NO: 1405 - protein, 373 aa, Homo sapiens
MRLLAWLIFLANWGGARAEPGKFWHIADLHLDPDYKVSKDPFQVCPSAGSQPVPDAGPWGDYLCDSPWALINSSIYAMKEIEPEPDFILWTGDDTPHVPDEKLGEAAVLEIVERLTKLIREVFPDTKVYAALGNHDFHPKNQFPAGSNNIYNQIAELWKPWLSNESIALFKKGAFYCEKLPGPSGAGRIVVLNTNLYYTSNALTADMADPGQQFQWLEDVLTDASKAGDMVYIVGHVPPGFFEKTQNKAWFREGFNEKYLKVVRKHHRVIAGQFFGHHHTDSFRMLYDDAGVPISAMFITPGVTPWKTTLPGVVNGANNPAIRVFEYDRATLSLKVRSPAEARGGGWEGLKCITTFPHSQLIHLPLTTEPQEG

SEQ ID NO: 1406 - protein, 455 aa, Homo sapiens
MRLLAWLIFLANWGGARAEPGKFWHIADLHLDPDYKVSKDPFQVCPSAGSQPVPDAGPWGDYLCDSPWALINSSIYAMKEIEPEPDFILWTGDDTPHVPDEKLGEAAVLEIVERLTKLIREVFPDTKVYAALGNHDFHPKNQFPAGSNNIYNQIAELWKPWLSNESIALFKKGAFYCEKLPGPSGAGRIVVLNTNLYYTSNALTADMADPGQQFQWLEDVLTDASKAGDMVYIVGHVPPGFFEKTQNKAWFREGFNEKYLKVVRKHHRVIAGQFFGHHHTDSFRMLYDDAGVPISAMFITPGVTPWKTTLPGVVNGANNPAIRVFEYDRATLSLKDMVTYFMNLSQANAQGTPRWELEYQLTEAYGVPDASAHSMHTVLDRIAGDQSTLQRYYVYNSVSYSAGVCDEACSMQHVCAMRQVDIDAYTTCLYASGTTPVPQLPLLLMALLGLCTLVL

SEQ ID NO: 1407 - protein, 570 aa, Homo sapiens
MESLGLHTVTLSDGTTAYVQQAVKGEKLLEGQVIQLEDGTTAYIHQVTVQKEALSFEDGQPVQLEDGSMAYIHRTPREGYDPSTLEAVQLEDGSTAYIHHPVAVPSESTILAVQTEVGLEDLAAEDDEGFSADAVVALEQYASKVLHDSQIPRNGKGQQVGDRAFRCGYKGCGRLYTTAHHLKVHERAHTGDRPYRCDFPSCGKAFATGYGLKSHVRTHTGEKPYKCPEELCSKAFKTSGDLQKHVRTHTGERPFQCPFEGCGRSFTTSNIRKVHVRTHTGERPYTCPEPHCGRGFTSATNYKNHVRIHTGEKPYVCTVPGCGKRFTEYSSLYKHHVVHTHCKPYTCSTCGKTYRQTSTLAMHKRSAHGELEATEESEQALYEQQQLEAASAAEESPPPKRPRIAYLSEVKEERDDIPAQVAMVTEEDGAPQVALITQDGAQQVSLSPEDLQALGSAISMVTQHGSTTLTIPSPDADLATSGTHTVTMVSADGTQTQPVTIITSGAVVAEDSSVASLRHQQVALLATANGTHIAVQLEEQQTLEEAINVATAAMQQGAVTLETTVSESGC

SEQ ID NO: 1408 - protein, 961 aa, Homo sapiens
MFRQFYLWTCLASGIILGSLFEICLGQYDDDCKLARGGPPATIVAIDEESRNGTILVDNMLIKGTAGGPDPTIELSLKDNVDYWVLMDPVKQMLFLNSTGRVLDRDPPMNIHSIVVQVQCINKKVGTIIYHEVRIVVRDRNDNSPTFKHESYYATVNELTPVGTTIFTGFSGDNGATDIDDGPNGQIEYVIQYNPDDPTSNDTFEIPLMLTGNIVLRKRLNYEDKTRYFVIIQANDRAQNLNERRTTTTTLTVDVLDGDDLGPMFLPCVLVPNTRDCRPLTYQAAIPELRTPEELNPIIVTPPIQAIDQDRNIQPPSDRPGILYSILVGTPEDYPRFFHMHPRTAELSLLEPVNRDFHQKFDLVIKAEQDNGHPLPAFAGLHIEILDENNQSPYFTMPSYQGYILESAPVGATISDSLNLTSPLRIVALDKDIEDTKDPELHLFLNDYTSVFTVTQTGITRYLTLLQPVDREEQQTYTFSITAFDGVQESEPVIVNIQVMDANDNTPTFPEISYDVYVYTDMRPGDSVIQLTAVDADEGSNGEITYEILVGAQGDFIINKTTGLITIAPGVEMIVGRTYALTVQAADNAPPAERRNSICTVYIEVLPPNNQSPPRFPQLMYSLEISEAMRVGAVLLNLQATDREGDSITYAIENGDPQRVFNLSETTGILTLGKALDRESTDRYILIITASDGRPDGTSTATVNIVVTDVNDNAPVFDPYLPRNLSVVEEEANAFVGQVKATDPDAGINGQVHYSLGNFNNLFRITSNGSIYTAVKLNREVRDYYELVVVATDGAVHPRHSTLTLAIKVLDIDDNSPVFTNSTYTVLVEENLPAGTTILQIEAKDVDLGANVSYRIRSPEVKHFFALHPFTGELSLLRSLDYEAFPDQEASITFLVEAFDIYGTMPPGIATVTVIVKDMNDYPPVFSKRIYKGMVAPDAVKGTPITTVYAEDADPPVSRRH

SEQ ID NO: 1409 - protein, 654 aa, Homo sapiens
MFRQFYLWTCLASGIILGSLFEICLGQYDDDCKLARGGPPATIVAIDEESRNGTILVDNMLIKGTAGGPDPTIELSLKDNVDYWVLMDPVKQMLFLNSTGRVLDRDPPMNIHSIVVQVQCINKKVGTIIYHEVRIVVRDRNDNSPTFKHESYYATVNELTPVGTTIFTGFSGDNGATDIDDGPNGQIEYVIQYNPDDPTSNDTFEIPLMLTGNIVLRKRLNYEDKTRYFVIIQANDRAQNLNERRTTTTTLTVDVLDGDDLGPMFLPCVLVPNTRDCRPLTYQAAIPELRTPEELNPIIVTPPIQAIDQDRNIQPPSDRPGILYSILVGTPEDYPRFFHMHPRTAELSLLEPVNRDFHQKFDLVIKAEQDNGHPLPAFAGLHIEILDENNQSPYFTMPSYQGYILESAPVGATISDSLNLTSPLRIVALDKDIEDTKDPELHLFLNDYTSVFTVTQTGITRYLTLLQPVDREEQQTYTFSITAFDGVQESEPVIVNIQVMDANDNTPTFPEISYDVYVYTDMRPGDSVIQLTAVDADEGSNGEITYEILVGAQGDFIINKTTGLITIAPGVEMIVGRTYALTVQAADNAPPAERRNSICTVYIEVLPPNNQSPPRFPQLMYSLEISEAMRVGAVLLNLQHGDSNLRESTGQGKH

SEQ ID NO: 1410 - protein, 1962 aa, Homo sapiens
MFRQFYLWTCLASGIILGSLFEICLGQYDDDWQYEDCKLARGGPPATIVAIDEESRNGTILVDNMLIKGTAGGPDPTIELSLKDNVDYWVLMDPVKQMLFLNSTGRVLDRDPPMNIHSIVVQVQCINKKVGTIIYHEVRIVVRDRNDNSPTFKHESYYATVNELTPVGTTIFTGFSGDNGATDIDDGPNGQIEYVIQYNPDDPTSNDTFEIPLMLTGNIVLRKRLNYEDKTRYFVIIQANDRAQNLNERRTTTTTLTVDVLDGDDLGPMFLPCVLVPNTRDCRPLTYQAAIPELRTPEELNPIIVTPPIQAIDQDRNIQPPSDRPGILYSILVGTPEDYPRFFHMHPRTAELSLLEPVNRDFHQKFDLVIKAEQDNGHPLPAFAGLHIEILDENNQSPYFTMPSYQGYILESAPVGATISDSLNLTSPLRIVALDKDIEDTKDPELHLFLNDYTSVFTVTQTGITRYLTLLQPVDREEQQTYTFSITAFDGVQESEPVIVNIQVMDANDNTPTFPEISYDVYVYTDMRPGDSVIQLTAVDADEGSNGEITYEILVGAQGDFIINKTTGLITIAPGVEMIVGRTYALTVQAADNAPPAERRNSICTVYIEVLPPNNQSPPRFPQLMYSLEISEAMRVGAVLLNLQATDREGDSITYAIENGDPQRVFNLSETTGILTLGKALDRESTDRYILIITASDGRPDGTSTATVNIVVTDVNDNAPVFDPYLPRNLSVVEEEANAFVGQVKATDPDAGINGQVHYSLGNFNNLFRITSNGSIYTAVKLNREVRDYYELVVVATDGAVHPRHSTLTLAIKVLDIDDNSPVFTNSTYTVLVEENLPAGTTILQIEAKDVDLGANVSYRIRSPEVKHFFALHPFTGELSLLRSLDYEAFPDQEASITFLVEAFDIYGTMPPGIATVTVIVKDMNDYPPVFSKRIYKGMVAPDAVKGTPITTVYAEDADPPGLPASRVRYRVDDVQFPYPASIFEVEEDSGRVITRVNLNEEPTTIFKLVVVAFDDGEPVMSSSATVKILVLHPGEIPRFTQEEYRPPPVSELATKGTMVGVISAAAINQSIVYSIVSGNEEDTFGINNITGVIYVNGPLDYETRTSYVLRVQADSLEVVLANLRVPSKSNTAKVYIEIQDENNHPPVFQKKFYIGGVSEDARMFTSVLRVKATDKDTGNYSVMAYRLIIPPIKEGKEGFVVETYTGLIKTAMLFHNMRRSYFKFQVIATDDYGKGLSGKADVLVSVVNQLDMQVIVSNVPPTLVEKKIEDLTEILDRYVQEQIPGAKVVVESIGARRHGDAFSLEDYTKCDLTVYAIDPQTNRAIDRNELFKFLDGKLLDINKDFQPYYGEGGRILEIRTPEAVTSIKKRGESLGYTEGALLALAFIIILCCIPAILVVLVSYRQFKVRQAECTKTARIQAALPAAKPAVPAPAPVAAPPPPPPPPPGAHLYEELGDSSMHNLFLLYHFQQSRGNNSVSEDRKHQQVVMPFSSNTIEAHKSAHVDGSLKSNKLKSARKFTFLSDEDDLSAHNPLYKENISQVSTNSDISQRTDFVDPFSPKIQAKSKSLRGPREKIQRLWSQSVSLPRRLMRKVPNRPEIIDLQQWQGTRQKAENENTGICTNKRGSSNPLLTTEEANLTEKEEIRQGETLMIEGTEQLKSLSSDSSFCFPRPHFSFSTLPTVSRTVELKSEPNVISSPAECSLELSPSRPCVLHSSLSRRETPICMLPIETERNIFENFAHPPNISPSACPLPPPPPISPPSPPPAPAPLAPPPDISPFSLFCPPPSPPSIPLPLPPPTFFPLSVSTSGPPTPPLLPPFPTPLPPPPPSIPCPPPPSASFLSTECVCITGVKCTTNLMPAEKIKSSMTQLSTTTVCKTDPQREPKGILRHVKNLAELEKSVANMYSQIEKNYLRTNVSELQTMCPSEVTNMEITSEQNKGSLNNIVEGTEKQSHSQSTSL

SEQ ID NO: 1411 - protein, 1677 aa, Homo sapiens
MFRQFYLWTCLASGIILGSLFEICLGQYDDDCKLARGGPPATIVAIDEESRNGTILVDNMLIKGTAGGPDPTIELSLKDNVDYWVLMDPVKQMLFLNSTGRVLDRDPPMNIHSIVVQVQCINKKVGTIIYHEVRIVVRDRNDNSPTFKHESYYATVNELTPVGTTIFTGFSGDNGATDIDDGPNGQIEYVIQYNPDDPTSNDTFEIPLMLTGNIVLRKRLNYEDKTRYFVIIQANDRAQNLNERRTTTTTLTVDVLDGDDLGPMFLPCVLVPNTRDCRPLTYQAAIPELRTPEELNPIIVTPPIQAIDQDRNIQPPSDRPGILYSILVGTPEDYPRFFHMHPRTAELSLLEPVNRDFHQKFDLVIKAEQDNGHPLPAFAGLHIEILDENNQSPYFTMPSYQGYILESAPVGATISDSLNLTSPLRIVALDKDIEDTKDPELHLFLNDYTSVFTVTQTGITRYLTLLQPVDREEQQTYTFSITAFDGVQESEPVIVNIQVMDANDNTPTFPEISYDVYVYTDMRPGDSVIQLTAVDADEGSNGEITYEILVGAQGDFIINKTTGLITIAPGVEMIVGRTYALTVQAADNAPPAERRNSICTVYIEVLPPNNQSPPRFPQLMYSLEISEAMRVGAVLLNLQATDREGDSITYAIENGDPQRVFNLSETTGILTLGKALDRESTDRYILIITASDGRPDGTSTATVNIVVTDVNDNAPVFDPYLPRNLSVVEEEANAFVGQVKATDPDAGINGQVHYSLGNFNNLFRITSNGSIYTAVKLNREVRDYYELVVVATDGAVHPRHSTLTLAIKVLDIDDNSPVFTNSTYTVLVEENLPAGTTILQIEAKDVDLGANVSYRIRSPEVKHFFALHPFTGELSLLRSLDYEAFPDQEASITFLVEAFDIYGTMPPGIATVTVIVKDMNDYPPVFSKRIYKGMVAPDAVKGTPITTVYAEDADPPGLPASRVRYRVDDVQFPYPASIFEVEEDSGRVITRVNLNEEPTTIFKLVVVAFDDGEPVMSSSATVKILVLHPGEIPRFTQEEYRPPPVSELATKGTMVGVISAAAINQSIVYSIVSGNEEDTFGINNITGVIYVNGPLDYETRTSYVLRVQADSLEVVLANLRVPSKSNTAKVYIEIQDENNHPPVFQKKFYIGGVSEDARMFTSVLRVKATDKDTGNYSVMAYRLIIPPIKEGKEGFVVETYTGLIKTAMLFHNMRRSYFKFQVIATDDYGKGLSGKADVLVSVVNQLDMQVIVSNVPPTLVEKKIEDLTEILDRYVQEQIPGAKVVVESIGARRHGDAFSLEDYTKCDLTVYAIDPQTNRAIDRNELFKFLDGKLLDINKDFQPYYGEGGRILEIRTPEAVTSIKKRGESLGYTEGALLALAFIIILCCIPAILVVLVSYRQFKVRQAECTKTARIQAALPAAKPAVPAPAPVAAPPPPPPPPPGAHLYEELGDSSMHKYEMPQYGSRRRLLPPAGQEEYGEVVGEAEEEYEEEEWARKRMIKLVVDREYETSSTGEDSAPECQRNRLHHPSIHSNINGNIYIAQNGSVVRTRRACLTDNLKVASPVRLGGPFKKLDKLAVTHEENVPLNTLSKGPFSTEKMNARPTLVTFAPCPVGTDNTAVKPLRNRLKSTVEQESMIDSKNIKEALEFHSDHTQSDDEELWMGPWNNLHIPMTKL

SEQ ID NO: 1412 - protein, 839 aa, Homo sapiens
MMSASRLAGTLIPAMAFLSCVRPESWEPCVEVVPNITYQCMELNFYKIPDNLPFSTKNLDLSFNPLRHLGSYSFFSFPELQVLDLSRCEIQTIEDGAYQSLSHLSTLILTGNPIQSLALGAFSGLSSLQKLVAVETNLASLENFPIGHLKTLKELNVAHNLIQSFKLPEYFSNLTNLEHLDLSSNKIQSIYCTDLRVLHQMPLLNLSLDLSLNPMNFIQPGAFKEIRLHKLTLRNNFDSLNVMKTCIQGLAGLEVHRLVLGEFRNEGNLEKFDKSALEGLCNLTIEEFRLAYLDYYLDDIIDLFNCLTNVSSFSLVSVTIERVKDFSYNFGWQHLELVNCKFGQFPTLKLKSLKRLTFTSNKGGNAFSEVDLPSLEFLDLSRNGLSFKGCCSQSDFGTTSLKYLDLSFNGVITMSSNFLGLEQLEHLDFQHSNLKQMSEFSVFLSLRNLIYLDISHTHTRVAFNGIFNGLSSLEVLKMAGNSFQENFLPDIFTELRNLTFLDLSQCQLEQLSPTAFNSLSSLQVLNMSHNNFFSLDTFPYKCLNSLQVLDYSLNHIMTSKKQELQHFPSSLAFLNLTQNDFACTCEHQSFLQWIKDQRQLLVEVERMECATPSDKQGMPVLSLNITCQMNKTIIGVSVLSVLVVSVVAVLVYKFYFHLMLLAGCIKYGRGENIYDAFVIYSSQDEDWVRNELVKNLEEGVPPFQLCLHYRDFIPGVAIAANIIHEGFHKSRKVIVVVSQHFIQSRWCIFEYEIAQTWQFLSSRAGIIFIVLQKVEKTLLRQQVELYRLLSRNTYLEWEDSVLGRHIFWRRLRKALLDGKSWNPEGTVGTGCNWQEATSI

SEQ ID NO: 1413 - protein, 594 aa, Homo sapiens
MESNHKSGDGLSGTQKEAALRALVQRTGYSLVQENGQRKYGGPPPGWDAAPPERGCEIFIGKLPRDLFEDELIPLCEKIGKIYEMRMMMDFNGNNRGYAFVTFSNKVEAKNAIKQLNNYEIRNGRLLGVCASVDNCRLFVGGIPKTKKREEILSEMKKVTEGVVDVIVYPSAADKTKNRGFAFVEYESHRAAAMARRKLLPGRIQLWGHGIAVDWAEPEVEVDEDTMSSVKILYVRNLMLSTSEEMIEKEFNNIKPGAVERVKKIRDYAFVHFSNREDAVEAMKALNGKVLDGSPIEVTLAKPVDKDSYVRYTRGTGGRGTMLQGEYTYSLGQVYDPTTTYLGAPVFYAPQTYAAIPSLHFPATKGHLSNRAIIRAPSVREIYMNVPVGAAGVRGLGGRGYLAYTGLGRGYQVKGDKREDKLYDILPGMELTPMNPVTLKPQGIKLAPQILEEICQKNNWGQPVYQLHSAIGQDQRQLFLYKITIPALASQNPAIHPFTPPKLSAFVDEAKTYAAEYTLQTLGIPTDGGDGTMATAAAAATAFPGYAVPNATAPVSAAQLKQAVTLGQDLAAYTTYEVYPTFAVTARGDGYGTF

SEQ ID NO: 1414 - protein, 594 aa, Homo sapiens
MEAVCLGTCPEPEASMSTAIPGLKKGNNALQSIILQTLLEKENGQRKYGGPPPGWDAAPPERGCEIFIGKLPRDLFEDELIPLCEKIGKIYEMRMMMDFNGNNRGYAFVTFSNKVEAKNAIKQLNNYEIRNGRLLGVCASVDNCRLFVGGIPKTKKREEILSEMKKVTEGVVDVIVYPSAADKTKNRGFAFVEYESHRAAAMARRKLLPGRIQLWGHGIAVDWAEPEVEVDEDTMSSVKILYVRNLMLSTSEEMIEKEFNNIKPGAVERVKKIRDYAFVHFSNREDAVEAMKALNGKVLDGSPIEVTLAKPVDKDSYVRYTRGTGGRGTMLQGEYTYSLGQVYDPTTTYLGAPVFYAPQTYAAIPSLHFPATKGHLSNRAIIRAPSVRGAAGVRGLGGRGYLAYTGLGRGYQVKGDKREDKLYDILPGMELTPMNPVTLKPQGIKLAPQILEEICQKNNWGQPVYQLHSAIGQDQRQLFLYKITIPALASQNPAIHPFTPPKLSAFVDEAKTYAAEYTLQTLGIPTDGGDGTMATAAAAATAFPGYAVPNATAPVSAAQLKQAVTLGQDLAAYTTYEVYPTFAVTARGDGYGTF

SEQ ID NO: 1415 - protein, 173 aa, Homo sapiens
MEAPGPRALRTALCGGCCCLLLCAQLAVAGKGARGFGRGALIRLNIWPAVQGACKQLEVCEHCVEGDGARNLSSCVWEQCRPEEPGHCVAQSEVVKEGCSIYNRSEACPAAHHHPTYEPKTVTTGSPPVPEAHSPGFDGASFIGGVVLVLSLQAVAFFVLHFLKAKDSTYQTL

SEQ ID NO: 1416 - protein, 174 aa, Homo sapiens
MEAPGPRALRTALCGGCCCLLLCAQLAVAGKGARGFGRGALIRLNIWPAVQGACKQLEVCEHCVEGDGARNLSSCVWEQCRPEEPGHCVAQSEVVKEGCSIYNRSEACPAAHHHPTYEPKTVTTGSPPVPEAHSPGFDGASFIGGVVLVLSLQAVAFFVLHFLKAKDSTYQTLI

SEQ ID NO: 1417 - protein, 174 aa, Homo sapiens
MRHFLSKVYSFPMRKLILFLVFPVVRQTPTQHFKNQFPALHWEHELGLAFTKNRMNYTNKFLLIPESGDYFIYSQVTFRGMTSECSEIRQAGRPNKPDSITVVITKVTDSYPEPTQLLMGTKSVCEVGSNWFQPIYLGAMFSLQEGDKLMVNVSDISLVDYTKEDKTFFGAFLL

SEQ ID NO: 1418 - protein, 532 aa, Homo sapiens
MESAEPAGQARAAATKLSEAVGAALQEPRRQRRLVLVIVCVALLLDNMLYMVIVPIVPDYIAHMRGGGEGPTRTPEVWEPTLPLPTPANASAYTANTSASPTAAWPAGSALRPRYPTESEDVKIGVLFASKAILQLLVNPLSGPFIDRMSYDVPLLIGLGVMFASTVLFAFAEDYATLFAARSLQGLGSAFADTSGIAMIADKYPEEPERSRALGVALAFISFGSLVAPPFGGILYEFAGKRVPFLVLAAVSLFDALLLLAVAKPFSAAARARANLPVGTPIHRLMLDPYIAVVAGALTTCNIPLAFLEPTIATWMKHTMAASEWEMGMAWLPAFVPHVLGVYLTVRLAARYPHLQWLYGALGLAVIGASSCIVPACRSFAPLVVSLCGLCFGIALVDTALLPTLAFLVDVRHVSVYGSVYAIADISYSVAYALGPIVAGHIVHSLGFEQLSLGMGLANLLYAPVLLLLRNVGLLTRSRSERDVLLDEPPQGLYDAVRLRERPVSGQDGEPRSPPGPFDACEDDYNYYYTRS

SEQ ID NO: 1419 - protein, 519 aa, Homo sapiens
MFETEADEKREMALEEGKGPGAEDSPPSKEPSPGQELPPGQDLPPNKDSPSGQEPAPSQEPLSSKDSATSEGSPPGPDAPPSKDVPPCQEPPPAQDLSPCQDLPAGQEPLPHQDPLLTKDLPAIQESPTRDLPPCQDLPPSQVSLPAKALTEDTMSSGDLLAATGDPPAAPRPAFVIPEVRLDSTYSQKAGAEQGCSGDEEDAEEAEEVEEGEEGEEDEDEDTSDDNYGERSEAKRSSMIETGQGAEGGLSLRVQNSLRRRTHSEGSLLQEPRGPCFASDTTLHCSDGEGAASTWGMPSPSTLKKELGRNGGSMHHLSLFFTGHRKMSGADTVGDDDEASRKRKSKNLAKDMKNKLGIFRRRNESPGAPPAGKADKMMKSFKPTSEEALKWGESLEKLLVHKYGLAVFQAFLRTEFSEENLEFWLACEDFKKVKSQSKMASKAKKIFAEYIAIQACKEVNLDSYTREHTKDNLQSVTRGCFDLAQKRIFGLMEKDSYPRFLRSDLYLDLINQKKMSPPL

SEQ ID NO: 1420 - protein, 247 aa, Homo sapiens
MLSDGCGSEEKISVPSCYGGIGAPVSRQVPASHDSELMAFMTRKLWDLEQQVKAQTDEILSKDQKIAALEDLVQTLRPHPAEATLQRQEELETMCVQLQRQVREMERFLSDYGLQWVGEPMDQEDSESKTVSEHGERDWMTAKKFWKPGDSLAPPEVDFDRLLASLQDLSELVVEGDTQVTPVPGGARLRTLEPIPLKLYRNGIMMFDGPFQPFYDPSTQRCLRDILDGFFPSELQRLYPNGVPFKV

SEQ ID NO: 1421 - protein, 520 aa, Homo sapiens
MSSPLASLSKTRKVPLPSEPMNPGRRGIRIYGDEDEVDMLSDGCGSEEKISVPSCYGGIGAPVSRQVPASHDSELMAFMTRKLWDLEQQVKAQTDEILSKDQKIAALEDLVQTLRPHPAEATLQRQEELETMCVQLQRQVREMERFLSDYGLQWVGEPMDQEDSESKTVSEHGERDWMTAKKFWKPGDSLAPPEVDFDRLLASLQDLSELVVEGDTQVTPVPGGARLRTLEPIPLKLYRNGIMMFDGPFQPFYDPSTQRCLRDILDGFFPSELQRLYPNGVPFKVSDLRNQVYLEDGLDPFPGEGRVVGRQLMHKALDRVEEHPGSRMTAEKFLNRLPKFVIRQGEVIDIRGPIRDTLQNCCPLPARIQEIVVETPTLAAERERSQESPNTPAPPLSMLRIKSENGEQAFLLMMQPDNTIGDVRALLAQARVMDASAFEIFSTFPPTLYQDDTLTLQAAGLVPKAALLLRARRAPKSSLKFSPGPCPGPGPGPSPGPGPGPSPGPGPGPSPCPGPSPSPQ

SEQ ID NO: 1422 - protein, 868 aa, Homo sapiens
MWPRLAFCCWGLALVSGWATFQQMSPSRNFSFRLFPETAPGAPGSIPAPPAPGDEAAGSRVERLGQAFRRRVRLLRELSERLELVFLVDDSSSVGEVNFRSELMFVRKLLSDFPVVPTATRVAIVTFSSKNYVVPRVDYISTRRARQHKCALLLQEIPAISYRGGGTYTKGAFQQAAQILLHARENSTKVVFLITDGYSNGGDPRPIAASLRDSGVEIFTFGIWQGNIRELNDMASTPKEEHCYLLHSFEEFEALARRALHEDLPSGSFIQDDMVHCSYLCDEGKDCCDRMGSCKCGTHTGHFECICEKGYYGKGLQYECTACPSGTYKPEGSPGGISSCIPCPDENHTSPPGSTSPEDCVCREGYRASGQTCELVHCPALKPPENGYFIQNTCNNHFNAACGVRCHPGFDLVGSSIILCLPNGLWSGSESYCRVRTCPHLRQPKHGHISCSTREMLYKTTCLVACDEGYRLEGSDKLTCQGNSQWDGPEPRCVERHCSTFQMPKDVIISPHNCGKQPAKFGTICYVSCRQGFILSGVKEMLRCTTSGKWNVGVQAAVCKDVEAPQINCPKDIEAKTLEQQDSANVTWQIPTAKDNSGEKVSVHVHPAFTPPYLFPIGDVAIVYTATDLSGNQASCIFHIKVIDAEPPVIDWCRSPPPVQVSEKVHAASWDEPQFSDNSGAELVITRSHTQGDLFPQGETIVQYTATDPSGNNRTCDIHIVIKGSPCEIPFTPVNGDFICTPDNTGVNCTLTCLEGYDFTEGSTDKYYCAYEDGVWKPTYTTEWPDCAKKRFANHGFKSFEMFYKAARCDDTDLMKKFSEAFETTLGKMVPSFCSDAEDIDCRLEENLTKKYCLEYNYDYENGFAIGN

SEQ ID NO: 1423 - protein, 3571 aa, Homo sapiens
MWPRLAFCCWGLALVSGWATFQQMSPSRNFSFRLFPETAPGAPGSIPAPPAPGDEAAGSRVERLGQAFRRRVRLLRELSERLELVFLVDDSSSVGEVNFRSELMFVRKLLSDFPVVPTATRVAIVTFSSKNYVVPRVDYISTRRARQHKCALLLQEIPAISYRGGGTYTKGAFQQAAQILLHARENSTKVVFLITDGYSNGGDPRPIAASLRDSGVEIFTFGIWQGNIRELNDMASTPKEEHCYLLHSFEEFEALARRALHEDLPSGSFIQDDMVHCSYLCDEGKDCCDRMGSCKCGTHTGHFECICEKGYYGKGLQYECTACPSGTYKPEGSPGGISSCIPCPDENHTSPPGSTSPEDCVCREGYRASGQTCELVHCPALKPPENGYFIQNTCNNHFNAACGVRCHPGFDLVGSSIILCLPNGLWSGSESYCRVRTCPHLRQPKHGHISCSTREMLYKTTCLVACDEGYRLEGSDKLTCQGNSQWDGPEPRCVERHCSTFQMPKDVIISPHNCGKQPAKFGTICYVSCRQGFILSGVKEMLRCTTSGKWNVGVQAAVCKDVEAPQINCPKDIEAKTLEQQDSANVTWQIPTAKDNSGEKVSVHVHPAFTPPYLFPIGDVAIVYTATDLSGNQASCIFHIKVIDAEPPVIDWCRSPPPVQVSEKVHAASWDEPQFSDNSGAELVITRSHTQGDLFPQGETIVQYTATDPSGNNRTCDIHIVIKGSPCEIPFTPVNGDFICTPDNTGVNCTLTCLEGYDFTEGSTDKYYCAYEDGVWKPTYTTEWPDCAKKRFANHGFKSFEMFYKAARCDDTDLMKKFSEAFETTLGKMVPSFCSDAEDIDCRLEENLTKKYCLEYNYDYENGFAIGPGGWGAANRLDYSYDDFLDTVQETATSIGNAKSSRIKRSAPLSDYKIKLIFNITASVPLPDERNDTLEWENQQRLLQTLETITNKLKRTLNKDPMYSFQLASEILIADSNSLETKKASPFCRPGSVLRGRMCVNCPLGTYYNLEHFTCESCRIGSYQDEEGQLECKLCPSGMYTEYIHSRNISDCKAQCKQGTYSYSGLETCESCPLGTYQPKFGSRSCLSCPENTSTVKRGAVNISACGVPCPEGKFSRSGLMPCHPCPRDYYQPNAGKAFCLACPFYGTTPFAGSRSITECSSFSSTFSAAEESVVPPASLGHIKKRHEISSQVFHECFFNPCHNSGTCQQLGRGYVCLCPLGYTGLKCETDIDECSPLPCLNNGVCKDLVGEFICECPSGYTGQRCEENINECSSSPCLNKGICVDGVAGYRCTCVKGFVGLHCETEVNECQSNPCLNNAVCEDQVGGFLCKCPPGFLGTRCGKNVDECLSQPCKNGATCKDGANSFRCLCAAGFTGSHCELNINECQSNPCRNQATCVDELNSYSCKCQPGFSGKRCETEQSTGFNLDFEVSGIYGYVMLDGMLPSLHALTCTFWMKSSDDMNYGTPISYAVDNGSDNTLLLTDYNGWVLYVNGREKITNCPSVNDGRWHHIAITWTSANGIWKVYIDGKLSDGGAGLSVGLPIPGGGALVLGQEQDKKGEGFSPAESFVGSISQLNLWDYVLSPQQVKSLATSCPEELSKGNVLAWPDFLSGIVGKVKIDSKSIFCSDCPRLGGSVPHLRTASEDLKPGSKVNLFCDPGFQLVGNPVQYCLNQGQWTQPLPHCERISCGVPPPLENGFHSADDFYAGSTVTYQCNNGYYLLGDSRMFCTDNGSWNGVSPSCLDVDECAVGSDCSEHASCLNVDGSYICSCVPPYTGDGKNCAEPIKCKAPGNPENGHSSGEIYTVGAEVTFSCQEGYQLMGVTKITCLESGEWNHLIPYCKAVSCGKPAIPENGCIEELAFTFGSKVTYRCNKGYTLAGDKESSCLANSSWSHSPPVCEPVKCSSPENINNGKYILSGLTYLSTASYSCDTGYSLQGPSIIECTASGIWDRAPPACHLVFCGEPPAIKDAVITGNNFTFRNTVTYTCKEGYTLAGLDTIECLADGKWSRSDQQCLAVSCDEPPIVDHASPETAHRLFGDIAFYYCSDGYSLADNSQLLCNAQGKWVPPEGQDMPRCIAHFCEKPPSVSYSILESVSKAKFAAGSVVSFKCMEGFVLNTSAKIECMRGGQWNPSPMSIQCIPVRCGEPPSIMNGYASGSNYSFGAMVAYSCNKGFYIKGEKKSTCEATGQWSSPIPTCHPVSCGEPPKVENGFLEHTTGRIFESEVRYQCNPGYKSVGSPVFVCQANRHWHSESPLMCVPLDCGKPPPIQNGFMKGENFEVGSKVQFFCNEGYELVGDSSWTCQKSGKWNKKSNPKCMPAKCPEPPLLENQLVLKELTTEVGVVTFSCKEGHVLQGPSVLKCLPSQQWNDSFPVCKIVLCTPPPLISFGVPIPSSALHFGSTVKYSCVGGFFLRGNSTTLCQPDGTWSSPLPECVPVECPQPEEIPNGIIDVQGLAYLSTALYTCKPGFELVGNTTTLCGENGHWLGGKPTCKAIECLKPKEILNGKFSYTDLHYGQTVTYSCNRGFRLEGPSALTCLETGDWDVDAPSCNAIHCDSPQPIENGFVEGADYSYGAIIIYSCFPGFQVAGHAMQTCEESGWSSSIPTCMPIDCGLPPHIDFGDCTKLKDDQGYFEQEDDMMEVPYVTPHPPYHLGAVAKTWENTKESPATHSSNFLYGTMVSYTCNPGYELLGNPVLICQEDGTWNGSAPSCISIECDLPTAPENGFLRFTETSMGSAVQYSCKPGHILAGSDLRLCLENRKWSGASPRCEAISCKKPNPVMNGSIKGSNYTYLSTLYYECDPGYVLNGTERRTCQDDKNWDEDEPICIPVDCSSPPVSANGQVRGDEYTFQKEIEYTCNEGFLLEGARSRVCLANGSWSGATPDCVPVRCATPPQLANGVTEGLDYGFMKEVTFHCHEGYILHGAPKLTCQSDGNWDAEIPLCKPVNCGPPEDLAHGFPNGFSFIHGGHIQYQCFPGYKLHGNSSRRCLSNGSWSGSSPSCLPCRCSTPVIEYGTVNGTDFDCGKAARIQCFKGFKLLGLSEITCEADGQWSSGFPHCEHTSCGSLPMIPNAFISETSSWKENVITYSCRSGYVIQGSSDLICTEKGVWSQPYPVCEPLSCGSPPSVANAVATGEAHTYESEVKLRCLEGYTMDTDTDTFTCQKDGRWFPERISCSPKKCPLPENITHILVHGDDFSVNRQVSVSCAEGYTFEGVNISVCQLDGTWEPPFSDESCSPVSCGKPESPEHGFVVGSKYTFESTIIYQCEPGYELEGNRERVCQENRQWSGGVAICKETRCETPLEFLNGKADIENRTTGPNVVYSCNRGYSLEGPSEAHCTENGTWSHPVPLCKPNPCPVPFVIPENALLSEKEFYVDQNVSIKCREGFLLQGHGIITCNPDETWTQTSAKCEKISCGPPAHVENAIARGVHYQYGDMITYSCYSGYMLEGFLRSVCLENGTWTSPPICRAVCRFPCQNGGICQRPNACSCPEGWMGRLCEEPICILPCLNGGRCVAPYQCDCPPGWTGSRCHTAVCQSPCLNGGKCVRPNRCHCLSSWTGHNCSRKRRTGF

SEQ ID NO: 1424 - protein, 115 aa, Homo sapiens
MVQIIKDTNEFKTFLTAAGHKLAVVQFSSKRCGPCKRMFPVFHAMSVKYQNVFFANVDVNNSPELAETCHIKTIPTFQMFKKSQKVTLFSRIKRIICCYRSGFMSNLCLADDGNE

SEQ ID NO: 1425 - protein, 127 aa, Homo sapiens
MVQIIKDTNEFKTFLTAAGHKLAVVQFSSKRCGPCKRMFPVFHAMSVKYQNVFFANVDVNNSPELAETCHIKTIPTFQMFKKSQKVTLFSRIKRIICCYRSGFMSNLIFEFCGADAKKLEAKTQELM

SEQ ID NO: 1426 - protein, 913 aa, Homo sapiens
MTSRLRALGGRINNIRTSELPKEKTRSEVICSIHFLDGVVQTFKVTKQDTGQVLLDMVHNHLGVTEKEYFGLQHDDDSVDSPRWLEASKAIRKQLKGGFPCTLHFRVRFFIPDPNTLQQEQTRHLYFLQLKMDICEGRLTCPLNSAVVLASYAVQSHFGDYNSSIHHPGYLSDSHFIPDQNEDFLTKVESLHEQHSGLKQSEAESCYINIARTLDFYGVELHSGRDLHNLDLMIGIASAGVAVYRKYICTSFYPWVNILKISFKRKKFFIHQRQKQAESREHIVAFNMLNYRSCKNLWKSCVEHHTFFQAKKLLPQEKNVLSQYWTMGSRNTKKSVNNQYCKKVIGGMVWNPAMRRSLSVEHLETKSLPSRSPPITPNWRSPRLRHEIRKPRHSSADNLANEMTYITETEDVFYTYKGSLAPQDSDSEVSQNRSPHQESLSENNPAQSYLTQKSSSSVSPSSNAPGSCSPDGVDQQLLDDFHRVTKGGSTEDASQYYCDKNDNGDSYLVLIRITPDEDGKFGFNLKGGVDQKMPLVVSRINPESPADTCIPKLNEGDQIVLINGRDISEHTHDQVVMFIKASRESHSRELALVIRRRAVRSFADFKSEDELNQLFPEAIFPMCPEGGDTLEGSMAQLKKGLESGTVLIQFEQLYRKKPGLAITFAKLPQNLDKNRYKDVLPYDTTRVLLQGNEDYINASYVNMEIPAANLVNKYIATQGPLPHTCAQFWQVVWDQKLSLIVMLTTLTERGRTKCHQYWPDPPDVMNHGGFHIQCQSEDCTIAYVSREMLVTNTQTGEEHTVTHLQYVAWPDHGVPDDSSDFLEFVNYVRSLRVDSEPVLVHCSAGIGRTGVLVTMETAMCLTERNLPIYPLDIVRKMRDQRAMMVQTSSQYKFVCEAILRVYEEGLVQMLDPS

SEQ ID NO: 1427 - protein, 588 aa, Homo sapiens
MHRSAPSQTTKRSRSPFSTTRRSWDDSESSGTNLNIDNEDYSRYPPREYRASGSRRGMAYGHIDSYGADDSEEEGAGPVERPPVRGKTGKFKDDKLYDPEKGARSLAGPPPHFSSFSRDVREERDKLDPVPAARCSASRADFLPQSSVASQSSSEGKLATKGDSSERERREQNLPARPSRAPVSICGGGENTSKSAEEPVVRPKIRNLASPNCVKPKIFFDTDDDDDMPHSTSRWRDTANDNEGHSDGLARRGRGESSSGYPEPKYPEDKREARSDQVKPEKVPRRRRTMADPDFWTHSDDYYKYCDEDSDSDKEWIAALRRKYRSREQTLSSSGESWETLPGKEEREPPQAKVSASTGTSPGPGASASAGAGAGASAGSNGSNYLEEVREPSLQEEQASLEEGEIPWLQYHENDSSSEGDNDSGHELMQPGVFMLDGNNNLEDDSSVSEDLEVDWSLFDGFADGLGVAEAISYVDPQFLTYMALEERLAQAMETALAHLESLAVDVEVANPPASKESIDALPEILVTEDHGAVGQEMCCPICCSEYVKGEVATELPCHHYFHKPCVSIWLQKSGTCPVCRCMFPPPL

SEQ ID NO: 1428 - protein, 455 aa, Homo sapiens
MGQESSKPVWPNPTGGYQSNTGRRYGRRHAYVSFRPPTSQRERIASQRKTNSEVPMHRSAPSQTTKRSRSPFSTTRRSWDDSESSGTNLNIDNEDYSSTSRWRDTANDNEGHSDGLARRGRGESSSGYPEPKYPEDKREARSDQVKPEKVPRRRRTMADPDFWTHSDDYYKYCDEDSDSDKEWIAALRRKYRSREQTLSSSGESWETLPGKEEREPPQAKVSASTGTSPGPGASASAGAGAGASAGSNGSNYLEEVREPSLQEEQASLEEGEIPWLQYHENDSSSEGDNDSGHELMQPGVFMLDGNNNLEDDSSVSEDLEVDWSLFDGFADGLGVAEAISYVDPQFLTYMALEERLAQAMETALAHLESLAVDVEVANPPASKESIDALPEILVTEDHGAVGQEMCCPICCSEYVKGEVATELPCHHYFHKPCVSIWLQKSGTCPVCRCMFPPPL

SEQ ID NO: 1429 - protein, 1332 aa, Homo sapiens
MRNLKLFRTLEFRDIQGPGNPQCFSLRTEQGTVLIGSEHGLIEVDPVSREVKNEVSLVAEGFLPEDGSGRIVGVQDLLDQESVCVATASGDVILCSLSTQQLECVGSVASGISVMSWSPDQELVLLATGQQTLIMMTKDFEPILEQQIHQDDFGESKFITVGWGRKETQFHGSEGRQAAFQMQMHESALPWDDHRPQVTWRGDGQFFAVSVVCPETGARKVRVWNREFALQSTSEPVAGLGPALAWKPSGSLIASTQDKPNQQDIVFFEKNGLLHGHFTLPFLKDEVKVNDLLWNADSSVLAVWLEDLQREESSIPKTCVQLWTVGNYHWYLKQSLSFSTCGKSKIVSLMWDPVTPYRLHVLCQGWHYLAYDWHWTTDRSVGDNSSDLSNVAVIDGNRVLVTVFRQTVVPPPMCTYQLLFPHPVNQVTFLAHPQKSNDLAVLDASNQISVYKCGDCPSADPTVKLGAVGGSGFKVCLRTPHLEKRYKIQFENNEDQDVNPLKLGLLTWIEEDVFLAVSHSEFSPRSVIHHLTAASSEMDEEHGQLNVSSSAAVDGVIISLCCNSKTKSVVLQLADGQIFKYLWESPSLAIKPWKNSGGFPVRFPYPCTQTELAMIGEEECVLGLTDRCRFFINDIEVASNITSFAVYDEFLLLTTHSHTCQCFCLRDASFKTLQAGLSSNHVSHGEVLRKVERGSRIVTVVPQDTKLVLQMPRGNLEVVHHRALVLAQIRKWLDKLMFKEAFECMRKLRINLNLIYDHNPKVFLGNVETFIKQIDSVNHINLFFTELKEEDVTKTMYPAPVTSSVYLSRDPDGNKIDLVCDAMRAVMESINPHKYCLSILTSHVKKTTPELEIVLQKVHELQGNAPSDPDAVSAEEALKYLLHLVDVNELYDHSLGTYDFDLVLMVAEKSQKDPKEYLPFLNTLKKMETNYQRFTIDKYLKRYEKAIGHLSKCGPEYFPECLNLIKDKNLYNEALKLYSPSSQQYQDISIAYGEHLMQEHMYEPAGLMFARCGAHEKALSAFLTCGNWKQALCVAAQLNFTKDQLVGLGRTLAGKLVEQRKHIDAAMVLEECAQDYEEAVLLLLEGAAWEEALRLVYKYNRLDIIETNVKPSILEAQKNYMAFLDSQTATFSRHKKRLLVVRELKEQAQQAGLDDEVPHGQESDLFSETSSVVSGSEMSGKYSHSNSRISARSSKNRRKAERKKHSLKEGSPLEDLALLEALSEVVQNTENLKDEVYHILKVLFLFEFDEQGRELQKAFEDTLQLMERSLPEIWTLTYQQNSATPVLGPNSTANSIMASYQQQKTSVPVLDAELFIPPKINRRTQWKLSLLD

SEQ ID NO: 1430 - protein, 2261 aa, Homo sapiens
MACWPQLRLLLWKNLTFRRRQTCQLLLEVAWPLFIFLILISVRLSYPPYEQHECHFPNKAMPSAGTLPWVQGIICNANNPCFRYPTPGEAPGVVGNFNKSIVARLFSDARRLLLYSQKDTSMKDMRKVLRTLQQIKKSSSNLKLQDFLVDNETFSGFLYHNLSLPKSTVDKMLRADVILHKVFLQGYQLHLTSLCNGSKSEEMIQLGDQEVSELCGLPREKLAAAERVLRSNMDILKPILRTLNSTSPFPSKELAEATKTLLHSLGTLAQELFSMRSWSDMRQEVMFLTNVNSSSSSTQIYQAVSRIVCGHPEGGGLKIKSLNWYEDNNYKALFGGNGTEEDAETFYDNSTTPYCNDLMKNLESSPLSRIIWKALKPLLVGKILYTPDTPATRQVMAEVNKTFQELAVFHDLEGMWEELSPKIWTFMENSQEMDLVRMLLDSRDNDHFWEQQLDGLDWTAQDIVAFLAKHPEDVQSSNGSVYTWREAFNETNQAIRTISRFMECVNLNKLEPIATEVWLINKSMELLDERKFWAGIVFTGITPGSIELPHHVKYKIRMDIDNVERTNKIKDGYWDPGPRADPFEDMRYVWGGFAYLQDVVEQAIIRVLTGTEKKTGVYMQQMPYPCYVDDIFLRVMSRSMPLFMTLAWIYSVAVIIKGIVYEKEARLKETMRIMGLDNSILWFSWFISSLIPLLVSAGLLVVILKLGNLLPYSDPSVVFVFLSVFAVVTILQCFLISTLFSRANLAAACGGIIYFTLYLPYVLCVAWQDYVGFTLKIFASLLSPVAFGFGCEYFALFEEQGIGVQWDNLFESPVEEDGFNLTTSVSMMLFDTFLYGVMTWYIEAVFPGQYGIPRPWYFPCTKSYWFGEESDEKSHPGSNQKRISEICMEEEPTHLKLGVSIQNLVKVYRDGMKVAVDGLALNFYEGQITSFLGHNGAGKTTTMSILTGLFPPTSGTAYILGKDIRSEMSTIRQNLGVCPQHNVLFDMLTVEEHIWFYARLKGLSEKHVKAEMEQMALDVGLPSSKLKSKTSQLSGGMQRKLSVALAFVGGSKVVILDEPTAGVDPYSRRGIWELLLKYRQGRTIILSTHHMDEADVLGDRIAIISHGKLCCVGSSLFLKNQLGTGYYLTLVKKDVESSLSSCRNSSSTVSYLKKEDSVSQSSSDAGLGSDHESDTLTIDVSAISNLIRKHVSEARLVEDIGHELTYVLPYEAAKEGAFVELFHEIDDRLSDLGISSYGISETTLEEIFLKVAEESGVDAETSDGTLPARRNRRAFGDKQSCLRPFTEDDAADPNDSDIDPESRETDLLSGMDGKGSYQVKGWKLTQQQFVALLWKRLLIARRSRKGFFAQIVLPAVFVCIALVFSLIVPPFGKYPSLELQPWMYNEQYTFVSNDAPEDTGTLELLNALTKDPGFGTRCMEGNPIPDTPCQAGEEEWTTAPVPQTIMDLFQNGNWTMQNPSPACQCSSDKIKKMLPVCPPGAGGLPPPQRKQNTADILQDLTGRNISDYLVKTYVQIIAKSLKNKIWVNEFRYGGFSLGVSNTQALPPSQEVNDAIKQMKKHLKLAKDSSADRFLNSLGRFMTGLDTKNNVKVWFNNKGWHAISSFLNVINNAILRANLQKGENPSHYGITAFNHPLNLTKQQLSEVALMTTSVDVLVSICVIFAMSFVPASFVVFLIQERVSKAKHLQFISGVKPVIYWLSNFVWDMCNYVVPATLVIIIFICFQQKSYVSSTNLPVLALLLLLYGWSITPLMYPASFVFKIPSTAYVVLTSVNLFIGINGSVATFVLELFTDNKLNNINDILKSVFLIFPHFCLGRGLIDMVKNQAMADALERFGENRFVSPLSWDLVGRNLFAMAVEGVVFFLITVLIQYRFFIRPRPVNAKLSPLNDEDEDVRRERQRILDGGGQNDILEIKELTKIYRRKRKPAVDRICVGIPPGECFGLLGVNGAGKSSTFKMLTGDTTVTRGDAFLNKNSILSNIHEVHQNMGYCPQFDAITELLTGREHVEFFALLRGVPEKEVGKVGEWAIRKLGLVKYGEKYAGNYSGGNKRKLSTAMALIGGPPVVFLDEPTTGMDPKARRFLWNCALSVVKEGRSVVLTSHSMEECEALCTRMAIMVNGRFRCLGSVQHLKNRFGDGYTIVVRIAGSNPDLKPVQDFFGLAFPGSVLKEKHRNMLQYQLPSSLSSLARIFSILSQSKKRLHIEDYSVSQTTLDQVFVNFAKDQSDDDHLKDLSLHKNQTVVDVAVLTSFLQDEKVKESYV

SEQ ID NO: 1431 - protein, 735 aa, Homo sapiens
MSEIILEFESFDLEPDSNPPGGMFCRYDRLEIWDGFPDVGPHIGRYCGQKTPGRIRSSSGILSMVFYTDSAIAKEGFSANYSVLQSSVSEDFKCMEALGMESGEIHSDQITASSQYSTNWSAERSRLNYPENGWTPGEDSYREWIQVDLGLLRFVTAVGTQGAISKETKKKYYVKTYKIDVSSNGEDWITIKEGNKPVLFQGNTNPTDVVVAVFPKPLITRFVRIKPATWETGISMRFEVYGCKITDYPCSGMLGMVSGLISDSQITSSNQGDRNWMPENIRLVTSRSGWALPPAPHSYINEWLQIDLGEEKIVRGIIIQGGKHRENKVFMRKFKIGYSNNGSDWKMIMDDSKRKAKSFEGNNNYDTPELRTFPALSTRFIRIYPERATHGGLGLRMELLGCEVEAPTAGPTTPNGNLVDECDDDQANCHSGTGGTTVLATEKPTVIDSTIQSEFPTYGFNCEFGWGSHKTFCHWEHDNHVQLKWSVLTSKTGPIQDHTGDGNFIYSQADENQKGKVARLVSPVVYSQNSAHCMTFWYHMSGSHVGTLRVKLRYQKPEEYDQLVWMAIGHQGDHWKEGRVLLHKSLKLYQVIFEGEIGKGNLGGIAVDDISINNHISQEDCAKPADLDKKNPEIKIDETGSTPGYEGEGEGDKNISRKPGNVLKTLDPILITIIAMSALGVLLGAVCGVVLYCACWHNGMSERNLSALENYNFELVDGVKLKKDKLNTQSTYSEA

SEQ ID NO: 1432 - protein, 1030 aa, Homo sapiens
MAEPGGAAGRSHPEDGSASEGEKEGNNESHMVSPPEKDDGQKGEEAVGSTEHPEEVTTQAEAAIEEGEVETEGEAAVEGEEEAVSYGDAESEEEYYYTETSSPEGQISAADTTYPYFSPPQELPGEEAYDSVSGEAGLQGFQQEATGPPESRERRVTSPEPSHGVLGPSEQMGQVTSGPAVGRLTGSTEEPQGQVLPMGVQHRFRLSHGSDIESSDLEEFVSQEPVIPPGVPDAHPREGDLPVFQDQIQQPSTEEGAMAERVESEGSDEEAEDEGSQLVVLDPDHPLMVRFQAALKNYLNRQIEKLKLDLQELVVATKQSRAQRQELGVNLYEVQQHLVHLQKLLEKSHDRHAMASSERRQKEEELQAARALYTKTCAAANEERKKLAALQTEMENLALHLFYMQNIDQDMRDDIRVMTQVVKKAETERIRAEIEKKKQDLYVDQLTTRAQQLEEDIALFEAQYLAQAEDTRILRKAVSEACTEIDAISVEKRRIMQQWASSLVGMKHRDEAHRAVLEALRGCQHQAKSTDGEIEAYKKSIMKEEEKNEKLASILNRTETEATLLQKLTTQCLTKQVALQSQFNTYRLTLQDTEDALSQDQLEQMILTEELQAIRQAIQGELELRRKTDAAIREKLQEHMTSNKTTKYFNQLILRLQKEKTNMMTHLSKINGDIAQTTLDITHTSSRLDAHQKTLVELDQDVKKVNELITNSQSEISRRTILIERKQGLINFLNKQLERMVSELGGEEVGPLELEIKRLSKLIDEHDGKAVQAQVTWLRLQQEMVKVTQEQEEQLASLDASKKELHIMEQKKLRVESKIEQEKKEQKEIEHHMKDLDNDLKKLNMLMNKNRCSSEELEQNNRVTENEFVRSLKASERETIKMQDKLNQLSEEKATLLNQLVEAEHQIMLWEKKIQLAKEMRSSVDSEIGQTEIRAMKGEIHRMKKYCRTTQDAHRHVHEQHGTHAGTCTKNTGRAQARARTTRDARGHVHEQHGTRAGTCTNNTGRAQARARTRDARRHVHEHRTHTARA

SEQ ID NO: 1433 - protein, 276 aa, Homo sapiens
MALLDVCGAPRGQRPESALPVAGSGRRSDPGHYSFSMRSPELALPRGMQPTEFFQSLGGDGERNVQIEMAHGTTTLAFKFQHGVIAAVDSRASAGSYISALRVNKVIEINPYLLGTMSGCAADCQYWERLLAKECRLYYLRNGERISVSAASKLLSNMMCQYRGMGLSMGSMICGWDKKGPGLYYVDEHGTRLSGNMFSTGSGNTYAYGVMDSGYRPNLSPEEAYDLGRRAIAYATHRDSYSGGVVNMYHMKEDGWVKVESTDVSDLLHQYREANQ

SEQ ID NO: 1434 - protein, 686 aa, Homo sapiens
MRLPDLRPWTSLLLVDAALLWLLQGPLGTLLPQGLPGLWLEGTLRLGGLWGLLKLRGLLGFVGTLLLPLCLATPLTVSLRALVAGASRAPPARVASAPWSWLLVGYGAAGLSWSLWAVLSPPGAQEKEQDQVNNKVLMWRLLKLSRPDLPLLVAAFFFLVLAVLGETLIPHYSGRVIDILGGDFDPHAFASAIFFMCLFSFGSSLSAGCRGGCFTYTMSRINLRIREQLFSSLLRQDLGFFQETKTGELNSRLSSDTTLMSNWLPLNANVLLRSLVKVVGLYGFMLSISPRLTLLSLLHMPFTIAAEKVYNTRHQEVLREIQDAVARAGQVVREAVGGLQTVRSFGAEEHEVCRYKEALEQCRQLYWRRDLERALYLLVRRVLHLGVQMLMLSCGLQQMQDGELTQGSLLSFMIYQESVGSYVQTLVYIYGDMLSNVGAAEKVFSYMDRQPNLPSPGTLAPTTLQGVVKFQDVSFAYPNRPDRPVLKGLTFTLRPGEVTALVGPNGSGKSTVAALLQNLYQPTGGQVLLDEKPISQYEHCYLHSQVVSVGQEPVLFSGSVRNNIAYGLQSCEDDKVMAAAQAAHADDFIQEMEHGIYTDVGEKGSQLAAGQKQRLAIARALVRDPRVLILDEATSALDVQCEQALQDWNSRGDRTVLVIAHRLQTVQRAHQILVLQEGKLQKLAQL

SEQ ID NO: 1435 - protein, 269 aa, Homo sapiens
MSWKKALRIPGDLRVATVTLMLAMLSSLLAEGRDSPEDFVFQFKGMCYFTNGTERVRLVTRYIYNREEYARFDSDVGVYRAVTPQGRPDAEYWNSQKEVLEGTRAELDTVCRHNYEVAFRGILQRRVEPTVTISPSRTEALNHHNLLVCSVTDFYPGQIKVRWFRNDQEETAGVVSTPLIRNGDWTFQILVMLEMTPQRGDVYTCHVEHPSLQSPITVEWRAQSESAQSKMLSGVGGFVLGLIFLGLGLIIRQRSQKGPQGPPPAGLLH

SEQ ID NO: 1436 - protein, 266 aa, Homo sapiens
MVCLKLPGGSYMAKLTVTLMVLSSPLALAGDTRPRFLQQDKYECHFFNGTERVRFLHRDIYNQEEDLRFDSDVGEYRAVTELGRPDAEYWNSQKDFLEDRRAAVDTYCRHNYGVGESFTVQRRVEPKVTVYPARTQTLQHHNLLVCSVNGFYPGSIEVRWFRNSQEEKAGVVSTGLIQNGDWTFQTLVMLETVPRSGEVYTCQVEHPSVTSPLTVEWRAQSESAQSKMLSGVGGFVLGLLFLGAGLFIYFKNQKGHSGLHPTGLVS

SEQ ID NO: 1437 - protein, 229 aa, Homo sapiens
MAISGVPVLGFFIIAVLMSAQESWAIKEEHVIIQAEFYLNPDQSGEFMFDFDGDEIFHVDMAKKETVWRLEEFGRFASFEAQGALANIAVDKANLEIMTKRSNYTPITNDKFTPPVVNVTWLRNGKPVTTGVSETVFLPREDHLFRKFHYLPFLPSTEDVYDCRVEHWGLDEPLLKHWEFDAPSPLPETTENVVCALGLTVGLVGIIIGTIFIIKGLRKSNAAERRGPL

SEQ ID NO: 1438 - protein, 455 aa, Homo sapiens
MVDFPGYNLSGAVASFLFILLTMKQSEDFRVIGPAHPILAGVGEDALLTCQLLPKRTTMHVEVRWYRSEPSTPVFVHRDGVEVTEMQMEEYRGWVEWIENGIAKGNVALKIHNIQPSDNGQYWCHFQDGNYCGETSLLLKVAGLGSAPSIHMEGPGESGVQLVCTARGWFPEPQVYWEDIRGEKLLAVSEHRIQDKDGLFYAEATLVVRNASAESVSCLVHNPVLTEEKGSVISLPEKLQTELASLKVNGPSQPILVRVGEDIQLTCYLSPKANAQSMEVRWDRSHRYPAVHVYMDGDHVAGEQMAEYRGRTVLVSDAIDEGRLTLQILSARPSDDGQYRCLFEKDDVYQEASLDLKVVSLGSSPLITVEGQEDGEMQPMCSSDGWFPQPHVPWRDMEGKTIPSSSQALTQGSHGLFHVQTLLRVTNISAVDVTCSISIPFLGEEKIATFSLSGW

SEQ ID NO: 1439 - protein, 561 aa, Homo sapiens
MTVLEITLAVILTLLGLAILAILLTRWARCKQSEMYISRYSSEQSARLLDYEDGRGSRHAYSTQSGNLCFQRSKRDYTPSTNSLVSMASKFSLGQTELILLLMCFILALSRSSIGSIKCLQTTEEPPSRTAGAMMQFTAPIPGATGPIKLSQKTIVQTPGPIVQYPGSNAGPPSAPRGPPMAPIIISQRTARIPQVHTMDSSGKITLTPVVILTGYMDEELAKKSCSKIQILKCGGTARSQNSREENKEALKNDIIFTNSVESLKSAHIKEPEREGKGTDLEKDKIGMEVKVDSDAGIPKRQETQLKISEMSIPQGQGAQIKKSVSDVPRGQESQVKKSESGVPKGQEAQVTKSGLVVLKGQEAQVEKSEMGVPRRQESQVKKSQSGVSKGQEAQVKKRESVVLKGQEAQVEKSELKVPKGQEGQVEKTEADVPKEQEVQEKKSEAGVLKGPESQVKNTEVSVPETLESQVKKSESGVLKGQEAQEKKESFEDKGNNDKEKERDAEKDPNKKEKGDKNTKGDKGKDKVKGKRESEINGEKSKGSKRAKANTGRKYNKKVEE

SEQ ID NO: 1440 - protein, 562 aa, Homo sapiens
MTVLEITLAVILTLLGLAILAILLTRWARCKQSEMYISRYSSEQSARLLDYEDGRGSRHAYSTQSDTSYDNRERSKRDYTPSTNSLALSRSSIALPQGSMSSIKCLQTTEEPPSRTAGAMMQFTAPIPGATGPIKLSQKTIVQTPGPIVQYPGSNVRSHPHTITGPPSAPRGPPMAPIIISQRTASQLAAPIRIPQVHTMDSSGKITLTPVVILTGYMDEELAKKSCSKIQILKCGGTARSQNSREENKEALKNDIIFTNSVESLKSAHIKEPEREGKGTDLEKDKIGMEVKVDSDAGIPKRQETQLKISEMSIPQGQGAQIKKSVSDVPRGQESQVKKSESGVPKGQEAQVTKSGLVVLKGQEAQVEKSEMGVPRRQESQVKKSQSGVSKGQEAQVKKRESVVLKGQEAQVEKSELKVPKGQEGQVEKTEADVPKEQEVQEKKSEAGVLKGPESQVKNTEVSVPETLESQVKKSESGVLKGQEAQEKKESFEDKGNNDKEKERDAEKDPNKKEKGDKNTKGDKGKDKVKGKRESEINGEKSKGSKRAKANTGRKYNKKVEE

SEQ ID NO: 1441 - protein, 2003 aa, Homo sapiens
MQPPSLLLLLLLLLLLCVSVVRPRGLLCGSFPEPCANGGTCLSLSLGQGTCQCAPGFLGETCQFPDPCQNAQLCQNGGSCQALLPAPLGLPSSPSPLTPSFLCTCLPGFTGERCQAKLEDPCPPSFCSKRGRCHIQASGRPQCSCMPGWTGEQCQLRDFCSANPCVNGGVCLATYPQIQCHCPPGFEGHACERDVNECFQDPGPCPKGTSCHNTLGSFQCLCPVGQEGPRCELRAGPCPPRGCSNGGTCQLMPEKDSTFHLCLCPPGFIGPDCEVNPDNCVSHQCQNGGTCQDGLDTYTCLCPETWTGWDCSEDVDECETQGPPHCRNGGTCQNSAGSFHCVCVSGWGGTSCEENLDDCIAATCAPGSTCIDRVGSFSCLCPPGRTGLLCHLEDMCLSQPCHGDAQCSTNPLTGSTLCLCQPGYSGPTCHQDLDECLMAQQGPSPCEHGGSCLNTPGSFNCLCPPGYTGSRCEADHNECLSQPCHPGSTCLDLLATFHCLCPPGLEGQLCEVETNECASAPCLNHADCHDLLNGFQCICLPGFSGTRCEEDIDECRSSPCANGGQCQDQPGAFHCKCLPGFEGPRCQTEVDECLSDPCPVGASCLDLPGAFFCLCPSGFTGQLCEVPLCAPNLCQPKQICKDQKDKANCLCPDGSPGCAPPEDNCTCHHGHCQRSSCVCDVGWTGPECEAELGGCISAPCAHGGTCYPQPSGYNCTCPTGYTGPTCSEEMTACHSGPCLNGGSCNPSPGGYYCTCPPSHTGPQCQTSTDYCVSAPCFNGGTCVNRPGTFSCLCAMGFQGPRCEGKLRPSCADSPCRNRATCQDSPQGPRCLCPTGYTGGSCQTLMDLCAQKPCPRNSHCLQTGPSFHCLCLQGWTGPLCNLPLSSCQKAALSQGIDVSSLCHNGGLCVDSGPSYFCHCPPGFQGSLCQDHVNPCESRPCQNGATCMAQPSGYLCQCAPGYDGQNCSKELDACQSQPCHNHGTCTPKPGGFHCACPPGFVGLRCEGDVDECLDQPCHPTGTAACHSLANAFYCQCLPGHTGQWCEVEIDPCHSQPCFHGGTCEATAGSPLGFICHCPKGFEGPTCSHRAPSCGFHHCHHGGLCLPSPKPGFPPRCACLSGYGGPDCLTPPAPKGCGPPSPCLYNGSCSETTGLGGPGFRCSCPHSSPGPRCQKPGAKGCEGRSGDGACDAGCSGPGGNWDGGDCSLGVPDPWKGCPSHSRCWLLFRDGQCHPQCDSEECLFDGYDCETPPACTPAYDQYCHDHFHNGHCEKGCNTAECGWDGGDCRPEDGDPEWGPSLALLVVLSPPALDQQLFALARVLSLTLRVGLWVRKDRDGRDMVYPYPGARAEEKLGGTRDPTYQERAAPQTQPLGKETDSLSAGFVVVMGVDLSRCGPDHPASRCPWDPGLLLRFLAAMAAVGALEPLLPGPLLAVHPHAGTAPPANQLPWPVLCSPVAGVILLALGALLVLQLIRRRRREHGALWLPPGFTRRPRTQSAPHRRRPPLGEDSIGLKALKPKAEVDEDGVVMCSGPEEGEEVGQAEETGPPSTCQLWSLSGGCGALPQAAMLTPPQESEMEAPDLDTRGPDGVTPLMSAVCCGEVQSGTFQGAWLGCPEPWEPLLDGGACPQAHTVGTGETPLHLAARFSRPTAARRLLEAGANPNQPDRAGRTPLHAAVAADAREVCQLLLRSRQTAVDARTEDGTTPLMLAARLAVEDLVEELIAAQADVGARDKWGKTALHWAAAVNNARAARSLLQAGADKDAQDNREQTPLFLAAREGAVEVAQLLLGLGAARELRDQAGLAPADVAHQRNHWDLLTLLEGAGPPEARHKATPGREAGPFPRARTVSVSVPPHGGGALPRCRTLSAGAGPRGGGACLQARTWSVDLAARGGGAYSHCRSLSGVGAGGGPTPRGRRFSAGMRGPRPNPAIMRGRYGVAAGRGGRVSTDDWPCDWVALGACGSASNIPIPPPCLTPSPERGSPQLDCGPPALQEMPINQGGEGKK

SEQ ID NO: 1442 - protein, 929 aa, Homo sapiens
MQGLPDPPSQRGIIPRAFEHVFESVQCAENTKFLVRASYLEIYNEDVRDLLGADTKQKLELKEHPEKGVYVKGLSMHTVHSVAQCEHIMETGWKNRSVGYTLMNKDSSRSHSIFTISIEMSAVDERGKDHLRAGKLNLVDLAGSERQSKTGATGERLKEATKINLSLSALGNVISALVDGRCKHVPYRDSKLTRLLQDSLGGNTKTLMVACLSPADNNYDETLSTLRYANRAKNIRNKPRINEDPKDALLREYQEEIKKLKAILTQQMSPSSLSALLSRQVPPDPVQVEEKLLPQPVIQHDVEAEKQLIREEYEERLARLKADYKAEQESRARLEEDITAMRNSYDVRLSTLEENLRKETEAVLQVGVLYKAEVMSRAEFASSAEYPPAFQYETVVKPKVFSTTDTLPSDDVSKTQVSSRFAELPKVEPSKSEISLGSSESSSLEETSVSEAFPGPEEPSNVEVSMPTEESRSRYFLDECLGQEAAGHLLGEQNYLPQEEPQEVPLQGLLGLQDPFAEVEAKLARLSSTVARTDAPQADVPKVPVQVPAPTDLLEPSDARPEAEAADDFPPRPEVDLASEVALEVVRTAEPGVWLEAQAPVALVAQPEPLPATAGVKRESVGMEVAVLTDDPLPVVDQQQVLARLQLLEQQVVGGEQAKNKDLKEKHKRRKRYADERRKQLVAALQNSDEDSGDWVLLNVYDSIQEEVRAKSKLLEKMQRKLRAAEVEIKDLQSEFQLEKIDYLATIRRQERDSMLLQQLLEQVQPLIRRDCNYSNLEKILRESCWDEDNGFWKIPHPVITKTSLPVAVSTGPQNKPARKTSAADNGEPNMEDDRYRLMLSRSNSENIASNYFRSKRASQILSTDARKSLTHHNSPPGLSCPLSNNSAIPPTQAPEMPQPRPFRLESLDIPFTKAKRKKSKSNFGSEPL

SEQ ID NO: 1443 - protein, 347 aa, Homo sapiens
MAAGTAVGAWVLVLSLWGAVVGAQNITARIGEPLVLKCKGAPKKPPQRLEWKLNTGRTEAWKVLSPQGGGPWDSVARVLPNGSLFLPAVGIQDEGIFRCQAMNRNGKETKSNYRVRVYQIPGKPEIVDSASELTAGVPNKVGTCVSEGSYPAGTLSWHLDGKPLVPNEKGVSVKEQTRRHPETGLFTLQSELMVTPARGGDPRPTFSCSFSPGLPRHRALRTAPIQPRVWEPVPLEEVQLVVEPEGGAVAPGGTVTLTCEVPAQPSPQIHWMKDGVPLPLPPSPVLILPEIGPQDQGTYSCVATHSSHGPQESRAVSISIIEPGEEGPTAGEGFDKVREAEDSPQHM

SEQ ID NO: 1444 - protein, 233 aa, Homo sapiens
MAAGTAVGAWVLVLSLWGAVVGAQNITARIGEPLVLKCKGAPKKPPQRLEWKLNTGRTEAWKVLSPQGGGPWDSVARVLPNGSLFLPAVGIQDEGIFRCQAMNRNGKETKSNYRVRVYQIPGKPEIVDSASELTAGVPNKVVEESRRSRKRPCEQEVGTCVSEGSYPAGTLSWHLDGKPLVPNEKGVSVKEQTRRHPETGLFTLQSELMVTPARGGDPRPTFSCSFSPGLPRH

SEQ ID NO: 1445 - protein, 342 aa, Homo sapiens
MAAGTAVGAWVLVLSLWGAVVGAQNITARIGEPLVLKCKGAPKKPPQRLEWKLGGGPWDSVARVLPNGSLFLPAVGIQDEGIFRCQAMNRNGKETKSNYRVRVYQIPGKPEIVDSASELTAGVPNKVGTCVSEGSYPAGTLSWHLDGKPLVPNEKGVSVKEQTRRHPETGLFTLQSELMVTPARGGDPRPTFSCSFSPGLPRHRALRTAPIQPRVWEPVPLEEVQLVVEPEGGAVAPGGTVTLTCEVPAQPSPQIHWMKDVSDLERGAGRTRRGGANCRLCGRIRAGNSSPGPGDPGRPGDSRPAHWGHLVAKAATPRRGEEGPRKPGGRGGACRTESVGGT

SEQ ID NO: 1446 - protein, 420 aa, Homo sapiens
MAAGTAVGAWVLVLSLWGAVVGAQNITARIGEPLVLKCKGAPKKPPQRLEWKLNTGRTEAWKVLSPQGGGPWDSVARVLPNGSLFLPAVGIQDEGIFRCQAMNRNGKETKSNYRVRVYQIPGKPEIVDSASELTAGVPNKVVEESRRSRKRPCEQEVGTCVSEGSYPAGTLSWHLDGKPLVPNEKGVSVKEQTRRHPETGLFTLQSELMVTPARGGDPRPTFSCSFSPGLPRHRALRTAPIQPRVWEPVPLEEVQLVVEPEGGAVAPGGTVTLTCEVPAQPSPQIHWMKDGVPLPLPPSPVLILPEIGPQDQGTYSCVATHSSHGPQESRAVSISIIEPGEEGPTAGSVGGSGLGTLALALGILGGLGTAALLIGVILWQRRQRRGEERKAPENQEEEEERAELNQSEEPEAGESSTGGP

SEQ ID NO: 1447 - protein, 404 aa, Homo sapiens
MAAGTAVGAWVLVLSLWGAVVGAQNITARIGEPLVLKCKGAPKKPPQRLEWKLNTGRTEAWKVLSPQGGGPWDSVARVLPNGSLFLPAVGIQDEGIFRCQAMNRNGKETKSNYRVRVYQIPGKPEIVDSASELTAGVPNKVGTCVSEGSYPAGTLSWHLDGKPLVPNEKGVSVKEQTRRHPETGLFTLQSELMVTPARGGDPRPTFSCSFSPGLPRHRALRTAPIQPRVWEPVPLEEVQLVVEPEGGAVAPGGTVTLTCEVPAQPSPQIHWMKDGVPLPLPPSPVLILPEIGPQDQGTYSCVATHSSHGPQESRAVSISIIEPGEEGPTAGSVGGSGLGTLALALGILGGLGTAALLIGVILWQRRQRRGEERKAPENQEEEEERAELNQSEEPEAGESSTGGP

SEQ ID NO: 1448 - protein, 476 aa, Homo sapiens
MRSEKEGAGGLRAAVAARGPSGREKLSALEVQFHRDSQQQEAETPPTSSSGCGGGAGKPREEKRTALSKVVIRRLPPGLTKEQLEEQLRPLPAHDYFEFFAADLSLYPHLYSRAYINFRNPDDILLFRDRFDGYIFLDSKGLEYPAVVEFAPFQKIAKKKLRKKDAKTGSIEDDPEYKKFLETYCVEEEKTSANPETLLGEMEAKTRELIARRTTPLLEYIKNRKLEKQRIREEKREERRRRELEKKRLREEEKRRRREEERCKKKETDKQKKIAEKEVRIKLLKKPEKGEEPTTEKPKERGEEIDTGGGKQESCAPGAVVKARPMEGSLEEPQETSHSGSDKEHRDVERSQEQESEAQRYHVDDGRRHRAHHEPERLSRRSEDEQRWGKGPGQDRGKKGSQDSGAPGEAMERLGRAQRCDDSPAPRKERLANKDRPALQLYDPGARFRARECGGNRRICKAEGSGTGPEKREEAE

SEQ ID NO: 1449 - protein, 819 aa, Homo sapiens
MDIQLDPARDDLPLMANTSHILVKHYVLDLDVDFESQVIEGTIVLFLEDGNRFKKQNSSIEEACQSESNKACKFGMPEPCHIPVTNARTFSSEMEYNDFAICSKGEKDTSDKDGNHDNQEHASGISSSKYCCDTGNHGSEDFLLVLDCCDLSVLKVEEVDVAAVPGLEKFTRSPELTVVSEEFRNQIVRELVTLPANRWREQLDYYARCSQAPGCGELLFDTDTWSLQIRKTGAQTATDFPHAIRIWYKTKPEGRSVTWTSDQSGRPCVYTVGSPINNRALFPCQEPPVAMSTWQATVRAAASFVVLMSGENSAKPTQLWEECSSWYYYVTMPMPASTFTIAVGCWTEMKMETWSSNDLATERPFSPSEANFRHVGVCSHMEYPCRFQNASATTQEIIPHRVFAPVCLTGACQETLLRLIPPCLSAAHSVLGAHPFSRLDVLIVPANFPSLGMASPHIMFLSQSILTGGNHLCGTRLCHEIAHAWFGLAIGARDWTEEWLSEGFATHLEDVFWATAQQLAPYEAREQQELRACLRWRRLQDEMQCSPEEMQVLRPSKDKTGHTSDSGASVIKHGLNPEKIFMQVHYLKGYFLLRFLAKRLGDETYFSFLRKFVHTFHGQLILSQDFLQMLLENIPEEKRLELSVENIYQDWLESSGIPKPLQRERRAGAECGLARQVRAEVTKWIGVNRRPRKRKRREKEEVFEKLLPDQLVLLLEHLLEQKTLSPRTLQSLQRTYHLQDQDAEVRHRWCELIVKHKFTKAYKSVERFLQEDQAMGVYLYGELMVSEDARQQQLARRCFERTKEQMDRSSAQVVAEMLF

SEQ ID NO: 1450 - protein, 117 aa, Homo sapiens
MGTWGAPHRTLPCRNRGAMQPRVLLVVALLALLASARASEAEDASLLSFMQGYMKHATKTAKDALSSVQESQVAQQARGWVTDGFSSLKDYWSTVKDKFSEFWDLDPEVRPTSAVAA

SEQ ID NO: 1451 - protein, 355 aa, Homo sapiens
MDFLHRNGVLIIQHLQKDYRAYYTFLNFMSNVGDPRNIFFIYFPLCFQFNQTVGTKMIWVAVIGDWLNLIFKWILFGHRPYWWVQETQIYPNHSSPCLEQFPTTCETGPGSPSGHAMGASCVWYVMVTAALSHTVCGMDKFSITLHRLTWSFLWSVFWLIQISVCISRVFIATHFPHQVILGVIGGMLVAEAFEHTPGIQTASLGTYLKTNLFLFLFAVGFYLLLRVLNIDLLWSVPIAKKWCANPDWIHIDTTPFAGLVRNLGVLFGLGFAINSEMFLLSCRGGNNYTLSFRLLCALTSLTILQLYHFLQIPTHEEHLFYVLSFCKSASIPLTVVAFIPYSVHMLMKQSGKKSQ

SEQ ID NO: 1452 - protein, 1359 aa, Homo sapiens
MYSVEDLLISHGYKLSRDPPASREDNPKGRQAARTGTRAGQGLQNGHEDGPAALAHRKTSAGKGHVSDSESRRSTPRGHGEPQSTSASRTSEAGFCNQPPSAWSSHPPTGNDQAYRRRGRQEARSQKPREHENLEARGMAQAHSLPVHVREGPWEVGGRSEHVMKKPVWEEELRMSGPAKWQNVSLESWNQPRKLGRQMSDGDGERLFQDLYPFIQGEHVLNSQNKGKSRSLPRVLSPESLSCTEIPIPLNERHSPKMPPYPPTCAPNLDSTRNSEKSGCSAPFPRPKFGRPLKPPSYSSHQQSRGGADSSDSQDSQQMDAYVPRHELCLSDPGLEPPVYVPPPSYRSPPQNIPNPYLEDTVPINVCGGHSQQQSPTEKAGASGQPPSGPPGTGNEYGVSPRLPQGLPAHPRPVTAYDGFVQYIPFDDPRLRHFKLAQPQGFCEDIKLDDKSYNSSPVTAQEPAHGGMQPDGAIWNPQSLIPPSGDERGLVLADSSPRWLWGQPPGDGENSGLPNQRDRCVARGQWPDVRGSQHGHTGRQVSSPYSQGESTCETQTKLKKFQTGTRTKKSSKKKMNETIFCLVSIPVKSESHLPDRDMDNNDLKPSADQKNGSDKSPALQEQSLLSMSSTDLELQALTGSMGGRTEFQKQDLGEPEEDRQTNDLSFIHLTKHRELKHSGSWPGHRYRDQQTQTSFSEEPQSSQLLPGAKLGGPSRAALSPKCSDPAASEAQTHTAFPTGDHKQRPSARNLKGHRSLSPSSNSAFSRTSLSVDQAPTPKAGRSQPCVDVHGLGAHPGPKREVVKGEPTGPCNSKQLFGQFLLKPVSRRPWDLISQLESFNKELQEEEESSSSSSSSSSSSEESEAEPQQENRAHCRQEDVGFRGNSPEMRVEPQPRMWVPESPVCRSGRGESKSESWSEELQPGHPRAWPPSPGRFRVEEGGGAPFCSADGSTSAEKRHLEVSNGMDELAGSPFPVTRMSSRSSDAKPLPASYPAEPREPQESPKITSAFSSVKPSEAVPRKFDSGGERGAGLPLSLSNKNRGLSAPDLRSVGLTPGQEQGASELEGSLGEASTIEIPPGESLQARAARILGIEVAVESLLPGIRRAGQNQPAEPDASACTPESPQEELLSRPAPADVPRVSTDAFYGRRKCGWTKSPLFVGDRDSARRAPQAFEHSDVDGVVTSTDPVPEPEPSPLESKFFEQKDVETKPPFRSTLFHFVERTPSVAGSEKRLRSPSKVIESLQEKLASPPRRADPDRLMRMKEVSSVSRMRVLSFRNADSQEDAEELKATTRGQAGLPGGLVSPGSGDRAQRLGHSLSVSKDSISREEKEHPAAQKEKSMDQDFWCPDSYDPSRVERV

SEQ ID NO: 1453 - protein, 354 aa, Homo sapiens
MEKFKAAMLLGSVGDALGYRNVCKENSTVGMKIQEELQRSGGLDHLVLSPGEWPVSDNTIMHIATAEALTTDYWCLDDLYREMVRCYVEIVEKLPERRPDPATIEGCAQLKPNNYLLAWHTPFNEKGSGFGAATKAMCIGLRYWKPERLETLIEVSVECGRMTHNHPTGFLGSLCTALFVSFAAQGKPLVQWGRDMLRAVPLAEEYCRKTIRHTAEYQEHWFYFEAKWQFYLEERKISKDSENKAIFPDNYDAEEREKTYRKWSSEGRGGRRGHDAPMIAYDALLAAGNSWTELCHRAMFHGGESAATGTIAGCLFGLLYGLDLVPKGLYQDLEDKEKLEDLGAALYRLSTEEK

SEQ ID NO: 1454 - protein, 2005 aa, Homo sapiens
MAQSVLVPPGPDSFRFFTRESLAAIEQRIAEEKAKRPKQERKDEDDENGPKPNSDLEAGKSLPFIYGDIPPEMVSVPLEDLDPYYINKKTFIVLNKGKAISRFSATPALYILTPFNPIRKLAIKILVHSLFNMLIMCTILTNCVFMTMSNPPDWTKNVEYTFTGIYTFESLIKILARGFCLEDFTFLRDPWNWLDFTVITFAYVTEFVNLGNVSALRTFRVLRALKTISVIPGLKTIVGALIQSVKKLSDVMILTVFCLSVFALIGLQLFMGNLRNKCLQWPPDNSSFEINITSFFNNSLDGNGTTFNRTVSIFNWDEYIEDKSHFYFLEGQNDALLCGNSSDAGQCPEGYICVKAGRNPNYGYTSFDTFSWAFLSLFRLMTQDFWENLYQLTLRAAGKTYMIFFVLVIFLGSFYLINLILAVVAMAYEEQNQATLEEAEQKEAEFQQMLEQLKKQQEEAQAAAAAASAESRDFSGAGGIGVFSESSSVASKLSSKSEKELKNRRKKKKQKEQSGEEEKNDRVRKSESEDSIRRKGFRFSLEGSRLTYEKRFSSPHQSLLSIRGSLFSPRRNSRASLFSFRGRAKDIGSENDFADDEHSTFEDNDSRRDSLFVPHRHGERRHSNVSQASRASRVLPILPMNGKMHSAVDCNGVVSLVGGPSTLTSAGQLLPEGTTTETEIRKRRSSSYHVSMDLLEDPTSRQRAMSIASILTNTMEELEESRQKCPPCWYKFANMCLIWDCCKPWLKVKHLVNLVVMDPFVDLAITICIVLNTLFMAMEHYPMTEQFSSVLSVGNLVFTGIFTAEMFLKIIAMDPYYYFQEGWNIFDGFIVSLSLMELGLANVEGLSVLRSFRLLRVFKLAKSWPTLNMLIKIIGNSVGALGNLTLVLAIIVFIFAVVGMQLFGKSYKECVCKISNDCELPRWHMHDFFHSFLIVFRVLCGEWIETMWDCMEVAGQTMCLTVFMMVMVIGNLVVLNLFLALLLSSFSSDNLAATDDDNEMNNLQIAVGRMQKGIDFVKRKIREFIQKAFVRKQKALDEIKPLEDLNNKKDSCISNHTTIEIGKDLNYLKDGNGTTSGIGSSVEKYVVDESDYMSFINNPSLTVTVPIAVGESDFENLNTEEFSSESDMEESKEKLNATSSSEGSTVDIGAPAEGEQPEVEPEESLEPEACFTEDCVRKFKCCQISIEEGKGKLWWNLRKTCYKIVEHNWFETFIVFMILLSSGALAFEDIYIEQRKTIKTMLEYADKVFTYIFILEMLLKWVAYGFQVYFTNAWCWLDFLIVDVSLVSLTANALGYSELGAIKSLRTLRALRPLRALSRFEGMRVVVNALLGAIPSIMNVLLVCLIFWLIFSIMGVNLFAGKFYHCINYTTGEMFDVSVVNNYSECKALIESNQTARWKNVKVNFDNVGLGYLSLLQVATFKGWMDIMYAAVDSRNVELQPKYEDNLYMYLYFVIFIIFGSFFTLNLFIGVIIDNFNQQKKKFGGQDIFMTEEQKKYYNAMKKLGSKKPQKPIPRPANKFQGMVFDFVTKQVFDISIMILICLNMVTMMVETDDQSQEMTNILYWINLVFIVLFTGECVLKLISLRYYYFTIGWNIFDFVVVILSIVGMFLAELIEKYFVSPTLFRVIRLARIGRILRLIKGAKGIRTLLFALMMSLPALFNIGLLLFLVMFIYAIFGMSNFAYVKREVGIDDMFNFETFGNSMICLFQITTSAGWDGLLAPILNSGPPDCDPDKDHPGSSVKGDCGNPSVGIFFFVSYIIISFLVVVNMYIAVILENFSVATEESAEPLSEDDFEMFYEVWEKFDPDATQFIEFAKLSDFADALDPPLLIAKPNKVQLIAMDLPMVSGDRIHCLDILFAFTKRVLGESGEMDALRIQMEERFMASNPSKVSYEPITTTLKRKQEEVSAIIIQRAYRRYLLKQKVKKVSSIYKKDKGKECDGTPIKEDTLIDKLNENSTPEKTDMTPSTTSPPSYDSVTKPEKEKFEKDKSEKEDKGKDIRESKK

SEQ ID NO: 1455 - protein, 485 aa, Homo sapiens
MAAAPPLSKAEYLKRYLSGADAGVDRGSESGRKRRKKRPKPGGAGGKGMRIVDDDVSWTAISTTKLEKEEEEDDGDLPVVAEFVDERPEEVKQMEAFRSSAKWKLLGGHNEDLPSNRHFRHDTPDSSPRRVRHGTPDPSPRKDRHDTPDPSPRRARHDTPDPSPLRGARHDSDTSPPRRIRHDSSDTSPPRRARHDSPDPSPPRRPQHNSSGDCQKATDSDLSSPRHKQSPGHQDSDSDLSPPRNRPRHRSSDSDLSPPRRRQRTKSSDSDLSPPRRSQPPGKKAAHMYSGAKTGLVLTDIQREQQELKEQDQETMAFEAEFQYAETVFRDKSGRKRNLKLERLEQRRKAEKDSERDELYAQWGKGLAQSRQQQQNVEDAMKEMQKPLARYIDDEDLDRMLREQEREGDPMANFIKKNKAKENKNKKVRPRYSGPAPPPNRFNIWPGYRWDGVDRSNGFEQKRFARLASKKAVEELAYKWSVEDM

SEQ ID NO: 1456 - protein, 152 aa, Homo sapiens
MDSGTEEYELNGGLPPGTPGSPDASPARWGWRHGPINVNHYASKKSAAESMLDIALLMANASQLKAVVEQGPSFAFYVPLVVLISISLVLQIGVGVLLIFLVKYDLNNPAKHAKLDFLNNLATGLVFIIVVVNIFITAFGVQKPLMDMAPQQ

SEQ ID NO: 1457 - protein, 1128 aa, Homo sapiens
MDGRTPRPQDAPARRKPKAKAPLPPAETKYTDVSSAADSVESTAFIMEQKENMIDKDVELSVVLPGDIIKSTTVHGSKPMMDLLIFLCAQYHLNPSSYTIDLLSAEQNHIKFKPNTPIGMLEVEKVILKPKMLDKKKPTPIIPEKTVRVVINFKKTQKTIVRVSPHASLQELAPIICSKCEFDPLHTLLLKDYQSQEPLDLTKSLNDLGLRELYAMDVNRESCQISQNLDIMKEKENKGFFSFFQRSKKKRDQTASAPATPLVNKHRPTFTRSNTISKPYISNTLPSDAPKKRRAPLPPMPASQSVPQDLAHIQERPASCIVKSMSVDETDKSPCEAGRVRAGSLQLSSMSAGNSSLRRTKRKAPSPPSKIPPHQSDENSRVTALQPVDGVPPDSASEANSPEELSSPAGISSDYSLEEIDEKEELSEVPKVEAENISPKSQDIPFVSTDIINTLKNDPDSALGNGSGEFSQNSMEEKQETKSTDGQEPHSVVYDTSNGKKVVDSIRNLKSLGPNQENVVQNEIIVYPENTEDNMKNGVKKTEINVEGVAKNNNIDMEVERPSNSEAHETDTAISYKENHLAASSVPDQKLNQPSAEKTKDAAIQTTPSCNSFDGKHQDHNLSDSKVEECVQTSNNNISTQHSCLSSQDSVNTSREFRSQGTLIIHSEDPLTVKDPICAHGNDDLLPPVDRIDKNSTASYLKNYPLYRQDYNPKPKPSNEITREYIPKIGMTTYKIVPPKSLEISKDWQSETIEYKDDQDMHALGKKHTHENVKETAIQTEDSAISESPEEPLPNLKPKPNLRTEHQVPSSVSSPDDAMVSPLKPAPKMTRDTGTAPFAPNLEEINNILESKFKSRASNAQAKPSSFFLQMQKRVSGHYVTSAAAKSVHAAPNPAPKELTNKEAERDMLPSPEQTLSPLSKMPHSVPQPLVEKTDDDVIGQAPAEASPPPIAPKPVTIPASQVSTQNLKTLKTFGAPRPYSSSGPSPFALAVVKRSQSFSKERTESPSASALVQPPANTEEGKTHSVNKFVDIPQLGVSDKENNSAHNEQNSQIPTPTDGPSFTVMRQSSLTFQSSDPEQMRQSLLTAIRSGEAAAKLKRVTIPSNTISVNGRSRLSHSMSPDAQDGH

SEQ ID NO: 1458 - protein, 122 aa, Homo sapiens
MPRSSRSPGDPGALLEDVAHNPRPRRIAQRGRNTSRMAEDTSPNMNDNILLPVRNNDQALGLTQCMLGCVYASCCARSSWRRQAFCSSVLSVCPRALPSPRWRYPWALALIIGHWARHCTAT

SEQ ID NO: 1459 - protein, 354 aa, Homo sapiens
MPRSSRSPGDPGALLEDVAHNPRPRRIAQRGRNTSRMAEDTSPNMTWFTCFACSLRTQAQQVLFNTCRCKLLCQKLMEKTGILLLCAFGFWMFSIHLPSKMKVWQDDSINGPLQSLRLYQEKVRHHSGEIQDLRGSMNQLIAKLQEMEAMSDEQKMAQKIMKMIHGDYIEKPDFALKSIGASIDFEHTSVTYNHEKAHSYWNWIQLWNYAQPPDVILEPNVTPGNCWAFEGDRGQVTIQLAQKVYLSNLTLQHIPKTISLSGSLDTAPKDFVIYGMEGSPKEEVFLGAFQFQPENIIQMFPLQNQPARAFSAVKVKISSNWGNPGFTCLYRVRVHGSVAPPREQPHQNPYPKRD

SEQ ID NO: 1460 - protein, 1233 aa, Homo sapiens
MRGLPRGRGLMRARGRGRAAPPGSRGRGRGGPHRGRGRPRSLLSLPRAQASWTPQLSTGLTSPPVPCLPSQGEAPAEMGALLLEKETRGATERVHGSLGDTPRSEETLPKATPDSLEPAGPSSPASVTVTVGDEGADTPVGATPLIGDESENLEGDGDLRGGRILLGHATKSFPSSPSKGGSCPSRAKMSMTGAGKSPPSVQSLAMRLLSMPGAQGAAAAGSEPPPATTSPEGQPKVHRARKTMSKPGNGQPPVPEKRPPEIQHFRMSDDVHSLGKVTSDLAKRRKLNSGGGLSEELGSARRSGEVTLTKGDPGSLEEWETVVGDDFSLYYDSYSVDERVDSDSKSEVEALTEQLSEEEEEEEEEEEEEEEEEEEEEEEEDEESGNQSDRSGSSGRRKAKKKWRKDSPWVKPSRKRRKREPPRAKEPRGVSNDTSSLETERGFEELPLCSCRMEAPKIDRISERAGHKCMATESVDGELSGCNAAILKRETMRPSSRVALMVLCETHRARMVKHHCCPGCGYFCTAGTFLECHPDFRVAHRFHKACVSQLNGMVFCPHCGEDASEAQEVTIPRGDGVTPPAGTAAPAPPPLSQDVPGRADTSQPSARMRGHGEPRRPPCDPLADTIDSSGPSLTLPNGGCLSAVGLPLGPGREALEKALVIQESERRKKLRFHPRQLYLSVKQGELQKVILMLLDNLDPNFQSDQQSKRTPLHAAAQKGSVEICHVLLQAGANINAVDKQQRTPLMEAVVNNHLEVARYMVQRGGCVYSKEEDGSTCLHHAAKIGNLEMVSLLLSTGQVDVNAQDSGGWTPIIWAAEHKHIEVIRMLLTRGADVTLTDNEENICLHWASFTGSAAIAEVLLNARCDLHAVNYHGDTPLHIAARESYHDCVLLFLSRGANPELRNKEGDTAWDLTPERSDVWFALQLNRKLRLGVGNRAIRTEKIICRDVARGYENVPIPCVNGVDGEPCPEDYKYISENCETSTMNIDRNITHLQHCTCVDDCSSSNCLCGQLSIRCWYDKDGRLLQEFNKIEPPLIFECNQACSCWRNCKNRVVQSGIKVRLQLYRTAKMGWGVRALQTIPQGTFICEYVGELISDAEADVREDDSYLFDLDNKDGEVYCIDARYYGNISRFINHLCDPNIIPVRVFMLHQDLRFPRIAFFSSRDIRTGEELGFDYGDRFWDIKSKYFTCQCGSEKCKHSAEAIALEQSRLARLDPHPELLPELGSLPPVNT

SEQ ID NO: 1461 - protein, 1176 aa, Homo sapiens
MAAAAGAAAAAAAEGEAPAEMGALLLEKETRGATERVHGSLGDTPRSEETLPKATPDSLEPAGPSSPASVTVTVGDEGADTPVGATPLIGDESENLEGDGDLRGGRILLGHATKSFPSSPSKGGSCPSRAKMSMTGAGKSPPSVQSLAMRLLSMPGAQGAAAAGSEPPPATTSPEGQPKVHRARKTMSKPGNGQPPVPEKRPPEIQHFRMSDDVHSLGKVTSDLAKRRKLNSGGGLSEELGSARRSGEVTLTKGDPGSLEEWETVVGDDFSLYYDSYSVDERVDSDSKSEVEALTEQLSEEEEEEEEEEEEEEEEEEEEEEEEDEESGNQSDRSGSSGRRKAKKKWRKDSPWVKPSRKRRKREPPRAKEPRGVSNDTSSLETERGFEELPLCSCRMEAPKIDRISERAGHKCMATESVDGELSGCNAAILKRETMRPSSRVALMVLCETHRARMVKHHCCPGCGYFCTAGTFLECHPDFRVAHRFHKACVSQLNGMVFCPHCGEDASEAQEVTIPRGDGVTPPAGTAAPAPPPLSQDVPGRADTSQPSARMRGHGEPRRPPCDPLADTIDSSGPSLTLPNGGCLSAVGLPLGPGREALEKALVIQESERRKKLRFHPRQLYLSVKQGELQKVILMLLDNLDPNFQSDQQSKRTPLHAAAQKGSVEICHVLLQAGANINAVDKQQRTPLMEAVVNNHLEVARYMVQRGGCVYSKEEDGSTCLHHAAKIGNLEMVSLLLSTGQVDVNAQDSGGWTPIIWAAEHKHIEVIRMLLTRGADVTLTDNEENICLHWASFTGSAAIAEVLLNARCDLHAVNYHGDTPLHIAARESYHDCVLLFLSRGANPELRNKEGDTAWDLTPERSDVWFALQLNRKLRLGVGNRAIRTEKIICRDVARGYENVPIPCVNGVDGEPCPEDYKYISENCETSTMNIDRNITHLQHCTCVDDCSSSNCLCGQLSIRCWYDKDGRLLQEFNKIEPPLIFECNQACSCWRNCKNRVVQSGIKVRLQLYRTAKMGWGVRALQTIPQGTFICEYVGELISDAEADVREDDSYLFDLDNKDGEVYCIDARYYGNISRFINHLCDPNIIPVRVFMLHQDLRFPRIAFFSSRDIRTGEELGFDYGDRFWDIKSKYFTCQCGSEKCKHSAEAIALEQSRLARLDPHPELLPELGSLPPVNT

SEQ ID NO: 1462 - protein, 1210 aa, Homo sapiens
MAAAAGAAAAAAAEGEAPAEMGALLLEKETRGATERVHGSLGDTPRSEETLPKATPDSLEPAGPSSPASVTVTVGDEGADTPVGATPLIGDESENLEGDGDLRGGRILLGHATKSFPSSPSKGGSCPSRAKMSMTGAGKSPPSVQSLAMRLLSMPGAQGAAAAGSEPPPATTSPEGQPKVHRARKTMSKPGNGQPPVPEKRPPEIQHFRMSDDVHSLGKVTSDLAKRRKLNSGGGLSEELGSARRSGEVTLTKGDPGSLEEWETVVGDDFSLYYDSYSVDERVDSDSKSEVEALTEQLSEEEEEEEEEEEEEEEEEEEEEEEEDEESGNQSDRSGSSGRRKAKKKWRKDSPWVKPSRKRRKREPPRAKEPRGVNGVGSSGPSEYMEVPLGSLELPSEGTLSPNHAGVSNDTSSLETERGFEELPLCSCRMEAPKIDRISERAGHKCMATESVDGELSGCNAAILKRETMRPSSRVALMVLCETHRARMVKHHCCPGCGYFCTAGTFLECHPDFRVAHRFHKACVSQLNGMVFCPHCGEDASEAQEVTIPRGDGVTPPAGTAAPAPPPLSQDVPGRADTSQPSARMRGHGEPRRPPCDPLADTIDSSGPSLTLPNGGCLSAVGLPLGPGREALEKALVIQESERRKKLRFHPRQLYLSVKQGELQKVILMLLDNLDPNFQSDQQSKRTPLHAAAQKGSVEICHVLLQAGANINAVDKQQRTPLMEAVVNNHLEVARYMVQRGGCVYSKEEDGSTCLHHAAKIGNLEMVSLLLSTGQVDVNAQDSGGWTPIIWAAEHKHIEVIRMLLTRGADVTLTDNEENICLHWASFTGSAAIAEVLLNARCDLHAVNYHGDTPLHIAARESYHDCVLLFLSRGANPELRNKEGDTAWDLTPERSDVWFALQLNRKLRLGVGNRAIRTEKIICRDVARGYENVPIPCVNGVDGEPCPEDYKYISENCETSTMNIDRNITHLQHCTCVDDCSSSNCLCGQLSIRCWYDKDGRLLQEFNKIEPPLIFECNQACSCWRNCKNRVVQSGIKVRLQLYRTAKMGWGVRALQTIPQGTFICEYVGELISDAEADVREDDSYLFDLDNKDGEVYCIDARYYGNISRFINHLCDPNIIPVRVFMLHQDLRFPRIAFFSSRDIRTGEELGFDYGDRFWDIKSKYFTCQCGSEKCKHSAEAIALEQSRLARLDPHPELLPELGSLPPVNT

SEQ ID NO: 1463 - protein, 891 aa, Homo sapiens
MLPTEVPQSHPGPSALLLLQLLLPPTSAFFPNIWSLLAAPGSITHQDLTEEAALNVTLQLFLEQPPPGRPPLRLEDFLGRTLLADDLFAAYFGPGSSRRFRAALGEVSRANAAQDFLPTSRNDPDLHFDAERLGQGRARLVGALRETVVAARALDHTLARQRLGAALHALQDFYSHSNWVELGEQQPHPHLLWPRQELQNLAQVADPTCSDCEELSCPRNWLGFTLLTSGYFGTHPPKPPGKCSHGGHFDRSSSQPPRGGINKDSTSPGFSPHHMLHLQAAKLALLASIQAFSLLRSRLGDRDFSRLLDITPASSLSFVLDTTGSMGEEINAAKIQARHLVEQRRGSPMEPVHYVLVPFHDPGFGPVFTTSDPDSFWQQLNEIHALGGGDEPEMCLSALQLALLHTPPLSDIFVFTDASPKDAFLTNQVESLTQERRCRVTFLVTEDTSRVQGRARREILSPLRFEPYKAVALASGGEVIFTKDQHIRDVAAIVGESMAALVTLPLDPPVVVPGQPLVFSVDGLLQKITVRIHGDISSFWIKNPAGVSQGQEEGGGPLGHTRRFGQFWMVTMDDPPQTGTWEIQVTAEDTPGVRVQAQTSLDFLFHFGIPMEDGPHPGLYPLTQPVAGLQTQLLVEVTGLGSRANPGDPQPHFSHVILRGVPEGAELGQVPLEPVGPPERGLLAASLSPTLLSTPRPFSLELIGQDAAGRRLHRAAPQPSTVVPVLLELSGPSGFLAPGSKVPLSLRIASFSGPQDLDLRTFVNPSFSLTSNLSRAHLELNESAWGRLWLEVPDSAAPDSVVMVTVTAGGREANPVPPTHAFLRLLVSAPAPQDRHTTPTGSSDPILTTATPAFSPFTLVTQGRAGAGLAAGSPWWGTVGGVLLLLGLASW

SEQ ID NO: 1464 - protein, 217 aa, Homo sapiens
MAVFLQLLPLLLSRAQGNPGASLDGRPGDRVNLSCGGVSHPIRWVWAPSFPACKGLSKGRRPILWASSSGTPTVPPLQPFVGRLRSLDSGIRRLELLLSAGDSGTFFCKGRHEDESRTVLHVLGDRTYCKAPGPTHGACPRNRFDHSLDLLCPPHIAPLVKTEPQRPVKEEEPKIPGDLDQEPSLLYADLDHLALSRPRRLSTADPADASTIYAVVV

SEQ ID NO: 1465 - protein, 237 aa, Homo sapiens
MAVFLQLLPLLLSRAQGNPGASLDGRPGDRVNLSCGGVSHPIRWVWAPSFPACKGLSKGRRPILWASSSGTPTVPPLQPFVGRLRSLDSGIRRLELLLSAGDSGTFFCKGRHEDESRTVLHVLGDRTYCKAPGPTHGSVYPQLLIPLLGAGLVLGLGALGLVWWLHRRLPPQPIRPLPRFALSPPHSSTCENRAPEASKGGRAQDSRGPGPGTEPALCGSGPSSPQQAPPAVHSGPC

SEQ ID NO: 1466 - protein, 222 aa, Homo sapiens
MAVFLQLLPLLLSRAQGNPGASLDGRPGDRVNLSCGGVSHPIRWVWAPSFPACKGLSKGRRPILWASSSGTPTVPPLQPFVGRLRSLDSGIRRLELLLSAGDSGTFFCKGRHEDESRTVLHVLGDRTYCKAPGPTHGSVYPQLLIPLLGAGLVLGLGALGLVWWLHRRLPPQPIRPLPRFALSPPHSSTCENRAPEASKGGRAQDSRGPGPGTGKGMGMGRG

SEQ ID NO: 1467 - protein, 356 aa, Homo sapiens
MSRPLLITFTPATDPSDLWKDGQQQPQPEKPESTLDGAAARAFYEALIGDESSAPDSQRSQTEPARERKRKKRRIMKAPAAEAVAEGASGRHGQGRSLEAEDKMTHRILRAAQEGDLPELRRLLEPHEAGGAGGNINARDAFWWTPLMCAARAGQGAAVSYLLGRGAAWVGVCELSGRDAAQLAEEAGFPEVARMVRESHGETRSPENRSPTPSLQYCENCDTHFQDSNHRTSTAHLLSLSQGPQPPNLPLGVPISSPGFKLLLRGGWEPGMGLGPRGEGRANPIPTVLKRDQEGLGYRSAPQPRVTHFPAWDTRAVAGRERPPRVATLSWREERRREEKDRAWERDLRTYMNLEF

SEQ ID NO: 1468 - protein, 269 aa, Homo sapiens
MIRTLLLSTLVAGALSCGVSTYAPDMSRMLGGEEARPNSWPWQVSLQYSSNGQWYHTCGGSLIANSWVLTAAHCISSSGIYRVMLGQHNLYVAESGSLAVSVSKIVVHKDWNSDQVSKGNDIALLKLANPVSLTDKIQLACLPPAGTILPNNYPCYVTGWGRLQTNGALPDDLKQGQLLVVDYATCSSSGWWGSTVKTNMICAGGDGVICTCNGDSGGPLNCQASDGRWEVHGIGSLTSVLGCNYYYKPSIFTRVSNYNDWINSVIANN

SEQ ID NO: 1469 - protein, 2157 aa, Homo sapiens
MSDRSGPTAKGKDGKKYSSLNLFDTYKGKSLEIQKPAVAPRHGLQSLGKVAIARRMPPPANLPSLKAENKGNDPNVSLVPKDGTGWASKQEQSDPKSSDASTAQPPESQPLPASQTPASNQPKRPPAAPENTPLVPSGVKSWAQASVTHGAHGDGGRASSLLSRFSREEFPTLQAAGDQDKAAKERESAEQSSGPGPSLRPQNSTTWRDGGGRGPDELEGPDSKLHHGHDPRGGLQPSGPPQFPPYRGMMPPFMYPPYLPFPPPYGPQGPYRYPTPDGPSRFPRVAGPRGSGPPMRLVEPVGRPSILKEDNLKEFDQLDQENDDGWAGAHEEVDYTEKLKFSDEEDGRDSDEEGAEGHRDSQSASGEERPPEADGKKGNSPNSEPPTPKTAWAETSRPPETEPGPPAPKPPLPPPHRGPAGNWGPPGDYPDRGGPPCKPPAPEDEDEAWRQRRKQSSSEISLAVERARRRREEEERRMQEERRAACAEKLKRLDEKFGAPDKRLKAEPAAPPAAPSTPAPPPAVPKELPAPPAPPPASAPTPETEPEEPAQAPPAQSTPTPGVAAAPTLVSGGGSTSSTSSGSFEASPVEPQLPSKEGPEPPEEVPPPTTPPVPKVEPKGDGIGPTRQPPSQGLGYPKYQKSLPPRFQRQQQEQLLKQQQQHQWQQHQQGSAPPTPVPPSPPQPVTLGAVPAPQAPPPPPKALYPGALGRPPPMPPMNFDPRWMMIPPYVDPRLLQGRPPLDFYPPGVHPSGLVPRERSDSGGSSSEPFDRHAPAMLRERGTPPVDPKLAWVGDVFTATPAEPRPLTSPLRQAADEDDKGMRSETPPVPPPPPYLASYPGFPENGAPGPPISRFPLEEPGPRPLPWPPGSDEVAKIQTPPPKKEPPKEETAQLTGPEAGRKPARGVGSGGQGPPPPRRESRTETRWGPRPGSSRRGIPPEEPGAPPRRAGPIKKPPPPTKVEELPPKPLEQGDETPKPPKPDPLKITKGKLGGPKETPPNGNLSPAPRLRRDYSYERVGPTSCRGRGRGEYFARGRGFRGTYGGRGRGARSREFRSYREFRGDDGRGGGTGGPNHPPAPRGRTASETRSEGSEYEEIPKRRRQRGSETGSETHESDLAPSDKEAPTPKEGTLTQVPLAPPPPGAPPSPAPARFTARGGRVFTPRGVPSRRGRGGGRPPPQVCPGWSPPAKSLAPKKPPTGPLPPSKEPLKEKLIPGPLSPVARGGSNGGSNVGMEDGERPRRRRHGRAQQQDKPPRFRRLKQERENAARGSEGKPSLTLPASAPGPEEALTTVTVAPAPRRAAAKSPDLSNQNSDQANEEWETASESSDFTSERRGDKEAPPPVLLTPKAVGTPGGGGGGAVPGISAMSRGDLSQRAKDLSKRSFSSQRPGMERQNRRPGPGGKAGSSGSSSGGGGGGPGGRTGPGRGDKRSWPSPKNRSRPPEERPPGLPLPPPPPSSSAVFRLDQVIHSNPAGIQQALAQLSSRQGSVTAPGGHPRHKPGLPQAPQGPSPRPPTRYEPQRVNSGLSSDPHFEEPGPMVRGVGGTPRDSAGVSPFPPKRRERPPRKPELLQEESLPPPHSSGFLGSKPEGPGPQAESRDTGTEALTPHIWNRLHTATSRKSYRPSSMEPWMEPLSPFEDVAGTEMSQSDSGVDLSGDSQVSSGPCSQRSSPDGGLKGAAEGPPKRPGGSSPLNAVPCEGPPGSEPPRRPPPAPHDGDRKELPREQPLPPGPIGTERSQRTDRGTEPGPIRPSHRPGPPVQFGTSDKDSDLRLVVGDSLKAEKELTASVTEAIPVSRDWELLPSAAASAEPQSKNLDSGHCVPEPSSSGQRLYPEVFYGSAGPSSSQISGGAMDSQLHPNSGGFRPGTPSLHPYRSQPLYLPPGPAPPSALLSGLALKGQFLDFSTMQATELGKLPAGGVLYPPPSFLYSPAFCPSPLPDTSLLQVRQDLPSPSDFYSTPLQPGGQSGFLPSGAPAQQMLLPMVDSQLPVVNFGSLPPAPPPAPPPLSLLPVGPALQPPSLAVRPPPAPATRVLPSPARPFPASLGRAELHPVELKPFQDYQKLSSNLGGPGSSRTPPTGRSFSGLNSRLKATPSTYSGVFRTQRVDLYQQASPPDALRWIPKPWERTGPPPREGPSRRAEEPGSRGDKEPGLPPPR

SEQ ID NO: 1470 - protein, 294 aa, Homo sapiens
MRPRAPACAAAALGLCSLLLLLAPGHACPAGCACTDPHTVDCRDRGLPSVPDPFPLDVRKLLVAGNRIQRIPEDFFIFYGDLVYLDFRNNSLRSLEEGTFSGSAKLVFLDLSYNNLTQLGAGAFRSAGRLVKLSLANNNLVGVHEDAFETLESLQVLELNDNNLRSLSVAALAALPALRSLRLDGNPWLCDCDFAHLFSWIQENASKLPKGLDEIQCSLPMESRRISLRELSEASFSECRFSLSLTDLCIIIFSGVAVSIAAIISSFFLATVVQCLQRCAPNKDAEDEDEDKDD

SEQ ID NO: 1471 - protein, 1710 aa, Homo sapiens
MKKIFSKKGESPLGSFARRQRSSAGGGGEPGEGAYSQPGYHVRDRDLGKIHKAASAGNVAKVQQILLLRKNGLNDRDKMNRTALHLACANGHPEVVTLLVDRKCQLNVCDNENRTALMKAVQCQEEKCATILLEHGADPNLADVHGNTALHYAVYNEDISVATKLLLYDANIEAKNKDDLTPLLLAVSGKKQQMVEFLIKKKANVNAVDKLESSHQLISEYKEERIPKHSSQNSNSVDESSEDSLSRLSGKPGVDDSWPTSDDEDLNFDTKNVPKPSLAKLMTASQQSRKNLEATYGTVRTGNRTLFEDRDSDSQDEVVVESLPTTSIKVQCFSHPTYQSPDLLPKPSHKSLANPGLMKEEPTKPGIAKKENGIDIIESAPLEQTNNDNLTYVDEVHKNNRSDMMSALGLGQEEDIESPWDSESISENFPQKYVDPLAGAADGKEKNIGNEQAEDVFYIPSCMSGSRNFKMAKLEDTRNVGMPVAHMESPERYLHLKPTIEMKDSVPNKAGGMKDVQTSKAAEHDLEVASEEEQEREGSENNQPQVEEERKKHRNNEMEVSANIHDGATDDAEDDDDDDGLIQKRKSGETDHQQFPRKENKEYASSGPALQMKEVKSTEKEKRTSKESVNSPVFGKASLLTGGLLQVDDDSSLSEIDEDEGRPTKKTSNEKNKVKNQIQSMDDVDDLTQSSETASEDCELPHSSYKNFMLLIEQLGMECKDSVSLLKIQDAALSCERLLELKKNHCELLTVKIKKMEDKVNVLQRELSETKEIKSQLEHQKVEWERELCSLRFSLNQEEEKRRNADTLYEKIREQLRRKEEQYRKEVEVKQQLELSLQTLEMELRTVKSNLNQVVQERNDAQRQLSREQNARMLQDGILTNHLSKQKEIEMAQKKMNSENSHSHEEEKDLSHKNSMLQEEIAMLRLEIDTIKNQNQEKEKKCFEDLKIVKEKNEDLQKTIKQNEETLTQTISQYNGRLSVLTAENAMLNSKLENEKQSKERLEAEVESYHSRLAAAIHDRDQSETSKRELELAFQRARDECSRLQDKMNFDVSNLKDNNEILSQQLFKTESKLNSLEIEFHHTRDALREKTLGLERVQKDLSQTQCQMKEMEQKYQNEQVKVNKYIGKQESVEERLSQLQSENMLLRQQLDDAHNKADNKEKTVINIQDQFHAIVQKLQAESEKQSLLLEERNKELISECNHLKERQYQYENEKAEREVVVRQLQQELADTLKKQSMSEASLEVTSRYRINLEDETQDLKKKLGQIRNQLQEAQDRHTEAVRCAEKMQDHKQKLEKDNAKLKVTVKKQMDKIEELQKNLLNANLSEDEKEQLKKLMELKQSLECNLDQEMKKNVELEREITGFKNLLKMTRKKLNEYENGEFSFHGDLKTSQFEMDIQINKLKHKIDDLTAELETAGSKCLHLDTKNQILQEELLSMKTVQKKCEKLQKNKKKLEQEVINLRSHIERNMVELGQVKQYKQEIEERARQEIAEKLKEVNLFLQAQAASQENLEQFRENNFASMKSQMELRIKDLESELSKIKTSQEDFNKTELEKYKQLYLEELKVRKSLSSKLTKTNERLAEVNTKLLVEKQQSRSLFTTLTTRPVMEPPCVGNLNNSLDLNRKLIPRENLVISTSNPRASNNSMENYLSKMQQELEKNITRELKEAAAELESGSIASPLGSTDESNLNQDLVWKASREYVQVLKKNYMI

SEQ ID NO: 1472 - protein, 351 aa, Homo sapiens
MSIVTVQLGQCGNQIGFEVFDALLSDSHSSQGLCSMRENEAYQASCKERFFSEEENGVPIARAVLVDMEPKVINQMLSKAAQSGQWKYGQHACFCQKQGSGNNWAYGYSVHGPRHEESIMNIIRKEVEKCDSFSGFFIIMSMAGGTGSGLGAFVTQNLEDQYSNSLKMNQIIWPYGTGEVIVQNYNSILTLSHLYRSSDALLLHENDAIHKICAKLMNIKQISFSDINQVLAHQLGSVFQPTYSAESSFHYRRNPLEGFKDPALYTSWLKPVNAFNVWKTQRAFSKYEKSAVLVSNSQFLVKPLDMIVGKAWNMFASKAYIHQYTKFGIEEEDFLDSFTSLEQVVASYCNL

SEQ ID NO: 1473 - protein, 119 aa, Homo sapiens
MVLPLPWLSRYHFLRLLLPSWSLAPQGSHGCCSQNPKASMEEQTSSRGNGKMTSPPRGPGTHRTAELARAEELLEQQLELYQALLEGQEGAWEAQALVLKIQKLKEQMRRHQESLGGGA

SEQ ID NO: 1474 - protein, 293 aa, Homo sapiens
MASNVTNKMDPHSMNSRVFIGNLNTLVVKKSDVEAIFSKYGKIAGCSVHKGFAFVQYDKEKNARAAVAGEDGRMIASQVVDINLAAEPKVNRGNAGVKRSAAEMYGSSFDLDYGFQRDYYDGMYSFPARVPPPPPIALAVVPSKRQRLSGNTSRRGKSGFNSKSGKRGSSKSGKLKGDDLQAIKQELTQIKQKVDSLLENLEKIEKEQSKQEVEVKNAKSEEEQSSSSMKKDETHVKMESEGGAEDSAEEGDPLDDDVNEDQGDDQLELIKDDEKEAEEGEDDRDSTNGQDDS

SEQ ID NO: 1475 - protein, 366 aa, Homo sapiens
MRVMAPRALLLLLSGGLALTETWACSHSMRYFDTAVSRPGRGEPRFISVGYVDDTQFVRFDSDAASPRGEPRAPWVEQEGPEYWDRETQKYKRQAQADRVSLRNLRGYYNQSEDGSHTLQRMSGCDLGPDGRLLRGYDQSAYDGKDYIALNEDLRSWTAADTAAQITQRKLEAARAAEQLRAYLEGTCVEWLRRYLENGKETLQRAEPPKTHVTHHPLSDHEATLRCWALGFYPAEITLTWQRDGEDQTQDTELVETRPAGDGTFQKWAAVVVPSGQEQRYTCHMQHEGLQEPLTLSWEPSSQPTIPIMGIVAGLAVLVVLAVLGAVVTAMMCRRKSSGGKGGSCSQAACSNSAQGSDESLITCKA

SEQ ID NO: 1476 - protein, 131 aa, Homo sapiens
MRVMAPRALLLLLSGGLALTETWACSHSMRYFDTAVSRPGRGEPRFISVGYVDDTQFVRFDSDAASPRGEPRAPWVEQEGPEYWDRETQKYKRQAQADRVSLRNLRGYYNQSEDEDVWLRPGARRAPPPRV

SEQ ID NO: 1477 - protein, 691 aa, Homo sapiens
MELRSTAAPRAEGYSNVGFQNEENFLENENTSGNNSIRSRAVQSREHTNTKQDEEQVTVEQDSPRNREHMEDDDEEMQQKGCLERRYDTVCGFCRKHKTTLRHIIWGILLAGYLVMVISACVLNFHRALPLFVITVAAIFFVVWDHLMAKYEHRIDEMLSPGRRLLNSHWFWLKWVIWSSLVLAVIFWLAFDTAKLGQQQLVSFGGLIMYIVLLFLFSKYPTRVYWRPVLWGIGLQFLLGLLILRTDPGFIAFDWLGRQVQTFLEYTDAGASFVFGEKYKDHFFAFKVLPIVVFFSTVMSMLYYLGLMQWIIRKVGWIMLVTTGSSPIESVVASGNIFVGQTESPLLVRPYLPYITKSELHAIMTAGFSTIAGSVLGAYISFGVPSSHLLTASVMSAPASLAAAKLFWPETEKPKITLKNAMKMESGDSGNLLEAATQGASSSISLVANIAVNLIAFLALLSFMNSALSWFGNMFDYPQLSFELICSYIFMPFSFMMGVEWQDSFMVARLIGYKTFFNEFVAYEHLSKWIHLRKEGGPKFVNGVQQYISIRSEIIATYALCGFANIGSLGIVIGGLTSMAPSRKRDIASGAVRALIAGTVACFMTACIAGILSSTPVDINCHHVLENAFNSTFPGNTTKVIACCQSLLSSTVAKGPGEVIPGGNHSLYSLKGCCTLLNPSTFNCNGISNTF

SEQ ID NO: 1478 - protein, 345 aa, Homo sapiens
MLPCFQLLRIGGGRGGDLYTFHPPAGAGCTYRLGHRADLCDVALRPQQEPGLISGIHAELHAEPRGDDWRVSLEDHSSQGTLVNNVRLPRGHRLELSDGDLLTFGPEGPPGTSPSEFYFMFQQVRVKPQDFAAITIPRSRGEARVGAGFRPMLPSQGAPQRPLSTFSPAPKATLILNSIGSLSKLRPQPLTFSPSWGGPKSLPVPAPPGEMGTTPSAPPQRNRRKSVHRVLAELDDESEPPENPPPVLMEPRKKLRVDKAPLTPTGNRRGRPRKYPVSAPMAPPAVGGGEPCAAPCCCLPQEETVAWVQCDGCDVWFHVACVGCSIQAAREADFRCPGCRAGIQT

SEQ ID NO: 1479 - protein, 782 aa, Homo sapiens
MFPPSGSTGLIPPSHFQARPLSTLPRMAPTWLSDIPLVQPPGHQDVSERRLDTQRPQVTMWERDVSSDRQEPGRRGRSWGLEGSQALSQQAEVIVRQLQELRRLEEEVRLLRETSLQQKMRLEAQAMELEALARAEKAGRAEAEGLRAALAGAEVVRKNLEEGSQRELEEVQRLHQEQLSSLTQAHEEALSSLTSKAEGLEKSLSSLETRRAGEAKELAEAQREAELLRKQLSKTQEDLEAQVTLVENLRKYVGEQVPSEVHSQTWELERQKLLETMQHLQEDRDSLHATAELLQVRVQSLTHILALQEEELTRKVQPSDSLEPEFTRKCQSLLNRWREKVFALMVQLKAQELEHSDSVKQLKGQVASLQEKVTSQSQEQAILQRSLQDKAAEVEVERMGAKGLQLELSRAQEARRRWQQQTASAEEQLRLVVNAVSSSQIWLETTMAKVEGAAAQLPSLNNRLSYAVRKVHTIRGLIARKLALAQLRQESCPLPPPVTDVSLELQQLREERNRLDAELQLSARLIQQEVGRAREQGEAERQQLSKVAQQLEQELQQTQESLASLGLQLEVARQGQQESTEEAASLRQELTQQQELYGQALQEKVAEVETRLREQLSDTERRLNEARREHAKAVVSLRQIQRRAAQEKERSQELRRLQEEARKEEGQRLARRLQELERDKNLMLATLQQEGLLSRYKQQRLLTVLPSLLDKKKSVVSSPRPPECSASAPVAAAVPTRESIKGSLSVLLDDLQDLSEAISKEEAVCQGDNLDRCSSSNPQMSS

SEQ ID NO: 1480 - protein, 529 aa, Homo sapiens
MGSSRAPWMGRVGGHGMMALLLAGLLLPGTLAKSIGTFSDPCKDPTRITSPNDPCLTGKGDSSGFSSYSGSSSSGSSISSARSSGGGSSGSSSGSSIAQGGSAGSFKPGTGYSQVSYSSGSGSSLQGASGSSQLGSSSSHSGNSGSHSGSSSSHSSSSSSFQFSSSSFQVGNGSALPTNDNSYRGILNPSQPGQSSSSSQTFGVSSSGQSVSSNQRPCSSDIPDSPCSGGPIVSHSGPYIPSSHSVSGGQRPVVVVVDQHGSGAPGVVQGPPCSNGGLPGKPCPPITSVDKSYGGYEVVGGSSDSYLVPGMTYSKGKIYPVGYFTKENPVKGSPGVPSFAAGPPISEGKYFSSNPIIPSQSAASSAIAFQPVGTGGVQLCGGGSTGSKGPCSPSSSRVPSSSSISSSSGLPYHPCGSASQSPCSPPGTGSFSSSSSSQSSGKIILQPCGSKSSSSGHPCMSVSSLTLTGGPDGSPHPDPSAGAKPCGSSSAGKIPCRSIRDILAQVKPLGPQLADPEVFLPQGELLNSP

SEQ ID NO: 1481 - protein, 566 aa, Homo sapiens
MKMQKGNVLLMFGLLLHLEAATNSNETSTSANTGSSVISSGASTATNSGSSVTSSGVSTATISGSSVTSNGVSIVTNSEFHTTSSGISTATNSEFSTVSSGISIATNSESSTTSSGASTATNSESSTPSSGASTATNSDSSTTSSGASTATNSDSSTTSSEASTATNSESSTTSSGASTATNSESSTVSSRASTATNSESSTTSSGASTATNSESRTTSNGAGTATNSESSTTSSGASTATNSESSTPSSGAGTATNSESSTTSSGAGTATNSESSTVSSGISTVTNSESSTPSSGANTATNSESSTTSSGANTATNSDSSTTSSGASTATNSESSTTSSGASTATNSESSTTSSGASTATNSGSSTTSSGTSTATNSESSTVSSGASTATTSESSTTSSGASTATNSESSTVSSGASTATNSESSTTSSGANTATNSGSSVTSAGSGTAALTGMHTTSHSASTAVSEAKPGGSLVPWEIFLITLVSVVAAVGLFAGLFFCVRNSLSLRNTFNTAVYHPHGLNHGLGPGPGGNHGAPHRPRWSPNWFWRRPVSSIAMEMSGRNSGP

SEQ ID NO: 1482 - protein, 631 aa, Homo sapiens
MGLPRGPEGQGLPEVETREDEEQNVKLTEILELLVAAGYFRARIKGLSPFDKVVGGMTWCITTCNFDVDVDLLFQENSTIGQKIALSEKIVSVLPRMKCPHQLEPHQIQGMDFIHIFPVVQWLVKRAIETKEEMGDYIRSYSVSQFQKTYSLPEDDDFIKRKEKAIKTVVDLSEVYKPRRKYKRHQGAEELLDEESRIHATLLEYGRRYGFSRQSKMEKAEDKKTALPAGLSATEKADAHEEDELRAAEEQRIQSLMTKMTAMANEESRLTASSVGQIVGLCSAEIKQIVSEYAEKQSELSAEESPEKLGTSQLHRRKVISLNKQIAQKTKHLEELRASHTSLQARYNEAKKTLTELKTYSEKLDKEQAALEKIESKADPSILQNLRALVAMNENLKSQEQEFKAHCREEMTRLQQEIENLKAERAPRGDEKTLSSGEPPGTLTSAMTHDEDLDRRYNMEKEKLYKIRLLQARRNREIAILHRKIDEVPSRAELIQYQKRFIELYRQISAVHKETKQFFTLYNTLDDKKVYLEKEISLLNSIHENFSQAMASPAARDQFLRQMEQIVEGIKQSRMKMEKKKQENKMRRDQLNDQYLELLEKQRLYFKTVKEFKEEGRKNEMLLSKVKAKAS

SEQ ID NO: 1483 - protein, 151 aa, Homo sapiens
MSSFSTTTVSFLLLLAFQLLGQTRANPMYNAVSNADLMDFKNLLDHLEEKMPLEDEVVPPQVLSEPNEEAGAALSPLPEVPPWTGEVSPAQRDGGALGRGPWDSSDRSALLKSKLRALLTAPRSLRRSSCFGGRMDRIGAQSGLGCNSFRY

SEQ ID NO: 1484 - protein, 229 aa, Homo sapiens
MVNEARGNSSLNPCLEGSASSGSESSKDSSRCSTPGLDPERHERLREKMRRRLESGDKWFSLEFFPPRTAEGAVNLISRFDRMAAGGPLYIDVTWHPAGDPGSDKETSSMMIASTAVNYCGLETILHMTCCRQRLEEITGHLHKAKQLGLKNIMALRGDPIGDQWEEEEGGFNYAVDLVKHIRSEFGDYFDICVAGYPKGHPEAGSFEADLKHLKEKVSAGADFIITQL

SEQ ID NO: 1485 - protein, 406 aa, Homo sapiens
MATPGNLGSSVLASKTKTKKKHFVAQKVKLFRASDPLLSVLMWGVNHSINELSHVQIPVMLMPDDFKAYSKIKVDNHLFNKENMPSHFKFKEYCPMVFRNLRERFGIDDQDFQNSLTRSAPLPNDSQARSGARFHTSYDKRYIIKTITSEDVAEMHNILKKYHQYIVECHGITLLPQFLGMYRLNVDGVEIYVIVTRNVFSHRLSVYRKYDLKGSTVAREASDKEKAKELPTLKDNDFINEGQKIYIDDNNKKVFLEKLKKDVEFLAQLKLMDYSLLVGIHDVERAEQEEVECEENDGEEEGESDGTHPVGTPPDSPGNTLNSSPPLAPGEFDPNIDVYGIKCHENSPRKEVYFMAIIDILTHYDAKKKAAHAAKTVKHGAGAEISTVNPEQYSKRFLDFIGHILT

SEQ ID NO: 1486 - protein, 697 aa, Homo sapiens
MDHRKARVLPAGHYCPSLGIWASQVGSVRSSVPPSISRNPAMVNEARGNSSLNPCLEGSASSGSESSKDSSRCSTPGLDPERHERLREKMRRRLESGDKWFSLEFFPPRTAEGAVNLISRFDRMAAGGPLYIDVTWHPAGDPGSDKETSSMMIASTAVNYCGLETILHMTCCRQRLEEITGHLHKAKQLGLKNIMALRGDPIGDQWEEEEGGFNYAVDLVKHIRSEFGDYFDICVAGYPKGHPEAGSFEADLKHLKEKVSAGADFIITQLFFEADTFFRFVKACTDMGITCPIVPGIFPIQGYHSLRQLVKLSKLEVPQEIKDVIEPIKDNDAAIRNYGIELAVSLCQELLASGLVPGLHFYTLNREMATTEVLKRLGMWTEDPRRPLPWALSAHPKRREEDVRPIFWASRPKSYIYRTQEWDEFPNGRWGNSSSPAFGELKDYYLFYLKSKSPKEELLKMWGEELTSEESVFEVFVLYLSGEPNRNGHKVTCLPWNDEPLAAETSLLKEELLRVNRQGILTINSQPNINGKPSSDPIVGWGPSGGYVFQKAYLEFFTSRETAEALLQVLKKYELRVNYHLVNVKGENITNAPELQPNAVTWGIFPGREIIQPTVVDPVSFMFWKDEAFALWIERWGKLYEEESPSRTIIQYIHDNYFLVNLVDNDFPLDNCLWQVVEDTLELLNRPTQNARETEAP

SEQ ID NO: 1487 - protein, 656 aa, Homo sapiens [sequence omitted]

SEQ ID NO: 1488 - protein, 480 aa, Homo sapiens
MAHVGDCTQTPWLPVLVVSLMCSARAEYSNCGENEYYNQTTGLCQECPPCGPGEEPYLSCGYGTKDEDYGCVPCPAEKFSKGGYQICRRHKDCEGFFRATVLTPGDMENDAECGPCLPGYYMLENRPRNIYGMVCYSCLLAPPNTKECVGATSGASANFPGTSGSSTLSPFQHAHKELSGQGHLATALIIAMSTIFIMAIAIVLIIMFYILKTKPSAPGDGPHAPVPCFLDSPSTPPVGEPGCSLPPLSPACCTSHPGKSVEAQVSKDEEKKEAPDNVVMFSEKDEFEKLTATPAKPTKSENDASSENEQLLSRSVDSDEEPAPDKQGSPELCLLSLVHLAREKSATSNKSAGIQSRRKKILDVYANVCGVVEGLSPTELPFDCLEKTSRMLSSTYNSEKAVVKTWRHLAESFGLKRDEIGGMTDGMQLFDRISTAGYSIPELLTKLVQIERLDAVESLCADILEWAGVVPPASQPHAAS

SEQ ID NO: 1489 - protein, 484 aa, Homo sapiens
MKKGIRYETSRKTSYIFQQPQHGPWQTRMRKISNHGSLRVAKVAYPLGLCVGVFIYVAYIKWHRATATQAFFSITRAAPGARWGQQAHSPLGTAADGHEVFYGIMFDAGSTGTRVHVFQFTRPPRETPTLTHETFKALKPGLSAYADDVEKSAQGIRELLDVAKQDIPFDFWKATPLVLKATAGLRLLPGEKAQKLLQKVKKVFKASPFLVGDDCVSIMNGTDEGVSAWITINFLTGSLKTPGGSSVGMLDLGGGSTQIAFLPRVEGTLQASPPGYLTALRMFNRTYKLYSYSYLGLGLMSARLAILGGVEGQPAKDGKELVSPCLSPSFKGEWEHAEVTYRVSGQKAAASLHELCAARVSEVLQNRVHRTEEVKHVDFYAFSYYYDLAAGVGLIDAEKGGSLVVGDFEIAAKYVCRTLETQPQSSPFSCMDLTYVSLLLQEFGFPRSKVLKLTRKIDNVETSWALGAIFHYIDSLNRQKSPAS

SEQ ID NO: 1490 - protein, 294 aa, Homo sapiens
VLKATAGLRLLPGEKAQKLLQKVKKVFKASPFLVGDDCVSIMNGTDEGVSAWITINFLTGSLKTPGGSSVGMLDLGGGSTQIAFLPRVEGTLQASPPGYLTALRMFNRTYKLYSYSYLGLGLMSARLAILGGVEGQPAKDGKELVSPCLSPSFKGEWEHAEVTYRVSGQKAAASLHELCAARVSEVLQNRVHRTEEVKHVDFYAFSYYYDLAAGVGLIDAEKGGSLVVGDFEIAAKYGGSHLEREGTCLIPSVSDPGDTAAEQPLLMHGPHLRQPATPGVRLSQEQSAEAHSEN

SEQ ID NO: 1491 - protein, 465 aa, Homo sapiens [sequence omitted]

SEQ ID NO: 1492 - protein, 425 aa, Homo sapiens
MASGQFVNKLQEEVICPICLDILQKPVTIDCGHNFCLKCITQIGETSCGFFKCPLCKTSVRKNAIRFNSLLRNLVEKIQALQASEVQSKRKEATCPRHQEMFHYFCEDDGKFLCFVCRESKDHKSHNVSLIEEAAQNYQGQIQEQIQVLQQKEKETVQVKAQGVHRVDVFTDQVEHEKQRILTEFELLHQVLEEEKNFLLSRIYWLGHEGTEAGKHYVASTEPQLNDLKKLVDSLKTKQNMPPRQLLEDIKVVLCRSEEFQFLNPTPVPLELEKKLSEAKSRHDSITGSLKKFKDQLQADRKKDENRFFKSMNKNDMKSWGLLQKNNHKMNKTSEPGSSSAGGRTTSGPPNHHSSAPSHSLFRASSAGKVTFPVCLLASYDEISGQGASSQDTKTFDVALSEELHAALSEWLTAIRAWFCEVPSS

SEQ ID NO: 1493 - protein, 354 aa, Homo sapiens
MWWRDLTRLRLWLKREAIPGEGRKAAKVNAGVGEKGIYTASSRGGPPSARSKAVTVVAEGAASRSWLSMDAPELGPGLVERLEQLATCPLCGGSFEDPVLLACEHSFCRACLARRWGTPPATGTEASPTACPCCGLPCPRRSLRSNVRLAVEVRISRELREKLAEPGARAGRRRGGRIPTMGCLDLPGEDMRKTWRRFEVPTSKSSNSEDDLPEDYPVVKKMLHRLTADLTLDPGTAHRRLLISADRRSVQLAPPGTPAPPDGPKRFDQLPAVLGAQGFGAGRHCWEVETADAASCRDSSGEDADDEESHYAVGAAGESVQRKGCAPGPLGERIFPLFCTCDPRAPLRIVPAES

SEQ ID NO: 1494 - protein, 299 aa, Homo sapiens
MAVMAPRTLLLLLSGALALTQTWAGSHSMRYFFTSVSRPGRGEPRFIAVGYVDDTQFVRFDSDAASQRMEPRAPWIEQEGPEYWDQETRNVKAQSQTDRVDLGTLRGYYNQSEAGSHTIQIMYGCDVGSDGRFLRGYRQDAYDGKDYIALNEDLRSWTAADMAAQITKRKWEAAHEAEQLRAYLDGTCVEWLRRYLENGKETLQRTDPPKTHMTHHPISDHEATLRCWALGFYPAEITLTWQRDGEDQTQDTELVETRPAGDGTFQKWAAVVVPSGEEQRYTCHVQHEGLPKPLTLRWV

SEQ ID NO: 1495 - protein, 371 aa, Homo sapiens
MAVMAPRTLLLLLSGALALTQTWAGSHSMRYFFTSVSRPGRGEPRFIAVGYVDDTQFVRFDSDAASQRMEPRAPWIEQEGPEYWDQETRNVKAQSQTDRVDLGTLRGYYNQSEAGSHTIQIMYGCDVGSDGRFLRGYRQDAYDGKDYIALNEDLRSWTAADMAAQITKRKWEAAHEAEQLRAYLDGTCVEWLRRYLENGKETLQRTDPPKTHMTHHPISDHEATLRCWALGFYPAEITLTWQRDGEDQTQDTELVETRPAGDGTFQKWAAVVVPSGEEQRYTCHVQHEGLPKPLTLRWELSSQPTIPIVGIIAGLVLLGAVITGAVVAAVMWRRKSSGGEGVKDRKGGSYTQAASSDSAQGSDVSLTACKV

SEQ ID NO: 1496 - protein, 365 aa, Homo sapiens
MAVMAPRTLLLLLSGALALTQTWAGSHSMRYFFTSVSRPGRGEPRFIAVGYVDDTQFVRFDSDAASQRMEPRAPWIEQEGPEYWDQETRNVKAQSQTDRVDLGTLRGYYNQSEAGSHTIQIMYGCDVGSDGRFLRGYRQDAYDGKDYIALNEDLRSWTAADMAAQITKRKWEAAHEAEQLRAYLDGTCVEWLRRYLENGKETLQRTDPPKTHMTHHPISDHEATLRCWALGFYPAEITLTWQRDGEDQTQDTELVETRPAGDGTFQKWAAVVVPSGEEQRYTCHVQHEGLPKPLTLRWELSSQPTIPIVGIIAGLVLLGAVITGAVVAAVMWRRKSSDRKGGSYTQAASSDSAQGSDVSLTACKV

SEQ ID NO: 1497 - protein, 1383 aa, Homo sapiens
MYATDSRGHSPAFLQPQNGNSRHPSGYVPGKVVPLRPPPPPKSQASAKFTSIRREDRATFAFSPEEQQAQRESQKQKRHKNTFICFAITSFSFFIALAIILGISSKYAPDENCPDQNPRLRNWDPGQDSAKQVVIKEGDMLRLTSDATVHSIVIQDGGLLVFGDNKDGSRNITLRTHYILIQDGGALHIGAEKCRYKSKATITLYGKSDEGESMPTFGKKFIGVEAGGTLELHGARKASWTLLARTLNSSGLPFGSYTFEKDFSRGLNVRVIDQDTAKILESERFDTHEYRNESRRLQEFLRFQDPGRIVAIAVGDSAAKSLLQGTIQMIQERLGSELIQGLGYRQAWALVGVIDGGSTSCNESVRNYENHSSGGKALAQREFYTVDGQKFSVTAYSEWIEGVSLSGFRVEVVDGVKLNLLDDVSSWKPGDQIVVASTDYSMYQAEEFTLLPCSECSHFQVKVKETPQFLHMGEIIDGVDMRAEVGILTRNIVIQGEVEDSCYAENQCQFFDYDTFGGHIMIMKNFTSVHLSYVELKHMGQQQMGRYPVHFHLCGDVDYKGGYRHATFVDGLSIHHSFSRCITVHGTNGLLIKDTIGFDTLGHCFFLEDGIEQRNTLFHNLGLLTKPGTLLPTDRNNSMCTTMRDKVFGNYIPVPATDCMAVSTFWIAHPNNNLINNAAAGSQDAGIWYLFHKEPTGESSGLQLLAKPELTPLGIFYNNRVHSNFKAGLFIDKGVKTTNSSAADPREYLCLDNSARFRPHQDANPEKPRVAALIDRLIAFKNNDNGAWVRGGDIIVQNSAFADNGIGLTFASDGSFPSDEGSSQEVSESLFVGESRNYGFQGGQNKYVGTGGIDQKPRTLPRNRTFPIRGFQIYDGPIHLTRSTFKKYVPTPDRYSSAIGFLMKNSWQITPRNNISLVKFGPHVSLNVFFGKPGPWFEDCEMDGDKNSIFHDIDGSVTGYKDAYVGRMDNYLIRHPSCVNVSKWNAVICSGTYAQVYVQTWSTQNLSMTITRDEYPSNPMVLRGINQKAAFPQYQPVVMLEKGYTIHWNGPAPRTTFLYLVNFNKNDWIRVGLCYPSNTSFQVTFGYLQRQNGSLSKIEEYEPVHSLEELQRKQSERKFYFDSSTGLLFLYLKAKSHRHGHSYCSSQGCERVKIQAATDSKDISNCMAKAYPQYYRKPSVVKRMPAMLTGLCQGCGTRQVVFTSDPHKSYLPVQFQSPDKAETQRGDPSVISVNGTDFTFRSAGVLLLVVDPCSVPFRLTEKTVFPLADVSRIEEYLKTGIPPRSIVLLSTRGEIKQLNISHLLVPLGLAKPAHLYDKGSTIFLGFSGNFKPSWTKLFTSPAGQGLGVLEQFIPLQLDEYGCPRATTVRRRDLELLKQASKAH

SEQ ID NO: 1498 - protein, 1014 aa, Homo sapiens
MRVPVFEDIKDETEEEKIGEEENEEDQVFYKPVIEDLSMELARKCTELISDIRYKEEFKKSKDKCTFVTDSPMLNHVKNIGAFISEAKYKGTIKADLSNSLYKRMPATIDSVFAGEVTQLQSEVAYKQKHDAAKGFSDYAHMKEPPEVKHAMEVNKHQSNISYRKDVQDTHTYSAELDRPDIKMATQISKIISNAEYKKGQGIMNKEPAVIGRPDFEHAVEASKLSSQIKYKEKFDNEMKDKKHHYNPLESASFRQNQLAATLASNVKYKKDIQNMHDPVSDLPNLLFLDHVLKASKMLSGREYKKLFEENKGMYHFDADAVEHLHHKGNAVLQSQVKYKEEYEKNKGKPMLEFVETPSYQASKEAQKMQSEKVYKEDFEKEIKGRSSLDLDKTPEFLHVKYITNLLREKEYKKDLENEIKGKGMELNSEVLDIQRAKRASEMASEKEYKKDLESIIKGKGMQAGTDTLEMQHAKKAAEIASEKDYKRDLETEIKGKGMQVSTDTLDVQRAKKASEMASQKQYKKDLENEIKGKGMQVSMDIPDILRAKRTSEIYSQRKYKDEAEKMLSNYSTIADTPEIQRIKTTQQNISAVFYKKEVGAGTAVKDSPEIERVKKNQQNISSVKYKEEIKHATAISDPPELKRVKENQKNISNLQYKEQNYKATPVSMTPEIERVRRNQEQLSAVKYKGELQRGTAISDPPELKRAKENQKNISNVYYRGQLGRATTLSVTPEMERVKKNQENISSVKYTQDHKQMKGRPSLILDTPAMRHVKEAQNHISMVKYHEDFEKTKGRGFTPVVDDPVTERVRKNTQVVSDAAYKGVHPHIVEMDRRPGIIVDLKVWRTDPGSIFDLDPLEDNIQSRSLHMLSEKASHYRRHWSRSHSSSTFGTGLGDDRSEISEIYPSFSCCSEVTRPSDEGAPVLPGAYQQSHSQGYGYMHQTSVSSMRSMQHSPNLRTYRAMYDYSAQDEDEVSFRDGDYIVNVQPIDDGWMYGTVQRTGRTGMLPANYIEFVN

SEQ ID NO: 1499 - protein, 281 aa, Homo sapiens
MVLAPLPDPGPPSLAVAPEPCPQPLRSPSLDNPTPFPNLGPSENPLKRLLVPGEEWEFEVTAFYRGRQVFQQTISCPEGLRLVGSEVGDRTLPGWPVTLPDPGMSLTDRGVMSYVRHVLSCLGGGLALWRAGQWLWAQRLGHCHTYWAVSEELLPNSGHGPDGEVPKDKEGGVFDLGPFIVDLITFTEGSGRSPRYALWFCVGESWPQDQPWTKRLVMVKVVPTCLRALVEMARVGGASSLENTVDLHISNSHPLSLTSDQYKAYLQDLVEGMDFQGPGES

SEQ ID NO: 1500 - protein, 273 aa, Homo sapiens
MRLLVLLWGCLLLPGYEALEGPEEISGFEGDTVSLQCTYREELRDHRKYWCRKGGILFSRCSGTIYAEEEGQETMKGRVSIRDSRQELSLIVTLWNLTLQDAGEYWCGVEKRGPDESLLISLFVFPASPGLYPAATTAKQGKTGAEAPPLPGTSQYGHERTSQYTGTSPHPATSPPAGSSRPPMQLDSTSAEDTSPALSSGSSKPRVSIPMVRILAPVLVLLSLLSAAGLIAFCSHLLLWRKEAQQATETQRNEKFCLSRLNSLMFSLSLPWL

SEQ ID NO: 1501 - protein, 1642 aa, Homo sapiens
MASGSRWRPTPPPLLLLLLLALAARADGLEFGGGPGQWARYARWAGAASSGELSFSLRTNATRALLLYLDDGGDCDFLELLLVDGRLRLRFTLSCAEPATLQLDTPVADDRWHMVLLTRDARRTALAVDGEARAAEVRSKRREMQVASDLFVGGIPPDVRLSALTLSTVKYEPPFRGLLANLKLGERPPALLGSQGLRGATADPLCAPARNPCANGGLCTVLAPGEVGCDCSHTGFGGKFCSEEEHPMEGPAHLTLNSEGKEEFVATFKGNEFFCYDLSHNPIQSSTDEITLAFRTLQRNGLMLHTGKSADYVNLSLKSGAVWLVINLGSGAFEALVEPVNGKFNDNAWHDVRVTRNLRQHAGIGHAMVTISVDGILTTTGYTQEDYTMLGSDDFFYIGGSPNTADLPGSPVSNNFMGCLKDVVYKNNDFKLELSRLAKEGDPKMKLQGDLSFRCEDVAALDPVTFESPEAFVALPRWSAKRTGSISLDFRTTEPNGLLLFSQGRRAGGGAGSHSSAQRADYFAMELLDGHLYLLLDMGSGGIKLRASSRKVNDGEWCHVDFQRDGRKGSISVNSRSTPFLATGDSEILDLESELYLGGLPEGGRVDLPLPPEVWTAALRAGYVGCVRDLFIDGRSRDLRGLAEAQGAVGVAPFCSRETLKQCASAPCRNGGVCREGWNRFICDCIGTGFLGRVCEREATVLSYDGSMYMKIMLPNAMHTEAEDVSLRFMSQRAYGLMMATTSRESADTLRLELDGGQMKLTVNLGKGPETLFAGHKLNDNEWHTVRVVRRGKSLQLSVDNVTVEGQMAGAHMRLEFHNIETGIMTERRFISVVPSNFIGHLSGLVFNGQPYMDQCKDGDITYCELNARFGLRAIVADPVTFKSRSSYLALATLQAYASMHLFFQFKTTAPDGLLLFNSGNGNDFIVIELVKGYIHYVFDLGNGPSLMKGNSDKPVNDNQWHNVVVSRDPGNVHTLKIDSRTVTQHSNGARNLDLKGELYIGGLSKNMFSNLPKLVASRDGFQGCLASVDLNGRLPDLIADALHRIGQVERGCDGPSTTCTEESCANQGVCLQQWDGFTCDCTMTSYGGPVCNDPGTTYIFGKGGALITYTWPPNDRPSTRMDRLAVGFSTHQRSAVLVRVDSASGLGDYLQLHIDQGTVGVIFNVGTDDITIDEPNAIVSDGKYHVVRFTRSGGNATLQVDSWPVNERYPAGRQLTIFNSQAAIKIGGRDQGRPFQGQVSGLYYNGLKVLALAAESDPNVRTEGHLRLVGEGPSVLLSAETTATTLLADMATTIMETTTTMATTTTRRGRSPTLRDSTTQNTDDLLVASAECPSDDEDLEECEPSTGGELILPIITEDSLDPPPVATRSPFVPPPPTFYPFLTGVGATQDTLPPPAARRPPSGGPCQAERDDSDCEEPIEASGFASGEVFDSSLPPTDDEDFYTTFPLVTDRTTLLSPRKPAPRPNLRTDGATGAPGVLFAPSAPAPNLPAGKMNHRDPLQPLLENPPLGPGAPTSFEPRRPPPLRPGVTSAPGFPHLPTANPTGPGERGPPGAVEVIRESSSTTGMVVGIVAAAALCILILLYAMYKYRNRDEGSYQVDQSRNYISNSAQSNGAVVKEKAPAAPKTPSKAKKNKDKEYYV

SEQ ID NO: 1502 - protein, 445 aa, Homo sapiens
MAFSELLDLVGGLGRFQVLQTMALMVSIMWLCTQSMLENFSAAVPSHRCWAPLLDNSTAQASILGSLSPEALLAISIPPGPNQRPHQCRRFRQPQWQLLDPNATATSWSEADTEPCVDGWVYDRSIFTSTIVAKWNLVCDSHALKPMAQSIYLAGILVGAAACGPASDRWLAESARWLLTTGRLDWGLQELWRVAAINGKGAVQDTLTPEVLLSAMREELSMGQPPASLGTLLRMPGLRFRTCISTLCWFAFGFTFFGLALDLQALGSNIFLLQMFIGVVDIPAKMGALLLLSHLGRRPTLAASLLLAGLCILANTLVPHEMGALRSALAVLGLGGVGAAFTCITIYSSELFPTVLRMTAVGLGQMAARGGAILGPLVRLLGVHGPWLPLLVYGTVPVLSGLAALLLPETQSLPLPDTIQDVQNQAVKKATHGTLGNSVLKSTQF

SEQ ID NO: 1503 - protein, 553 aa, Homo sapiens
MAFSELLDLVGGLGRFQVLQTMALMVSIMWLCTQSMLENFSAAVPSHRCWAPLLDNSTAQASILGSLSPEALLAISIPPGPNQRPHQCRRFRQPQWQLLDPNATATSWSEADTEPCVDGWVYDRSIFTSTIVAKWNLVCDSHALKPMAQSIYLAGILVGAAACGPASDRFGRRLVLTWSYLQMAVMGTAAAFAPAFPVYCLFRFLLAFAVAGVMMNTGTLLMEWTAARARPLVMTLNSLGFSFGHGLTAAVAYGVRDWTLLQLVVSVPFFLCFLYSWWLAESARWLLTTGRLDWGLQELWRVAAINGKGAVQDTLTPEVLLSAMREELSMGQPPASLGTLLRMPGLRFRTCISTLCWFAFGFTFFGLALDLQALGSNIFLLQMFIGVVDIPAKMGALLLLSHLGRRPTLAASLLLAGLCILANTLVPHEMGALRSALAVLGLGGVGAAFTCITIYSSELFPTVLRMTAVGLGQMAARGGAILGPLVRLLGVHGPWLPLLVYGTVPVLSGLAALLLPETQSLPLPDTIQDVQNQAVKKATHGTLGNSVLKSTQF

SEQ ID NO: 1504 - protein, 1347 aa, Homo sapiens
MENLPFPLKLLSASSLNAPSSTPWVLDIFLTLVFALGFFFLLLPYLSYFRCDDPPSPSPGKRKCPVGRRRRPRGRMKNHSLRAGRECPRGLQETSDLLSQLQSLLGPHLDKGDFGQLSGPDPPGEVGERAPDGASQSSHEPMEDAAPILSPLASPDPQAKHPQDLASTPSPGPMTTSVSSLSASQPPEPSLPLEHPSPEPPALFPHPPHTPDPLACSPPPPKGFTAPPLRDSTLITPSHCDSVALPLGTVPQSLSPHEDLVASVPAISGLGGSNSHVSASSRWQETARTSCAFNSSVQQDHLSRHPPETYQMEAGSLFLLSSDGQNAVGIQVTETAKVNIWEEKENVGSFTDRMTPEKHLNSLRNLAKSLDAEQDTTNPKPFWNMGENSKQLPGPQKLSDPRLWQESFWKNYSQLFWGLPSLHSESLVANAWVTDRSYTLQSPPFLFNEMSNVCPIQRETTMSPLLFQAQPPSHLGPECQPFISSTPQFRPTPMAQAEAQAHLQSSFPVLSPAFPSLIKNTGVACPASQNKVQALSLPETQHPEWPLLRRQLEGRLALPSRVQKSQDVFSVSTPNLPQESLTSILPENFPVSPELRRQLEQHIKKWIIQHWGNLGRIQESLDLMQLRDESPGTSQAKGKPSPWQSSMSTGESSKEAQKVKFQLERDPCPHLGQILGETPQNLSRDMKSFPRKVLGVTSEESERNLRKPLRSDSGSDLLRCTERTHIENILKAHMGRNLGQTNEGLIPVRVRRSWLAVNQALPVSNTHVKTSNLAAPKSGKACVNTAQVLSFLEPCTQQGLGAHIVRFWAKHRWGLPLRVLKPIQCFKLEKVSSLSLTQLAGPSSATCESGAGSEVEVDMFLRKPPMASLRKQVLTKASDHMPESLLASSPAWKQFQRAPRGIPSWNDHGPLKPPPAGQEGRWPSKPLTYSLTGSTQQSRSLGAQSSKAGETREAVPQCRVPLETCMLANLQATSEDMHGFEAPGTSKSSLHPRVSVSQDPRKLCLMEEVVNEFEPGMATKSETQPQVCAAVVLLPDGQASVVPHASENLVSQVPQGHLQSMPAGNMRASQELHDLMAARRSKLVHEEPRNPNCQGSCKNQRPMFPPIHKSEKSRKPNLEKHEERLEGLRTPQLTPVRKTEDTHQDEGVQLLPSKKQPPSVSHFGGNIKQFFQWIFSKKKSKPAPVTAESQKTVKNRSCVYSSSAEAQGLMTAVGQMLDEKMSLCHARHASKVNQHKQKFQAPVCGFPCNHRHLFYSEHGRILSYAASSQQATLKSQGCPNRDRQIRNQQPLKSVRCNNEQWGLRHPQILHPKKAVSPVSPLQHWPKTSGASSHHHHCPRHCLLWEGI

SEQ ID NO: 1505 - protein, 653 aa, Homo sapiens
MAFRDVAVDFTQDEWRLLSPAQRTLYREVMLENYSNLVSLGISFSKPELITQLEQGKETWREEKKCSPATCPDPEPELYLDPFCPPGFSSQKFPMQHVLCNHPPWIFTCLCAEGNIQPGDPGPGDQEKQQQASEGRPWSDQAEGPEGEGAMPLFGRTKKRTLGAFSRPPQRQPVSSRNGLRGVELEASPAQSGNPEETDKLLKRIEVLGFGTVNCGECGLSFSKMTNLLSHQRIHSGEKPYVCGVCEKGFSLKKSLARHQKAHSGEKPIVCRECGRGFNRKSTLIIHERTHSGEKPYMCSECGRGFSQKSNLIIHQRTHSGEKPYVCRECGKGFSQKSAVVRHQRTHLEEKTIVCSDCGLGFSDRSNLISHQRTHSGEKPYACKECGRCFRQRTTLVNHQRTHSKEKPYVCGVCGHSFSQNSTLISHRRTHTGEKPYVCGVCGRGFSLKSHLNRHQNIHSGEKPIVCKDCGRGFSQQSNLIRHQRTHSGEKPMVCGECGRGFSQKSNLVAHQRTHSGERPYVCRECGRGFSHQAGLIRHKRKHSREKPYMCRQCGLGFGNKSALITHKRAHSEEKPCVCRECGQGFLQKSHLTLHQMTHTGEKPYVCKTCGRGFSLKSHLSRHRKTTSVHHRLPVQPDPEPCAGQPSDSLYSL

SEQ ID NO: 1506 - protein, 958 aa, Homo sapiens
MLKSKTFLKKTRAGGVMKIVREHYLRDDIGCGAPGCAACGGAHEGPALEPQPQDPASSVCPQPHYLLPDTNVLLHQIDVLEDPAIRNVIVLQTVLQEVRNRSAPVYKRIRDVTNNQEKHFYTFTNEHHRETYVEQEQGENANDRNDRAIRVAAKWYNEHLKKMSADNQLQVIFITNDRRNKEKAIEEGIPAFTCEEYVKSLTANPELIDRLACLSEEGNEIESGKIIFSEHLPLSKLQQGIKSGTYLQGTFRASRENYLEATVWIHGDNEENKEIILQGLKHLNRAVHEDIVAVELLPKSQWVAPSSVVLHDEGQNEEDVEKEEETERMLKTAVSEKMLKPTGRVVGIIKRNWRPYCGMLSKSDIKESRRHLFTPADKRIPRIRIETRQASTLEGRRIIVAIDGWPRNSRYPNGHFVRNLGDVGEKETETEVLLLEHDVPHQPFSQAVLSFLPKMPWSITEKDMKNREDLRHLCICSVDPPGCTDIDDALHCRELENGNLEVGVHIADVSHFIRPGNALDQESARRGTTVYLCEKRIDMVPELLSSNLCSLKCDVDRLAFSCIWEMNHNAEILKTKFTKSVINSKASLTYAEAQLRIDSANMNDDITTSLRGLNKLAKILKKRRIEKGALTLSSPEVRFHMDSETHDPIDLQTKELRETNSMVEEFMLLANISVAKKIHEEFSEHALLRKHPAPPPSNYEILVKAARSRNLEIKTDTAKSLAESLDQAESPTFPYLNTLLRILATRCMMQAVYFCSGMDNDFHHYGLASPIYTHFTSPIRRYADVIVHRLLAVAIGADCTYPELTDKHKLADICKNLNFRHKMAQYAQRASVAFHTQLFFKSKGIVSEEAYILFVRKNAIVVLIPKYGLEGTVFFEEKDKPNPQLIYDDEIPSLKIEDTVFHVFDKVKVKIMLDSSNLQHQKIRMSLVEPQIPGISIPTDTSNMDLNGPKKKKMKLGK

SEQ ID NO: 1507 - protein, 865 aa, Homo sapiens
MASLYQRFTGKINTSRSFPAPPEASHLLGGQGPEEDGGAGAKPLGPRAQAAAPRERGGGGGGAGGRPRFQYQARSDGDEEDELVGSNPPQRNWKGIAIALLVILVICSLIVTSVILLTPAEDNSLSQKKKVTVEDLFSEDFKIHDPEAKWISDTEFIYREQKGTVRLWNVETNTSTVLIEGKKIESLRAIRYEISPDREYALFSYNVEPIYQHSYTGYYVLSKIPHGDPQSLDPPEVSNAKLQYAGWGPKGQQLIFIFENNIYYCAHVGKQAIRVVSTGKEGVIYNGLSDWLYEEEILKTHIAHWWSPDGTRLAYAAINDSRVPIMELPTYTGSIYPTVKPYHYPKAGSENPSISLHVIGLNGPTHDLEMMPPDDPRMREYYITMVKWATSTKVAVTWLNRAQNVSILTLCDATTGVCTKKHEDESEAWLHRQNEEPVFSKDGRKFFFIRAIPQGGRGKFYHITVSSSQPNSSNDNIQSITSGDWDVTKILAYDEKGNKIYFLSTEDLPRRRQLYSANTVGNFNRQCLSCDLVENCTYFSASFSHSMDFFLLKCEGPGVPMVTVHNTTDKKKMFDLETNEHVKKAINDRQMPKVEYRDIEIDDYNLPMQILKPATFTDTTHYPLLLVVDGTPGSQSVAEKFEVSWETVMVSSHGAVVVKCDGRGSGFQGTKLLHEVRRRLGLLEEKDQMEAVRTMLKEQYIDRTRVAVFGKDYGGYLSTYILPAKGENQGQTFTCGSALSPITDFKLYASAFSERYLGLHGLDNRAYEMTKVAHRVSALEEQQFLIIHPTADEKIHFQHTAELITQLIRGKANYSLQIYPDESHYFTSSSLKQHLYRSIINFFVECFRIQDKLLTVTAKEDEEED

SEQ ID NO: 1508 - protein, 928 aa, Homo sapiens
MLKSKTFLKKTRAGGVMKIVREHYLRDDIGCGAPGCAACGGAHEGPALEPQPQDPASSVCPQPHYLLPDTNVLLHQIVSAWRPGTWASVASSLRLPGSLETYVEQEQGENANDRNDRAIRVAAKWYNEHLKKMSADNQLQVIFITNDRRNKEKAIEEGIPAFTCEEYVKSLTANPELIDRLACLSEEGNEIESGKIIFSEHLPLSKLQQGIKSGTYLQGTFRASRENYLEATVWIHGDNEENKEIILQGLKHLNRAVHEDIVAVELLPKSQWVAPSSVVLHDEGQNEEDVEKEEETERMLKTAVSEKMLKPTGRVVGIIKRNWRPYCGMLSKSDIKESRRHLFTPADKRIPRIRIETRQASTLEGRRIIVAIDGWPRNSRYPNGHFVRNLGDVGEKETETEVLLLEHDVPHQPFSQAVLSFLPKMPWSITEKDMKNREDLRHLCICSVDPPGCTDIDDALHCRELENGNLEVGVHIADVSHFIRPGNALDQESARRGTTVYLCEKRIDMVPELLSSNLCSLKCDVDRLAFSCIWEMNHNAEILKTKFTKSVINSKASLTYAEAQLRIDSANMNDDITTSLRGLNKLAKILKKRRIEKGALTLSSPEVRFHMDSETHDPIDLQTKELRETNSMVEEFMLLANISVAKKIHEEFSEHALLRKHPAPPPSNYEILVKAARSRNLEIKTDTAKSLAESLDQAESPTFPYLNTLLRILATRCMMQAVYFCSGMDNDFHHYGLASPIYTHFTSPIRRYADVIVHRLLAVAIGADCTYPELTDKHKLADICKNLNFRHKMAQYAQRASVAFHTQLFFKSKGIVSEEAYILFVRKNAIVVLIPKYGLEGTVFFEEKDKPNPQLIYDDEIPSLKIEDTVFHVFDKVKVKIMLDSSNLQHQKIRMSLVEPQIPGISIPTDTSNMDLNGPKKKKMKLGK

SEQ ID NO: 1509 - protein, 3623 aa, Homo sapiens
MMNMSLPFLWSLLTLLIFAEVNGEAGELELQRQKRSINLQQPRMATERGNLVFLTGSAQNIEFRTGSLGKIKLNDEDLSECLHQIQKNKEDIIELKGSAIGLPQNISSQIYQLNSKLVDLERKFQGLQQTVDKKVCSSNPCQNGGTCLNLHDSFFCICPPQWKGPLCSADVNECEIYSGTPLSCQNGGTCVNTMGSYSCHCPPETYGPQCASKYDDCEGGSVARCVHGICEDLMREQAGEPKYSCVCDAGWMFSPNSPACTLDRDECSFQPGPCSTLVQCFNTQGSFYCGACPTGWQGNGYICEDINECEINNGGCSVAPPVECVNTPGSSHCQACPPGYQGDGRVCTLTDICSVSNGGCHPDASCSSTLGSLPLCTCLPGYTGNGYGPNGCVQLSNICLSHPCLNGQCIDTVSGYFCKCDSGWTGVNCTENINECLSNPCLNGGTCVDGVDSFSCECTRLWTGALCQVPQQVCGESLSGINGSFSYRSPDVGYVHDVNCFWVIKTEMGKVLRITFTFFRLESMDNCPHEFLQVYDGDSSSAFQLGRFCGSSLPHELLSSDNALYFHLYSEHLRNGRGFTVRWETQQPECGGILTGPYGSIKSPGYPGNYPPGRDCVWIVVTSPDLLVTFTFGTLSLEHHDDCNKDYLEIRDGPLYQDPLLGKFCTTFSVPPLQTTGPFARIHFHSDSQISDQGFHITYLTSPSDLRCGGNYTDPEGELFLPELSGPFTHTRQCVYMMKQPQGEQIQINFTHVELQCQSDSSQNYIEVRDGETLLGKVCGNGTISHIKSITNSVWIRFKIDASVEKASFRAVYQVACGDELTGEGVIRSPFFPNVYPGERTCRWTIHQPQSQVILLNFTVFEIGSSAHCETDYVEIGSSSILGSPENKKYCGTDIPSFITSVYNFLYVTFVKSSSTENHGFMAKFSAEDLACGEILTESTGTIQSPGHPNVYPHGINCTWHILVQPNHLIHLMFETFHLEFHYNCTNDYLEVYDTDSETSLGRYCGKSIPPSLTSSGNSLMLVFVTDSDLAYEGFLINYEAISAATACLQDYTDDLGTFTSPNFPNNYPNNWECIYRITVRTGQLIAVHFTNFSLEEAIGNYYTDFLEIRDGGYEKSPLLGIFYGSNLPPTIISHSNKLWLKFKSDQIDTRSGFSAYWDGSSTGCGGNLTTSSGTFISPNYPMPYYHSSECYWWLKSSHGSAFELEFKDFHLEHHPNCTLDYLAVYDGPSSNSHLLTQLCGDEKPPLIRSSGDSMFIKLRTDEGQQGRGFKAEYRQTCENVVIVNQTYGILESIGYPNPYSENQHCNWTIRATTGNTVNYTFLAFDLEHHINCSTDYLELYDGPRQMGRYCGVDLPPPGSTTSSKLQVLLLTDGVGRREKGFQMQWFVYGCGGELSGATGSFSSPGFPNRYPPNKECIWYIRTDPGSSIQLTIHDFDVEYHSRCNFDVLEIYGGPDFHSPRIAQLCTQRSPENPMQVSSTGNELAIRFKTDLSINGRGFNASWQAVTGGCGGIFQAPSGEIHSPNYPSPYRSNTDCSWVIRVDRNHRVLLNFTDFDLEPQDSCIMAYDGLSSTMSRLARTCGREQLANPIVSSGNSLFLRFQSGPSRQNRGFRAQFRQACGGHILTSSFDTVSSPRFPANYPNNQNCSWIIQAQPPLNHITLSFTHFELERSTTCARDFVEILDGGHEDAPLRGRYCGTDMPHPITSFSSALTLRFVSDSSISAGGFHTTVTASVSACGGTFYMAEGIFNSPGYPDIYPPNVECVWNIVSSPGNRLQLSFISFQLEDSQDCSRDFVEIREGNATGHLVGRYCGNSFPLNYSSIVGHTLWVRFISDGSGSGTGFQATFMKIFGNDNIVGTHGKVASPFWPENYPHNSNYQWTVNVNASHVVHGRILEMDIEEIQNCYYDKLRIYDGPSIHARLIGAYCGTQTESFSSTGNSLTFHFYSDSSISGKGFLLEWFAVDAPDGVLPTIAPGACGGFLRTGDAPVFLFSPGWPDSYSNRVDCTWLIQAPDSTVELNILSLDIESHRTCAYDSLVIRDGDNNLAQQLAVLCGREIPGPIRSTGEYMFIRFTSDSSVTRAGFNASFHKSCGGYLHADRGIITSPKYPETYPSNLNCSWHVLVQSGLTIAVHFEQPFQIPNGDSSCNQGDYLVLRNGPDICSPPLGPPGGNGHFCGSHASSTLFTSDNQMFVQFISDHSNEGQGFKIKYEAKSLACGGNVYIHDADSAGYVTSPNHPHNYPPHADCIWILAAPPETRIQLQFEDRFDIEVTPNCTSNYLELRDGVDSDAPILSKFCGTSLPSSQWSSGEVMYLRFRSDNSPTHVGFKAKYSIAQCGGRVPGQSGVVESIGHPTLPYRDNLFCEWHLQGLSGHYLTISFEDFNLQNSSGCEKDFVEIWDNHTSGNILGRYCGNTIPDSIDTSSNTAVVRFVTDGSVTASGFRLRFESSMEECGGDLQGSIGTFTSPNYPNPNPHGRICEWRITAPEGRRITLMFNNLRLATHPSCNNEHVIVFNGIRSNSPQLEKLCSSVNVSNEIKSSGNTMKVIFFTDGSRPYGGFTASYTSSEDAVCGGSLPNTPEGNFTSPGYDGVRNYSRNLNCEWTLSNPNQGNSSISIHFEDFYLESHQDCQFDVLEFRVGDADGPLMWRLCGPSKPTLPLVIPYSQVWIHFVTNERVEHIGFHAKYSFTDCGGIQIGDSGVITSPNYPNAYDSLTHCSSLLEAPQGHTITLTFSDFDIEPHTTCAWDSVTVRNGGSPESPIIGQYCGNSNPRTIQSGSNQLVVTFNSDHSLQGGGFYATWNTQTLGCGGIFHSDNGTIRSPHWPQNFPENSRCSWTAITHKSKHLEISFDNNFLIPSGDGQCQNSFVKVWAGTEEVDKALLATGCGNVAPGPVITPSNTFTAVFQSQEAPAQGFSASFVSRCGSNFTGPSGYIISPNYPKQYDNNMNCTYVIEANPLSVVLLTFVSFHLEARSAVTGSCVNDGVHIIRGYSVMSTPFATVCGDEMPAPLTIAGPVLLNFYSNEQITDFGFKFSYRIISCGGVFNFSSGIITSPAYSYADYPNDMHCLYTITVSDDKVIELKFSDFDVVPSTSCSHDYLAIYDGANTSDPLLGKFCGSKRPPNVKSSNNSMLLVFKTDSFQTAKGWKMSFRQTLGPQQGCGGYLTGSNNTFASPDSDSNGMYDKNLNCVWIIIAPVNKVIHLTFNTFALEAASTRQRCLYDYVKLYDGDSENANLAGTFCGSTVPAPFISSGNFLTVQFISDLTLEREGFNATYTIMDMPCGGTYNATWTPQNISSPNSSDPDVPFSICTWVIDSPPHQQVKITVWALQLTSQDCTQNYLQLQDSPQGHGNSRFQFCGRNASAVPVFYSSMSTAMVIFKSGVVNRNSRMSFTYQIADCNRDYHKAFGNLRSPGWPDNYDNDKDCTVTLTAPQNHTISLFFHSLGIENSVECRNDFLEVRNGSNSNSPLLGKYCGTLLPNPVFSQNNELYLRFKSDSVTSDRGYEIIWTSSPSGCGGTLYGDRGSFTSPGYPGTYPNNTYCEWVLVAPAGRLVTINFYFISIDDPGDCVQNYLTLYDGPNASSPSSGPYCGGDTSIAPFVASSNQVFIKFHADYARRPSAFRLTWDS

SEQ ID NO: 1510 - protein, 634 aa, Homo sapiens
MSGAIFGPLEGPSSLDAPSIHPLVCPLCHVQYERPCLLDCFHDFCAGCLRGRATDGRLTCPLCQHQTVLKGPSGLPPVDRLLQFLVDSSGDGVEAVRCANCDLECSEQDVETTYFCNTCGQPLCARCRDETHRARMFARHDIVALGQRSRDVPQKCTLHAEPYLLFSTDKKLLLCIRCFRDMQKESRAHCVDLESAYVQGCERLEQAVLAVKALQTATREAIALLQAMVEEVRHSAAEEEDAIHALFGSMQDRLAERKALLLQAVQSQYEEKDKAFKEQLSHLATLLPTLQVHLVICSSFLSLANKAEFLDLGYELMERLQGIVTRPHHLRPIQSSKIASDHRAEFARCLEPLLLLGPRRVAAAASGANTLAGGLGPKALTGPHCPSPVGKMSGSPVQKPTLHRSISTKVLLAEGENTPFAEHCRHYEDSYRHLQAEMQSLKDQVQELHRDLTKHHSLIKAEIMGDVLHKSLQLDVQIASEHASLEGMRVVFQEIWEEAYQRVANEQEIYEAQLHDLLQLRQENAYLTTITKQITPYVRSIAKVKERLEPRFQAPVDEQSESLQNTHDDSRNNAASARNNPGSVPEKREKTSEPKGNSWAPNGLSEEPLLKNMDHHRSKQKNGGDVPTWREHPT

SEQ ID NO: 1511 - protein, 757 aa, Homo sapiens
MALGEEKAEAEASEDTKAQSYGRGSCRERELDIPGPMSGEQPPRLEAEGGLISPVWGAEGIPAPTCWIGTDPGGPSRAHQPQASDANREPVAERSEPALSGLPPATMGSGDLLLSGESQVEKTKLSSSEEFPQTLSLPRTTTICSGHDADTEDDPSLADLPQALDLSQQPHSSGLSCLSQWKSVLSPGSAAQPSSCSISASSTGSSLQGHQERAEPRGGSLAKVSSSLEPVVPQEPSSVVGLGPRPQWSPQPVFSGGDASGLGRRRLSFQAEYWACVLPDSLPPSPDRHSPLWNPNKEYEDLLDYTYPLRPGPQLPKHLDSRVPADPVLQDSGVDLDSFSVSPASTLKSPTNVSPNCPPAEATALPFSGPREPSLKQWPSRVPQKQGGMGLASWSQLASTPRAPGSRDARWERREPALRGAKDRLTIGKHLDMGSPQLRTRDRGWPSPRPEREKRTSQSARRPTCTESRWKSEEEVESDDEYLALPARLTQVSSLVSYLGSISTLVTLPTGDIKGQSPLEVSDSDGPASFPSSSSQSQLPPGAALQGSGDPEGQNPCFLRSFVRAHDSAGEGSLGSSQALGVSSGLLKTRPSLPARLDRWPFSDPDVEGQLPRKGGEQGKESLVQCVKTFCCQLEELICWLYNVADVTDHGTAARSNLTSLKSSLQLYRQFKKDIDEHQSLTESVLQKGEILLQCLLENTPVLEDVLGRIAKQSGELESHADRLYDSILASLDMLAGCTLIPDKKPMAAMEHPCEGV

SEQ ID NO: 1512 - protein, 5890 aa, Homo sapiens
MEKEETTRELLLPNWQGSGSHGLTIAQRDDGVFVQEVTQNSPAARTGVVKEGDQIVGATIYFDNLQSGEVTQLLNTMGHHTVGLKLHRKGDRSPEPGQTWTREVFSSCSSEVVLSGDDEEYQRIYTTKIKPRLKSEDGVEGDLGETQSRTITVTRRVTAYTVDVTGREGAKDIDISSPEFKIKIPRHELTEISNVDVETQSGKTVIRLPSGSGAASPTGSAVDIRAGAISASGPELQGAGHSKLQVTMPGIKVGGSGVNVNAKGLDLGGRGGVQVPAVDISSSLGGRAVEVQGPSLESGDHGKIKFPTMKVPKFGVSTGREGQTPKAGLRVSAPEVSVGHKGGKPGLTIQAPQLEVSVPSANIEGLEGKLKGPQITGPSLEGDLGLKGAKPQGHIGVDASAPQIGGSITGPSVEVQAPDIDVQGPGSKLNVPKMKVPKFSVSGAKGEETGIDVTLPTGEVTVPGVSGDVSLPEIATGGLEGKMKGTKVKTPEMIIQKPKISMQDVDLSLGSPKLKGDIKVSAPGVQGDVKGPQVALKGSRVDIETPNLEGTLTGPRLGSPSGKTGTCRISMSEVDLNVAAPKVKGGVDVTLPRVEGKVKVPEVDVRGPKVDVSAPDVEAHGPEWNLKMPKMKMPTFSTPGAKGEGPDVHMTLPKGDISISGPKVNVEAPDVNLEGLGGKLKGPDVKLPDMSVKTPKISMPDVDLHVKGTKVKGEYDVTVPKLEGELKGPKVDIDAPDVDVHGPDWHLKMPKMKMPKFSVPGFKAEGPEVDVNLPKADVDISGPKIDVTAPDVSIEEPEGKLKGPKFKMPEMNIKVPKISMPDVDLHLKGPNVKGEYDVTMPKVESEIKVPDVELKSAKMDIDVPDVEVQGPDWHLKMPKMKMPKFSMPGFKAEGPEVDVNLPKADVDISGPKVGVEVPDVNIEGPEGKLKGPKFKMPEMNIKAPKISMPDVDLHMKGPKVKGEYDMTVPKLEGDLKGPKVDVSAPDVEMQGPDWNLKMPKIKMPKFSMPSLKGEGPEFDVNLSKANVDISAPKVDTNAPDLSLEGPEGKLKGPKFKMPEMHFRAPKMSLPDVDLDLKGPKMKGNVDISAPKIEGEMQVPDVDIRGPKVDIKAPDVEGQGLDWSLKIPKMKMPKFSMPSLKGEGPEVDVNLPKADVVVSGPKVDIEAPDVSLEGPEGKLKGPKFKMPEMHFKTPKISMPDVDLHLKGPKVKGDVDVSVPKVEGEMKVPDVEIKGPKMDIDAPDVEVQGPDWHLKMPKMKMPKFSMPGFKGEGREVDVNLPKADIDVSGPKVDVEVPDVSLEGPEGKLKGPKFKMPEMHFKAPKISMPDVDLNLKGPKLKGDVDVSLPEVEGEMKVPDVDIKGPKVDISAPDVDVHGPDWHLKMPKVKMPKFSMPGFKGEGPEVDVKLPKADVDVSGPKMDAEVPDVNIEGPDAKLKGPKFKMPEMSIKPQKISIPDVGLHLKGPKMKGDYDVTVPKVEGEIKAPDVDIKGPKVDINAPDVEVHGPDWHLKMPKVKMPKFSMPGFKGEGPEVDMNLPKADLGVSGPKVDIDVPDVNLEAPEGKLKGPKFKMPSMNIQTHKISMPDVGLNLKAPKLKTDVDVSLPKVEGDLKGPEIDVKAPKMDVNVGDIDIEGPEGKLKGPKFKMPEMHFKAPKISMPDVDLHLKGPKVKGDMDVSVPKVEGEMKVPDVDIKGPKVDIDAPDVEVHDPDWHLKMPKMKMPKFSMPGFKAEGPEVDVNLPKADIDVSGPSVDTDAPDLDIEGPEGKLKGSKFKMPKLNIKAPKVSMPDVDLNLKGPKLKGEIDASVPELEGDLRGPQVDVKGPFVEAEVPDVDLECPDAKLKGPKFKMPEMHFKAPKISMPDVDLHLKGPKVKGDADVSVPKLEGDLTGPSVGVEVPDVELECPDAKLKGPKFKMPDMHFKAPKISMPDVDLHLKGPKVKGDVDVSVPKLEGDLTGPSVGVEVPDVELECPDAKLKGPKFKMPEMHFKTPKISMPDVDLHLKGPKVKGDMDVSVPKVEGEMKVPDVDIKGPKMDIDAPDVDVHGPDWHLKMPKMKMPKFSMPGFKAEGPEVDVNLPKADVVVSGPKVDVEVPDVSLEGPEGKLKGPKLKMPEMHFKAPKISMPDVDLHLKGPKVKGDVDVSLPKLEGDLTGPSVDVEVPDVELECPDAKLKGPKFKMPEMHFKTPKISMPDVNLNLKGPKVKGDMDVSVPKVEGEMKVPDVDIRGPKVDIDAPDVDVHGPDWHLKMPKMKMPKFSMPGFKGEGPEVDVNLPKADVDVSGPKVDVEVPDVSLEGPEGKLKGPKFKMPEMHFKTPKISMPDVDFNLKGPKIKGDVDVSAPKLEGELKGPELDVKGPKLDADMPEVAVEGPNGKWKTPKFKMPDMHFKAPKISMPDLDLHLKSPKAKGEVDVDVPKLEGDLKGPHVDVSGPDIDIEGPEGKLKGPKFKMPDMHFKAPNISMPDVDLNLKGPKIKGDVDVSVPEVEGKLEVPDMNIRGPKVDVNAPDVQAPDWHLKMPKMKMPKFSMPGFKAEGPEVDVNLPKADVDISGPKVDIEGPDVNIEGPEGKLKGPKLKMPEMNIKAPKISMPDFDLHLKGPKVKGDVDVSLPKVEGDLKGPEVDIKGPKVDINAPDVGVQGPDWHLKMPKVKMPKFSMPGFKGEGPDGDVKLPKADIDVSGPKVDIEGPDVNIEGPEGKLKGPKFKMPEMNIKAPKISMPDIDLNLKGPKVKGDVDVSLPKVEGDLKGPEVDIKGPKVDIDAPDVDVHGPDWHLKMPKIKMPKISMPGFKGEGPDVDVNLPKADIDVSGPKVDVECPDVNIEGPEGKWKSPKFKMPEMHFKTPKISMPDIDLNLTGPKIKGDVDVTGPKVEGDLKGPEVDLKGPKVDIDVPDVNVQGPDWHLKMPKMKMPKFSMPGFKAEGPEVDVNLPKADVDVSGPKVDVEGPDVNIEGPEGKLKGPKFKMPEMNIKAPKIPMPDFDLHLKGPKVKGDVDISLPKVEGDLKGPEVDIRGPQVDIDVPDVGVQGPDWHLKMPKVKMPKFSMPGFKGEGPDVDVNLPKADLDVSGPKVDIDVPDVNIEGPEGKLKGPKFKMPEMNIKAPKISMPDIDLNLKGPKVKGDMDVSLPKVEGDMKVPDVDIKGPKVDINAPDVDVQGPDWHLKMPKIKMPKISMPGFKGEGPEVDVNLPKADLDVSGPKVDVDVPDVNIEGPDAKLKGPKFKMPEMNIKAPKISMPDLDLNLKGPKMKGEVDVSLANVEGDLKGPALDIKGPKIDVDAPDIDIHGPDAKLKGPKLKMPDMHVNMPKISMPEIDLNLKGSKLKGDVDVSGPKLEGDIKAPSLDIKGPEVDVSGPKLNIEGKSKKSRFKLPKFNFSGSKVQTPEVDVKGKKPDIDITGPKVDINAPDVEVQGKVKGSKFKMPFLSISSPKVSMPDVELNLKSPKVKGDLDIAGPNLEGDFKGPKVDIKAPEVNLNAPDVDVHGPDWNLKMPKMKMPKFSVSGLKAEGPDVAVDLPKGDINIEGPSMNIEGPDLNVEGPEGGLKGPKFKMPDMNIKAPKISMPDIDLNLKGPKVKGDVDISLPKLEGDLKGPEVDIKGPKVDINAPDVDVHGPDWHLKMPKVKMPKFSMPGFKGEGPEVDVTLPKADIDISGPNVDVDVPDVNIEGPDAKLKGPKFKMPEMNIKAPKISMPDFDLNLKGPKMKGDVVVSLPKVEGDLKGPEVDIKGPKVDIDTPDINIEGSEGKFKGPKFKIPEMHLKAPKISMPDIDLNLKGPKVKGDVDVSLPKMEGDLKGPEVDIKGPKVDINAPDVDVQGPDWHLKMPKVKMPKFSMPGFKGEGPDVDVNLPKADLDVSGPKVDIDVPDVNIEGPEGKLKGPKFKMPEMNIKAPKISMPDIDLNLKGPKVKGDMDVSLPKVEGDMQVPDLDIKGPKVDINAPDVDVRGPDWHLKMPKIKMPKISMPGFKGEGPEVDVNLPKADLDVSGPKVDVDVPDVNIEGPDAKLKGPKFKMPEMNIKAPKISMPDFDLHLKGPKVKGDVDVSLPKMEGDLKAPEVDIKGPKVDIDAPDVDVHGPDWHLKMPKVKMPKFSMPGFKGEGPEVDVNLPKADIDVSGPKVDIDTPDIDIHGPEGKLKGPKFKMPDLHLKAPKISMPEVDLNLKGPKMKGDVDVSLPKVEGDLKGPEVDIKGPKVDIDVPDVDVQGPDWHLKMPKVKMPKFSMPGFKGEGPDVDVNLPKADLDVSGPKVDIDVPDVNIEGPDAKLKGPKFKMPEMNIKAPKISMPDFDLHLKGPKVKGDVDVSLPKVEGDLKGPEVDIKGPKVDIDAPDVDVHGPDWHLKMPKVKMPKFSMPGFKGEGPDVDVTLPKADIEISGPKVDIDAPDVSIEGPDAKLKGPKFKMPEMNIKAPKISMPDIDFNLKGPKVKGDVDVSLPKVEGDLKGPEIDIKGPSLDIDTPDVNIEGPEGKLKGPKFKMPEMNIKAPKISMPDFDLHLKGPKVKGDVDVSLPKVESDLKGPEVDIEGPEGKLKGPKFKMPDVHFKSPQISMSDIDLNLKGPKIKGDMDISVPKLEGDLKGPKVDVKGPKVGIDTPDIDIHGPEGKLKGPKFKMPDLHLKAPKISMPEVDLNLKGPKVKGDMDISLPKVEGDLKGPEVDIRDPKVDIDVPDVDVQGPDWHLKMPKVKMPKFSMPGFKGEGPDVDVNLPKADIDVSGPKVDVDVPDVNIEGPDAKLKGPKFKMPEMSIKAPKISMPDIDLNLKGPKVKGDVDVTLPKVEGDLKGPEADIKGPKVDINTPDVDVHGPDWHLKMPKVKMPKFSMPGFKGEGPDVDVSLPKADIDVSGPKVDVDIPDVNIEGPDAKLKGPKFKMPEINIKAPKISIPDVDLDLKGPKVKGDFDVSVPKVEGTLKGPEVDLKGPRLDFEGPDAKLSGPSLKMPSLEISAPKVTAPDVDLHLKAPKIGFSGPKLEGGEVDLKGPKVEAPSLDVHMDSPDINIEGPDVKIPKFKKPKFGFGAKSPKADIKSPSLDVTVPEAELNLETPEISVGGKGKKSKFKMPKIHMSGPKIKAKKQGFDLNVPGGEIDASLKAPDVDVNIAGPDAALKVDVKSPKTKKTMFGKMYFPDVEFDIKSPKFKAEAPLPSPKLEGELQAPDLELSLPAIHVEGLDIKAKAPKVKMPDVDISVPKIEGDLKGPKVQANLGAPDINIEGLDAKVKTPSFGISAPQVSIPDVNVNLKGPKIKGDVPSVGLEGPDVDLQGPEAKIKFPKFSMPKIGIPGVKMEGGGAEVHAQLPSLEGDLRGPDVKLEGPDVSLKGPGVDLPSVNLSMPKVSGPDLDLNLKGPSLKGDLDASVPSMKVHAPGLNLSGVGGKMQVGGDGVKVPGIDATTKLNVGAPDVTLRGPSLQGDLAVSGDIKCPKVSVGAPDLSLEASEGSIKLPKMKLPQFGISTPGSDLHVNAKGPQVSGELKGPGVDVNLKGPRISAPNVDFNLEGPKVKGSLGATGEIKGPTVGGGLPGIGVQGLEGNLQMPGIKSSGCDVNLPGVNVKLPTGQISGPEIKGGLKGSEVGFHGAAPDISVKGPAFNMASPESDFGINLKGPKIKGGADVSGGVSAPDISLGEGHLSVKGSGGEWKGPQVSSALNLDTSKFAGGLHFSGPKVEGGVKGGQIGLQAPGLSVSGPQGHLESGSGKVTFPKMKIPKFTFSGRELVGREMGVDVHFPKAEASIQAGAGDGEWEESEVKLKKSKIKMPKFNFSKPKGKGGVTGSPEASISGSKGDLKSSKASLGSLEGEAEAEASSPKGKFSLFKSKKPRHRSNSFSDEREFSGPSTPTGTLEFEGGEVSLEGGKVKGKHGKLKFGTFGGLGSKSKGHYEVTGSDDETGKLQGSGVSLASKKSRLSSSSSNDSGNKVGIQLPEVELSVSTKKE

SEQ ID NO: 1513 - protein, 142 aa, Homo sapiens
MDMRWHCENLQTTDDILVASAECPSDDEDIDPCEPSSGGLANPTRAGGREPYPGSAEVIRESSSTTGMVVGIVAAAALCILILLYAMYKYRNRDEGSYHVDESRNYISNSAQSNGAVVKEKQPSSAKSSNKNKKNKDKEYYV

SEQ ID NO: 1514 - protein, 1257 aa, Homo sapiens
MRSKARARKLAKSDGDVVNNMYEPNRDLLASHSAEDEAEDSAMSPIPVGPPSPFPTSEDFTPKEGSPYEAPVYIPEDIPIPADFELRESSIPGAGLGVWAKRKMEAGERLGPCVVVPRAAAKETDFGWEQILTDVEVSPQEGCITKISEDLGSEKFCVDANQAGAGSWLKYIRVACSCDDQNLTMCQISEQIYYKVIKDIEPGEELLVHVKEGVYPLGTVPPGLDEEPTFRCDECDELFQSKLDLRRHKKYTCGSVGAALYEGLAEELKPEGLGGGSGQAHECKDCERMFPNKYSLEQHMVIHTEEREYKCDQCPKAFNWKSNLIRHQMSHDSGKRFECENCVKVFTDPSNLQRHIRSQHVGARAHACPDCGKTFATSSGLKQHKHIHSTVKPFICEVCHKSYTQFSNLCRHKRMHADCRTQIKCKDCGQMFSTTSSLNKHRRFCEGKNHYTPGGIFAPGLPLTPSPMMDKAKPSPSLNHASLGFNEYFPSRPHPGSLPFSTAPPTFPALTPGFPGIFPPSLYPRPPLLPPTSLLKSPLNHTQDAKLPSPLGNPALPLVSAVSNSSQGTTAAAGPEEKFESRLEDSCVEKLKTRSSDMSDGSDFEDVNTTTGTDLDTTTGTGSDLDSDVDSDPDKDKGKGKSAEGQPKFGGGLAPPGAPNSVAEVPVFYSQHSFFPPPDEQLLTATGAAGDSIKAIASIAEKYFGPGFMGMQEKKLGSLPYHSAFPFQFLPNFPHSLYPFTDRALAHNLLVKAEPKSPRDALKVGGPSAECPFDLTTKPKDVKPILPMPKGPSAPASGEEQPLDLSIGSRARASQNGGGREPRKNHVYGERKLGAGEGLPQVCPARMPQQPPLHYAKPSPFFMDPIYSRVEKRKVTDPVGALKEKYLRPSPLLFHPQMSAIETMTEKLESFAAMKADSGSSLQPLPHHPFNFRSPPPTLSDPILRKGKERYTCRYCGKIFPRSANLTRHLRTHTGEQPYRCKYCDRSFSISSNLQRHVRNIHNKEKPFKCHLCNRCFGQQTNLDRHLKKHEHENAPVSQHPGVLTNHLGTSASSPTSESDNHALLDEKEDSYFSEIRNFIANSEMNQASTRTEKRADMQIVDGSAQCPGLASEKQEDVEEEDDDDLEEDDEDSLAGKSQDDTVSPAPEPQAAYEDEEDEEPAASLAVGFDHTRRCAEDHEGGLLALEPMPTFGKGLDLRRAAEEAFEVKDVLNSTLDSEALKHTLCRQAKNQGSLDAWLKVTGATSESGAFHPINHL

SEQ ID NO: 1515 - protein, 779 aa, Homo sapiens
MGKSEGPVGMVESAGRAGQKRPGFLEGGLLLLLLLVTAALVALGVLYADRRGKQLPRLASRLCFLQEERTFVKRKPRGIPEAQEVSEVCTTPGCVIAAARILQNMDPTTEPCDDFYQFACGGWLRRHVIPETNSRYSIFDVLRDELEVILKAVLENSTAKDRPAVEKARTLYRSCMNQSVIEKRGSQPLLDILEVVGGWPVAMDRWNETVGLEWELERQLALMNSQFNRRVLIDLFIWNDDQNSSRHIIYIDQPTLGMPSREYYFNGGSNRKVREAYLQFMVSVATLLREDANLPRDSCLVQEDMVQVLELETQLAKATVPQEERHDVIALYHRMGLEELQSQFGLKGFNWTLFIQTVLSSVKIKLLPDEEVVVYGIPYLQNLENIIDTYSARTIQNYLVWRLVLDRIGSLSQRFKDTRVNYRKALFGTMVEEVRWRECVGYVNSNMENAVGSLYVREAFPGDSKSMVRELIDKVRTVFVETLDELGWMDEESKKKAQEKAMSIREQIGHPDYILEEMNRRLDEEYSNLNFSEDLYFENSLQNLKVGAQRSLRKLREKVDPNLWIIGAAVVNAFYSPNRNQIVFPAGILQPPFFSKEQPQALNFGGIGMVIGHEITHGFDDNGRNFDKNGNMMDWWSNFSTQHFREQSECMIYQYGNYSWDLADEQNVNGFNTLGENIADNGGVRQAYKAYLKWMAEGGKDQQLPGLDLTHEQLFFINYAQVWCGSYRPEFAIQSIKTDVHSPLKYRVLGSLQNLAAFADTFHCARGTPMHPKERCRVW

SEQ ID NO: 1516 - protein, 1436 aa, Homo sapiens
MLHLSAAPPAPPPEVTATARPCLCSVGRRGDGGKMAAAGALERSFVELSGAERERPRHFREFTVCSIGTANAVAGAVKYSESAGGFYYVESGKLFSVTRNRFIHWKTSGDTLELMEESLDINLLNNAIRLKFQNCSVLPGGVYVSETQNRVIILMLTNQTVHRLLLPHPSRMYRSELVVDSQMQSIFTDIGKVDFTDPCNYQLIPAVPGISPNSTASTAWLSSDGEALFALPCASGGIFVLKLPPYDIPGMVSVVELKQSSVMQRLLTGWMPTAIRGDQSPSDRPLSLAVHCVEHDAFIFALCQDHKLRMWSYKEQMCLMVADMLEYVPVKKDLRLTAGTGHKLRLAYSPTMGLYLGIYMHAPKRGQFCIFQLVSTESNRYSLDHISSLFTSQETLIDFALTSTDIWALWHDAENQTVVKYINFEHNVAGQWNPVFMQPLPEEEIVIRDDQDPREMYLQSLFTPGQFTNEALCKALQIFCRGTERNLDLSWSELKKEVTLAVENELQGSVTEYEFSQEEFRNLQQEFWCKFYACCLQYQEALSHPLALHLNPHTNMVCLLKKGYLSFLIPSSLVDHLYLLPYENLLTEDETTISDDVDIARDVICLIKCLRLIEESVTVDMSVIMEMSCYNLQSPEKAAEQILEDMITIDVENVMEDICSKLQEIRNPIHAIGLLIREMDYETEVEMEKGFNPAQPLNIRMNLTQLYGSNTAGYIVCRGVHKIASTRFLICRDLLILQQLLMRLGDAVIWGTGQLFQAQQDLLHRTAPLLLSYYLIKWGSECLATDVPLDTLESNLQHLSVLELTDSGALMANRFVSSPQTIVELFFQEVARKHIISHLFSQPKAPLSQTGLNWPEMITAITSYLLQLLWPSNPGCLFLECLMGNCQYVQLQDYIQLLHPWCQVNVGSCRFMLGRCYLVTGEGQKALECFCQAASEVGKEEFLDRLIRSEDGEIVSTPRLQYYDKVLRLLDVIGLPELVIQLATSAITEAGDDWKSQATLRTCIFKHHLDLGHNSQAYEALTQIPDSSRQLDCLRQLVVVLCERSQLQDLVEFPYVNLHNEVVGIIESRARAVDLMTHNYYELLYAFHIYRHNYRKAGTVMFEYGMRLGREVRTLRGLEKQGNCYLAALNCLRLIRPEYAWIVQPVSGAVYDRPGASPKRNHDGECTAAPTNRQIEILELEDLEKECSLARIRLTLAQHDPSAVAVAGSSSAEEMVTLLVQAGLFDTAISLCQTFKLPLTPVFEGLAFKCIKLQFGGEAAQAEAWAWLAANQLSSVITTKESSATDEAWRLLSTYLERYKVQNNLYHHCVINKLLSHGVPLPNWLINSYKKVDAAELLRLYLNYDLLEEAVDLVSEYVDAVLGKGHQYFGIEFPLSATAPMVWLPYSSIDQLLQALGENSANSHNIALSQKILDKLEDYQQKVDKATRDLLYRRTL

SEQ ID NO: 1517 - protein, 773 aa, Homo sapiens
MAECGASGSGSSGDSLDKSITLPPDEIFRNLENAKRFAIDIGGSLTKLAYYSTVQHKVAKVRSFDHSGKDTEREHEPPYEISVQEEITARLHFIKFENTYIEACLDFIKDHLVNTETKVIQATGGGAYKFKDLIEEKLRLKVDKEDVMTCLIKGCNFVLKNIPHEAFVYQKDSDPEFRFQTNHPHIFPYLLVNIGSGVSIVKVETEDRFEWVGGSSIGGGTFWGLGALLTKTKKFDELLHLASRGQHSNVDMLVRDVYGGAHQTLGLSGNLIASSFGKSATADQEFSKEDMAKSLLHMISNDIGQLACLHARLHSLDRVYFGGFFIRGHPVTMRTITYSINFFSKGEVQALFLRHEGYLGAIGAFLKGAEQDNPNQYSWGENYAGSSGLMSASPELGPAQRARSGTFDLLEMDRLERPLVDLPLLLDPPSYVPDTVDLTDDALARKYWLTCFEEALDGVVKRAVASQPDSVDAAERAEKFRQKYWNKLQTLRQQPFAYGTLTVRSLLDTREHCLNEFNFPDPYSKVKQRENGVALRCFPGVVRSLDALGWEERQLALVKGLLAGNVFDWGAKAVSAVLESDPYFGFEEAKRKLQERPWLVDSYSEWLQRLKGPPHKCALIFADNSGIDIILGVFPFVRELLLRGTEVILACNSGPALNDVTHSESLIVAERIAGMDPVVHSALQEERLLLVQTGSSSPCLDLSRLDKGLAALVRERGADLVVIEGMGRAVHTNYHAALRCESLKLAVIKNAWLAERLGGRLFSVIFKYEVPAE

SEQ ID NO: 1518 - protein, 464 aa, Homo sapiens
MGSPAHRPALLLLLPPLLLLLLLRVPPSRSFPGSGDSPLEDDEVGYSHPRYKDTPWCSPIKVKYGDVYCRAPQGGYYKTALGTRCDIRCQKGYELHGSSLLICQSNKRWSDKVICKQKRCPTLAMPANGGFKCVDGAYFNSRCEYYCSPGYTLKGERTVTCMDNKAWSGRPASCVDMEPPRIKCPSVKERIAEPNKLTVRVSWETPEGRDTADGILTDVILKGLPPGSNFPEGDHKIQYTVYDRAENKGTCKFRVKVRVKRCGKLNAPENGYMKCSSDGDNYGATCEFSCIGGYELQGSPARVCQSNLAWSGTEPTCAAMNVNVGVRTAAALLDQFYEKRRLLIVSTPTARNLLYRLQLGMLQQAQCGLDLRHITVVELVGVFPTLIGRIGAKIMPPALALQLRLLLRIPLYSFSMVLVDKHGMDKERYVSLVMPVALFNLIDTFPLRKEEMVLQAEMSQTCNT

SEQ ID NO: 1519 - protein, 591 aa, Homo sapiens
MEMEQEKMTMNKELSPDAAAYCCSACHGDETWSYNHPIRGRAKSRSLSASPALGSTKEFRRTRSLHGPCPVTTFGPKACVLQNPQTIIATPLSLASQLLPSPAVSHSGQGGVTGQVHVLPQPSDQGVLSGPRAARGQTAPQEEAVTQEEVEALVCGHTQRWVPGPVYDAAAGGSGWAQLSLRAGMGVGQATGHIQDPASQRLTWNKSPKSVLVIKKMRDASLLQPFKELCTHLMEARGAGGKGAWGAHGVGGASIHITAPRVGSAGGMSRLALCFQENMIVYVEKKVLEDPAIASDESFGAVKKKFCTFREDYDDISNQIDFIICLGGDGTLLYASSLFQGSVPPVMAFHLGSLGFLTPFSFENFQSQVTQVIEGNAAVVLRSRLKVRVVKELRGKKTAVHNGLGENGSQAAGLDMDVGKQAMQYQVLNEVVIDRGPSSYLSNVDVYLDGHLITTVQGDGVIVSTPTGSTAYAAAAGASMIHPNVPAIMITPICPHSLSFRPIVVPAGVELKIMLSPEARNTAWVSFDGRKRQEIRHGDSISITTSCYPLPSICVRDPVSDWFESLAQCLHWNVRKKQAHFEEEEEEEEEG

SEQ ID NO: 1520 - protein, 3681 aa, Homo sapiens
MSEVSSDEREDVQKKTFTKWVNAQFSKFGKQHIENLFSDLQDGRRLLDLLEGLTGQKLPKEKGSTRVHALNNVNKALRVLQNNNVDLVNIGSTDIVDGNHKLTLGLIWNIILHWQVKNVMKNIMAGLQQTNSEKILLSWVRQSTRNYPQVNVINFTTSWSDGLALNALIHSHRPDLFDWNSVVCQQSATQRLEHAFNIARYQLGIEKLLDPEDVDTTYPDKKSILMYITSLFQVLPQQVSIEAIQEVEMLPRPPKVTKEEHFQLHHQMHYSQQITVSLAQGYERTSSPKPRFKSYAYTQAAYVTTSDPTRSPFPSQHLEAPEDKSFGSSLMESEVNLDRYQTALEEVLSWLLSAEDTLQAQGEISNDVEVVKDQFHTHEGYMMDLTAHQGRVGNILQLGSKLIGTGKLSEDEETEVQEQMNLLNSRWECLRVASMEKQSNLHRVLMDLQNQKLKELNDWLTKTEERTRKMEEEPLGPDLEDLKRQVQQHKVLQEDLEQEQVRVNSLTHMVVVVDESSGDHATAALEEQLKVLGDRWANICRWTEDRWVLLQDILLKWQRLTEEQCLFSAWLSEKEDAVNKIHTTGFKDQNEMLSSLQKLAVLKADLEKKKQSMGKLYSLKQDLLSTLKNKSVTQKTEAWLDNFARCWDNLVQKLEKSTAQISQAVTTTQPSLTQTTVMETVTTVTTREQILVKHAQEELPPPPPQKKRQITVDSEIRKRLDVDITELHSWITRSEAVLQSPEFAIFRKEGNFSDLKEKVNAIEREKAEKFRKLQDASRSAQALVEQMVNEGVNADSIKQASEQLNSRWIEFCQLLSERLNWLEYQNNIIAFYNQLQQLEQMTTTAENWLKIQPTTPSEPTAIKSQLKICKDEVNRLSDLQPQIERLKIQSIALKEKGQGPMFLDADFVAFTNHFKQVFSDVQAREKELQTIFDTLPPMRYQETMSAIRTWVQQSETKLSIPQLSVTDYEIMEQRLGELQALQSSLQEQQSGLYYLSTTVKEMSKKAPSEISRKYQSEFEEIEGRWKKLSSQLVEHCQKLEEQMNKLRKIQNHIQTLKKWMAEVDVFLKEEWPALGDSEILKKQLKQCRLLVSDIQTIQPSLNSVNEGGQKIKNEAEPEFASRLETELKELNTQWDHMCQQVYARKEALKGGLEKTVSLQKDLSEMHEWMTQAEEEYLERDFEYKTPDELQKAVEEMKRAKEEAQQKEAKVKLLTESVNSVIAQAPPVAQEALKKELETLTTNYQWLCTRLNGKCKTLEEVWACWHELLSYLEKANKWLNEVEFKLKTTENIPGGAEEISEVLDSLENLMRHSEDNPNQIRILAQTLTDGGVMDELINEELETFNSRWRELHEEAVRRQKLLEQSIQSAQETEKSLHLIQESLTFIDKQLAAYIADKVDAAQMPQEAQKIQSDLTSHEISLEEMKKHNQGKEAAQRVLSQIDVAQKKLQDVSMKFRLFQKPANFEQRLQESKMILDEVKMHLPALETKSVEQEVVQSQLNHCVNLYKSLSEVKSEVEMVIKTGRQIVQKKQTENPKELDERVTALKLHYNELGAKVTERKQQLEKCLKLSRKMRKEMNVLTEWLAATDMELTKRSAVEGMPSNLDSEVAWGKATQKEIEKQKVHLKSITEVGEALKTVLGKKETLVEDKLSLLNSNWIAVTSRAEEWLNLLLEYQKHMETFDQNVDHITKWIIQADTLLDESEKKKPQQKEDVLKRLKAELNDIRPKVDSTRDQAANLMANRGDHCRKLVEPQISELNHRFAAISHRIKTGKASIPLKELEQFNSDIQKLLEPLEAEIQQGVNLKEEDFNKDMNEDNEGTVKELLQRGDNLQQRITDERKREEIKIKQQLLQTKHNALKDLRSQRRKKALEISHQWYQYKRQADDLLKCLDDIEKKLASLPEPRDERKIKEIDRELQKKKEELNAVRRQAEGLSEDGAAMAVEPTQIQLSKRWREIESKFAQFRRLNFAQIHTVREETMMVMTEDMPLEISYVPSTYLTEITHVSQALLEVEQLLNAPDLCAKDFEDLFKQEESLKNIKDSLQQSSGRIDIIHSKKTAALQSATPVERVKLQEALSQLDFQWEKVNKMYKDRQGRFDRSVEKWRRFHYDIKIFNQWLTEAEQFLRKTQIPENWEHAKYKWYLKELQDGIGQRQTVVRTLNATGEEIIQQSSKTDASILQEKLGSLNLRWQEVCKQLSDRKKRLEEQKNILSEFQRDLNEFVLWLEEADNIASIPLEPGKEQQLKEKLEQVKLLVEELPLRQGILKQLNETGGPVLVSAPISPEEQDKLENKLKQTNLQWIKVSRALPEKQGEIEAQIKDLGQLEKKLEDLEEQLNHLLLWLSPIRNQLEIYNQPNQEGPFDVKETEIAVQAKQPDVEEILSKGQHLYKEKPATQPVKRKLEDLSSEWKAVNRLLQELRAKQPDLAPGLTTIGASPTQTVTLVTQPVVTKETAISKLEMPSSLMLEVPALADFNRAWTELTDWLSLLDQVIKSQRVMVGDLEDINEMIIKQKATMQDLEQRRPQLEELITAAQNLKNKTSNQEARTIITDRIERIQNQWDEVQEHLQNRRQQLNEMLKDSTQWLEAKEEAEQVLGQARAKLESWKEGPYTVDAIQKKITETKQLAKDLRQWQTNVDVANDLALKLLRDYSADDTRKVHMITENINASWRSIHKRVSEREAALEETHRLLQQFPLDLEKFLAWLTEAETTANVLQDATRKERLLEDSKGVKELMKQWQDLQGEIEAHTDVYHNLDENSQKILRSLEGSDDAVLLQRRLDNMNFKWSELRKKSLNIRSHLEASSDQWKRLHLSLQELLVWLQLKDDELSRQAPIGGDFPAVQKQNDVHRAFKRELKTKEPVIMSTLETVRIFLTEQPLEGLEKLYQEPRELPPEERAQNVTRLLRKQAEEVNTEWEKLNLHSADWQRKIDETLERLRELQEATDELDLKLRQAEVIKGSWQPVGDLLIDSLQDHLEKVKALRGEIAPLKENVSHVNDLARQLTTLGIQLSPYNLSTLEDLNTRWKLLQVAVEDRVRQLHEAHRDFGPASQHFLSTSVQGPWERAISPNKVPYYINHETQTTCWDHPKMTELYQSLADLNNVRFSAYRTAMKLRRLQKALCLDLLSLSAACDALDQHNLKQNDQPMDILQIINCLTTIYDRLEQEHNNLVNVPLCVDMCLNWLLNVYDTGRTGRIRVLSFKTGIISLCKAHLEDKYRYLFKQVASSTGFCDQRRLGLLLHDSIQIPRQLGEVASFGGSNIEPSVRSCFQFANNKPEIEAALFLDWMRLEPQSMVWLPVLHRVAAAETAKHQAKCNICKECPIIGFRYRSLKHFNYDICQSCFFSGRVAKGHKMHYPMVEYCTPTTSGEDVRDFAKVLKNKFRTKRYFAKHPRMGYLPVQTVLEGDNMETPVTLINFWPVDSAPASSPQLSHDDTHSRIEHYASRLAEMENSNGSYLNDSISPNESIDDEHLLIQHYCQSLNQDSPLSQPRSPAQILISLESEERGELERILADLEEENRNLQAEYDRLKQQHEHKGLSPLPSPPEMMPTSPQSPRDAELIAEAKLLRQHKGRLEARMQILEDHNKQLESQLHRLRQLLEQPQAEAKVNGTTVSSPSTSLQRSDSSQPMLLRVVGSQTSDSMGEEDLLSPPQDTSTGLEEVMEQLNNSFPSSRGRNTPGKPMREDTM

SEQ ID NO: 1521 - protein, 348 aa, Homo sapiens
MHQDGISSMNQLGGLFVNGRPLPLDTRQQIVRLAVSGMRPCDISRILKVSNGCVSKILGRYYRTGVLEPKGIGGSKPRLATPPVVARIAQLKGECPALFAWEIQRQLCAEGLCTQDKTPSVSSINRVLRALQEDQGLPCTRLRSPAVLAPAVLTPHSGSETPRGTHPGTGHRNRTIFSPSQAEALEKEFQRGQYPDSVARGKLATATSLPEDTVRVWFSNRRAKWRRQEKLKWEMQLPGASQGLTVPRVAPGIISAQQSPGSVPTAALPALEPLGPSCYQLCWATAPERCLSDTPPKACLKPCWDCGSFLLPVIAPSCVDVAWPCLDASLAHHLIGGAGKATPTHFSH

SEQ ID NO: 1522 - protein, 505 aa, Homo sapiens
MVSNHYFLLCVNLPLREIHTPGAVQVSRRTISSNSFSPEVFVLPVDVEKENAHFYVADMIISAMEKMKCNILSQQQTESWSKEVSGLLGSDQPDSEMTFDTNIKQESGSSTSSYSGYEGCAVLQVSPVTETRTYHDVKEICKCDVDEFVILELGDFNDITETCSCSCSSSKSVTYEPDFNSAELLAKELYRVFQKCWILSVVNSQLAGSLSAAGSIVVNEECVRKDFESSMNVVQEIKFKSRIRGTEDWAPPRFQIIFNIHPPLKRDLVVAAQNFFCAGCGTPVEPKFVKRLRYCEYLGKYFCDCCHSYAESCIPARILMMWDFKKYYVSNFSKQLLDSIWHQPIFNLLSIGQSLYAKAKELDRVKEIQEQLFHIKKLLKTCRFANSALKEFEQVPGHLTDELHLFSLEDLVRIKKGLLAPLLKDILKASLAHVAGCELCQGKGFICEFCQNTTVIFPFQTATCRRCSACRACFHKQCFQSSECPRCARITARRKLLESVASAAT

SEQ ID NO: 1523 - protein, 595 aa, Homo sapiens
MVSNHYFLLCVNLPLREIHTPGPSPSCLGDSLAETTLSEDTTDSVGSASPHGSSEKSSSFSLSSTEVHMVRPGYSHRVSLPTSPGILATSPYPETDSAFFEPSHLTSAADEGAVQVSRRTISSNSFSPEVFVLPVDVEKENAHFYVADMIISAMEKMKCNILSQQQTESWSKEVSGLLGSDQPDSEMTFDTNIKQESGSSTSSYSGYEGCAVLQVSPVTETRTYHDVKEICKCDVDEFVILELGDFNDITETCSCSCSSSKSVTYEPDFNSAELLAKELYRVFQKCWILSVVNSQLAGSLSAAGSIVVNEECVRKDFESSMNVVQEIKFKSRIRGTEDWAPPRFQIIFNIHPPLKRDLVVAAQNFFCAGCGTPVEPKFVKRLRYCEYLGKYFCDCCHSYAESCIPARILMMWDFKKYYVSNFSKQLLDSIWHQPIFNLLSIGQSLYAKAKELDRVKEIQEQLFHIKKLLKTCRFANSALKEFEQVPGHLTDELHLFSLEDLVRIKKGLLAPLLKDILKASLAHVAGCELCQGKGFICEFCQNTTVIFPFQTATCRRCSACRACFHKQCFQSSECPRCARITARRKLLESVASAAT

SEQ ID NO: 1524 - protein, 635 aa, Homo sapiens
MVSQSTVRQDSPVEPWEGISDHSGIIDGSPRLLNTDHPPCQLDIRLMRHKAVWINPQDVQQQPQDLQSQVPAAGNSGTHFVTDAASPSGPSPSCLGDSLAETTLSEDTTDSVGSASPHGSSEKSSSFSLSSTEVHMVRPGYSHRVSLPTSPGILATSPYPETDSAFFEPSHLTSAADEGAVQVSRRTISSNSFSPEVFVLPVDVEKENAHFYVADMIISAMEKMKCNILSQQQTESWSKEVSGLLGSDQPDSEMTFDTNIKQESGSSTSSYSGYEGCAVLQVSPVTETRTYHDVKEICKCDVDEFVILELGDFNDITETCSCSCSSSKSVTYEPDFNSAELLAKELYRVFQKCWILSVVNSQLAGSLSAAGSIVVNEECVRKDFESSMNVVQEIKFKSRIRGTEDWAPPRFQIIFNIHPPLKRDLVVAAQNFFCAGCGTPVEPKFVKRLRYCEYLGKYFCDCCHSYAESCIPARILMMWDFKKYYVSNFSKQLLDSIWHQPIFNLLSIGQSLYAKAKELDRVKEIQEQLFHIKKLLKTCRFANSCVKERALFVNFARIRLSSSHFRQQHVEDVQRAGLAFTNSASSPPSAPGVRGSQRGENFWKVWPLQQHDAPEYCEKDCSTCLMITPICVYYW

SEQ ID NO: 1525 - protein, 447 aa, Homo sapiens
MIISAMEKMKCNILSQQQTESWSKEVSGLLGSDQPDSEMTFDTNIKQESGSSTSSYSGYEGCAVLQVSPVTETRTYHDVKEICKCDVDEFVILELGDFNDITETCSCSCSSSKSVTYEPDFNSAELLAKELYRVFQKCWILSVVNSQLAGSLSAAGSIVVNEECVRKDFESSMNVVQEIKFKSRIRGTEDWAPPRFQIIFNIHPPLKRDLVVAAQNFFCAGCGTPVEPKFVKRLRYCEYLGKYFCDCCHSYAESCIPARILMMWDFKKYYVSNFSKQLLDSIWHQPIFNLLSIGQSLYAKAKELDRVKEIQEQLFHIKKLLKTCRFANSALKEFEQVPGHLTDELHLFSLEDLVRIKKGLLAPLLKDILKASLAHVAGCELCQGKGFICEFCQNTTVIFPFQTATCRRCSACRACFHKQCFQSSECPRCARITARRKLLESVASAAT

SEQ ID NO: 1526 - protein, 525 aa, Homo sapiens
MAGLWLGLVWQKLLLWGAASALSLAGASLVLSLLQRVASYARKWQQMRPIPTVARAYPLVGHALLMKPDGREFFQQIIEYTEEYRHMPLLKLWVGPVPMVALYNAENVEVILTSSKQIDKSSMYKFLEPWLGLGLLTSTGNKWRSRRKMLTPTFHFTILEDFLDIMNEQANILVKKLEKHINQEAFNCFFYITLCALDIICETAMGKNIGAQSNDDSEYVRAVYRMSEMIFRRIKMPWLWLDLWYLMFKEGWEHKKSLQILHTFTNSVIAERANEMNANEDCRGDGRGSAPSKNKRRAFLDLLLSVTDDEGNRLSHEDIREEVDTFMFEGHDTTAAAINWSLYLLGSNPEVQKKVDHELDDVFGKSDRPATVEDLKKLRYLECVIKETLRLFPSVPLFARSVSEDCEVAGYRVLKGTEAVIIPYALHRDPRYFPNPEEFQPERFFPENAQGRHPYAYVPFSAGPRNCIGQKFAVMEEKTILSCILRHFWIESNQKREELGLEGQLILRPSNGIWIKLKRRNADER

SEQ ID NO: 1527 - protein, 793 aa, Homo sapiens
MNGEYRGRGFGRGRFQSWKRGRGGGNFSGKWREREHRPDLSKTTGKRTSEQTPQFLLSTKTPQSMQSTLDRFIPYKGWKLYFSEVYSDSSPLIEKIQAFEKFFTRHIDLYDKDEIERKGSILVDFKELTEGGEVTNLIPDIATELRDAPEKTLACMGLAIHQVLTKDLERHAAELQAQEGLSNDGETMVNVPHIHARVYNYEPLTQLKNVRANYYGKYIALRGTVVRVSNIKPLCTKMAFLCAACGEIQSFPLPDGKYSLPTKCPVPVCRGRSFTALRSSPLTVTMDWQSIKIQELMSDDQREAGRIPRTIECELVHDLVDSCVPGDTVTITGIVKVSNAEEGSRNKNDKCMFLLYIEANSISNSKGQKTKSSEDGCKHGMLMEFSLKDLYAIQEIQAEENLFKLIVNSLCPVIFGHEAACNVAPRGVYVCGNTTTTSGLTVTLSKDSSSGDFALEAGALVLGDQGICGIDEFDKMGNQHQALLEAMEQQSISLAKAGVVCSLPARTSIIAAANPVGGHYNKAKTVSENLKMGSALLSRFDLVFILLDTPNEHHDHLLSEHVIAIRAGKQRTISSATVARMNSQDSNTSVLEVVSEKPLSERLKVVPGETIDPIPHQLLRKYIGYARQYVYPRLSTEAARVLQDFYLELRKQSQRLNSSPITTRQLESLIRLTEARARLELREEATKEDAEDIVEIMKYSMLGTYSDEFGNLDFERSQHGSGMSNRSTAKRFISALNNVAERTYNNIFQFHQLRQIAKELNIQVADFENFIGSLNDQGYLLKKGPKVYQLQTM

SEQ ID NO: 1528 - protein, 880 aa, Homo sapiens
MNGEYRGRGFGRGRFQSWKRGRGGGNFSGKWREREHRPDLSKTTGKRTSEQTPQFLLSTKTPQSMQSTLDRFIPYKGWKLYFSEVYSDSSPLIEKIQAFEKFFTRHIDLYDKDEIERKGSILVDFKELTEGGEVTNLIPDIATELRDAPEKTLACMGLAIHQVLTKDLERHAAELQAQEGLSNDGETMVNVPHIHARVYNYEPLTQLKNVRANYYGKYIALRGTVVRVSNIKPLCTKMAFLCAACGEIQSFPLPDGKYSLPTKCPVPVCRGRSFTALRSSPLTVTMDWQSIKIQELMSDDQREAGRIPRTIECELVHDLVDSCVPGDTVTITGIVKVSNAEEGSRNKNDKCMFLLYIEANSISNSKGQKTKSSEDGCKHGMLMEFSLKDLYAIQEIQAEENLFKLIVKWSLALSPRLEYSGAISAHCNLHLPSSNSSPTSACRVAGTTGMRHQTQLLLLVKAGLALALFGGSQKYADDKNRIPIRGDPHILVVGDPGLGKSQMLQAACNVAPRGVYVCGNTTTTSGLTVTLSKDSSSGDFALEAGALVLGDQGICGIDEFDKMGNQHQALLEAMEQQSISLAKAGVVCSLPARTSIIAAANPVGGHYNKAKTVSENLKMGSALLSRFDLVFILLDTPNEHHDHLLSEHVIAIRAGKQRTISSATVARMNSQDSNTSVLEVVSEKPLSERLKVVPGETIDPIPHQLLRKYIGYARQYVYPRLSTEAARVLQDFYLELRKQSQRLNSSPITTRQLESLIRLTEARARLELREEATKEDAEDIVEIMKYSMLGTYSDEFGNLDFERSQHGSGMSNRSTAKRFISALNNVAERTYNNIFQFHQLRQIAKELNIQVADFENFIGSLNDQGYLLKKGPKVYQLQTM

SEQ ID NO: 1529 - protein, 695 aa, Homo sapiens
MAETKIIYHMDEEETPYLVKLPVAPERVTLADFKNVLSNRPVHAYKFFFKSMDQDFGVVKEEIFDDNAKLPCFNGRVVSWLVLAEGAHSDAGSQGTDSHTDLPPPLERTGGIGDSRPPSFHPNVASSRDGMDNETGTESMVSHRRERARRRNREEAARTNGHPRGDRRRDVGLPPDSASTALSSELESSSFVDSDEDGSTSRLSSSTEQSTSSRLIRKHKRRRRKQRLRQADRASSFSSITDSTMSLNIVTVTLNMERHHFLGISIVGQSNDRGDGGIYIGSIMKGGAVAADGRIEPGDMLLQVNDVNFENMSNDDAVRVLREIVSQTGPISLTVAKCWDPTPRSYFTVPRADPVRPIDPAAWLSHTAALTGALPRYGTSPCSSAVTRTSSSSLTSSVPGAPQLEEAPLTVKSDMSAVVRVMQLPDSGLEIRDRMWLKITIANAVIGADVVDWLYTHVEGFKERREARKYASSLLKHGFLRHTVNKITFSEQCYYVFGDLCSNLATLNLNSGSSGTSDQDTLAPLPHPAAPWPLGQGYPYQYPGPPPCFPPAYQDPGFSYGSGSTGSQQSEGSKSSGSTRSSRRAPGREKERRAAGAGGSGSESDHTAPSGVGSSWRERPAGQLSRGSSPRSQASATAPGLPPPHPTTKAYTVVGGPPGGPPVRELAAVPPELTGSRQSFQKAMGNPCEFFVDIM

SEQ ID NO: 1530 - protein, 670 aa, Homo sapiens
MAETKIIYHMDEEETPYLVKLPVAPERVTLADFKNVLSNRPVHAYKFFFKSMDQDFGVVKEEIFDDNAKLPCFNGRVVSWLVLAEGAHSDAGSQGTDSHTDLPPPLERTGGIGDSRPPSFHPNVASSRDGMDNETGTESMVSHRRERARRRNREEAARTNGHPRGDRRRDVGLPPDSASTALSSELESSSFVDSDEDGSTSRLSSSTEQSTSSRLIRKHKRRRRKQRLRQADRASSFSSITDSTMSLNIVTVTLNMERHHFLGISIVGQSNDRGDGGIYIGSIMKGGAVAADGRIEPGDMLLQVNDVNFENMSNDDAVRVLREIVSQTGPISLTVAKCWDPTPRSYFTVPRADPVRPIDPAAWLSHTAALTGALPRYELEEAPLTVKSDMSAVVRVMQLPDSGLEIRDRMWLKITIANAVIGADVVDWLYTHVEGFKERREARKYASSLLKHGFLRHTVNKITFSEQCYYVFGDLCSNLATLNLNSGSSGTSDQDTLAPLPHPAAPWPLGQGYPYQYPGPPPCFPPAYQDPGFSYGSGSTGSQQSEGSKSSGSTRSSRRAPGREKERRAAGAGGSGSESDHTAPSGVGSSWRERPAGQLSRGSSPRSQASATAPGLPPPHPTTKAYTVVGGPPGGPPVRELAAVPPELTGSRQSFQKAMGNPCEFFVDIM

SEQ ID NO: 1531 - protein, 840 aa, Homo sapiens
MNGEYRGRGFGRGRFQSWKRGRGGGNFSGKWREREHRPDLSKTTGKRTSEQTPQFLLSTKTPQSMQSTLDRFIPYKGWKLYFSEVYSDSSPLIEKIQAFEKFFTRHIDLYDKDEIERKGSILVDFKELTEGGEVTNLIPDIATELRDAPEKTLACMGLAIHQVLTKDLERHAAELQAQEGLSNDGETMVNVPHIHARVYNYEPLTQLKNVRANYYGKYIALRGTVVRVSNIKPLCTKMAFLCAACGEIQSFPLPDGKYSLPTKCPVPVCRGRSFTALRSSPLTVTMDWQSIKIQELMSDDQREAGRIPRTIECELVHDLVDSCVPGDTVTITGIVKVSNAEEGSRNKNDKCMFLLYIEANSISNSKGQKTKSSEDGCKHGMLMEFSLKDLYAIQEIQAEENLFKLIVNSLCPVIFGHELVKAGLALALFGGSQKYADDKNRIPIRGDPHILVVGDPGLGKSQMLQAACNVAPRGVYVCGNTTTTSGLTVTLSKDSSSGDFALEAGALVLGDQGICGIDEFDKMGNQHQALLEAMEQQSISLAKAGVVCSLPARTSIIAAANPVGGHYNKAKTVSENLKMGSALLSRFDLVFILLDTPNEHHDHLLSEHVIAIRAGKQRTISSATVARMNSQDSNTSVLEVVSEKPLSERLKVVPGETIDPIPHQLLRKYIGYARQYVYPRLSTEAARVLQDFYLELRKQSQRLNSSPITTRQLESLIRLTEARARLELREEATKEDAEDIVEIMKYSMLGTYSDEFGNLDFERSQHGSGMSNRSTAKRFISALNNVAERTYNNIFQFHQLRQIAKELNIQVADFENFIGSLNDQGYLLKKGPKVYQLQTM

SEQ ID NO: 1532 - protein, 412 aa, Homo sapiens
MEALQKQQAARLAQGVGPLAPACPLLPPQPPLPDHRTLQAPEGALGNVGAEEEEDAEEDEEKREEAGAEEEAAEESRPGAQGPSSPSSQPPGLHPHEWTYEEQFKQLYELDADPKRKEFLDDLFSFMQKRGTPVNRVPIMAKQVLDLYALFRLVTAKGGLVEVINRKVWREVTRGLSLPTTITSAAFTLRTQYMKYLYPYECETRALSSPGELQAAIDSNRREGRRQAYTATPLFGLAGPPPRGAQDPALGPGPAPPATQSSPGPAQGSTSGLPAHACAQLSPSPIKKEESGIPNPCLALPVGLALGPTREKLAPEEPPEKRAVLMGPMDPPRPCMPPSFLPRGKVPLREERLDGPLNLAGSGISSINMALEINGVVYTGVLFARRQPVPASQGPTNPAPPPSTGPPSSILP

SEQ ID NO: 1533 - protein, 196 aa, Homo sapiens
MKPRTLVELSKLGLGNETVVQLRTLELPVDYREAKRRVTGIWEDHQPQLVVHVGMDTAAKAIILEQSGKNQGYRDADIRSFWPEGGVCLPGSPDVLESGVCMKAVCKRVAVEGVDVIFSRDAGRYVCDYTYYLSLHHGKGCAALIHVPPLSRGLPASLLGRALRVIIQEMLEEVGKPKHRAQFEENSTMVLPAKGN

SEQ ID NO: 1534 - protein, 579 aa, Homo sapiens
MTRLERSSHRTVICKVPGELVAREGKCASRARESEIPSEEGYCDFNSRPNENSYCYQLLRQLNEQRKKGILCDVSIVVSGKIFKAHKNILVAGSRFFKTLYCFSNKESPNQNNTTHLDIAAVQGFSVILDFLYSGNLVLTSQNAIEVMTVASYLQMSEVVQTCRNFIKDALNISIKSEAPESVVVDYNNRKPVNRDGLSSSRDQKIASFWATRNLTNLASNVKIENDGCNVDEGQIENYQMNDSSWVQDGSPEMAENESEGQTKVFIWNNMGSQGIQETGKTRRKNQTTKRFIYNIPPNNETNLEDCSVMQPPVAYPEENTLLIKEEPDLDGALLSGPDGDRNVNANLLAEAGTSQDGGDAGTSHDFKYGLMPGPSNDFKYGLIPGTSNDFKYGLIPGASNDFKYGLLPESWPKQETWENGESSLIMNKLKCPHCSYVAKYRRTLKRHLLIHTGVRSFSCDICGKLFTRREHVKRHSLVHKKDKKYKCMVCKKIFMLAASVGIRHGSRRYGVCVDCADKSQPGGQEGVDQGQDTEFPRDEEYEENEVGEADEELVDDGEDQNDPSRWDESGEVCMSLDD

SEQ ID NO: 1535 - protein, 2718 aa, Homo sapiens
MPRTKQIHPRNLRDKIEEAQKELNGAEVSKKEILQAGVKGTSESLKGVKRKKIVAENHLKKIPKSPLRNPLQAKHKQNTEESSFAVLHSASESHKKQNYIPVKNGKQFTKQNGETPGIIAEASKSEESVSPKKPLFLQQPSELRRWRSEGADPAKFSDLDEQCDSSSLSSKTRTDNSECISSHCGTTSPSYTNTAFDVLLKAMEPELSTLSQKGSPCAIKTEKLRPNKTARSPPKLKNSSMDAPNQTSQELVAESQSSCTSYTVHMSAAQKNEQGAMQSASHLYHQHEHFVPKSNQHNQQLPGCSGFTGSLTNLQNQENAKLEQVYNIAVTSSVGLTSPSSRSQVTPQNQQMDSASPLSISPANSTQSPPMPIYNSTHVASVVNQSVEQMCNLLLKDQKPKKQGKYICEYCNRACAKPSVLLKHIRSHTGERPYPCVTCGFSFKTKSNLYKHKKSHAHTIKLGLVLQPDAGGLFLSHESPKALSIHSDVEDSGESEEEGATDERQHDLGAMELQPVHIIKRMSNAETLLKSSFTPSSPENVIGDFLLQDRSAESQAVTELPKVVVHHVTVSPLRTDSPKAMDPKPELSSAQKQKDLQVTNVQPLSANMSQGGVSRLETNENSHQKGDMNPLEGKQDSHVGTVHAQLQRQQATDYSQEQQGKLLSPRSLGSTDSGYFSRSESADQTVSPPTPFARRLPSTEQDSGRSNGPSAALVTTSTPSALPTGEKALLLPGQMRPPLATKTLEERISKLISDNEALVDDKQLDSVKPRRTSLSRRGSIDSPKSYIFKDSFQFDLKPVGRRTSSSSDIPKSPFTPTEKSKQVFLLSVPSLDCLPITRSNSMPTTGYSAVPANIIPPPHPLRGSQSFDDKIGAFYDDVFVSGPNAPVPQSGHPRTLVRQAAIEDSSANESHVLGTGQSLDESHQGCHAAGEAMSVRSKALAQGPHIEKKKSHQGRGTMFECETCRNRYRKLENFENHKKFYCSELHGPKTKVAMREPEHSPVPGGLQPQILHYRVAGSSGIWEQTPQIRKRRKMKSVGDDEELQQNESGTSPKSSEGLQFQNALGCNPSLPKHNVTIRSDQQHKNIQLQNSHIHLVARGPEQTMDPKLSTIMEQQISSAAQDKIELQRHGTGISVIQHTNSLSRPNSFDKPEPFERASPVSFQELNRTGKSGSLKVIGISQEESHPSRDGSHPHQLALSDALRGELQESSRKSPSERHVLGQPSRLVRQHNIQVPEILVTEEPDRDLEAQCHDQEKSEKFSWPQRSETLSKLPTEKLPPKKKRLRLAEIEHSSTESSFDSTLSRSLSRESSLSHTSSFSASLDIEDVSKTEASPKIDFLNKAEFLMIPAGLNTLNVPGCHREMRRTASEQINCTQTSMEVSDLRSKSFDCGSITPPQTTPLTELQPPSSPSRVGVTGHVPLLERRRGPLVRQISLNIAPDSHLSPVHPTSFQNTALPSVNAVPYQGPQLTSTSLAEFSANTLHSQTQVKDLQAETSNSSSTNVFPVQQLCDINLLNQIHAPPSHQSTQLSLQVSTQGSKPDKNSVLSGSSKSEDCFAPKYQLHCQVFTSGPSCSSNPVHSLPNQVISDPVGTDHCVTSATLPTKLIDSMSNSHPLLPPELRPLGSQVQKVPSSFMLPIRLQSSVPAYCFATLTSLPQILVTQDLPNQPICQTNHSVVPISEEQNSVPTLQKGHQNALPNPEKEFLCENVFSEMSQNSSLSESLPITQKISVGRLSPQQESSASSKRMLSPANSLDIAMEKHQKRAKDENGAVCATDVRPLEALSSRVNEASKQKKPILVRQVCTTEPLDGVMLEKDVFSQPEISNEAVNLTNVLPADNSSTGCSKFVVIEPISELQEFENIKSSTSLTLTVRSSPAPSENTHISPLKCTDNNQERKSPGVKNQGDKVNIQEQSQQPVTSLSLFNIKDTQQLAFPSLKTTTNFTWCYLLRQKSLHLPQKDQKTSAYTDWTVSASNPNPLGLPTKVALALLNSKQNTGKSLYCQAITTHSKSDLLVYSSKWKSSLSKRALGNQKSTVVEFSNKDASEINSEQDKENSLIKSEPRRIKIFDGGYKSNEEYVYVRGRGRGKYICEECGIRCKKPSMLKKHIRTHTDVRPYHCTYCNFSFKTKGNLTKHMKSKAHSKKCVDLGVSVGLIDEQDTEESDEKQRFSYERSGYDLEESDGPDEDDNENEDDDEDSQAESVLSATPSVTASPQHLPSRSSLQDPVSTDEDVRITDCFSGVHTDPMDVLPRALLTRMTVLSTAQSDYNRKTLSPGKARQRAARDENDTIPSVDTSRSPCHQMSVDYPESEEILRSSMAGKAVAITQSPSSVRLPPAAAEHSPQTAAGMPSVASPHPDPQEQKQQITLQPTPGLPSPHTHLFSHLPLHSQQQSRTPYNMVPVGGIHVVPAGLTYSTFVPLQAGPVQLTIPAVSVVHRTLGTHRNTVTEVSGTTNPAGVAELSSVVPCIPIGQIRVPGLQNLSTPGLQSLPSLSMETVNIVGLANTNMAPQVHPPGLALNAVGLQVLTANPSSQSSPAPQAHIPGLQILNIALPTLIPSVSQVAVDAQGAPEMPASQSKACETQPKQTSVASANQVSRTESPQGLPTVQRENAKKVLNPPAPAGDHARLDGLSKMDTEKAASANHVKPKPELTSIQGQPASTSQPLLKAHSEVFTKPSGQQTLSPDRQVPRPTALPRRQPTVHFSDVSSDDDEDRLVIAT

SEQ ID NO: 1536 - protein, 4262 aa, Homo sapiens
MPRPGTMALCLLTLVLSLLPPQAAAEQDLSVNRAVWDGGGCISQGDVLNRQCQQLSQHVRTGSAANTATGTTSTNVVEPRMYLSCSTNPEMTSIESSVTSDTPGVSSTRMTPTESRTTSESTSDSTTLFPSSTEDTSSPTTPEGTDVPMSTPSEESISSTMAFVSTAPLPSFEAYTSLTYKVDMSTPLTTSTQASSSPTTPESTTIPKSTNSEGSTPLTSMPASTMKVASSEAITLLTTPVEISTPVTISAQASSSPTTAEGPSLSNSAPSGGSTPLTRMPLSVMLVVSSEASTLSTTPAATNIPVITSTEASSSPTTAEGTSIPTSTYTEGSTPLTSTPASTMPVATSEMSTLSITPVDTSTLVTTSTEPSSLPTTAEATSMLTSTLSEGSTPLTNMPVSTILVASSEASTTSTIPVDSKTFVTTASEASSSPTTAEDTSIATSTPSEGSTPLTSMPVSTTPVASSEASNLSTTPVDSKTQVTTSTEASSSPPTAEVNSMPTSTPSEGSTPLTSMSVSTMPVASSEASTLSTTPVDTSTPVTTSSEASSSSTTPEGTSIPTSTPSEGSTPLTNMPVSTRLVVSSEASTTSTTPADSNTFVTTSSEASSSSTTAEGTSMPTSTYSERGTTITSMSVSTTLVASSEASTLSTTPVDSNTPVTTSTEATSSSTTAEGTSMPTSTYTEGSTPLTSMPVNTTLVASSEASTLSTTPVDTSTPVTTSTEASSSPTTADGASMPTSTPSEGSTPLTSMPVSKTLLTSSEASTLSTTPLDTSTHITTSTEASCSPTTTEGTSMPISTPSEGSPLLTSIPVSITPVTSPEASTLSTTPVDSNSPVTTSTEVSSSPTPAEGTSMPTSTYSEGRTPLTSMPVSTTLVATSAISTLSTTPVDTSTPVTNSTEARSSPTTSEGTSMPTSTPGEGSTPLTSMPDSTTPVVSSEARTLSATPVDTSTPVTTSTEATSSPTTAEGTSIPTSTPSEGTTPLTSTPVSHTLVANSEASTLSTTPVDSNTPLTTSTEASSPPPTAEGTSMPTSTPSEGSTPLTRMPVSTTMVASSETSTLSTTPADTSTPVTTYSQASSSSTTADGTSMPTSTYSEGSTPLTSVPVSTRLVVSSEASTLSTTPVDTSIPVTTSTEASSSPTTAEGTSIPTSPPSEGTTPLASMPVSTTLVVSSEANTLSTTPVDSKTQVATSTEASSPPPTAEVTSMPTSTPGERSTPLTSMPVRHTPVASSEASTLSTSPVDTSTPVTTSAETSSSPTTAEGTSLPTSTTSEGSTLLTSIPVSTTLVTSPEASTLLTTPVDTKGPVVTSNEVSSSPTPAEGTSMPTSTYSEGRTPLTSIPVNTTLVASSAISILSTTPVDNSTPVTTSTEACSSPTTSEGTSMPNSNPSEGTTPLTSIPVSTTPVVSSEASTLSATPVDTSTPGTTSAEATSSPTTAEGISIPTSTPSEGKTPLKSIPVSNTPVANSEASTLSTTPVDSNSPVVTSTAVSSSPTPAEGTSIAISTPSEGSTALTSIPVSTTTVASSEINSLSTTPAVTSTPVTTYSQASSSPTTADGTSMQTSTYSEGSTPLTSLPVSTMLVVSSEANTLSTTPIDSKTQVTASTEASSSTTAEGSSMTISTPSEGSPLLTSIPVSTTPVASPEASTLSTTPVDSNSPVITSTEVSSSPTPAEGTSMPTSTYTEGRTPLTSITVRTTPVASSAISTLSTTPVDNSTPVTTSTEARSSPTTSEGTSMPNSTPSEGTTPLTSIPVSTTPVLSSEASTLSATPIDTSTPVTTSTEATSSPTTAEGTSIPTSTLSEGMTPLTSTPVSHTLVANSEASTLSTTPVDSNSPVVTSTAVSSSPTPAEGTSIATSTPSEGSTALTSIPVSTTTVASSETNTLSTTPAVTSTPVTTYAQVSSSPTTADGSSMPTSTPREGRPPLTSIPVSTTTVASSEINTLSTTLADTRTPVTTYSQASSSPTTADGTSMPTPAYSEGSTPLTSMPLSTTLVVSSEASTLSTTPVDTSTPATTSTEGSSSPTTAGGTSIQTSTPSERTTPLAGMPVSTTLVVSSEGNTLSTTPVDSKTQVTNSTEASSSATAEGSSMTISAPSEGSPLLTSIPLSTTPVASPEASTLSTTPVDSNSPVITSTEVSSSPIPTEGTSMQTSTYSDRRTPLTSMPVSTTVVASSAISTLSTTPVDTSTPVTNSTEARSSPTTSEGTSMPTSTPSEGSTPFTSMPVSTMPVVTSEASTLSATPVDTSTPVTTSTEATSSPTTAEGTSIPTSTLSEGTTPLTSIPVSHTLVANSEVSTLSTTPVDSNTPFTTSTEASSPPPTAEGTSMPTSTSSEGNTPLTRMPVSTTMVASFETSTLSTTPADTSTPVTTYSQAGSSPTTADDTSMPTSTYSEGSTPLTSVPVSTMPVVSSEASTHSTTPVDTSTPVTTSTEASSSPTTAEGTSIPTSPPSEGTTPLASMPVSTTPVVSSEAGTLSTTPVDTSTPMTTSTEASSSPTTAEDIVVPISTASEGSTLLTSIPVSTTPVASPEASTLSTTPVDSNSPVVTSTEISSSATSAEGTSMPTSTYSEGSTPLRSMPVSTKPLASSEASTLSTTPVDTSIPVTTSTETSSSPTTAKDTSMPISTPSEVSTSLTSILVSTMPVASSEASTLSTTPVDTRTLVTTSTGTSSSPTTAEGSSMPTSTPGERSTPLTNILVSTTLLANSEASTLSTTPVDTSTPVTTSAEASSSPTTAEGTSMRISTPSDGSTPLTSILVSTLPVASSEASTVSTTAVDTSIPVTTSTEASSSPTTAEVTSMPTSTPSETSTPLTSMPVNHTPVASSEAGTLSTTPVDTSTPVTTSTKASSSPTTAEGIVVPISTASEGSTLLTSIPVSTTPVASSEASTLSTTPVDTSIPVTTSTEGSSSPTTAEGTSMPISTPSEVSTPLTSILVSTVPVAGSEASTLSTTPVDTRTPVTTSAEASSSPTTAEGTSMPISTPGERRTPLTSMSVSTMPVASSEASTLSRTPADTSTPVTTSTEASSSPTTAEGTGIPISTPSEGSTPLTSIPVSTTPVAIPEASTLSTTPVDSNSPVVTSTEVSSSPTPAEGTSMPISTYSEGSTPLTGVPVSTTPVTSSAISTLSTTPVDTSTPVTTSTEAHSSPTTSEGTSMPTSTPSEGSTPLTYMPVSTMLVVSSEDSTLSATPVDTSTPVTTSTEATSSTTAEGTSIPTSTPSEGMTPLTSVPVSNTPVASSEASILSTTPVDSNTPLTTSTEASSSPPTAEGTSMPTSTPSEGSTPLTSMPVSTTTVASSETSTLSTTPADTSTPVTTYSQASSSPPIADGTSMPTSTYSEGSTPLTNMSFSTTPVVSSEASTLSTTPVDTSTPVTTSTEASLSPTTAEGTSIPTSSPSEGTTPLASMPVSTTPVVSSEVNTLSTTPVDSNTLVTTSTEASSSPTIAEGTSLPTSTTSEGSTPLSIMPLSTTPVASSEASTLSTTPVDTSTPVTTSSPTNSSPTTAEVTSMPTSTAGEGSTPLTNMPVSTTPVASSEASTLSTTPVDSNTFVTSSSQASSSPATLQVTTMRMSTPSEGSSSLTTMLLSSTYVTSSEASTPSTPSVDRSTPVTTSTQSNSTPTPPEVITLPMSTPSEVSTPLTIMPVSTTSVTISEAGTASTLPVDTSTPVITSTQVSSSPVTPEGTTMPIWTPSEGSTPLTTMPVSTTRVTSSEGSTLSTPSVVTSTPVTTSTEAISSSATLDSTTMSVSMPMEISTLGTTILVSTTPVTRFPESSTPSIPSVYTSMSMTTASEGSSSPTTLEGTTTMPMSTTSERSTLLTTVLISPISVMSPSEASTLSTPPGDTSTPLLTSTKAGSFSIPAEVTTIRISITSERSTPLTTLLVSTTLPTSFPGASIASTPPLDTSTTFTPSTDTASTPTIPVATTISVSVITEGSTPGTTIFIPSTPVTSSTADVFPATTGAVSTPVITSTELNTPSTSSSSTTTSFSTTKEFTTPAMTTAAPLTYVTMSTAPSTPRTTSRGCTTSASTLSATSTPHTSTSVTTRPVTPSSESSRPSTITSHTIPPTFPPAHSSTPPTTSASSTTVNPEAVTTMTTRTKPSTRTTSFPTVTTTAVPTNTTIKSNPTSTPTVPRTTTCFGDGCQNTASRCKNGGTWDGLKCQCPNLYYGELCEEVVSSIDIGPPETISAQMELTVTVTSVKFTEELKNHSSQEFQEFKQTFTEQMNIVYSGIPEYVGVNITKLRHDVFQHHWHPSAKHYGDPVRP

SEQ ID NO: 1537 - protein, 253 aa, Homo sapiens
MANLGCWMLVLFVATWSDLGLCKKRPKPGGWNTGGSRYPGQGSPGGNRYPPQGGGGWGQPHGGGWGQPHGGGWGQPHGGGWGQPHGGGWGQGGGTHSQWNKPSKPKTNMKHMAGAAAAGAVVGGLGGYMLGSAMSRPIIHFGSDYEDRYYRENMHRYPNQVYYRPMDEYSNQNNFVHDCVNITIKQHTVTTTTKGENFTETDVKMMERVVEQMCITQYERESQAYYQRGSSMVLFSSPPVILLISFLIFLIVG

SEQ ID NO: 1538 - protein, 5478 aa, Homo sapiens
MLVIWILTLALRLCASVTTVTPEGSAVHKAISQQGTLWTGEVLEKQTVEQGKSTLRRQKNHFHRSAGELRCRNALKDEGASAGWSVMFAGESVVVLVHLWMTGARVKNLGLVEFASPGDDGDGRAEGFSLGLPLSEQARAAGAREKERQETVINHSTFSGFSQITGSTVNTSIGGNTTSASTPSSSDPFTTFSDYGVSVTFITGSTATKHFLDSSTNSGHSEESTVSHSGPGATGTTLFPSHSATSVFVGEPKTSPITSASMETTALPGSTTTAGLSEKSTTFYSSPRSPDRTLSPARTTSSGVSEKSTTSHSRPGPTHTIAFPDSTTMPGVSQESTASHSIPGSTDTTLSPGTTTPSSLGPESTTFHSSPGYTKTTRLPDNTTTSGLLEASTPVHSSTGSPHTTLSPSSSTTHEGEPTTFQSWPSSKDTSPAPSGTTSAFVKLSTTYHSSPSSTPTTHFSASSTTLGHSEESTPVHSSPVATATTPPPARSATSGHVEESTAYHRSPGSTQTMHFPESSTTSGHSEESATFHGSTTHTKSSTPSTTAALAHTSYHSSLGSTETTHFRDSSTISGRSEESKASHSSPDAMATTVLPAGSTPSVLVGDSTPSPISSGSMETTALPGSTTKPGLSEKSTTFYSSPRSPDTTHLPASMTSSGVSEESTTSHSRPGSTHTTAFPGSTTMPGLSQESTASHSSPGPTDTTLSPGSTTASSLGPEYTTFHSRPGSTETTLLPDNTTASGLLEASMPVHSSTRSPHTTLSPAGSTTRQGESTTFHSWPSSKDTRPAPPTTTSAFVEPSTTSHGSPSSIPTTHISARSTTSGLVEESTTYHSSPGSTQTMHFPESDTTSGRGEESTTSHSSTTHTISSAPSTTSALVEEPTSYHSSPGSTATTHFPDSSTTSGRSEESTASHSSQDATGTIVLPARSTTSVLLGESTTSPISSGSMETTALPGSTTTPGLSERSTTFHSSPRSPATTLSPASTTSSGVSEESTTSRSRPGSTHTTAFPDSTTTPGLSRHSTTSHSSPGSTDTTLLPASTTTSGPSQESTTSHSSSGSTDTALSPGSTTALSFGQESTTFHSNPGSTHTTLFPDSTTSSGIVEASTRVHSSTGSPRTTLSPASSTSPGLQGESTAFQTHPASTHTTPSPPSTATAPVEESTTYHRSPGSTPTTHFPASSTTSGHSEKSTIFHSSPDASGTTPSSAHSTTSGRGESTTSRISPGSTEITTLPGSTTTPGLSEASTTFYSSPRSPTTTLSPASMTSLGVGEESTTSRSQPGSTHSTVSPASTTTPGLSEESTTVYSSSRGSTETTVFPHSTTTSVHGEEPTTFHSRPASTHTTLFTEDSTTSGLTEESTAFPGSPASTQTGLPATLTTADLGEESTTFPSSSGSTGTKLSPARSTTSGLVGESTPSRLSPSSTETTTLPGSPTTPSLSEKSTTFYTSPRSPDATLSPATTTSSGVSEESSTSHSQPGSTHTTAFPDSTTTSDLSQEPTTSHSSQGSTEATLSPGSTTASSLGQQSTTFHSSPGDTETTLLPDDTITSGLVEASTPTHSSTGSLHTTLTPASSTSAGLQEESTTFQSWPSSSDTTPSPPGTTAAPVEVSTTYHSRPSSTPTTHFSASSTTLGRSEESTTVHSSPGATGTALFPTRSATSVLVGEPTTSPISSGSTETTALPGSTTTAGLSEKSTTFYSSPRSPDTTLSPASTTSSGVSEESTTSHSRPGSTHTTAFPGSTTMPGVSQESTASHSSPGSTDTTLSPGSTTASSLGPESTTFHSSPGSTETTLLPDNTTASGLLEASTPVHSSTGSPHTTLSPAGSTTRQGESTTFQSWPSSKDTMPAPPTTTSAFVELSTTSHGSPSSTPTTHFSASSTTLGRSEESTTVHSSPVATATTPSPARSTTSGLVEESTAYHSSPGSTQTMHFPESSTASGRSEESRTSHSSTTHTISSPPSTTSALVEEPTSYHSSPGSTATTHFPDSSTTSGRSEESTASHSSQDATGTIVLPARSTTSVLLGESTTSPISSGSMETTALPGSTTTPGLSEKSTTFHSSPRSPATTLSPASTTSSGVSEESTTSHSRPGSTHTTAFPDSTTTPGLSRHSTTSHSSPGSTDTTLLPASTTTSGPSQESTTSHSSPGSTDTALSPGSTTALSFGQESTTFHSSPGSTHTTLFPDSTTSSGIVEASTRVHSSTGSPRTTLSPASSTSPGLQGESTAFQTHPASTHTTPSPPSTATAPVEESTTYHRSPGSTPTTHFPASSTTSGHSEKSTIFHSSPDASGTTPSSAHSTTSGRGESTTSRISPGSTEITTLPGSTTTPGLSEASTTFYSSPRSPTTTLSPASMTSLGVGEESTTSRSQPGSTHSTVSPASTTTPGLSEESTTVYSSSPGSTETTVFPRTPTTSVRGEEPTTFHSRPASTHTTLFTEDSTTSGLTEESTAFPGSPASTQTGLPATLTTADLGEESTTFPSSSGSTGTTLSPARSTTSGLVGESTPSRLSPSSTETTTLPGSPTTPSLSEKSTTFYTSPRSPDATLSPATTTSSGVSEESSTSHSQPGSTHTTAFPDSTTTPGLSRHSTTSHSSPGSTDTTLLPASTTTSGPSQESTTSHSSPGSTDTALSPGSTTALSFGQESTTFHSSPGSTHTTLFPDSTTSSGIVEASTRVHSSTGSPRTTLSPASSTSPGLQGESTTFQTHPASTHTTPSPPSTATAPVEESTTYHRSPGSTPTTHFPASSTTSGHSEKSTIFHSSPDASGTTPSSAHSTTSGRGESTTSRISPGSTEITTLPGSTTTPGLSEASTTFYSSPRSPTTTLSPASMTSLGVGEESTTSRSQPGSTHSTVSPASTTTPGLSEESTTVYSSSPGSTETTVFPRSTTTSVRGEEPTTFHSRPASTHTTLFTEDSTTSGLTEESTAFPGSPASTQTGLPATLTTADLGEESTTFPSSSGSTGTTLSPARSTTSGLVGESTPSRLSPSSTETTTLPGSPTTPSLSEKSTTFYTSPRSPDATLSPATTTSSGVSEESSTSHSQPGSTHTTAFPDSTTTSGLSQEPTASHSSQGSTEATLSPGSTTASSLGQQSTTFHSSPGDTETTLLPDDTITSGLVEASTPTHSSTGSLHTTLTPASSTSAGLQEESTTFQSWPSSSDTTPSPPGTTAAPVEVSTTYHSRPSSTPTTHFSASSTTLGRSEESTTVHSSPGATGTALFPTRSATSVLVGEPTTSPISSGSTETTALPGSTTTAGLSEKSTTFYSSPRSPDTTLSPASTTSSGVSEESTTSHSRPGSTHTTAFPGSTTMPGVSQESTASHSSPGSTDTTLSPGSTTASSLGPESTTFHSGPGSTETTLLPDNTTASGLLEASTPVHSSTGSPHTTLSPAGSTTRQGESTTFQSWPNSKDTTPAPPTTTSAFVELSTTSHGSPSSTPTTHFSASSTTLGRSEESTTVHSSPVATATTPSPARSTTSGLVEESTTYHSSPGSTQTMHFPESDTTSGRGEESTTSHSSTTHTISSAPSTTSALVEEPTSYHSSPGSTATTHFPDSSTTSGRSEESTASHSSQDATGTIVLPARSTTSVLLGESTTSPISSGSMETTALPGSTTTPGLSEKSTTFHSSPRSPATTLSPASTTSSGVSEESTTSHSRPGSTHTTAFPDSTTTPGLSRHSTTSHSSPGSTDTTLLPASTTTSGSSQESTTSHSSSGSTDTALSPGSTTALSFGQESTTFHSSPGSTHTTLFPDSTTSSGIVEASTRVHSSTGSPRTTLSPASSTSPGLQGESTAFQTHPASTHTTPSPPSTATAPVEESTTYHRSPGSTPTTHFPASSTTSGHSEKSTIFHSSPDASGTTPSSAHSTTSGRGESTTSRISPGSTEITTLPGSTTTPGLSEASTTFYSSPRSPTTTLSPASMTSLGVGEESTTSRSQPGSTHSTVSPASTTTPGLSEESTTVYSSSPGSTETTVFPRSTTTSVRREEPTTFHSRPASTHTTLFTEDSTTSGLTEESTAFPGSPASTQTGLPATLTTADLGEESTTFPSSSGSTGTKLSPARSTTSGLVGESTPSRLSPSSTETTTLPGSPTTPSLSEKSTTFYTSPRSPDATLSPATTTSSGVSEESSTSHSQPGSTHTTAFPDSTTTSGLSQEPTTSHSSQGSTEATLSPGSTTASSLGQQSTTFHSSPGDTETTLLPDDTITSGLVEASTPTHSSTGSLHTTLTPASSTSTGLQEESTTFQSWPSSSDTTPSPPSTTAVPVEVSTTYHSRPSSTPTTHFSASSTTLGRSEESTTVHSSPGATGTALFPTRSATSVLVGEPTTSPISSGSTETTALPGSTTTAGLSEKSTTFYSSPRSPDTTLSPASTTSSGVSEESTTSHSRPGSMHTTAFPSSTTMPGVSQESTASHSSPGSTDTTLSPGSTTASSLGPESTTFHSSPGSTETTLLPDNTTASGLLEASTPVHSSTGSPHTTLSPAGSTTRQGESTTFQSWPNSKDTTPAPPTTTSAFVELSTTSHGSPSSTPTTHFSASSTTLGRSEESTTVHSSPVATATTPSPARSTTSGLVEESTTYHSSPGSTQTMHFPESNTTSGRGEESTTSHSSTTHTISSAPSTTSALVEEPTSYHSSPGSTATTHFPDSSTTSGRSEESTASHSSQDATGTIVLPARSTTSVLLGESTTSPISSGSMETTALPGSTTTPGLSEKSTTFHSSPSSTPTTHFSASSTTLGRSEESTTVHSSPVATATTPSPARSTTSGLVEESTAYHSSPGSTQTMHFPESSTASGRSEESRTSHSSTTHTISSPPSTTSALVEEPTSYHSSPGSIATTHFPESSTTSGRSEESTASHSSPDTNGITPLPAHFTTSGRIAESTTFYISPGSMETTLASTATTPGLSAKSTILYSSSRSPDQTLSPASMTSSSISGEPTSLYSQAESTHTTAFPASTTTSGLSQESTTFHSKPGSTETTLSPGSITTSSFAQEFTTPHSQPGSALSTVSPASTTVPGLSEESTTFYSSPGSTETTAFSHSNTMSIHSQQSTPFPDSPGFTHTVLPATLTTTDIGQESTAFHSSSDATGTTPLPARSTASDLVGEPTTFYISPSPTYTTLFPASSSTSGLTEESTTFHTSPSFTSTIVSTESLETLAPGLCQEGQIWNGKQCVCPQGYVGYQCLSPLESFPVETPEKLNATLGMTVKVTYRNFTEKMNDASSQEYQNFSTLFKNRMDVVLKGDNLPQYRGVNIRRLLNGSIVVKNDVILEADYTLEYEELFENLAEIVKAKIMNETRTTLLDPDSCRKAILCYSEEDTFVDSSVTPGFDFQEQCTQKAAEGYTQFYYVDVLDGKLACVNKCTKGTKSQMNCNLGTCQLQRSGPRCLCPNTNTHWYWGETCEFNIAKSLVYGIVGAVMAVLLLALIILIILFSLSQRKRHREQYDVPQEWRKEGTPGIFQKTAIWEDQNLRESRFGLENAYNNFRPTLETVDSGTELHIQRPEMVASTV

SEQ ID NO: 1539 - protein, 312 aa, Homo sapiens
MRNHTEITEFILLGLTDDPNFQVVIFVFLLITYMLSITGNLTLITITLLDSHLQTPMYFFLRNFSILEISFTTVSIPKFLGNIISGDKTISFNNCIVQLFFFILLGVTEFYLLAAMSYDRYVAICKPLHCLSIMNRRVCTLLVFTSWLVSFLIIFPALMLLLKLHYCRSNIIDHFTCDYFPLLQLACSDTKFLEVMGFSCAAFTLMFTLALIFLSYIYIIRTILRIPSTSQRTKAFSTCSSHMVVVSISYGSCIFMYIKPSAKDRVSLSKGVAILNTSVAPMMNPFIYSLRNQQVKQAFINMARKTVFFTST

SEQ ID NO: 1540 - protein, 433 aa, Homo sapiens
MLAATVLTLALLGNAHACSKGTSHEAGIVCRITKPALLVLNHETAKVIQTAFQRASYPDITGEKAMMLLGQVKYGLHNIQISHLSIASSQVELVEAKSIDVSIQNVSVVFKGTLKYGYTTAWWLGIDQSIDFEIDSAIDLQINTQLTCDSGRVRTDAPDCYLSFHKLLLHLQGEREPGWIKQLFTNFISFTLKLVLKGQICKEINVISNIMADFVQTRAASILSDGDIGVDISLTGDPVITASYLESHHKAVLETWGFNTNQEIFQEVVGGFPSQAQVTVHCLKMPKISCQNKGVVVNSSVMVKFLFPRPDQQHSVAYTFEEDIVTTVQASYSKKKLFLSLLDFQITPKTVSNLTESSSESVQSFLQSMITAVGIPEVMSRLEVVFTALMNSKGVSLFDIINPEIITRDGFLLLQMDFGFPEHLLVDFLQSLS

SEQ ID NO: 1541 - protein, 366 aa, Homo sapiens
MESETEPEPVTLLVKSPNQRHRDLELSGDRGWSVGHLKAHLSRVYPERPRPEDQRLIYSGKLLLDHQCLRDLLPKVAESTEEPAGSNRGQYPEDSSSDGLRQREVLRNLSSPGWENISRPEAAQQAFQGLGPGFSGYTPYGWLQLSWFQQIYARQYYMQYLAATAASGAFVPPPSAQEIPVVSAPAPAPIHNQFPAENQPANQNAAPQVVVNPGANQNLRMNAQGGPIVEEDDEINRDWLDWTYSAATFSVFLSILYFYSSLSRFLMVMGATVVMYLHHVGWFPFRPRPVQNFPNDGPPPDVVNQDPNNNLQEGTDPETEDPNHLPPDRDVLDGEQTSPSFMSTAWLVFKTFFASLLPEGPPAIAN

SEQ ID NO: 1542 - protein, 678 aa, Homo sapiens
MHVFAYRVHTHHLGKVVSGYRVRNGQWTLIGRQSPQLPQAFYPVGHPVDVSFGDLLAARCVFTGEGRTEATHIGGTSSDEMCNLYIMYYMEAKHAVSFMTCTQNVAPDMFRTIPPEANIPIPVKSDMVMMHEHHKETEYKDKIPLLQQPKREEEEVLDQGDFYSLLSKLLGEREDVVHVHKYNPTEKAESESDLVAEIANVVQKKDLGRSDAREGAEHERGNAILVRDRIHKFHRLVSTLRPPESRVFSLQQPPPGEGTWEPEHTGDFHMEEALDWPGVYLLPGQVSGVALDPKNNLVIFHRGDHVWDGNSFDSKFVYQQIGLGPIEEDTILVIDPNNAAVLQSSGKNLFYLPHGLSIDKDGNYWVTDVALHQVFKLDPNNKEGPVLILGRSMQPGSDQNHFCQPTDVAVDPGTGAIYVSDGYCNSRIVQFSPSGKFITQWGEESSGSSPLPGQFTVPHSLALVPLLGQLCVADRENGRIQCFKTDTKEFVREIKHSSFGRNVFAISYIPGLLFAVNGKPHFGDQEPVQGFVMNFSNGEIIDIFKPVRKHFDMPHDIVASEDGTVYIGDAHTNTVWKFTLTEKLEHRSVKKAGIEVQEIKADSEHKLETSSGRVLGRFRGKGSGGLNLGNFFASRKGYSRKGFDRLSTEGSDQEKEDDGSESEEEYSAPLPALAPSSS

SEQ ID NO: 1543 - protein, 1742 aa, Homo sapiens
MTSSSPAGLEGSDLSSINTMMSAVMSVGKVTENGGSPQGIKSPSKPPGPNRIGRRNQETKEEKSSYNCPLCEKICTTQHQLTMHIRQHNTDTGGADHSCSICGKSLSSASSLDRHMLVHSGERPYKCTVCGQSFTTNGNMHRHMKIHEKDPNSATATAPPSPLKRRRLSSKRKLSHDAESEREDPAPAKKMVEDGQSGDLEKKADEVFHCPVCFKEFVCKYGLETHMETHSDNPLRCDICCVTFRTHRGLLRHNALVHKQLPRDAMGRPFIQNNPSIPAGFHDLGFTDFSCRKFPRISQAWCETNLRRCISEQHRFVCDTCDKAFPMLCSLALHKQTHVAADQGQEKPQATPLPGDALDQKGFLALLGLQHTKDVRPAPAEEPLPDDNQAIQLQTLKCQLPQDPGCTNLLSLSPFEAASLGGSLTVLPATKDSIKHLSLQPFQKGFIIQPDSSIVVKPISGESAIELADIQQILKMAASAPPQISLPPFSKAPAAPLQAIFKHMPPLKPKPLVTPRTVVATSTPPPLINAQQASPGCISPSLPPPPLKLLKGSVEAASNAHLLQSKSGTQPHAATRLSLQQPRAELPGQPEMKTQLEQDSIIEALLPLSMEAKIKQEITEGELKAFMTAPGGKKTPAMRKVLYPCRFCNQVFAFSGVLRAHVRSHLGISPYQCNICDYIAADKAALIRHLRTHSGERPYICKICHYPFTVKANCERHLRKKHLKATRKDIEKNIEYVSSSAAELVDAFCAPDTVCRLCGEDLKHYRALRIHMRTHCGRGLGGGHKGRKPFECKECSAAFAAKRNCIHHILKQHLHVPEQDIESYVLAADGLGPAEAPAAEASGRGEDSGCAALGDCKPLTAFLEPQNGFLHRGPTQPPPPHVSIKLEPASSFAVDFNEPLDFSQKGLALVQVKQENISFLSPSSLVPYDCSMEPIDLSIPKNFRKGDKDLATPSEAKKPEEEAGSSEQPSPCPAPGPSLPVTLGPSGILESPMAPAPAATPEPPAQPLQGPVQLAVPIYSSALVSSPPLVGSSALLSGTALLRPLRPKPPLLLPKPPVTEELPPLASIAQIISSVSSAPTLLKTKVADPGPASTGSNTTASDSLGGSVPKAATTATPAATTSPKESSEPPAPASSPEAASPTEQGPAGTSKKRGRKRGMRSRPRANSGGVDLDSSGEFASIEKMLATTDTNKFSPFLQTAEDNTQDEVAGAPADHHGPSDEEQGSPPEDKLLRAKRNSYTNCLQKITCPHCPRVFPWASSLQRHMLTHTGQKPFPCQKCDAFFSTKSNCERHQLRKHGVTTCSLRRNGLIPQSKESDVGSHDSTDSQSDAETAAAAGEVLDLTSRDREQPSEGATELRQVAGDAPVEQATAETASPVHREEHGRGESHEPEEEHGTEESTGDADGAEEDASSNQSLDLDFATKLMDFKLAEGDGEAGAGGAASQEQKLACDTCGKSFKFLGTLSRHRKAHGRQEPKDEKGDGASTAEEGPQPAPEQEEKPPETPAEVVESAPGAGEAPAEKLAEETEGPSDGESAAEKRSSEKSDDDKKPKTDSPKSVASKADKRKKVCSVCNKRFWSLQDLTRHMRSHTGERPYKCQTCERTFTLKHSLVRHQRIHQKARHAKHHGKDSDKEERGEEDSENESTHSGNNAVSENEAELAPNASNHMAVTRSRKEGLASATKDCSHREEKVTAGWPSEPGQGDLNPESPAALGQDLLEPRSKRPAHPILATADGASQLVGME

SEQ ID NO: 1544 - protein, 154 aa, Homo sapiens
MAPRRARGCRTLGLPALLLLLLLRPPATREPAASSPSSNNTAATTAAIVPGSQLMPSKSPSTGTTEISSHESSHGTPSQTTAKNWELTASASHQPPGVYPQGHSDTTVAISTSTVLLCGLSAVSLLACYLKSRASVCSCHPRSAGHTCSVGSVC

SEQ ID NO: 1545 - protein, 267 aa, Homo sapiens
MAPRRARGCRTLGLPALLLLLLLRPPATRGITCPPPMSVEHADIWVKSYSLYSRERYICNSGFKRKAGTSSLTECVLNKATNVAHWTTPSLKCIRDPALVHQRPAPPSTVTTAGVTPQPESLSPSGKEPAASSPSSNNTAATTAAIVPGSQLMPSKSPSTGTTEISSHESSHGTPSQTTAKNWELTASASHQPPGVYPQGHSDTTVAISTSTVLLCGLSAVSLLACYLKSRQTPPLASVEMEAMEALPVTWGTSSRDEDLENCSHHL

SEQ ID NO: 1546 - protein, 2002 aa, Homo sapiens
MEQDRTNHVEGNRLSPFLIPSPPICQTEPLATKLQNGSPLPERAHPEVNGDTKWHSFKSYYGIPCMKGSQNSRVSPDFTQESRGYSKCLQNGGIKRTVSEPSLSGLLQIKKLKQDQKANGERRNFGVSQERNPGESSQPNVSDLSDKKESVSSVAQENAVKDFTSFSTHNCSGPENPELQILNEQEGKSANYHDKNIVLLKNKAVLMPNGATVSASSVEHTHGELLEKTLSQYYPDCVSIAVQKTTSHINAINSQATNELSCEITHPSHTSGQINSAQTSNSELPPKPAAVVSEACDADDADNASKLAAMLNTCSFQKPEQLQQQKSVFEICPSPAENNIQGTTKLASGEEFCSGSSSNLQAPGGSSERYLKQNEMNGAYFKQSSVFTKDSFSATTTPPPPSQLLLSPPPPLPQVPQLPSEGKSTLNGGVLEEHHHYPNQSNTTLLREVKIEGKPEAPPSQSPNPSTHVCSPSPMLSERPQNNCVNRNDIQTAGTMTVPLCSEKTRPMSEHLKHNPPIFGSSGELQDNCQQLMRNKEQEILKGRDKEQTRDLVPPTQHYLKPGWIELKAPRFHQAESHLKRNEASLPSILQYQPNLSNQMTSKQYTGNSNMPGGLPRQAYTQKTTQLEHKSQMYQVEMNQGQSQGTVDQHLQFQKPSHQVHFSKTDHLPKAHVQSLCGTRFHFQQRADSQTEKLMSPVLKQHLNQQASETEPFSNSHLLQHKPHKQAAQTQPSQSSHLPQNQQQQQKLQIKNKEEILQTFPHPQSNNDQQREGSFFGQTKVEECFHGENQYSKSSEFETHNVQMGLEEVQNINRRNSPYSQTMKSSACKIQVSCSNNTHLVSENKEQTTHPELFAGNKTQNLHHMQYFPNNVIPKQDLLHRCFQEQEQKSQQASVLQGYKNRNQDMSGQQAAQLAQQRYLIHNHANVFPVPDQGGSHTQTPPQKDTQKHAALRWHLLQKQEQQQTQQPQTESCHSQMHRPIKVEPGCKPHACMHTAPPENKTWKKVTKQENPPASCDNVQQKSIIETMEQHLKQFHAKSLFDHKALTLKSQKQVKVEMSGPVTVLTRQTTAAELDSHTPALEQQTTSSEKTPTKRTAASVLNNFIESPSKLLDTPIKNLLDTPVKTQYDFPSCRCVEQIIEKDEGPFYTHLGAGPNVAAIREIMEERFGQKGKAIRIERVIYTGKEGKSSQGCPIAKWVVRRSSSEEKLLCLVRERAGHTCEAAVIVILILVWEGIPLSLADKLYSELTETLRKYGTLTNRRCALNEERTCACQGLDPETCGASFSFGCSWSMYYNGCKFARSKIPRKFKLLGDDPKEEEKLESHLQNLSTLMAPTYKKLAPDAYNNQIEYEHRAPECRLGLKEGRPFSGVTACLDFCAHAHRDLHNMQNGSTLVCTLTREDNREFGGKPEDEQLHVLPLYKVSDVDEFGSVEAQEEKKRSGAIQVLSSFRRKVRMLAEPVKTCRQRKLEAKKAAAEKLSSLENSSNKNEKEKSAPSRTKQTENASQAKQLAELLRLSGPVMQQSQQPQPLQKQPPQPQQQQRPQQQQPHHPQTESVNSYSASGSTNPYMRRPNPVSPYPNSSHTSDIYGSTSPMNFYSTSSQAAGSYLNSSNPMNPYPGLLNQNTQYPSYQCNGNLSVDNCSPYLGSYSPQSQPMDLYRYPSQDPLSKLSLPPIHTLYQPRFGNSQSFTSKYLGYGNQNMQGDGFSSCTIRPNVHHVGKLPPYPTHEMDGHFMGATSRLPPNLSNPNMDYKNGEHHSPSHIIHNYSAAPGMFNSSLHALHLQNKENDMLSHTANGLSKMLPALNHDRTACVQGGLHKLSDANGQEKQPLALVQGVASGAEDNDEVWSDSEQSFLDPDIGGVAVAPTHGSILIECAKRELHATTPLKNPNRNHPTRISLVFYQHKSMNEPKHGLALWEAKMAEKAREKEEECEKYGPDYVPQKSHGKKVKREPAEPHETSEPTYLRFIKSLAERTMSVTTDSTVTTSPYAFTRVTGPYNRYI

SEQ ID NO: 1547 - protein, 326 aa, Homo sapiens
MASGILVNVKEEVTCPICLELLTQPLSLDCGHSFCQACLTANHKKSMLDKGESSCPVCRISYQPENIRPNRHVANIVEKLREVKLSPEGQKVDHCARHGEKLLLFCQEDGKVICWLCERSQEHRGHHTFLTEEVAREYQVKLQAALEMLRQKQQEAEELEADIREEKASWKTQIQYDKTNVLADFEQLRDILDWEESNELQNLEKEEEDILKSLTNSETEMVQQTQSLRELISDLEHRLQGSVMELLQGVDGVIKRTENVTLKKPETFPKNQRRVFRAPDLKGMLEVFRELTDVRRYWGWSAMARSRFTATSTSQIQAILLPQPPK

SEQ ID NO: 1548 - protein, 493 aa, Homo sapiens
MASGILVNVKEEVTCPICLELLTQPLSLDCGHSFCQACLTANHKKSMLDKGESSCPVCRISYQPENIRPNRHVANIVEKLREVKLSPEGQKVDHCARHGEKLLLFCQEDGKVICWLCERSQEHRGHHTFLTEEVAREYQVKLQAALEMLRQKQQEAEELEADIREEKASWKTQIQYDKTNVLADFEQLRDILDWEESNELQNLEKEEEDILKSLTNSETEMVQQTQSLRELISDLEHRLQGSVMELLQGVDGVIKRTENVTLKKPETFPKNQRRVFRAPDLKGMLEVFRELTDVRRYWVDVTVAPNNISCAVISEDKRQVSSPKPQIIYGARGTRYQTFVNFNYCTGILGSQSITSGKHYWEVDVSKKTAWILGVCAGFQPDAMCNIEKNENYQPKYGYWVIGLEEGVKCSAFQDSSFHTPSVPFIVPLSVIICPDRVGVFLDYEACTVSFFNITNHGFLIYKFSHCSFSQPVFPYLNPRKCGVPMTLCSPSS

SEQ ID NO: 1549 - protein, 891 aa, Homo sapiens
MSQVGGRGDRCTQEVQGLVHGAGDLSASLAENSPTMSQNGYFEDSSYYKCDTDDTFEAREEILGDEAFDTANSSIVSGESIRFFVNVNLEMQATNTENEATSGGCVLLHTSRKYLKLKNFKEEIRAHRDLDGFLAQASIVLNETATSLDNVLRTMLRRFARDPDNNEPNCNLDLLMAMLFTDAGAPMRGKVHLLSDTIQGVTATVTGVRYQQSWLCIICTMKALQKRHVCISRLVRPQNWGENSCEVRFVILVLAPPKMKSTKTAMEVARTFATMFSDIAFRQKLLETRTEEEFKEALVHQRQLLTMVSHGPVAPRTKERSTVSLPAHRHPEPPKCKDFVPFGKGIREDIARRFPLYPLDFTDGIIGKNKAVGKYITTTLFLYFACLLPTIAFGSLNDENTDGAIDVQKTIAGQSIGGLLYALFSGQPLVILLTTAPLALYIQVIRVICDDYDLDFNSFYAWTGLWNSFFLALYAFFNLSLVMSLFKRSTEEIIALFISITFVLDAVKGTVKIFWKYYYGHYLDDYHTKRTSSLVSLSGLGASLNASLHTALNASFLASPTELPSATHSGQATAVLSLLIMLGTLWLGYTLYQFKKSPYLHPCVREILSDCALPIAVLAFSLISSHGFREIEMSKFRYNPSESPFAMAQIQSLSLRAVSGAMGLGFLLSMLFFIEQNLVAALVNAPENRLVKGTAYHWDLLLLAIINTGLSLFGLPWIHAAYPHSPLHVRALALVEERVENGHIYDTIVNVKETRLTSLGASVLVGLSLLLLPVPLQWIPKPVLYGLFLYIALTSLDGNQLVQRVALLLKEQTAYPPTHYIRRVPQRKIHYFTGLQVLQLLLLCAFGMSSLPYMKMIFPLIMIAMIPIRYILLPRIIEAKYLDVMDAEHRP

SEQ ID NO: 1550 - protein, 918 aa, Homo sapiens
MGVYGPQDRSESEKRDVQRDPPPWHPRREGERPARARSLPLAAAGQGFLRKTWISEHENSPTMSQNGYFEDSSYYKCDTDDTFEAREEILGDEAFDTANSSIVSGESIRFFVNVNLEMQATNTENEATSGGCVLLHTSRKYLKLKNFKEEIRAHRDLDGFLAQASIVLNETATSLDNVLRTMLRRFARDPDNNEPNCNLDLLMAMLFTDAGAPMRGKVHLLSDTIQGVTATVTGVRYQQSWLCIICTMKALQKRHVCISRLVRPQNWGENSCEVRFVILVLAPPKMKSTKTAMEVARTFATMFSDIAFRQKLLETRTEEEFKEALVHQRQLLTMVSHGPVAPRTKERSTVSLPAHRHPEPPKCKDFVPFGKGIREDIARRFPLYPLDFTDGIIGKNKAVGKYITTTLFLYFACLLPTIAFGSLNDENTDGAIDVQKTIAGQSIGGLLYALFSGQPLVILLTTAPLALYIQVIRVICDDYDLDFNSFYAWTGLWNSFFLALYAFFNLSLVMSLFKRSTEEIIALFISITFVLDAVKGTVKIFWKYYYGHYLDDYHTKRTSSLVSLSGLGASLNASLHTALNASFLASPTELPSATHSGQATAVLSLLIMLGTLWLGYTLYQFKKSPYLHPCVREILSDCALPIAVLAFSLISSHGFREIEMSKFRYNPSESPFAMAQIQSLSLRAVSGAMGLGFLLSMLFFIEQNLVAALVNAPENRLVKGTAYHWDLLLLAIINTGLSLFGLPWIHAAYPHSPLHVRALALVEERVENGHIYDTIVNVKETRLTSLGASVLVGLSLLLLPVPLQWIPKPVLYGLFLYIALTSLDGNQLVQRVALLLKEQTAYPPTHYIRRVPQRKIHYFTGLQVLQLLLLCAFGMSSLPYMKMIFPLIMIAMIPIRYILLPRIIEAKYLDVMDAEHRP

SEQ ID NO: 1551 - protein, 722 aa, Homo sapiens
MPSPQTDTPGPELQSPKEAEEPQTPAQGSRRTSSRKEPNAHRKDGTRLGLGSLRQAFSRASQRALTQVSKEDTGLFRRSSCSLFRSFRQALNDGPATGHSQATPEVPSGVMNGVSQQASTGAASEELKPEAEGKSVADLITERQLLAAFEQLLRLETLLVAEKASRTFEQDPTAFARRAMDVCLLYDGLAAEIGAIVRETLDSDGVDAAALAELARVVSAEEEAHPSPPDDGDFLRTPRRWRQHWEEAVRRSAQERVRRPGAGWAFGEAEGASGLAQLLAELGGLVRRDLQKVRQEVQPAYAAAGFPAWEVYLRAFHSAVAQRLQELARDARGCEQLYILLDWAANVYGSPDFLGAPGLALPAEPLPPLLAPDVWARLESDYTSFLEAKIASCFDSILQLEQSHWAAAEVPEVLQGLYQAPLSMDVHMLVAEHVKAAGAISAELEATTLRICTRALGLFVPRFEKAFLASEAVSEPHLGAYINACEELRTSLLSRFPGTQEELEKPLVTATCSFQKHLLQGLQRELQPLFRVVCTRDWLTQDWLHPLMDKVVTFAGHLQRVARPRAQETLQEVHRFVVREYLARALRPRERFRGMERMHGSQKMSLDAQAISDTFQGLGSEATWLDQAIQCVAEILGETYKDDIQRHLETLIRSYPDIRRDHILAILALRRLGRQRNQHLLQHTQDLLRAAAGAAGAEAPRGRVLFEEIKVPSAMAVLITCV

SEQ ID NO: 1552 - protein, 194 aa, Homo sapiens
MAASLVGKKIVFVTGNAKKLEEVVQILGDKFPCTLVAQKIDLPEYQGEPDEISIQKCQEAVRQVQGPVLVEDTCLCFNALGGLPGPYIKWFLEKLKPEGLHQLLAGFEDKSAYALCTFALSTGDPSQPVRLFRGRTSGRIVAPRGCQDFGWDPCFQPDGYEQTYAEMPKAEKNAVSHRFRALLELQEYFGSLAA

SEQ ID NO: 1553 - protein, 3418 aa, Homo sapiens [sequence omitted]

SEQ ID NO: 1554 - protein, 234 aa, Homo sapiens
MSNYSVSLVGPAPWGFRLQGGKDFNMPLTISSLKDGGKAAQANVRIGDVVLSIDGINAQGMTHLEAQNKIKGCTGSLNMTLQRASAAPKPEPVPVQKPTVTSVCSETSQELAEGQRRGSQGDSKQQNGKIPPKRPPRKHIVERYTEFYHVPTHSDASKKRLIEDTEDWRPRTGTTQSRSFRILAQITGTEHLKESEADNTKKAKEKIPLHVFSPKYTKLRDWHHEVSARALNVQ

SEQ ID NO: 1555 - protein, 195 aa, Homo sapiens
MATAAQGPLSLLWGWLWSERFWLPENVSWADLEGPADGYGYPRGRHILSVFPLAAGIFFVRLLFERFIAKPCALCIGIEDSGPYQAQPNAILEKVFISITKYPDKKRLEGLSKQLDWNVRKIQCWFRHRRNQDKPPTLTKFCESIHLGSGTSDSAGITIHFSLFQVGFITIISWNWPSIGPLCFLSLQTLKERTS

SEQ ID NO: 1556 - protein, 312 aa, Homo sapiens
MGLNKSASTFQLTGFPGMEKAHHWIFIPLLAAYISILLGNGTLLFLIRNDHNLHEPMYYFLAMLAATDLGVTLTTMPTVLGVLWLDHREIGHGACFSQAYFIHTLSVMESGVLLAMAYDCFITIRSPLRYTSILTNTQVMKIGVRVLTRAGLSIMPIVVRLHWFPYCRSHVLSHAFCLHQDVIKLACADITFNRLYPVVVLFAMVLLDFLIIFFSYILILKTVMGIGSGGERAKALNTCVSHICCILVFYVTVVCLTFIHRFGKHVPHVVHITMSYIHFLFPPFMNPFIYSIKTKQIQSGILRLFSLPHSRA

SEQ ID NO: 1557 - protein, 90 aa, Homo sapiens
MVHLTPEEKSAVTALWGKVNVDEVGGEALGRLLVVYPWTQRFFESFGDLSTPDAVMGNPKVKAHGKKVLGAFSDGLAHLDNLKGTFATLS

SEQ ID NO: 1558 - protein, 81 aa, Homo sapiens
MTAAVFFGCAFIAFGPALALYVFTIATEPLRIIFLIAGRRVETCKNTEAPDCASPSGSLSFLLVGVSTDFVPCLVHGKSHY

SEQ ID NO: 1559 - protein, 216 aa, Homo sapiens
MTAAVFFGCAFIAFGPALALYVFTIATEPLRIIFLIAGAFFWLVSLLISSLVWFMARVIIDNKDGPTQKYLLIFGAFVSVYIQEMFRFAYYKLLKKASEGLKSINPGETAPSMRLLAYAFMTLVIILLHVFWGIVFFDGCEKKKWGILLIVLLTHLLVSAQTFISSYYGINLASAFIILVLMGTWAFLAAGGSCRSLKLCLLCQDKNFLLYNQRSR

SEQ ID NO: 1560 - protein, 710 aa, Homo sapiens
MERTAGKELALAPLQDWGEETEDGAVYSVSLRRQRSQRRSPAEGPGGSQAPSPIANTFLHYRTSKVRVLRAARLERLVGELVFGDREQDPSFMPAFLATYRTFVPTACLLGFLLPPMPPPPPPGVEIKKTAVQDLSFNKNLRAVVSVLGSWLQDHPQDFRDHPAHSDLGSVRTFLGWAAPGSAEAQKAEKLLEDFLEEAEREQEEEPPQVWTGPPRVAQTSDPDSSEACAEEEEGLMPQGPQLLDFSVDEVAEQLTLIDLELFSKVRLYECLGSVWSQRDRPGAAGASPTVRATVAQFNTVTGCVLGSVLGAPGLAAPQRAQRLEKWIRIAQRCRELRNFSSLRAILSALQSNPIYRLKRSWGAVSREPLSTFRKLSQIFSDENNHLSSREILFQEEATEGSQEEDNTPGSLPSKPPPGPVPYLGTFLTDLVMLDTALPDMLEGDLINFEKRRKEWEILARIQQLQRRCQSYTLSPHPPILAALHAQNQLTEEQSYRLSRVIEPPAASCPSSPRIRRRISLTKRLSAKLAREKSSSPSGSPGDPSSPTSSVSPGSPPSSPRSRDAPAGSPPASPGPQGPSTKLPLSLDLPSPRPFALPLGSPRIPLPAQQSSEARVIRVSIDNDHGNLYRSILLTSQDKAPSVVRRALQKHNVPQPWACDYQLFQVLPGDRVLLIPDNANVFYAMSPVAPRDFMLRRKEGTRNTLSVSPS

SEQ ID NO: 1561 - protein, 327 aa, Homo sapiens
MRLAVLFSGALLGLLAESTGTTSHRTTKSHKTTTHRTTTTGTTSHGPTTATHNPTTTSHGNVTVHPTSNSTATSQGPSTATHSPATTSHGNATVHPTSNSTATSPGFTSSAHPEPPPPSPSPSPTSKETIGDYTWTNGSQPCVHLQAQIQIRVMYTTQGGGEAWGISVLNPNKTKVQGSCEGAHPHLLLSFPYGHLSFGFMQDLQQKVVYLSYMAVEYNVSFPHAAQWTFSAQNASLRDLQAPLGQSFSCSNSSIILSPAVHLDLLSLRLQAAQLPHTGVFGQSFSCPSDRSILLPLIIGLILLGLLALVLIAFCIIRRRPSAYQAL

SEQ ID NO: 1562 - protein, 570 aa, Homo sapiens
MAGLTAAAPRPGVLLLLLSILHPSRPGGVPGAIPGGVPGGVFYPGAGLGALGGGALGPGGKPLKPVPGGLAGAGLGAGVGGAFAGIPGVGPFGGPQPGVPLGYPIKAPKLPGYGPGGVAGAAGKAGYPTGTGVGPQAAAAAAAKAAAKFGAGAAGVLPGVGGAGVPGVPGAIPGIGGIAGVGTPAAAAAAAAAAKAAKYGAAAGLVPGGPGFGPGVVGVPGAGVPGVGVPGAGIPVVPGAGIPGAAVPGVVSPEAAAKAAAKAAKYGARPGVGVGGIPTYGVGAGGFPGFGVGVGGIPGVAGVPGVGGVPGVGGVPGVGISPEAQAAAAAKAAKYGLVPGVGVAPGVGVAPGVGVAPGVGLAPGVGVAPGVGVAPGVGVAPGIGPGGVAAAAKSAAKVAAKAQLRAAAGLGAGIPGLGVGVGVPGLGVGAGVPGLGVGAGVPGFGAVPGALAAAKAAKYGAAVPGVLGGLGALGGVGIPGGVVGAGPAAAAAAAKAAAKAAQFGLVGAAGLGGLGVGGLGVPGVGGLGGIPPAAAAKAAKYGVAARPGFGLSPIFPGGACLGKACGRKRK

SEQ ID NO: 1563 - protein, 730 aa, Homo sapiens
MAGLTAAAPRPGVLLLLLSILHPSRPGGVPGAIPGGVPGGVFYPGAGLGALGGGALGPGGKPLKPVPGGLAGAGLGAGLGAFPAVTFPGALVPGGVADAAAAYKAAKAGAGLGGVPGVGGLGVSAGAVVPQPGAGVKPGKVPGVGLPGVYPGGVLPGARFPGVGVLPGVPTGAGVKPKAPGVGGAFAGIPGVGPFGGPQPGVPLGYPIKAPKLPGGYGLPYTTGKLPYGYGPGGVAGAAGKAGYPTGTGVGPQAAAAAAAKAAAKFGAGAAGVLPGVGGAGVPGVPGAIPGIGGIAGVGTPAAAAAAAAAAKAAKYGAAAGLVPGGPGFGPGVVGVPGAGVPGVGVPGAGIPVVPGAGIPGAAVPGVVSPEAAAKAAAKAAKYGARPGVGVGGIPTYGVGAGGFPGFGVGVGGIPGVAGVPGVGGVPGVGGVPGVGISPEAQAAAAAKAAKYGVGTPAAAAAKAAAKAAQFALLNLAGLVPGVGVAPGVGVAPGVGVAPGVGLAPGVGVAPGVGVAPGVGVAPGIGPGGVAAAAKSAAKVAAKAQLRAAAGLGAGIPGLGVGVGVPGLGVGAGVPGLGVGAGVPGFGAVPGALAAAKAAKYGAAVPGVLGGLGALGGVGIPGGVVGAGPAAAAAAAKAAAKAAQFGLVGAAGLGGLGVGGLGVPGVGGLGGIPPAAAAKAAKYGAAGLGGVLGGAGQFPLGGVAARPGFGLSPIFPGGACLGKACGRKRK

SEQ ID NO: 1564 - protein, 438 aa, Homo sapiens
MLRSTSTVTLLSGGAARTPGAPSRRANVCRLRLTVPPESPVPEQCEKKIERKEQLLDLSNGEPTRKLPQGVVYGVVRRSDQNQQKEMVVYGWSTSQLKEEMNYIKDVRATLEKVRKRMYGDYDEMRQKIRQLTQELSVSHAQQEYLENHIQTQSSALDRFNAMNSALASDSIGLQKTLVDVTLENSNIKDQIRNLQQTYEASMDKLREKQRQLEVAQVENQLLKMKVESSQEANAEVMREMTKKLYSQYEEKLQEEQRKHSAEKEALLEETNSFLKAIEEANKKMQAAEISLEEKDQRIGELDRLIERMEKERHQLQLQLLEHETEMSGELTDSDKERYQQLEEASASLRERIRHLDDMVHCQQKKVKQMVEENNELQSRLDYLTETQAKTEVETREIGVGCDLLPSQTGRTREIVMPSRNYTPYTRVLELTMKKTLT

SEQ ID NO: 1565 - protein, 445 aa, Homo sapiens
MLRSTSTVTLLSGGAARTPGAPSRRANVCRLRLTVPPESPVPEQCEKKIERKEQLLDLSNGEPTRKLPQGVVYGVVRRSDQNQQKEMVVYGWSTSQLKEEMNYIKDVRATLEKVRKRMYGDYDEMRQKIRQLTQELSVSHAQQEYLENHIQTQSSALDRFNAMNSALASDSIGLQKTLVDVTLENSNIKDQIRNLQQTYEASMDKLREKQRQLEVAQVENQLLKMKVESSQEANAEVMREMTKKLYSQYEEKLQEEQRKHSAEKEALLEETNSFLKAIEEANKKMQAAEISLEEKDQRIGELDRLIERMEKERHQLQLQLLEHETEMSGELTDSDKERYQQLEEASASLRERIRHLDDMVHCQQKKVKQMVEEIESLKKKLQQKQLLILQLLEKISFLEGENNELQSRLDYLTETQAKTEVETREIGVGCDLLPRRCKQSSQRKN

SEQ ID NO: 1566 - protein, 550 aa, Homo sapiens
MLRSTSTVTLLSGGAARTPGAPSRRANVCRLRLTVPPESPVPEQCEKKIERKEQLLDLSNGEPTRKLPQGVVYGVVRRSDQNQQKEMVVYGWSTSQLKEEMNYIKDVRATLEKVRKRMYGDYDEMRQKIRQLTQELSVSHAQQEYLENHIQTQSSALDRFNAMNSALASDSIGLQKTLVDVTLENSNIKDQIRNLQQTYEASMDKLREKQRQLEVAQVENQLLKMKVESSQEANAEVMREMTKKLYSQYEEKLQEEQRKHSAEKEALLEETNSFLKAIEEANKKMQAAEISLEEKDQRIGELDRLIERMEKERHQLQLQLLEHETEMSGELTDSDKERYQQLEEASASLRERIRHLDDMVHCQQKKVKQMVEEIESLKKKLQQKQLLILQLLEKISFLEGENNELQSRLDYLTETQAKTEVETREIGVGCDLLPRLPFRQNDSSSHCQKSGSPISSEERRRRDKQHLDDITAARLLPLHHMPTQLLSIEESLALQKQQKQNYEEMQAKLAAQKLAERLNIKMRSYNPEGESSGRYREVRDEDDDWSSDEF

SEQ ID NO: 1567 - protein, 677 aa, Homo sapiens
MAGLTAAAPRPGVLLLLLSILHPSRPGGVPGAIPGGVPGGVFYPALGPGGKPLKPVPGGLAGAGLGAGLGAFPAVTFPGALVPGGVADAAAAYKAAKAGAGLGGVPGVGGLGVSAGAVVPQPGAGVKPGKVPGVGLPGVYPGGVLPGARFPGVGVLPGVPTGAGVKPKAPGVGGAFAGIPGVGPFGGPQPGVPLGYPIKAPKLPGGYGLPYTTGKLPYGYGPGGVAGAAGKAGYPTGTGVGPQAAAAAAAKAAAKFGAGAAGVLPGVGGAGVPGVPGAIPGIGGIAGVGTPAAAAAAAAAAKAAKYGAAAGLVPGGPGFGPGVVGVPGAGVPGVGVPGAGIPVVPGAGIPGAAVPGVVSPEAAAKAAAKAAKYGARPGVGVGGIPTYGVGAGGFPGFGVGVGGIPGVAGVPGVGGVPGVGGVPGVGISPEAQAAAAAKAAKYGLVPGVGVAPGVGVAPGVGVAPGVGLAPGVGVAPGVGVAPGVGVAPGIGPGGVAAAAKSAAKVAAKAQLRAAAGLGAGIPGLGVGVGVPGLGVGAGVPGLGVGAGVPGFGAVPGALAAAKAAKYGAAVPGVLGGLGALGGVGIPGGVVGAGPAAAAAAAKAAAKAAQFGLVGAAGLGGLGVGGLGVPGVGGLGGIPPAAAAKAAKYGVAARPGFGLSPIFPGGACLGKACGRKRK

SEQ ID NO: 1568 - protein, 705 aa, Homo sapiens
MAGLTAAAPRPGVLLLLLSILHPSRPGGVPGAIPGGVPGGVFYPGAGLGALGGGALGPGGKPLKPVPGGLAGAGLGAGLGAFPAVTFPGALVPGGVADAAAAYKAAKAGAGLGGVPGVGGLGVSAGAVVPQPGAGVKPGKVPGVGLPGVYPGGVLPGARFPGVGVLPGVPTGAGVKPKAPGVGGAFAGIPGVGPFGGPQPGVPLGYPIKAPKLPGGYGLPYTTGKLPYGYGPGGVAGAAGKAGYPTGTGVGPQAAAAAAAKAAAKFGAGAAGVLPGVGGAGVPGVPGAIPGIGGIAGVGTPAAAAAAAAAAKAAKYGAAAGLVPGGPGFGPGVVGVPGAGVPGVGVPGAGIPVVPGAGIPGAAVPGVVSPEAAAKAAAKAAKYGARPGVGVGGIPTYGVGAGGFPGFGVGVGGIPGVAGVPGVGGVPGVGGVPGVGISPEAQAAAAAKAAKYGLVPGVGVAPGVGVAPGVGVAPGVGLAPGVGVAPGVGVAPGVGVAPGIGPGGVAAAAKSAAKVAAKAQLRAAAGLGAGIPGLGVGVGVPGLGVGAGVPGLGVGAGVPGFGAVPGALAAAKAAKYGAAVPGVLGGLGALGGVGIPGGVVGAGPAAAAAAAKAAAKAAQFGLVGAAGLGGLGVGGLGVPGVGGLGGIPPAAAAKAAKYGAAGLGGVLGGAGQFPLGGVAARPGFGLSPIFPGGACLGKACGRKRK

SEQ ID NO: 1569 - protein, 658 aa, Homo sapiens
MAGLTAAAPRPGVLLLLLSILHPSRPGGVPGAIPGGVPGGVFYPGAGLGALGGGALGPGGKPLKPVPGGLAGAGLGAGLGAFPAVTFPGALVPGGVADAAAAYKAAKAGAGLGGVPGVGGLGVSAGAVVPQPGAGVKPGKVPGVGLPGVYPGGVLPGARFPGVGVLPGVPTGAGVKPKAPGVGGAFAGIPGVGPFGGPQPGVPLGYPIKAPKLPGYGPGGVAGAAGKAGYPTGTGVGPQAAAAAAAKAAAKFGAGAAGVLPGVGGAGVPGVPGAIPGIGGIAGVGTPAAAAAAAAAAKAAKYGAAAGLVPGGPGFGPGVVGVPGAGVPGVGVPGAGIPVVPGAGIPGAAVPGVVSPEAAAKAAAKAAKYGARPGVGVGGIPTYGVGAGGFPGFGVGVGGIPGVAGVPGVGGVPGVGGVPGVGISPEAQAAAAAKAAKYGLVPGVGVAPGVGVAPGVGVAPGVGLAPGVGVAPGVGVAPGVGVAPGIGPGGVAGAAAGLGAGIPGLGVGVGVPGLGVGAGVPGLGVGAGVPGFGAVPGALAAAKAAKYGAAVPGVLGGLGALGGVGIPGGVVGAGPAAAAAAAKAAAKAAQFGLVGAAGLGGLGVGGLGVPGVGGLGGIPPAAAAKAAKYGVAARPGFGLSPIFPGGACLGKACGRKRK

SEQ ID NO: 1570 - protein, 1326 aa, Homo sapiens
MNLNTSSNTGDTQRLKIASLDVKQILKNETELDITDNLRKKLHWAKKEKLEITTKHNAELASYESQIAKLRSEVEKGEALRQSLEYDLAVARKEAGLGRRAAEERLAEAHRIQEKLCAQNSELQAKTNETEKAFQTSQQKWKEECRRFEHDLEERDNMIQNCNREYDLLMKEKSRLEKTLQEALEKHQREKNEMESHIRETALEEFRLQEEQWEAERRELQFIVQEQDTAVQNMHKKVEKLETEHMDCSDLLRRQTSELEFSTQREERLRKEFEATTLRVRKLEENIEAERAAHLESKFNSEIIQLRIRDLEGALQVEKASQAEAVADLEIIKNEFKEVESAYEREKHNAQESFAKLNLLEKEYFSKNKKLNEDIEEQKKVIIDLSKRLQYNEKSCSELQEELVMAKKHQAFLVETCENNVKELESILDSFTVSGQWTSGIHKDKDKPPSFSVVLERLRRTLTDYQNKLEDASNEEKACNELDSTKQKIDSHTKNIKELQDKLADVNKELSHLHTKCADREALISTLKVELQNVLHCWEKEKAQAAQSESELQKLSQAFHKDAEEKLTFLHTLYQHLVAGCVLIKQPEGMLDKFSWSELCAVLQENVDALIADLNRANEKIRHLEYICKNKSDTMRELQQTQEDTFTKVAEQIKAQESCWHRQKKELELQYSELFLEVQKRAQKFQEIAEKNMEKLNHIEKSHEQLVLENSHFKKLLSQTQREQMSLLAACALMAGALYPLYSRSCALSTQRDFLQEQVNTFELFKLEIRTLAQALSTVEEKKQEEAKMKKKTFKGLIRIFRKGVIAVLAANRLKILGQSCASLFTWMESFKEGIGMLVCTGEPQDKHKFPKHQKEQLRCLQALSWLTSSDLLAAIISSMAELQDVIGKADPNSRICGHLLIGAAKNSFAKLMDKISLVMECIPLHSSRSITYVEKDSLVQRLAHGLHKVNTLALKYGLRGHVPITKSTASLQKQILGFTQRLHAAEVERRSLRLEVTEFKRSVNEMKKELDKAQGLQMQLNEFKQSKLITHEKFESACEELNNALLREEQAQMLLNEQAQQLQELNYKLELHSSEEADKNQTLGEAVKSLSEAKMELRRKDQSLRQLNRHLTQLEQDKRRLEENIHDAESALRMAAKDKECVANHMRAVENTLHKVRDQISLSWSAASRNDFTLQLPKLHLETFAMEGLKGGPEVVACQAMIKSFMDVYQLASTRIMTLEKEMTSHRSHIAALKSELHTACLRENASLQSIGSRDHSNLSIPSRAPLPADTTGIGDFLPLKAELDTTYTFLKETFINTVPHALTSSHSSPVTMSANANRPTQIGL

SEQ ID NO: 1571 - protein, 886 aa, Homo sapiens
MEPPTVPSERSLSLSLPGPREGQATLKPPPQHLWRQPRTPIRIQQRGYSDSAERAERERQPHRPIERADAMDTSDRPGLRTTRMSWPSSFHGTGTGSGGAGGGSSRRFEAENGPTPSPGRSPLDSQASPGLVLHAGAATSQRRESFLYRSDSDYDMSPKTMSRNSSVTSEAHAEDLIVTPFAQVLASLRSVRSNFSLLTNVPVPSNKRSPLGGPTPVCKATLSEETCQQLARETLEELDWCLEQLETMQTYRSVSEMASHKFKRMLNRELTHLSEMSRSGNQVSEYISTTFLDKQNEVEIPSPTMKEREKQQAPRPRPSQPPPPPVPHLQPMSQITGLKKLMHSNSLNNSNIPRFGVKTDQEELLAQELENLNKWGLNIFCVSDYAGGRSLTCIMYMIFQERDLLKKFRIPVDTMVTYMLTLEDHYHADVAYHNSLHAADVLQSTHVLLATPALDAVFTDLEILAALFAAAIHDVDHPGVSNQFLINTNSELALMYNDESVLENHHLAVGFKLLQEDNCDIFQNLSKRQRQSLRKMVIDMVLATDMSKHMTLLADLKTMVETKKVTSSGVLLLDNYSDRIQVLRNMVHCADLSNPTKPLELYRQWTDRIMAEFFQQGDRERERGMEISPMCDKHTASVEKSQVGFIDYIVHPLWETWADLVHPDAQEILDTLEDNRDWYYSAIRQSPSPPPEEESRGPGHPPLPDKFQFELTLEEEEEEEISMAQIPCTAQEALTAQGLSGVEEALDATIAWEASPAQESLEVMAQEASLEAELEAVYLTQQAQSTGSAPVAPDEFSSREEFVVAVSHSSPSALALQSPLLPAWRTLSVSEHAPGLPGLPSTAAEVEAQREHQAAKRACSACAGTFGEDTSALPAPGGGGSGGDPT

SEQ ID NO: 1572 - protein, 2199 aa, Homo sapiens
MAEPSSARRPVPLIESELYFLIARYLSAGPCRRAAQVLVQELEQYQLLPKRLDWEGNEHNRSYEELVLSNKHVAPDHLLQICQRIGPMLDKEIPPSISRVTSLLGAGRQSLLRTAKDCRHTVWKGSAFAALHRGRPPEMPVNYGSPPNLVEIHRGKQLTGCSTFSTAFPGTMYQHIKMHRRILGHLSAVYCVAFDRTGHRIFTGSDDCLVKIWSTHNGRLLSTLRGHSAEISDMAVNYENTMIAAGSCDKIIRVWCLRTCAPVAVLQGHTGSITSLQFSPMAKGSQRYMVSTGADGTVCFWQWDLESLKFSPRPLKFTEKPRPGVQMLCSSFSVGGMFLATGSTDHVIRMYFLGFEAPEKIAELESHTDKVDSIQFCNNGDRFLSGSRDGTARIWRFEQLEWRSILLDMATRISGDLSSEEERFMKPKVTMIAWNQNDSIVVTAVNDHVLKVWNSYTGQLLHNLMGHADEVFVLETHPFDSRIMLSAGHDGSIFIWDITKGTKMKHYFNMIEGQGHGAVFDCKFSQDGQHFACTDSHGHLLIFGFGCSKPYEKIPDQMFFHTDYRPLIRDSNNYVLDEQTQQAPHLMPPPFLVDVDGNPHPTKYQRLVPGRENSADEHLIPQLGYVATSDGEVIEQIISLQTNDNDERSPESSILDGMIRQLQQQQDQRMGADQDTIPRGLSNGEETPRRGFRRLSLDIQSPPNIGLRRSGQVEGVRQMHQNAPRSQIATERDLQAWKRRVVVPEVPLGIFRKLEDFRLEKGEEERNLYIIGRKRKTLQLSHKSDSVVLVSQSRQRTCRRKYPNYGRRNRSWRELSSGNESSSSVRHETSCDQSEGSGSSEEDEWRSDRKSESYSESSSDSSSRYSDWTADAGINLQPPLRTSCRRRITRFCSSSEDEISTENLSPPKRRRKRKKENKPKKENLRRMTPAELANMEHLYEFHPPVWITDTTLRKSPFVPQMGDEVIYFRQGHEAYIEAVRRNNIYELNPNKEPWRKMDLRDQELVKIVGIRYEVGPPTLCCLKLAFIDPATGKLMDKSFSIRYHDMPDVIDFLVLRQFYDEARQRNWQSCDRFRSIIDDAWWFGTVLSQEPYQPQYPDSHFQCYIVRWDNTEIEKLSPWDMEPIPDNVDPPEELGASISVTTDELEKLLYKPQAGEWGQKSRDEECDRIISGIDQLLNLDIAAAFAGPVDLCTYPKYCTVVAYPTDLYTIRMRLVNRFYRRLSALVWEVRYIEHNARTFNEPESVIARSAKKITDQLLKFIKNQHCTNISELSNTSENDEQNAEDLDDSDLPKTSSGRRRVHDGKKSIRATNYVESNWKKQCKELVNLIFQCEDSEPFRQPVDLVEYPDYRDIIDTPMDFGTVRETLDAGNYDSPLEFCKDIRLIFSNAKAYTPNKRSKIYSMTLRLSALFEEKMKKISSDFKIGQKFNEKLRRSQRFKQRQNCKGDSQPNKSIRNLKPKRLKSQTKIIPELVGSPTQSTSSRTAYLGTHKTSAGISSGVTSGDSSDSAESSERRKRNRPITNGSTLSESEVEDSLATSLSSSASSSSEESKESSRARESSSRSGLSRSSNLRVTRTRAAQRKTGPVSLANGCGRKATRKRVYLSDSDNNSLETGEILKARAGNNRKVLRKCAAVAANKIKLMSDVEENSSSESVCSGRKLPHRNASAVARKKLLHNSEDEQSLKSEIEEEELKDENQLLPVSSSHTAQSNVDESENRDSESESDLRVARKNWHANGYKSHTPAPSKTKFLKIESSEEDSKSHDSDHACNRTAGPSTSVQKLKAESISEEADSEPGRSGGRKYNTFHKNASFFKKTKILSDSEDSESEEQDREDGKCHKMEMNPISGNLNCDPIAMSQCSSDHGCETDLDSDDDKIEKPNNFMKDSASQDNGLSRKISRKRVCSSDSDSSLQVVKKSSKARTGLLRITRRCAATAANKIKLMSDVEDVSLENVHTRSKNGRKKPLHLACTTAKKKLSDCEGSVHCEVPSEQYACEGKPPDPDSEGSTKVLSQALNGDSDSEDMLNSEHKHRHTNIHKIDAPSKRKSSSVTSSGEDSKSHIPGSETDRTFSSESTLAQKATAENNFEVELNYGLRRWNGRRLRTYGKAPFSKTKVIHDSQETAEKEVKRKRSHPELENVKISETTGNSKFRPDTSSKSSDLGSVTESDIDCTDNTKTKRRKTKGKAKVVRKDKTFSPVYL

SEQ ID NO: 1573 - protein, 2179 aa, Homo sapiens
MNSLSWGAANAVLLLLLLAWASPTFISINRGVRVMKGHSAFLSGDDLKFAIPKEKDACKVEVVMNEPITQRVGKLTPQVFDCHFLPNEVKYVHNGCPILDEDTVKLRLYRFTERDTFIETFILWVYLLEPDCNIIHMSNNVLEVPEFNGLSQAIDKNLLRFDYDRMASLECTVSLDTARTRLPAHGQMVLGEPRPEEPRGDQPHSFFPESQLRAKLKCPGGSCTPGLKKIGSLKVSCEEFLLMGLRYQHLDPPSPNIDYISIQLDLTDTRSKIVYKSESAWLPVYIRAGIPNQIPKAAFMAVFILEVDQFILTSLTTSVLDCEEDETPKPLLVFNITKAPLQGYVTHLLDHTRPISSFTWKDLSDMQIAYQPPNSSHSERRHDEVELEVYDFFFERSAPMTVHISIRTADTNAPRVSWNTGLSLLEGQSRAITWEQFQVVDNDDIGAVRLVTVGGLQHGWLTLRGGKGFLFTVADLQAGVVRYHHDDSDSTKDFVVFRIFDGHHSIRHKFPINVLPKDDSPPFLITNVVIELEEGQTILIQGSMLRASDVDASDDYIFFNITKPPQAGEIMKKPGPGLIGYPVHGFLQRDLFNGIIYYRHFGGEIFEDSFQFVLWDSHEPPNLSVPQVATIHITPVDDQLPKEAPGVSRHLVVKETEVAYITKKQLHFIDSESYDRELVYTITTPPFFSFSHRHLDAGKLFMVDSIPKVVKNPTALELRSFTQHAVNYMKVAYMPPMQDIGPHCRDVQFTFSVSNQHGGTLHGICFNITILPVDNQVPEAFTNPLKVTEGGQSIISTEHILISDADTKLDNIDLSLRELPLHGRVELNGFPLNSGGTFSWGDLHTLKVRYQHDGTEVLQDDLLLEVTDGTNSAEFVLHVEVFPVNDEPPVLKADLMPVMNCSEGGEVVITSEYIFATDVDSDNLKLMFVIAREPQHGVVRRAGVTVDQFSQRDVISEAVTYKHTGGEIGLMPCFDTITLVVSDGEAGPFVNGCCYNGPNPSVPLHASFPVYDLNITVYPVDNQPPSIAIGPVFVVDEGCSTALTVNHLSATDPDTAADDLEFVLVSPPQFGYLENILPSVGFEKSNIGISIDSFQWKDMNAFHINYVQSRHLRIEPTADQFTVYVTDGKHHSLEIPFSIIINPTNDEAPDFVVQNITVCEGQMKELDSSIISAVDLDIPQDALLFSITQKPRHGLLIDRGFSKDFSENKQPANPHQKHAPVHSFSMELLKTGMRLTYMHDDSESLADDFTIQLSDGKHKILKTISVEVIPVNDEKPMLSKKAEIAMNMGETRIISSAILSAIDEDSPREKIYYVFERLPQNGQLQLKIGRDWVPLSPGMKCTQEEVDLNLLRYTHTGAMDSQNQDSFTFYLWDGNNRSPALDCQITIKDMEKGDIVILTKPLVVSKGDRGFLTTTTLLAVDGTDKPEELLYVITSPPRYGQIEYVHYPGVPITNFSQMDVVGQTVCYVHKSKVTVSSDRFRFIISNGLRTEHGVFEITLETVDRALPVVTRNKGLRLAQGAVGLLSPDLLQLTDPDTPAENLTFLLVQLPQHGQLYLWGTGLLQHNFTQQDVDSKNVAYRHSGGDSQTDCFTFMATDGTNQGFIVNGRVWEEPVLFTIQVDQLDKTAPRITLLHSPSQVGLLKNGCYGIYITSRVLKASDPDTEDDQIIFKILQGPKHGHLENTTTGEFIHEKFSQKDLNSKTILYIINPSLEVNSDTVEFQIMDPTGNSATPQILELKWSHIEWSQTEYEVCENVGLLPLEIIRRGYSMDSAFVGIKVNQVSAAVGKDFTVIPSKLIQFDPGMSTKMWNIAITYDGLEEDDEVFEVILNSPVNAVLGTKTKAAVKILDSKGGQCHPSYSSNQSKHSTWEKGIWHLLPPGSSSSTTSGSFHLERRPLPSSMQLAVIRGDTLRGFDSTDLSQRKLRTRGNGKTVRPSSVYRNGTDIIYNYHGIVSLKLEDDSFPTHKRKAKVSIISQPQKTIKVAELPQADKVESTTDSHFPRQDQLPSFPKNCTLELKGLFHFEEGIQKLYQCNGIAWKAWSPQTKDVEDKSCPAGWHQHSGYCHILITEQKGTWNAAAQACREQYLGNLVTVFSRQHMRWLWDIGGRKSFWIGLNDQVHAGHWEWIGGEPVAFTNGRRGPSQRSKLGKSCVLVQRQGKWQTKDCRRAKPHNYVCSRKL

SEQ ID NO: 1574 - protein, 715 aa, Homo sapiens
MVTQESMLKAALPLFTRFIISNGLRTEHGVFEITLETVDRALPVVTRNKGLRLAQGAVGLLSPDLLQLTDPDTPAENLTFLLVQLPQHGQLYLWGTGLLQHNFTQQDVDSKNVAYRHSGGDSQTDCFTFMATDGTNQGFIVNGRVWEEPVLFTIQVDQLDKTAPRITLLHSPSQVGLLKNGCYGIYITSRVLKASDPDTEDDQIIFKILQGPKHGHLENTTTGEFIHEKFSQKDLNSKTILYIINPSLEVNSDTVEFQIMDPTGNSATPQILELKWSHIEWSQTEYEVCENVGLLPLEIIRRGYSMDSAFVGIKVNQVSAAVGKDFTVIPSKLIQFDPGMSTKMWNIAITYDGLEEDDEVFEVILNSPVNAVLGTKTKAAVKILDSKGGQCHPSYSSNQSKHSTWEKGIWHLLPPGSSSSTTSGSFHLERRPLPSSMQLAVIRGDTLRGFDSTDLSQRKLRTRGNGKTVRPSSVYRNGTDIIYNYHGIVSLKLEDDSFPTHKRKAKVSIISQPQKTIKVAELPQADKVESTTDSHFPRQDQLPSFPKNCTLELKGLFHFEEGIQKLYQCNGIAWKAWSPQTKDVEDKSCPAGWHQHSGYCHILITEQKGTWNAAAQACREQYLGNLVTVFSRQHMRWLWDIGGRKSFWIGLNDQVHAGHWEWIGGEPVAFTNGRRGPSQRSKLGKSCVLVQRQGKWQTKDCRRAKPHNYVCSRKL

SEQ ID NO: 1575 - protein, 669 aa, Homo sapiens
MAVYRAALGASLAAARLLPLGRCSPSPAPRSTLSGAAMEPAPRWLAGLRFDNRALRALPVEAPPPGPEGAPSAPRPVPGACFTRVQPTPLRQPRLVALSEPALALLGLGAPPAREAEAEAALFFSGNALLPGAEPAAHCYCGHQFGQFAGQLGDGAAMYLGEVCTATGERWELQLKGAGPTPFSRQADGRKVLRSSIREFLCSEAMFHLGVPTTRAGACVTSESTVVRDVFYDGNPKYEQCTVVLRVASTFIRFGSFEIFKSADEHTGRAGPSVGRNDIRVQLLDYVISSFYPEIQAAHASDSVQRNAAFFREVTRRTARMVAEWQCVGFCHGVLNTDNMSILGLTIDYGPFGFLDRYDPDHVCNASDNTGRYAYSKQPEVCRWNLRKLAEALQPELPLELGEAILAEEFDAEFQRHYLQKMRRKLGLVQVELEEDGALVSKLLETMHLTGADFTNTFYLLSSFPVELESPGLAEFLARLMEQCASLEELRLAFRPQMDPRQLSMMLMLAQSNPQLFALMGTRAGIARELERVEQQSRLEQLSAAELQSRNQGHWADWLQAYRARLDKDLEGAGDAAAWQAEHVRVMHANNPKYVLRNYIAQNAIEAAERGDFSEVRRVLKLLETPYHCEAGAATDAEATEADGADGRQRSYSSKPPLWAAELCVTUSS

SEQ ID NO: 1576 - protein, 739 aa, Homo sapiens
MPALARDGGQLPLLVVFSAMIFGTITNQDLPVIKCVLINHKNNDSSVGKSSSYPMVSESPEDLGCALRPQSSGTVYEAAAVEVDVSASITLQVLVDAPGNISCLWVFKHSSLNCQPHFDLQNRGVVSMVILKMTETQAGEYLLFIQSEATNYTILFTVSIRNTLLYTLRRPYFRKMENQDALVCISESVPEPIVEWVLCDSQGESCKEESPAVVKKEEKVLHELFGTDIRCCARNELGRECTRLFTIDLNQTPQTTLPQLFLKVGEPLWIRCKAVHVNHGFGLTWELENKALEEGNYFEMSTYSTNRTMIRILFAFVSSVARNDTGYYTCSSSKHPSQSALVTIVEKGFINATNSSEDYEIDQYEEFCFSVRFKAYPQIRCTWTFSRKSFPCEQKGLDNGYSISKFCNHKHQPGEYIFHAENDDAQFTKMFTLNIRRKPQVLAEASASQASCFSDGYPLPSWTWKKCSDKSPNCTEEITEGVWNRKANRKVFGQWVSSSTLNMSEAIKGFLVKCCAYNSLGTSCETILLNSPGPFPFIQDNISFYATIGVCLLFIVVLTLLICHKYKKQFRYESQLQMVQVTGSSDNEYFYVDFREYEYDLKWEFPRENLEFGKVLGSGAFGKVMNATAYGISKTGVSIQVAVKMLKEKADSSEREALMSELKMMTQLGSHENIVNLLGACTLSGPIYLIFEYCCYGDLLNYLRSKREKFHRTWTEIFKEHNFSFYPTFQSHPNSSKKK

SEQ ID NO: 1577 - protein, 370 aa, Homo sapiens
MDSELKEEIPVHEEFILCGGAETQVLKCGPWTDLFHDQSVKRPKLLIFIIPGNPGFSAFYVPFAKALYSLTNRRFPVWTISHAGHALAPKDKKILTTSEDSNAQEIKDIYGLNGQIEHKLAFLRTHVPKDMKLVLIGHSIGSYFTLQMLKRVPELPVIRAFLLFPTIERMSESPNGRIATPLLCWFRYVLYVTGYLLLKPCPETIKSLLIRRGLQVMNLENEFSPLNILEPFCLANAAYLGGQEMMEVVKRDDETIKEHLCKLTFYYGTIDPWCPKEYYEDIKKDFPEGDIRLCEKNIPHAFITHFNQEMADMIADSLKDDLSKIGNPSWHYHSLRTMRCPSAQILKPPDERFGSDLLPTYWWKNQISRD

SEQ ID NO: 1578 - protein, 465 aa, Homo sapiens
MHSSCRQRRNQNLSKEIPQTEFHTGYSMENEPGIVSPFKRVFLKGEKSRDKKAHEKVTERRPLHTVVLSLPERVEPDRLLSDYIEKEVKYLGQLTSIPGYLNPSSRTEILHFIDNAKRAHQLPGHLTQEHDAVLSLSAYNVKLAWRDGEDIILRVPIHDIAAVSYVRDDAAHLVVLKTAQDPGISPSQSLCAESSRGLSAGSLSESAVGPVEACCLVILAAESKVAAEELCCLLGQVFQVVYTESTIDFLDRAIFDGASTPTHHLSLHSDDSSTKVDIKETYEVEASTFCFPESVDVGGASPHSKTISESELSASATELLQDYMLTLRTKLSSQEIQQFAALLHEYRNGASIHEFCINLRQLYGDSRKFLLLGLRPFIPEKDSQHFENFLETIGVKDGRGIITDSFGRHRRALSTTSSSTTNGNRATGSSDDRSAPSEGDEWDRMISDISSDIEALGCSMDQDSA

SEQ ID NO: 1579 - protein, 589 aa, Homo sapiens
MLHLHHSCLCFRSWLPAMLAVLLSLAPSASSDISASRPNILLLMADDLGIGDIGCYGNNTMRTPNIDRLAEDGVKLTQHISAASLCTPSRAAFLTGRYPVRSGMVSSIGYRVLQWTGASGGLPTNETTFAKILKEKGYATGLIGKWHLGLNCESASDHCHHPLHHGFDHFYGMPFSLMGDCARWELSEKRVNLEQKLNFLFQVLALVALTLVAGKLTHLIPVSWMPVIWSALSAVLLLASSYFVGALIVHADCFLMRNHTITEQPMCFQRTTPLILQEVASFLKRNKHGPFLLFVSFLHVHIPLITMENFLGKSLHGLYGDNVEEMDWMVGRILDTLDVEGLSNSTLIYFTSDHGGSLENQLGNTQYGGWNGIYKGGKGMGGWEGGIRVPGIFRWPGVLPAGRVIGEPTSLMDVFPTVVRLAGGEVPQDRVIDGQDLLPLLLGTAQHSDHEFLMHYCERFLHAARWHQRDRGTMWKVHFVTPVFQPEGAGACYGRKVCPCFGEKVVHHDPPLLFDLSRDPSETHILTPASEPVFYQVMERVQQAVWEHQRTLSPVPLQLDRLGNIWRPWLQPCCGPFPLCWCLREDDPQ

SEQ ID NO: 1580 - protein, 1332 aa, Homo sapiens
MAEAGLRGWLLWALLLRLAQSEPYTTIHQPGYCAFYDECGKNPELSGSLMTLSNVSCLSNTPARKITGDHLILLQKICPRLYTGPNTQACCSAKQLVSLEASLSITKALLTRCPACSDNFVNLHCHNTCSPNQSLFINVTRVAQLGAGQLPAVVAYEAFYQHSFAEQSYDSCSRVRVPAAATLAVGTMCGVYGSALCNAQRWLNFQGDTGNGLAPLDITFHLLEPGQAVGSGIQPLNEGVARCNESQGDDVATCSCQDCAASCPAIARPQALDSTFYLGQMPGSLVLIIILCSVFAVVTILLVGFRVAPARDKSKMVDPKKGTSLSDKLSFSTHTLLGQFFQGWGTWVASWPLTILVLSVIPVVALAAGLVFTELTTDPVELWSAPNSQARSEKAFHDQHFGPFFRTNQVILTAPNRSSYRYDSLLLGPKNFSGILDLDLLLELLELQERLRHLQVWSPEAQRNISLQDICYAPLNPDNTSLYDCCINSLLQYFQNNRTLLLLTANQTLMGQTSQVDWKDHFLYCANAPLTFKDGTALALSCMADYGAPVFPFLAIGGYKGKDYSEAEALIMTFSLNNYPAGDPRLAQAKLWEEAFLEEMRAFQRRMAGMFQVTFMAERSLEDEINRTTAEDLPIFATSYIVIFLYISLALGSYSSWSRVMVDSKATLGLGGVAVVLGAVMAAMGFFSYLGIRSSLVILQVVPFLVLSVGADNIFIFVLEYQRLPRRPGEPREVHIGRALGRVAPSMLLCSLSEAICFFLGALTPMPAVRTFALTSGLAVILDFLLQMSAFVALLSLDSKRQEASRLDVCCCVKPQELPPPGQGEGLLLGFFQKAYAPFLLHWITRGVVLLLFLALFGVSLYSMCHISVGLDQELALPKDSYLLDYFLFLNRYFEVGAPVYFVTTLGYNFSSEAGMNAICSSAGCNNFSFTQKIQYATEFPEQSYLAIPASSWVDDFIDWLTPSSCCRLYISGPNKDKFCPSTVNSLNCLKNCMSITMGSVRPSVEQFHKYLPWFLNDRPNIKCPKGGLAAYSTSVNLTSDGQVLASRFMAYHKPLKNSQDYTEALRAARELAANITADLRKVPGTDPAFEVFPYTITNVFYEQYLTILPEGLFMLSLCLVPTFAVSCLLLGLDLRSGLLNLLSIVMILVDTVGFMALWGISYNAVSLINLVSAVGMSVEFVSHITRSFAISTKPTWLERAKEATISMGSAVFAGVAMTNLPGILVLGLAKAQLIQIFFFRLNLLITLLGLLHGLVFLPVILSYVGPDVNPALALEQKRAEEAVAAVMVASCPNHPSRVSTADNIYVNHSFEGSIKGAGAISNFLPNNGRQF

SEQ ID NO: 1581 - protein, 172 aa, Homo sapiens
MAESLRSPRRSLYKLVGSPPWKEAFRQRCLERMRNSRDRLLNRYRQAGSSGPGNSQNSFLVQEVMEEEWNALQSVENCPEDLAQLEELIDMAVLEEIQQELINQEQSIISEYEKSLQFDEKCLSIMLAEWEANPLICPVCTKYNLRITSGVVVCQCGLSIPSHACDTWAVIL

SEQ ID NO: 1582 - protein, 219 aa, Homo sapiens
MAESLRSPRRSLYKLVGSPPWKEAFRQRCLERMRNSRDRLLNRYRQAGSSGPGNSQNSFLVQEVMEEEWNALQSVENCPEDLAQLEELIDMAVLEEIQQELINQEQSIISEYEKSLQFDEKCLSIMLAEWEANPLICPVCTKYNLRITSGVVVCQCGLSIPSHSSELTEQKLRACLEGSINEHSAHCPHTPEFSVTGGTEEKSSLLMSCLACDTWAVIL

SEQ ID NO: 1583 - protein, 441 aa, Homo sapiens
MDDDDFGGFEAAETFDGGSGETQTTSPAIPWAAFPAVSGVHLSPSSPEIVLDRDHSSSIGCLSSDAIISSPENTHAANSIVSQTIPKAQIQQSTHTHLDISLFPLGLTDEKSNGTIALVDDSEDPGANVSNIQLQQKISSLEIKLKVSEEEKQRIKQDVESLMEKHNVLEKGFLKEKEQEAISFQDRYKELQEKHKQELEDMRKAGHEALSIIVDEYKALLQSSVKQQVEAIEKQYISAIEKQAHKCEELLNAQHQRLLEMLDTEKELLKEKIKEALIQQSQEQKEILEKCLEEERQRNKEALVSAAKLEKEAVKDAVLKVVEEERKNLEKAHAEERELWKTEHAKDQEKVSQEIQKAIQEQRKISQETVKAAIIEEQKRSEKAVEEAVKRTRDELIEYIKEQKRLDQVIRQRSLSSLELFLSCAQKQLSALIATEPVDIE

SEQ ID NO: 1584 - protein, 434 aa, Homo sapiens
MLPARCARLLTPHLLLVLVQLSPARGHRTTGPRFLISDRDPQCNLHCSRTQPKPICASDGRSYESMCEYQRAKCRDPTLGVVHRGRCKDAGQSKCRLERAQALEQAKKPQEAVFVPECGEDGSFTQVQCHTYTGYCWCVTPDGKPISGSSVQNKTPVCSGSVTDKPLSQGNSGRKDDGSKPTPTMETQPVFDGDEITAPTLWIKHLVIKDSKLNNTNIRNSEKVYSCDQERQSALEEAQQNPREGIVIPECAPGGLYKPVQCHQSTGYCWCVLVDTGRPLPGTSTRYVMPSCESDARAKTTEADDPFKDRELPGCPEGKKMEFITSLLDALTTDMVQAINSAAPTGGGRFSEPDPSHTLEERVVHWYFSQLDSNSSNDINKREMKPFKRYVKKKAKPKKCARRFTDYCDLNKDKVISLPELKGCLGVSKEGRLV

SEQ ID NO: 1585 - protein, 296 aa, Homo sapiens
MSVGAMKKGVGRAVGLGGGSGCQATEEDPLPNCGACAPGQGGRRWRLPQPAWVEGSSARLWEQATGTGWMDLEASLLPTGPNASNTSDGPDNLTSAGSPPRTGSISYINIIMPSVFGTICLLGIIGNSTVIFAVVKKSKLHWCNNVPDIFIINLSFFLAFALPFVVITAAYVRILQRMTSSVAPASQRSIRLRTKRVTRTAIAICLVFFVCWAPYYVLQLTQLSISRPTLTFVYLYNAAISLGYANSCLNPFVYIVLCETFRKRLVLSVKPAAQGQLRAVSNAQTADEERTESKGT

SEQ ID NO: 1586 - protein, 270 aa, Homo sapiens
MKPKMKYSTNKISTAKWKNTASKALCFKLGKSQQKAKEVCPMYFMKLRSGLMIKKEACYFRRETTKRPSLKTGRKHKRHLVLAACQQQSTVECFAFGISGVQKYTRALHDSSITGISPITEYLASLSTYNDQSITFALEDESYEIYVEDLKKDEKKDKVLLSYYESQHPSNESGDGVDGKMLMVTLSPTKDFWLHANNKEHSVELHKCEKPLPDQAFFVLHNMHSNCVSFECKTDPGVFIGVKDNHLALIKVDSSENLCTENILFKLSET

SEQ ID NO: 1587 - protein, 693 aa, Homo sapiens
MAALGVQSINWQTAFNRQAHHTDKFSSQELILRRGQNFQVLMIMNKGLGSNERLEFIVSTGPYPSESAMTKAVFPLSNGSSGGWSAVLQASNGNTLTISISSPASAPIGRYTMALQIFSQGGISSVKLGTFILLFNPWLNVDSVFMGNHAEREEYVQEDAGIIFVGSTNRIGMIGWNFGQFEEDILSICLSILDRSLNFRRDAATDVASRNDPKYVGRVLSAMINSNDDNGVLAGNWSGTYTGGRDPRSWNGSVEILKNWKKSGFSPVRYGQCWVFAGTLNTALRSLGIPSRVITNFNSAHDTDRNLSVDVYYDPMGNPLDKGSDSVWNFHVWNEGWFVRSDLGPSYGGWQVLDATPQERSQGVFQCGPASVIGVREGDVQLNFDMPFIFAEVNADRITWLYDNTTGKQWKNSVNSHTIGRYISTKAVGSNARMDVTDKYKYPEGSDQERQVFQKALGKLKPNTPFAATSSMGLETEEQEPSIIGKLKVAGMLAVGKEVNLVLLLKNLSRDTKTVTVNMTAWTIIYNGTLVHEVWKDSATMSLDPEEEAEHPIKISYAQYEKYLKSDNMIRITAVCKVPDESEVVVERDIILDNPTLTLEVLNEARVRKPVNVQMLFSNPLDEPVRDCVLMVEGSGLLLGNLKIDVPTLGPKEGSRVRFDILPSRSGTKQLLADFSCNKFPAIKAMLSIDVAE

SEQ ID NO: 1588 - protein, 457 aa, Homo sapiens
MGNSYAGQLKTTRFEEVLHNSIEASLRSNNLVPRPIFSQLYLEAEQQLAALEGGSRVDNEEEEEEGEGGLETNGPPNPFQLHPLPEGCCTTDGFCQAGKDLRLVSISNEPMDVPAGFLLVGVKSPSLPDHLLVCAVDKRFLPDDNGHNALLGFSGNCVGCGKKGFCYFTEFSNHINLKLTTQPKKQKHLKYYLVRNAQGTLTKGPLICWKGSEFRSRQIPASTCSSSLFPALESTAAFPSEPVPGTNPSILMGAQQAGPASDHPSLNAAMGPAVFNGKDSPKCQQLAKNNLLALPRPSALGILSNSGPPKKRHKGWSPESPSAPDGGCPQGGGNRAKYESAGMSCVPQVGLVGPASVTFPVVASGEPVSVPDNLLKICKAKPVIFKGHGNFPYLCGNLNDVVVSPLLYTCYQNSQSVSRAYEQYGASAIQPISEEMQLLLTVYYLVQLAHQIRNPDV

SEQ ID NO: 1589 - protein, 354 aa, Homo sapiens
MIQPEKLLLVTVGKTATLHCTVTSLLPVGPVLWFRGVGPGRELIYNQKEGHFPRVTTVSDLTKRNNMDFSIRISSITPADVGTYYCVKFRKGSPENVEFKSGPGTEMALGAKPSAPVVLGPAARTTPEHTVSFTCESHGFSPRDITLKWFKNGNELSDFQTNVDPTGQSVAYSIRSTARVVLDPWDVRSQVICEVAHVTLQGDPLRGTANLSEAIRVPPTLEVTQQPMRVGNQVNVTCQVRKFYPQSLQLTWSENGNVCQRETASTLTENKDGTYNWTSWFLVNISDQRDDVVLTCQVKHDGQLAVSKRLALEVTVHQKDQSSDATPGPASSLTALLLIAVLLGPIYVPWKQKT

SEQ ID NO: 1590 - protein, 2961 aa, Homo sapiens
MGNAPSHSSEDEAAAAGGEGWGPHQDWAAVSGTTPGPGVAAPALPPAAALLEPARLREAAAALLPTPPCESLVSRHRGALFRWLEERLGRGEESVTLEQFRELLEARGAGCSSEQFEEAFAQFDAEGDGTVDAENMLEALKNSSGANLQGELSHIIRQLQACSLVPGFTDIFSESKEGLDIHSSMILRFLHRNRLSSAVMPYPMLEHCNNMCTMRSSVLKESLDQLVQKEKESPGDLTRSPEMDKLKSVAKCYAYIETSSNSADIDKMTNGETSSYWQSDGSACSHWIRLKMKPDVVLRHLSIAVAATDQSYMPQQVTVAVGRNASDLQEVRDVHIPSNVTGYVTLLENANVSQLYVQINIKRCLSDGCDTRIHGLRAVGFQRVKKSGVSVSDASAIWYWSLLTSLVTASMETNPAFVQTVLHNTQKALRHMPPLSLSPGSTDFSTFLSPNVLEEVDSFLIRITSCCSTPEVELTLLAFALARGSVAKVMSSLCTITDHLDTQYDASSLILSMASVRQNLLLKYGKPLQLTLQACDVKGKEDKSGPENLLVEPWTRDGFLTETGKTRASTIFSTGTESAFQVTQIRIMVRRGGIGAQCGLVFAYNSSSDKFCAEEHFKRFEKYDKWKLQELRQFVKSRIGCSSDDLGEDDPIGWFELEEEWDEADVKLQQCRVAKYLMVKFLCTRQESAERLGVQGLTISGYLRPARAEAEQSVTCAHCRKDTEESVCGATLLLRTLQFIQQLAHDLVQQKESGLKYKSFLDFAGLDLQIFWNFYSKLKQNPREECVSAQTLLLQLLQSCFSVLQGDVLAASEEEKAPIQSPKGVEAAKELYTHLCDVVDKVDGDSVPMEILKQEVRNTLLNGAAIFFPNRQTRRNHLFTMMNVTEQEHKQSLQLTFRSLCTYFSDKDPGGLLLLPEKNDLAKMNISEVLAVMDTLVSVAARECELLMLSGAPGEVGSVLFSLFWSVQGSLLSWCYLQLKSTDSGAKDLAVDLIEKYVGQFLASMRAILESLFSQYSGKTIVERLCNSVFSMAARQLVIFLLDFCTLDIPHCVLLREFSVLTELLKKLCSGPEGGLRKLDVETWQQEQPVVLHTWTKESAHNYENNCHEVSVFVSPGATYFEVEFDDRCETEKRYDYLEFTDARGRKTRYDTKVGTDKWPKKVTFKAGPRLQFLFHSDSSHNEWGYKFTVTACGLPDVAVSWGLDLQLLVSRLMGRLASQCMALKSVRQLGSNMVVPQAKMALVLSSPLWKPVFRHQVCPELELEASWPTHPHRNSKEVKNIPDDPCRHFLLDFAQSEPAQNFCGPYSELFKGFIQACRKQAPKTDIVAGSTIDQAVNATFAALVYRTPDLYEKLQKYVNSGGKIALSEEFAQVYSLADGIRIWMLEMKQKSLMSLGNEAEEKHSSEATEVNPESLAKECIEKSLLLLKFLPTGISSKESCEKLETADETSHLQPLNKRQRTSSVVEEHFQASVSPTEAAPPATGDQSPGLGTQPKLPSSSGLPAADVSPATAEEPLSPSTPTRRPPFTRGRLRLLSFRSMEEARLVPTVKEKYPVLKDVMDFIKDQSLSHRSVVKVLSLRKAQAQSILEVLKITQHCAESLGQPHCFHPPFILFLLELLTCQKDFTNYFGHLEGCGADLHKEIRDTYYQLVLFLVKAVKGFSSLNDRSLLPALSCVQTALLHLLDMGWEPNDLAFFVDIQLPDLLMKMSQENISVHDSVISQWSEEDELADAKQNSEWMDECQDGMFEAWYEKIAQEDPEKQRKMHMFIARYCDLLNVDISCDGCDEIAPWHRYRCLQCSDMDLCKTCFLGGVKPEGHGDDHEMVNMEFTCDHCQGLIIGRRMNCNVCDDFDLCYGCYAAKKYSYGHLPTHSITAHPMVTIRISDRQRLIQPYIHNYSWLLFAALALYSAHLASAEDVDGEKLDPQTRSSATTLRSQCMQLVGDCLMKAHQGKGLKALALLGVLPDGDSSLEDQALPVTVPTGASEEQLEKKAVQGAELSEAGNGKRAVHEEIRPVDFKQRNKADKGVSLSKDPSCQTQISDSPADASPPTGLPDAEDSEVSSQKPIEEKAVTPSPEQVFAECSQKRILGLLAAMLPPLKSGPTVPLIDLEHVLPLMFQVVISNAGHLNETYHLTLGLLGQLIIRLLPAEVDAAVIKVLSAKHNLFAAGDSSIVPDGWKTTHLLFSLGAVCLDSRVGLDWACSMAEILRSLNSAPLWRDVIATFTDHCIKQLPFQLKHTNIFTLLVLVGFPQVLCVGTRCVYMDNANEPHNVIILKHFTEKNRAVIVDVKTRKRKTVKDYQLVQKGGGQECGDSRAQLSQYSQHFAFIASHLLQSSMDSHCPEAVEATWVLSLALKGLYKTLKAHGFEEIRATFLQTDLLKLLVKKCSKGTGFSKTWLLRDLEILSIMLYSSKKEINALAEHGDLELDERGDREEEVERPVSSPGDPEQKKLDPLEGLDEPTRICFLMAHDALNAPLHILRAIYELQMKKTDYFFLEVQKRFDGDELTTDERIRSLAQRWQPSKSLRLEEQSAKAVDTDMIILPCLSRPARCDQATAESNPVTQKLISSTESELQQSYAKQRRSKSAALLHKELNCKSKRAVRDYLFRVNEATAVLYARHVLASLLAEWPSHVPVSEDILELSGPAHMTYILDMFMQLEEKHEWEKILQKVLQGCREDMLGTMALAACQFMEEPGMEVQVRESKHPYNNNTNFEDKVHIPGAIYLSIKFDSQCNTEEGCDELAMSSSSDFQQDRHSFSGSQQKWKDFELPGDTLYYRFTSDMSNTEWGYRFTVTAGHLGRFQTGFEILKQMLSEERVVPHLPLAKIWEWLVGVACRQTGHQRLKAIHLLLRIVRCCGHSDLCDLALLKPLWQLFTHMEYGLFEDVTQPGILLPLHRALTELFFVTENRAQELGVLQDYLLALTTDDHLLRCAAQALQNIAAISLAINYPNKATRLWNVEC

SEQ ID NO: 1591 - protein, 213 aa, Homo sapiens
MPRLLRLSLLWLGLLLVRFSRELSDISSARKLCGRYLVKEIEKLCGHANWSQFRFEEETPFSRLIAQASEKVEAYSPYQFESPQTASPARGRGTNPVSTSWEEAVNSWEMQSLPEYKDKKGYSPLGKTREFSSSHNINVYIHENAKFQKKRRNKIKTLSNLFWGHHPQRKRRGYSEKCCLTGCTKEELSIACLPYIDFKRLKEKRSSLVTKIY

SEQ ID NO: 1592 - protein, 1132 aa, Homo sapiens
MGMACLTMTEMEGTSTSSIYQNGDISGNANSMKQIDPVLQVYLYHSLGKSEADYLTFPSGEYVAEEICIAASKACGITPVYHNMFALMSETERIWYPPNHVFHIDESTRHNVLYRIRFYFPRWYCSGSNRAYRHGISRGAEAPLLDDFVMSYLFAQWRHDFVHGWIKVPVTHETQEECLGMAVLDMMRIAKENDQTPLAIYNSISYKTFLPKCIRAKIQDYHILTRKRIRYRFRRFIQQFSQCKATARNLKLKYLINLETLQSAFYTEKFEVKEPGSGPSGEEIFATIIITGNGGIQWSRGKHKESETLTEQDLQLYCDFPNIIDVSIKQANQEGSNESRVVTIHKQDGKNLEIELSSLREALSFVSLIDGYYRLTADAHHYLCKEVAPPAVLENIQSNCHGPISMDFAISKLKKAGNQTGLYVLRCSPKDFNKYFLTFAVERENVIEYKHCLITKNENEEYNLSGTKKNFSSLKDLLNCYQMETVRSDNIIFQFTKCCPPKPKDKSNLLVFRTNGVSDVPTSPTLQRPTHMNQMVFHKIRNEDLIFNESLGQGTFTKIFKGVRREVGDYGQLHETEVLLKVLDKAHRNYSESFFEAASMMSKLSHKHLVLNYGVCVCGDENILVQEFVKFGSLDTYLKKNKNCINILWKLEVAKQLAWAMHFLEENTLIHGNVCAKNILLIREEDRKTGNPPFIKLSDPGISITVLPKDILQERIPWVPPECIENPKNLNLATDKWSFGTTLWEICSGGDKPLSALDSQRKLQFYEDRHQLPAPKWAELANLINNCMDYEPDFRPSFRAIIRDLNSLFTPDYELLTENDMLPNMRIGALGFSGAFEDRDPTQFEERHLKFLQQLGKGNFGSVEMCRYDPLQDNTGEVVAVKKLQHSTEEHLRDFEREIEILKSLQHDNIVKYKGVCYSAGRRNLKLIMEYLPYGSLRDYLQKHKERIDHIKLLQYTSQICKGMEYLGTKRYIHRDLATRNILVENENRVKIGDFGLTKVLPQDKEYYKVKEPGESPIFWYAPESLTESKFSVASDVWSFGVVLYELFTYIEKSKSPPAEFMRMIGNDKQGQMIVFHLIELLKNNGRLPRPDGCPDEIYMIMTECWNNNVNQRPSFRDLALRVDQIRDNMAG

SEQ ID NO: 1593 - protein, 529 aa, Homo sapiens
MAPEMDQFYRSTMAIYKSIMEQFNPALENLVYLGNNYLRAFHALSEAAEVYFSAIQKIGERALQSPTSQILGEILVQMSDTQRHLNSDLEVVVQTFHGGLLQHMEKNTKLDMQFIKDSRQHYELEYRHRAANLEKCMSELWRMERKRDKNVREMKESVNRLHAQMQAFVSESQRAAELEEKRRYRFLAEKHLLLSNTFLQFFGRARGMLQNRVLLWKEQSEASRSPSRAHSPGLLGPALGPPYPSGRLTPTCLDMPPRPLGEFSSPRSRHGSGSYGTEPDARPASQLEPDRRSLPRTPSASSLYSGSAQSSRSNSFGERPGGGGGARRVRALVSHSEGANHTLLRFSAGDVVEVLVPEAQNGWLYGKLEGSSASGWFPEAYVKALEEGPVNPMTPVTPMTSMTSMSPMTPMNPGNELPSRSYPLRGSHSLDDLLDRPGNSIAPSEYWDGQSRSRTPSRVPSRAPSPAPPPLPSSRRSSMGSTAVATDVKKLMSSEQYPPQELFPRGTNPFATVKLRPTITNDRSAPLIR

SEQ ID NO: 1594 - protein, 454 aa, Homo sapiens
MATNIEQIFRSFVVSKFREIQQELSSGRNEGQLNGETNTPIEGNQAGDAAASARSLPNEEIVQKIEEVLSGVLDTELRYKPDKAQLLEIAKANAAAMCAKAGVPLPPNLKPAPPPTIEEKVAKKSGGATIEELTEKCKQIAQSKEDDDVIVNKPHVSDEEEEEPPFYHHPFKLSEPKPIFFNLNIAAAKPTPPKSQVTLTKEFPVSSGSQHRKKEADSVYGEWVPVEKNGEENKDDDNVFSSNLPSEPVDISTAMSERALAQKRLSENAFDLEAMSMLNRAQERIDAWAQLNSIPGQFTGSTGVQVLTQEQLANTGAQAWIKKDQFLRAAPVTGGMGAVLMRKMGWREGEGLGKNKEGNKEPILVDFKTDRKGLVAVGERAQKRSGNFSAAMKDLSGKHPVSALMEICNKRRWQPPEFLLVHDSGPDHRKHFLFRVLRNGALTRPNCMFFLNRY

SEQ ID NO: 1595 - protein, 824 aa, Homo sapiens
MPVAEAPQVAGGQGDGGDGEEAEPEGMFKACEDSKRKARGYLRLVPLFVLLALLVLASAGVLLWYFLGYKAEVMVSQVYSGSLRVLNRHFSQDLTRRESSAFRSETAKAQKMLKELITSTRLGTYYNSSSVYSFGEGPLTCFFWFILQIPEHRRLMLSPEVVQALLVEELLSTVNSSAAVPYRAEYEVDPEGLVILEASVKDIAALNSTLGCYRYSYVGQGQVLRLKGPDHLASSCLWHLQGPKDLMLKLRLEWTLAECRDRLAMYDVAGPLEKRLITSVYGCSRQEPVVEVLASGAIMAVVWKKGLHSYYDPFVLSVQPVVFQACEVNLTLDNRLDSQGVLSTPYFPSYYSPQTHCSWHLTVPSLDYGLALWFDAYALRRQKYDLPCTQGQWTIQNRRLCGLRILQPYAERIPVVATAGITINFTSQISLTGPGVRVHYGLYNQSDPCPGEFLCSVNGLCVPACDGVKDCPNGLDERNCVCRATFQCKEDSTCISLPKVCDGQPDCLNGSDEEQCQEGVPCGTFTFQCEDRSCVKKPNPQCDGRPDCRDGSDEEHCDCGLQGPSSRIVGGAVSSEGEWPWQASLQVRGRHICGGALIADRWVITAAHCFQEDSMASTVLWTVFLGKVWQNSRWPGEVSFKVSRLLLHPYHEEDSHDYDVALLQLDHPVVRSAAVRPVCLPARSHFFEPGLHCWITGWGALREGALRADAVALFYGWRNQGSETCCCPISNALQKVDVQLIPQDLCSEVYRYQVTPRMLCAGYRKGKKDACQGDSGGPLVCKALSGRWFLAGLVSWGLGCGRPNYFGVYTRITGVISWIQQVVT

SEQ ID NO: 1596 - protein, 524 aa, Homo sapiens
MTAEDSTAAMSSDSAAGSSAKVPEGVAGAPNEAALLALMERTGYSMVQENGQRKYGGPPPGWEGPHPQRGCEVFVGKIPRDVYEDELVPVFEAVGRIYELRLMMDFDGKNRGYAFVMYCHKHEAKRAVRELNNYEIRPGRLLGVCCSVDNCRLFIGGIPKMKKREEILEEIAKVTEGVLDVIVYASAADKMKNRGFAFVEYESHRAAAMARRKLMPGRIQLWGHQIAVDWAEPEIDVDEDVMETVKILYVRNLMIETTEDTIKKSFGQFNPGCVERVKKIRDYAFVHFTSREDAVHAMNNLNGTELEGSCLEVTLAKPVDKEQYSRYQKAARGGGAAEAAQQPSYVYSCDPYTLAYYGYPYNALIGPNRDYFVKVAIPAIGAQYSMFPAAPAPKMIEDGKIHTVEHMISPIAVQPDPASAAAAAAAAAAAAAAVIPTVSTPPPFQGRPITPVYTVAPNVQRIPTAGIYGASYVPFAAPATATIATLQKNAAAAAAMYGGYAGYIPQAFPAAAIQVPIPDVYQTY

SEQ ID NO: 1597 - protein, 280 aa, Homo sapiens
MELGHGAGTTTFTRAHLNDKEGQQDLDPWKAAYSSLDTSKFKNQGLSSPQPLPLGASAQGSSLGQCHLKEIPPPPPTAASRDSLGMDPQSRSLKNAGSRSSSRENRATSGEGAQPCQGTDDGPSLGAQDQRSTPTNQKGSIIPNNIRHKFGSNVVDQLVSEEQAQKAIDEVFEGQKRASSWPSRTQNPVEISSVFSDYYDLGYNMRSNLFRGAAEETKSLMKASYTPEVIEKSVRDLEHWHGRKTDDLGRWHQKNAMNLNLQKALEEKYGENSKSKSSKY

SEQ ID NO: 1598 - protein, 122 aa, Homo sapiens
MHDSNNVEKDITPSELPANPGCLHSKEHSIKATLIWRLFFLIMFLTIIVCGMVAALSAIRANCHQEPSVCLQAACPESWIGFQRKCFYFSDDTKNWTSSQRFCDSQDADLAQVESFQELVRK

SEQ ID NO: 1599 - protein, 1724 aa, Homo sapiens
MVMGIFANCIFCLKVKYLPQQQKKKLQTDIKENGGKFSFSLNPQCTHIILDNADVLSQYQLNSIQKNHVHIANPDFIWKSIREKRLLDVKNYDPYKPLDITPPPDQKASSSEVKTEGLCPDSATEEEDTVELTEFGMQNVEIPHLPQDFEVAKYNTLEKVGMEGGQEAVVVELQCSRDSRDCPFLISSHFLLDDGMETRRQFAIKKTSEDASEYFENYIEELKKQGFLLREHFTPEATQLASEQLQALLLEEVMNSSTLSQEVSDLVEMIWAEALGHLEHMLLKPVNRISLNDVSKAEGILLLVKAALKNGETAEQLQKMMTEFYRLIPHKGTMPKEVNLGLLAKKADLCQLIRDMVNVCETNLSKPNPPSLAKYRALRCKIEHVEQNTEEFLRVRKEVLQNHHSKSPVDVLQIFRVGRVNETTEFLSKLGNVRPLLHGSPVQNIVGILCRGLLLPKVVEDRGVQRTDVGNLGSGIYFSDSLSTSIKYSHPGETDGTRLLLICDVALGKCMDLHEKDFSLTEAPPGYDSVHGVSQTASVTTDFEDDEFVVYKTNQVKMKYIIKFSMPGDQIKDFHPSDHTELEEYRPEFSNFSKVEDYQLPDAKTSSSTKAGLQDASGNLVPLEDVHIKGRIIDTVAQVIVFQTYTNKSHVPIEAKYIFPLDDKAAVCGFEAFINGKHIVGEIKEKEEAQQEYLEAVTQGHGAYLMSQDAPDVFTVSVGNLPPKAKVLIKITYITELSILGTVGVFFMPATVAPWQQDKALNENLQDTVEKICIKEIGTKQSFSLTMSIEMPYVIEFIFSDTHELKQKRTDCKAVISTMEGSSLDSSGFSLHIGLSAAYLPRMWVEKHPEKESEACMLVFQPDLDVDLPDLASESEVIICLDCSSSMEGVTFLQAKQIALHALSLVGEKQKVNIIQFGTGYKELFSYPKHITSNTMAAEFIMSATPTMGNTDFWKTLRYLSLLYPARGSRNILLVSDGHLQDESLTLQLVKRSRPHTRLFACGIGSTANRHVLRILSQCGAGVFEYFNAKSKHSWRKQIEDQMTRLCSPSCHSVSVKWQQLNPDVPEALQAPAQVPSLFLNDRLLVYGFIPHCTQATLCALIQEKEFRTMVSTTELQKTTGTMIHKLAARALIRDYEDGILHENETSHEMKKQTLKSLIIKLSKENSLITQFTSFVAVEKRDENESPFPDIPKVSELIAKEDVDFLPYMSWQGEPQEAVRNQSLLASSEWPELRLSKRKHRKIPFSKRKMELSQPEVSEDFEEDGLGVLPAFTSNLERGGVEKLLDLSWTESCKPTATEPLFKKVSPWETSTSSFFPILAPAVGSYLPPTARAHSPASLSFASYRQVASFGSAAPPRQFDASQFSQGPVPGTCADWIPQSASCPTGPPQNPPSSPYCGIVFSGSSLSSAQSAPLQHPGGFTTRPSAGTFPELDSPQLHFSLPTDPDPIRGFGSYHPSASSPFHFQPSAASLTANLRLPMASALPEALCSQSRTTPVDLCLLEESVGSLEGSRCPVFAFQSSDTESDELSEVLQDSCFLQIKCDTKDDSILCFLEVKEEDEIVCIQHWQDAVPWTELLSLQTEDGFWKLTPELGLILNLNTNGLHSFLKQKGIQSLGVKGRECLLDLIATMLVLQFIRTRLEKEGIVFKSLMKMDDASISRNIPWAFEAIKQASEWVRRTEGQYPSICPRLELGNDWDSATKQLLGLQPISTVSPLHRVLHYSQG

SEQ ID NO: 1600 - protein, 572 aa, Homo sapiens
MECLYYFLGFLLLAARLPLDAAKRFHDVLGNERPSAYMREHNQLNGWSSDENDWNEKLYPVWKRGDMRWKNSWKGGRVQAVLTSDSPALVGSNITFAVNLIFPRCQKEDANGNIVYEKNCRNEAGLSADPYVYNWTAWSEDSDGENGTGQSHHNVFPDGKPFPHHPGWRRWNFIYVFHTLGQYFQKLGRCSVRVSVNTANVTLGPQLMEVTVYRRHGRAYVPIAQVKDVYVVTDQIPVFVTMFQKNDRNSSDETFLKDLPIMFDVLIHDPSHFLNYSTINYKWSFGDNTGLFVSTNHTVNHTYVLNGTFSLNLTVKAAAPGPCPPPPPPPRPSKPTPSLATTLKSYDSNTPGPAGDNPLELSRIPDENCQINRYGHFQATITIVEGILEVNIIQMTDVLMPVPWPESSLIDFVVTCQGSIPTEVCTIISDPTCEITQNTVCSPVDVDEMCLLTVRRTFNGSGTYCVNLTLGDDTSLALTSTLISVPDRDPASPLRMANSALISVGCLAIFVTVISLLVYKKHKEYNPIENSPGNVVRSKGLSVFLNRAKAVFFPGNQEKDPLLKNQEFKGVS

SEQ ID NO: 1601 - protein, 356 aa, Homo sapiens
MRPTLLWSLLLLLGVFAAAAAAPPAQLTLETYQEWCNDSAATHDPLSQLPAPQHPKIRLYNAEQVLSWEPVALSNSTRPVVYQVQFKYTDSKWFTADIMSIGVNCTQITATECDFTAASPSAGFPMDFNVTLRLRAELGALHSAWVTMPWFQHYRNVTVGPPENIEVTPGEGSLIIRFSSPFDIADTSTAFFCYYVHYWEKGGIQQVKGPFRSNSISLDNLKPSRVYCLQVQAQLLWNKSNIFRVGHLSNISCYETMADASTELQQVILISVGTFSLLSVLAGACFFLVLKYRGLIKYWFHTPPSIPLQIEEYLKDPTQPILEALDKDSSPKDDVWDSVSIISFPEKEQEDVLQTL

SEQ ID NO: 1602 - protein, 3041 aa, Homo sapiens
METEAEPARPHGVAMETTPGLGLRSPGAPLAQNPAELLCEAGAAVAAARWDLQKHSLLIVIGDIGTESQLRAVRAHLEQGILSWNIDLSSFDLNQQLRLFITRHLAHFSSEVKGQRTLCHQSEILETIILVNPSADSISSEVHHLLSSSSAYKLLILSGQSLEPGGDLILQSGTYSYENFAQVLHNPEISQLLSNRDPGIQAFLTVSCLGEGDWSHLGLSSSQETLHLRLNPEPTLPTMDGVAEFSEYVSETVDVPSPFDLLEPPTSGGFLKLSKPCCYIFPGGRGDSALFAVNGFNILVDGGSDRKSCFWKLVRHLDRIDSVLLTHIGADNLPGINGLLQRKVAELEEEQSQGSSSYSDWVKNLISPELGVVFFNVPEKLRLPDASRKAKRSIEEACLTLQHLNRLGIQAEPLYRVVSNTIEPLTLFHKMGVGRLDMYVLNPVKDSKEMQFLMQKWAGNSKAKTGIVLPNGKEAEISVPYLTSITALVVWLPANPTEKIVRVLFPGNAPQNKILEGLEKLRHLDFLRYPVATQKDLASGAVPTNLKPSKIKQRADSKESLKATTKTAVSKLAKREEVVEEGAKEARSELAKELAKTEKKAKESSEKPPEKPAKPERVKTESSEALKAEKRKLIKDKVGKKHLKEKISKLEEKKDKEKKEIKKERKELKKDEGRKEEKKDAKKEEKRKDTKPELKKISKPDLKPFTPEVRKTLYKAKVPGRVKIDRSRAIRGEKELSSEPQTPPAQKGTVPLPTISGHRELVLSSPEDLTQDFEEMKREERALLAEQRDTGLGDKPFPLDTAEEGPPSTAIQGTPPSVPGLGQEEHVMKEKELVPEVPEEQGSKDRGLDSGAETEEEKDTWEEKKQREAERLPDRTEAREESEPEVKEDVIEKAELEEMEEVHPSDEEEEDATKAEGFYQKHMQEPLKVTPRSREAFGGRELGLQGKAPEKETSLFLSSLTTPAGATEHVSYIQDETIPGYSETEQTISDEEIHDEPEERPAPPRFHTSTYDLPGPEGAGPFEASQPADSAVPATSGKVYGTPETELTYPTNIVAAPLAEEEHVSSATSITECDKLSSFATSVAEDQSVASLTAPQTEETGKSSLLLDTVTSIPSSRTEATQGLDYVPSAGTISPTSSLEEDKGFKSPPCEDFSVTGESEKRGEIIGKGLSGERAVEEEEEETANVEMSEKLCSQYGTPVFSAPGHALHPGEPALGEAEERCLSPDDSTVKMASPPPSGPPSATHTPFHQSPVEEKSEPQDFQEADSWGDTKRTPGVGKEDAAEETVKPGPEEGTLEKEEKVPPPRSPQAQEAPVNIDEGLTGCTIQLLPAQDKAIVFEIMEAGEPTGPILGAEALPGGLRTLPQEPGKPQKDEVLRYPDRSLSPEDAESLSVLSVPSPDTANQEPTPKSPCGLTEQYLHKDRWPEVSPEDTQSLSLSEESPSKETSLDVSSKQLSPESLGTLQFGELNLGKEEMGHLMQAEDTSHHTAPMSVPEPHAATASPPTDGTTRYSAQTDITDDSLDRKSPASSFSHSTPSGNGKYLPGAITSPDEHILTPDSSFSKSPESLPGPALEDIAIKWEDKVPGLKDRTSEQKKEPEPKDEVLQQKDKTLEHKEVVEPKDTAIYQKDEALHVKNEAVKQQDKALEQKGRDLEQKDTALEQKDKALEPKDKDLEEKDKALEQKDKIPEEKDKALEQKDTALEQKDKALEPKDKDLEQKDRVLEQKEKIPEEKDKALDQKVRSVEHKAPEDTVAEMKDRDLEQTDKAPEQKHQAQEQKDKVSEKKDQALEQKYWALGQKDEALEQNIQALEENHQTQEQESLVQEDKTRKPKMLEEKSPEKVKAMEEKLEALLEKTKALGLEESLVQEGRAREQEEKYWRGQDVVQEWQETSPTREEPAGEQKELAPAWEDTSPEQDNRYWRGREDVALEQDTYWRELSCERKVWFPHELDGQGARPHYTEERESTFLDEGPDDEQEVPLREHATRSPWASDFKDFQESSPQKGLEVERWLAESPVGLPPEEEDKLTRSPFEIISPPASPPEMVGQRVPSAPGQESPIPDPKLMPHMKNEPTTPSWLADIPPWVPKDRPLPPAPLSPAPGPPTPAPESHTPAPFSWGTAEYDSVVAAVQEGAAELEGGPYSPLGKDYRKAEGEREEEGRAEAPDKSSHSSKVPEASKSHATTEPEQTEPEQREPTPYPDERSFQYADIYEQMMLTGLGPACPTREPPLGAAGDWPPCLSTKEAAAGRNTSAEKELSSPISPKSLQSDTPTFSYAALAGPTVPPRPEPGPSMEPSLTPPAVPPRAPILSKGPSPPLNGNILSCSPDRRSPSPKESGRSHWDDSTSDSELEKGAREQPEKEAQSPSPPHPIPMGSPTLWPETEAHVSPPLDSHLGPARPSLDFPASAFGFSSLQPAPPQLPSPAEPRSAPCGSLAFSGDRALALAPGPPTRTRHDEYLEVTKAPSLDSSLPQLPSPSSPGAPLLSNLPRPASPALSEGSSSEATTPVISSVAERFSPSLEAAEQESGELDPGMEPAAHSLWDLTPLSPAPPASLDLALAPAPSLPGDMGDGILPCHLECSEAATEKPSPFQVPSEDCAANGPTETSPNPPGPAPAKAENEEAAACPAWERGAWPEGAERSSRPDTLLSPEQPVCPAGGSGGPPSSASPEVEAGPQGCATEPRPHRGELSPSFLNPPLPPSIDDRDLSTEEVRLVGRGGRRRVGGPGTTGGPCPVTDETPPTSASDSGSSQSDSDVPPETEECPSITAEAALDSDEDGDFLPVDKAGGVSGTHHPRPGHDPPPLPQPDPRPSPPRPDVCMADPEGLSSESGRVERLREKEKVQGRVGRRAPGKAKPASPARRLDLRGKRSPTPGKGPADRASRAPPRPRSTTSQVTPAEEKDGHSPMSKGLVNGLKAGPMALSSKGSSGAPVYVDLAYIPNHCSGKTADLDFFRRVRASYYVVSGNDPANGEPSRAVLDALLEGKAQWGENLQVTLIPTHDTEVTREWYQQTHEQQQQLNVLVLASSSTVVMQDESFPACKIEF

SEQ ID NO: 1603 - protein, 460 aa, Homo sapiens
MGSNSGQAGRHIYKSLADDGPFDSVEPPKRPTSRLIMHSMAMFGREFCYAVEAAYVTPVLLSVGLPSSLYSIVWFLSPILGFLLQPVVGSASDHCRSRWGRRRPYILTLGVMMLVGMALYLNGATVVAALIANPRRKLVWAISVTMIGVVLFDFAADFIDGPIKAYLFDVCSHQDKEKGLHYHALFTGFGGALGYLLGAIDWAHLELGRLLGTEFQVMFFFSALVLTLCFTVHLCSISEAPLTEVAKGIPPQQTPQDPPLSSDGMYEYGSIEKVKNGYVNPELAMQGAKNKNHAEQTRRAMTLKSLLRALVNMPPHYRYLCISHLIGWTAFLSNMLFFTDFMGQIVYRGDPYSAHNSTEFLIYERGVEVGCWGLCINSVFSSLYSYFQKVLVSYIGLKGLYFTGYLLFGLGTGFIGLFPNVYSTLVLCSLFGVMSSTLYTVPFNLITEYHREEEKEVCCH

SEQ ID NO: 1604 - protein, 317 aa, Homo sapiens
MGLLLPLALCILVLCCGAMSPPQLALNPSALLSRGCNDSDVLAVAGFALRDINKDRKDGYVLRLNRVNDAQEYRRAISKKKIYMTCPDCPSSIPTDSSNHQVLEAATESLAKYNNENTSKQYSLFKVTRASSQWVVGPSYFVEYLIKESPCTKSQASSCSLQSSDSVPVGLCKGSLTRTHWEKFVSVTCDFFESQAPATGSENSAVNQKPTNLPKVEESQQKNTPPTDSPSKAGPRGSVQYLPDLDDKNSQEKGPQEAFPVHLDLTTNPQGETLDISFLFLEPMEEKLVVLPFPKEKARTAECPGPAQNASPLVLPP

SEQ ID NO: 1605 - protein, 345 aa, Homo sapiens
MGLLLPLALCILVLCCGAMSPPQLALNPSALLSRGCNDSDVLAVAGFALRDINKDRKDGYVLRLNRVNDAQEYRRVYGQCKAIFYMNNPSRVLYLAAYNCTLRPVSKKKIYMTCPDCPSSIPTDSSNHQVLEAATESLAKYNNENTSKQYSLFKVTRASSQWVVGPSYFVEYLIKESPCTKSQASSCSLQSSDSVPVGLCKGSLTRTHWEKFVSVTCDFFESQAPATGSENSAVNQKPTNLPKVEESQQKNTPPTDSPSKAGPRGSVQYLPDLDDKNSQEKGPQEAFPVHLDLTTNPQGETLDISFLFLEPMEEKLVVLPFPKEKARTAECPGPAQNASPLVLPP

SEQ ID NO: 1606 - protein, 99 aa, Homo sapiens
MGLFMIIAILLFQKPTVTEQLKKCWNNYVQGHCRKICRVNEVPEALCENGRYCCLNIKELEACKKITKPPRPKPATLALTLQDYVTIIENFPSLKTQST

SEQ ID NO: 1607 - protein, 2400 aa, Homo sapiens
MNSTPRNAQAPSHRECFLPSVARTPSVTKVTPAKKITFLKRGDPRFAGVRLAVHQRAFKTFSALMDELSQRVPLSFGVRSVTTPRGLHSLSALEQLEDGGCYLCSDKKPPKTPSGPGRPQERNPTAQQLRDVEGQREAPGTSSSRKSLKTPRRILLIKNMDPRLQQTVVLSHRNTRNLAAFLGKASDLLRFPVKQLYTTSGKKVDSLQALLHSPSVLVCAGHEAFRTPAMKNARRSEAETLSGLTSRNKNGSWGPKTKPSVIHSRSPPGSTPRLPERPGPSNPPVGPAPGRHPQDTPAQSGPLVAGDDMKKKVRMNEDGSLSVEMKVRFHLVGEDTLLWSRRMGRASALTAASGEDPVLGEVDPLCCVWEGYPWGFSEPGVWGPRPCRVGCREVFGRGGQPGPKYEIWTNPLHASQGERVAARKRWGLAQHVRCSGLWGHGTAGRERCSQDSASPASSTGLPEGSEPESSCCPRTPEDGVDSASPSAQIGAERKAGGSLGEDPGLCIDGAGLGGPEQGGRLTPRARSEEGASSDSSASTGSHEGSSEWGGRPQGCPGKARAETSQQEASEGGDPASPALSLSSLRSDDLQAETQGQGTEQATGAAVTREPLVLGLSCSWDSEGASSTPSTCTSSQQGQRRHRSRASAMSSPSSPGLGRVAPRGHPRHSHYRKDTHSPLDSSVTKQVPRPPERRRACQDGSVPRYSGSSSSTRTQASGNLRPPSSGSLPSQDLLGTSSATVTPAVHSDFVSGVSPHNAPSAGWAGDAGSRTCSPAPIPPHTSDSCSKSGAASLGEEARDTPQPSSPLVLQVGRPEQGAVGPHRSHCCSQPGTQPAQEAQRGPSPEASWLCGRYCPTPPRGRPCPQRRSSSCGSTGSSHQSTARGPGGSPQEGTRQPGPTPSPGPNSGASRRSSASQGAGSRGLSEEKTLRSGGGPQGQEEASGVSPSSLPRSSPEAVVREWLDNIPEEPILMTYELADETTGAAGGGLRGPEVDPGDDHSLEGLGEPAQAGQQSLEGDPGQDPEPEGALLGSSDTGPQSGEGVPQGAAPEGVSEAPAEAGADREAPAGCRVSLRALPGRVSASTQIMRALMGSKQGRPSSVPEVSRPMARRLSCSAGALITCLASLQLFEEDLGSPASKVRFKDSPRYQELLSISKDLWPGCDVGEDQLDSGLWELTWSQALPDLGSHAMTENFTPTSSSGVDISSGSGGSGESSVPCAMDGTLVTQGTELPLKTSNQRPDSRTYESPGDLENQQQCCFPTFLNARACACATNEDEAERDSEEQRASSNLEQLAENTVQEEVQLEETKEGTEGEGLQEEAVQLEETKTEEGLQEEGVQLEETKETEGEGQQEEEAQLEEIEETGGEGLQEEGVQLEEVKEGPEGGLQGEALEEGLKEEGLPEEGSVHGQELSEASSPDGKGSQEDDPVQEEEAGRASASAEPCPAEGTEEPTEPPSHLSETDPSASERQSGSQLEPGLEKPPGATMMGQEHTQAQPTQGAAERSSSVACSAALDCDPIWVSVLLKKTEKAFLAHLASAVAELRARWGLQDNDLLDQMAAELQQDVAQRLQDSTKRELQKLQGRAGRMVLEPPREALTGELLLQTQQRRHRLRGLRNLSAFSERTLGLGPLSFTLEDEPALSTALGSQLGEEAEGEEFCPCEACVRKKVSPMSPKATMGATRGPIKEAFDLQQILQRKRGEHTDGEAAEVAPGKTHTDPTSTRTVQGAEGGLGPGLSQGPGVDEGEDGEGSQRLNRDKDPKLGEAEGDAMAQEREGKTHNSETSAGSELGEAEQEGEGISERGETGGQGSGHEDNLQGEAAAGGDQDPGQSDGAEGIEAPEAEGEAQPESEGVEAPEAEGDAQEAEGEAQPESEDVEAPEAEGEAQPESEDVETPEAEWEVQPESEGAEAPEAEKEAQPETESVEALETEGEDEPESEGAEAQEAEEAAQEAEGQTQPESEVIESQEAEEEAQPESEDVEALEVEVETQEAEGEAQPESEDVEAPEAEGEMQEAEEEAQPESDGVEAQPKSEGEEAQEVEGETQKTEGDAQPESDGVEAPEAEEEAQEAEGEVQEAEGEAHPESEDVDAQEAEGEAQPESEGVEAPEAEGEAQKAEGIEAPETEGEAQPESEGIEAPEAEGEAQPESEGVEAQDAEGEAQPESEGIEAQEAEEEAQPELEGVEAPEAEGEAQPESEGIEAPEAEGEAQPELEGVEAPEAEEEAQPEPEGVETPEAEGEAQPESEGETQGEKKGSPQVSLGDGQSEEASESSSPVPEDRPTPPPSPGGDTPHQRPGSQTGPSSSRASSWGNCWQKDSENDHVLGDTRSPDAKSTGTPHAERKATRMYPESSTSEQEEAPLGSRTPEQGASEGYDLQEDQALGSLAPTEAVGRADGFGQDDLDF

SEQ ID NO: 1608 - protein, 202 aa, Homo sapiens
MQPILLLLAFLLLPRADAGEIIGGHEAKPHSRPYMAYLMIWDQKSLKRCGGFLIRDDFVLTAAHCWGRLERKAKRTRAVQPLRLPSNKAQVKPGQTCSVAGWGQTAPLGKHSHTLQEVKMTVQEDRKCESDLRHYYDSTIELCVGDPEIKKTSFKGDSGGPLVCNKVAQGIVSYGRNNGMPPRACTKVSSFVHWIKKTMKRY

SEQ ID NO: 1609 - protein, 202 aa, Homo sapiens; identical to SEQ ID NO: 1608

SEQ ID NO: 1610 - protein, 1898 aa, Homo sapiens
MLLSGGDPPAQEWFMVQTKSKPRVQRQRLQVQRIFRVKLNAFQSRPDTPYFWLQLEGPRENMGKAKEYLKGLCSPELWKEVRYPPILHCAFLGAQGLFLDCLCWSTLAYLVPGPPGSLMVGGLTESFIMTQNWLEELVGRLRWGPAPLLTPRGIWEAEVTRAFGALVWIRGDQHAGDLLQLPPAVQELLLSLVRDAAGKEDIIEWLSRFGISDSHSDPEVLICPPQQQKEAPAMVSVGESPGPFVDMGTLQNRGPENSKRLSSLGATGSLITAQSTPQEAANQLVRVGSNNQDGMDSAQEEGTVQATSSQDSTNHTQALLKQRQVQKIEDKLLFQPPVSALGVCPPWKAWTPGPAFGPLWPGAIAATFWRINELHSLHLAWLLSQACFNFPFWQRPLGPIQLKLPGQNPLPLNLEWKQKELAPLPSAESPAGRPDGGLGGEAALQNCPRPEISPKVTSLLVVPGSSDVKDKVSSDLPQIGPPLTSTPQLQAGGEPGDQGSMQLDFKGLEEGPAPVLPTGQGKPVAQGGLTDQSVPGAQTVPETLKVPMAAAVPKAENPSRTQVPSAAPKLPTSRMMLAVHTEPAAPEVPLAPTKPTAQLMATAQKTVVNQPVLVAQVEPTTPKTPQAQKMPVAKTSPAGPKTPKAQAGPAATVSKAPAASKAPAAPKVPVTPRVSRAPKTPAAQKVPTDAGPTLDVARLLSEVQPTSRASVSLLKGQGQAGRQGPQSSGTLALSSKHQFQMEGLLGAWEGAPRQPPRHLQANSTVTSFQRYHEALNTPFELNLSGEPGNQGLRRVVIDGSSVAMVHGLQHFFSCRGIAMAVQFFWNRGHREVTVFVPTWQLKKNRRVRESHFLTKLHSLKMLSITPSQLENGKKITTYDYRFMVKLAEETDGIIVTNEQIHILMNSSKKLMVKDRLLPFTFAGNLFMVPDDPLGRDGPTLDEFLKKPNRLDTDIGNFLKVWKTLPPSSASVTELSDDADSGPLESLPNMEEVREEKEERQDEEQRQGQGTQKAAEEDDLDSSLASVFRVECPSLSEEILRCLSLHDPPDGALDIDLLPGAASPYLGIPWDGKAPCQQVLAHLAQLTIPSNFTALSFFMGFMDSHRDAIPDYEALVGPLHSLLKQKPDWQWDQEHEEAFLALKRALVSALCLMAPNSQLPFRLEVTVSHVALTAILHQEHSGRKHPIAYTSKPLLPDEESQGPQSGGDSPYAVAWALKHFSRCIGDTPVVLDLSYASRTTADPEVREGRRVSKAWLIRWSLLVQDKGKRALELALLQGLLGENRLLTPAASMPRFFQVLPPFSDLSTFVCIHMSGYCFYREDEWCAGFGLYVLSPTSPPVSLSFSCSPYTPTYAHLAAVACGLERFGQSPLPVVFLTHCNWIFSLLWELLPLWRARGFLSSDGAPLPHPSLLSYIISLTSGLSSLPFIYRTSYRGSLFAVTVDTLAKQGAQGGGQWWSLPKDVPAPTVSPHAMGKRPNLLALQLSDSTLADIIARLQAGQKLSGSSPFSSAFNSLSLDKESGLLMFKGDKKPRVWVVPTQLRRDLIFSVHDIPLGAHQRPEETYKKLRLLGWWPGMQEHVKDYCRSCLFCIPRNLIGSELKVIESPWPLRSTAPWSNLQIEVVGPVTISEEGHKHVLIVADPNTRWVEAFPLKPYTHTAVAQVLLQHVFARWGVPVRLEAAQGPQFARHVLVSCGLALGAQVASLSRDLQFPCLTSSGAYWEFKRALKEFIFLHGKKWAASLPLLHLAFRASSTDATPFKVLTGGESRLTEPLWWEMSSANIEGLKMDVFLLQLVGELLELHWRVADKASEKAENRRFKRESQEKEWNVGDQVLLLSLPRNGSSAKWVGPFYIGDRLSLSLYRIWGFPTPEKLGCIYPSSLMKAFAKSGTPLSFKVLEQ

SEQ ID NO: 1611 - protein, 207 aa, Homo sapiens
MSRESDVEAQQSHGSSACSQPHGSVTQSQGSSSQSQGISSSSTSTMPNSSQSSHSSSGTLSSLETVSTQELYSIPEDQEPEDQEPEEPTPAPWARLWALQDGFANLECVNDNYWFGRDKSCEYCFDEPLLKRTDKYRTYSKKHFRIFREVGPKNSYIAYIEDHSGNGTFVNTELVGKGKRRPLNNNSEIALSLSRNKEKILKIYSLS

SEQ ID NO: 1612 - protein, 586 aa, Homo sapiens
MSRESDVEAQQSHGSSACSQPHGSVTQSQGSSSQSQGISSSSTSTMPNSSQSSHSSSGTLSSLETVSTQELYSIPEDQEPEDQEPEEPTPAPWARLWALQDGFANLETESGHVTQSDLELLLSSDPPASASQSAGIRGVRHHPRPVCSLKCVNDNYWFGRDKSCEYCFDEPLLKRTDKYRTYSKKHFRIFREVGPKNSYIAYIEDHSGNGTFVNTELVGKGKRRPLNNNSEIALSLSRNKVFVFFDLTVDDQSVYPKALRDEYIMSKTLGSGACGEVKLAFERKTCKKVAIKIISKRKFAIGSAREADPALNVETEIEILKKLNHPCIIKIKNFFDAEDYYIVLELMEGGELFDKVVGNKRLKEATCKLYFYQMLLAVQYLHENGIIHRDLKPENVLLSSQEEDCLIKITDFGHSKILGETSLMRTLCGTPTYLAPEVLVSVGTAGYNRAVDCWSLGVILFICLSGYPPFSEHRTQVSLKDQITSGKYNFIPEVWAEVSEKALDLVKKLLVVDPKARFTTEEALRHPWLQDEDMKRKFQDLLSEENESTALPQVLAQPSTSRKRPREGEAEGAETTKRPAVCAAVL

SEQ ID NO: 1613 - protein, 655 aa, Homo sapiens
MGRWAWVPSPWPPPGLGPFLLLLLLLLLLPRGFQPQPGGNRTESPEPNATATPAIPTILVTSVTSETPATSAPEAEGPQSGGLPPPPRAVPSSSSPQAQALTEDGRPCRFPFRYGGRMLHACTSEGSAHRKWCATTHNYDRDRAWGYCVEATPPPGGPAALDPCASGPCLNGGSCSNTQDPQSYHCSCPRAFTGKDCGTEKCFDETRYEYLEGGDRWARVRQGHVEQCECFGGRTWCEGTRHTACLSSPCLNGGTCHLIVATGTTVCACPPGFAGRLCNIEPDERCFLGNGTGYRGVASTSASGLSCLAWNSDLLYQELHVDSVGAAALLGLGPHAYCRNPDNDERPWCYVVKDSALSWEYCRLEACESLTRVQLSPDLLATLPEPASPGRQACGRRHKKRTFLRPRIIGGSSSLPGSHPWLAAIYIGDSFCAGSLVHTCWVVSAAHCFSHSPPRDSVSVVLGQHFFNRTTDVTQTFGIEKYIPYTLYSVFNPSDHDLVLIRLKKKGDRCATRSQFVQPICLPEPGSTFPAGHKCQIAGWGHLDENVSGYSSSLREALVPLVADHKCSSPEVYGADISPNMLCAGYFDCKSDACQGDSGGPLACEKNGVAYLYGIISWGDGCGRLHKPGVYTRVANYVDWINDRIRPPRRLVAPS

SEQ ID NO: 1614 - protein, 1376 aa, Homo sapiens
MFRAGEASKRPLPGPSPPRVRSVEVARGRAGYGFTLSGQAPCVLSCVMRGSPADFVGLRAGDQILAVNEINVKKASHEDVVKLIGKCSGVLHMVIAEGVGRFESCSSDEEGGLYEGKGWLKPKLDSKALGINRAERVVEEMQSGGIFNMIFENPSLCASNSEPLKLKQRSLSESAATRFDVGHESINNPNPNMLSKEEISKVIHDDSVFSIGLESHDDFALDASILNVAMIVGYLGSIELPSTSSNLESDSLQAIRGCMRRLRAEQKIHSLVTMKIMHDCVQLSTDKAGVVAEYPAEKLAFSAVCPDDRRFFGLVTMQTNDDGSLAQEEEGALRTSCHVFMVDPDLFNHKIHQGIARRFGFECTADPDTNGCLEFPASSLPVLQFISVLYRDMGELIEGMRARAFLDGDADAHQNNSTSSNSDSGIGNFHQEEKSNRVLVVDLGGSSSRHGPGGSAWDGVGGRGAQPWGAPWTGPFCPDPEGSPPFEAAHQTDRFWDLNKHLGPASPVEVPPASLRSSVPPSKRGTVGAGCGFNQRWLPVHVLREWQCGHTSDQDSYTDSTDGWSSINCGTLPPPMSKIPADRYRVEGSFAQPPLNAPKREWSRKAFGMQSIFGPHRNVRKTKEDKKGSKFGRGTGLTQPSQRTSARRSFGRSKRFSITRSLDDLESATVSDGELTGADLKDCVSNNSLSSNASLPSVQSCRRLRERRVASWAVSFERLLQDPVGVRYFSDFLRKEFSEENILFWQACEYFNHVPAHDKKELSYRAREIFSKFLCSKATTPVNIDSQAQLADDVLRAPHPDMFKEQQLQIFNLMKFDSYTRFLKSPLYQECILAEVEGRALPDSQQVPSSPASKHSLGSDHSSVSTPKKLSGKSKSGRSLNEELGDEDSEKKRKGAFFSWSRTRSTGRSQKKREHGDHADDALHANGGLCRRESQGSVSSAGSLDLSEACRTLAPEKDKATKHCCIHLPDGTSCVVAVKAGFSIKDILSGLCERHGINGAAADLFLVGGDKPLVLHQDSSILESRDLRLEKRTLFRLDLVPINRSVGLKAKPTKPVTEVLRPVVARYGLDLSGLLVRLSGEKEPLDLGAPISSLDGQRVVLEEKDPSRGKASADKQKGVPVKQNTAVNSSSRNHSATGEERTLGKSNSIKIKGENGKNARDPRLSKREESIAKIGKKKYQKINLDEAEEFFELISKAQSNRADDQRGLLRKEDLVLPEFLRLPPGSTELTLPTPAAVAKGFSKRSATGNGRESASQPGEQWEPVQESSDSPSTSPGSASSPPGPPGTTPPGQKSPSGPFCTPQSPVSLAQEGTAQIWKRQSQEVEAGGIQTVEDEHVAELTLMGEGDISSPNSTLLPPPSTPQEVPGPSRPGTSRF

SEQ ID NO: 1615 - protein, 132 aa, Homo sapiens
MDVFQEGLAMVVQDPLLCDLPIQVTLEEVNSQIALEYGQAMTVRVCKMDGEVMPVVVVQSATVLDLKKAIQRYVQLKQEREGGIQHISWSYVWRTYHLTSAGEKLTEDRKKLRDYGIRNRDEVSFIKKLRQK

SEQ ID NO: 1616 - protein, 372 aa, Homo sapiens
MRVMAPRALLLLLSGGLALTETWACSHSMRYFDTAVSRPGRGEPRFISVGYVDDTQFVRFDSDAASPRGEPRAPWVEQEGPEYWDRETQKYKRQAQADRVSLRNLRGYYNQSEDGSHTLQRMSGCDLGPDGRLLRGYDQSAYDGKDYIALNEDLRSWTAADTAAQITQRKLEAARAAEQLRAYLEGTCVEWLRRYLENGKETLQRAEPPKTHVTHHPLSDHEATLRCWALGFYPAEITLTWQRDGEDQTQDTELVETRPAGDGTFQKWAAVVVPSGQEQRYTCHMQHEGLQEPLTLSWEPSSQPTIPIMGIVAGLAVLVVLAVLGAVVTAMMCRRKSSGHFLPTGGKGGSCSQAACSNSAQGSDESLITCKA

SEQ ID NO: 1617 - protein, 736 aa, Homo sapiens
MSSLQALCSGLPLRPLPENRGRQAGVPHAPVRTPSLSPVEKQLALRNALRYFPPDVQELLAPEFAQELQLYGHIYMYRFCPDIEMRAYPIEQYPCQTKVAAAIMHMIMNNLDPAVAQFPQELVTYGGNGQVFSNWAQFWLTMFYLSKMTEEQTLVMYSGHPLGLFPSSRSAPRLVITNGMVIPNYSSRTEYEKLFALGVTMYGQMTAGSYCYIGPQGIVHGTVLTVLNAARRYLGIEDLAGKVFVTSGLGGMSGAQAKAAVIVGCIGVIAEVDKAALEKRHRQGWLMEVTDSLDRCIQRLRVLQLGLQQALGWAGLPAALGLCVLSCFVNLAPLGEGRCLAPSGFSRPLLGAPVLLLCPSREARKKKEVLSLGYHGNVVALWERLVHELDTTGECLVDLGSDQTSCHNPFNGGYYPVQLSFTEAQSLMASNPAVFKDLVQESLRRQVSAINRLAEEKFFFWDYGNAFLLEAQRAGADVEKKGAGRTEFRYPSYVQHIMGDIFSQGFGPFRWVCTSGDPQDLAVTDELATSVLEEAIADGVKVSVKLQYMDNIRWIREAARHRLVVGSQARILYSDQKGRVAIAVAINQAIACRRIKAPVVLSRDHHDVSGTDSPFRETSNIYDGSAFCADMAVQNFVGDACRGATWVALHNGGGVGWGEVINGGFGLVLDGTPEAEGRARLMLSWDVSNGVARRCWSGNQKAYEIICQTMQENSTLVVTLPHKVEDERVLQQALQL

SEQ ID NO: 1618 - protein, 308 aa, Homo sapiens
MAEENHTMKNEFILTGFTDHPELKTLLFVVFFAIYLITVVGNISLVALIFTHRRLHTPMYIFLGNLALVDSCCACAITPKMLENFFSENKRISLYECAVQFYFLCTVETADCFLLAAMAYDRYVAICNPLQYHIMMSKKLCIQMTTGAFIAGNLHSMIHVGLVFRLVFCGSNHINHFYCDILPLYRLSCVDPYINELVLFIFSGSVQVFTIGSVLISYLYILLTIFKMKSKEGRAKAFSTCASHFLSVSLFYGSLFFMYVRPNLLEEGDKDIPAAILFTIVVPLLNPFIYSLRNREVISVLRKILMKK

SEQ ID NO: 1619 - protein, 1070 aa, Homo sapiens
MARPVRGGLGAPRRSPCLLLLWLLLLRLEPVTAAAGPRAPCAAACTCAGDSLDCGGRGLAALPGDLPSWTRSLNLSYNKLSEIDPAGFEDLPNLQEVYLNNNELTAVPSLGAASSHVVSLFLQHNKIRSVEGSQLKAYLSLEVLDLSLNNITEVRNTCFPHGPPIKELNLAGNRIGTLELGAFDGLSRSLLTLRLSKNRITQLPVRAFKLPRLTQLDLNRNRIRLIEGLTFQGLNSLEVLKLQRNNISKLTDGAFWGLSKMHVLHLEYNSLVEVNSGSLYGLTALHQLHLSNNSIARIHRKGWSFCQKLHELVLSFNNLTRLDEESLAELSSLSVLRLSHNSISHIAEGAFKGLRSLRVLDLDHNEISGTIEDTSGAFSGLDSLSKLLLLEPSQSAGCSSPSQPHMSAGGRTLFGNKIKSVAKRAFSGLEGLEHLNLGGNAIRSVQFDAFVKMKNLKELHISSDSFLCDCQLKWLPPWLIGRMLQAFVTATCAHPESLKGQSIFSVPPESFVCDDFLKPQIITQPETTMAMVGKDIRFTCSAASSSSSPMTFAWKKDNEVLTNADMENFVHVHAQDGEVMEYTTILHLRQVTFGHEGRYQCVITNHFGSTYSHKARLTVNVLPSFTKTPHDITIRTTTMARLECAATGHPNPQIAWQKDGGTDFPAAQTPSLVVPLEDRVVSVGETVALQCKATGNPPPRITWFKGDRPLSLTERHHLTPDNQLLVVQNVVAEDAGRYTCEMSNTLGTERAHSQLSVLPAAGCRKDGTTVGIFTIAVVSSIVLTSLVWVCIIYQTRKKSEEYSVTNTDETVVPPDVPSYLSSQGTLSDRQETVVRTEGGPQANGHIESNGVCPRDASHFPEPDTHSVACRQPKLCAGSAYHKEPWKAMEKAEGTPGPHKMEHGGRVVCSDCNTEVDCYSRGQAFHPQPVSRDSAQPSAPNGPEPGGSDQEHSPHHQCSRTAAGSCPECQGSLYPSNHDRMLTAVKKKPMASLDGKGDSSWTLARLYHPDSTELQPASSLTSGSPERAEAQYLLVSNGHLPKACDASPESTPLTGQLPGKQRVPLLLAPKS

SEQ ID NO: 1620 - protein, 498 aa, Homo sapiens
MAFMEKPPAGKVLLDDTVPLTAAIEASQSLQSHTIVRRYSDFDLLNNSLQIAGLSLPLPPKKLIGNMDREFIAERQKGLQNYLNVITTNHILSNCELVKKFLDPNNYSANYTEIALQQVSMFFRSEPKWEVVEPLKDIGWRIRKKYFLMKIKNQPKERLVLSWADLGPDKYLSDKDFQCLIKLLPSCLHPYIYRVTFATANESSALLIRMFNEKGTLKDLIYKAKPKDPFLKKYCNPKKIQGLELQQIKTYGRQILEVLKFLHDKGFPYGHLHASNVMLDGDTCRLLDLENSLLGLPSFYRSYFSQFRKINTLESVDVHCFGHLLYEMTYGRPPDSVPVDSFPPAPSMAVVAVLESTLSCEACKNGMPTISRLLQMPLFSDVLLTTSEKPQFKIPTKLKEALRIAKECIEKRLIEEQKQIHQHRRLTRAQSHHGSEEERKKRKILARKKSKRSALENSEEHSAKYSNSNNSAGSGASSPLTSPSSPTPPSTSVEHAPF

SEQ ID NO: 1621 - protein, 515 aa, Homo sapiens
MAFMEKPPAGKVLLDDTVPLTAAIEASQSLQSHTEYIIRVQRGISVENSWQIVRRYSDFDLLNNSLQIAGLSLPLPPKKLIGNMDREFIAERQKGLQNYLNVITTNHILSNCELVKKFLDPNNYSANYTEIALQQVSMFFRSEPKWEVVEPLKDIGWRIRKKYFLMKIKNQPKERLVLSWADLGPDKYLSDKDFQCLIKLLPSCLHPYIYRVTFATANESSALLIRMFNEKGTLKDLIYKAKPKDPFLKKYCNPKKIQGLELQQIKTYGRQILEVLKFLHDKGFPYGHLHASNVMLDGDTCRLLDLENSLLGLPSFYRSYFSQFRKINTLESVDVHCFGHLLYEMTYGRPPDSVPVDSFPPAPSMAVVAVLESTLSCEACKNGMPTISRLLQMPLFSDVLLTTSEKPQFKIPTKLKEALRIAKECIEKRLIEEQKQIHQHRRLTRAQSHHGSEEERKKRKILARKKSKRSALENSEEHSAKYSNSNNSAGSGASSPLTSPSSPTPPSTSVEHAPF

SEQ ID NO: 1622 - protein, 566 aa, Homo sapiens
MGRAGGGGPGRGPPPLLLFLGAALVLASGAVPAREAGSAVEAEELVKGSPAWEPPANDTREEAGPPAAGEDEASWTAPGGELAGPEEVLQESAAVTGTAWLEADSPGLGGVTAEAGSGDAQALPATLQAPHEVLGQSIMPPAIPEATEASGPPSPTPGDKLSPASELPKESPLEVWLNLGGSTPDPQGPELTYPFQGTLEPQPASDIIDIDYFEGLDGEGRGADLGSFPGSPGTSENHPDTEGETPSWSLLDLYDDFTPFDESDFYPTTSFYDDLDEEEEEEEDDKDAVGGGDLEDENELLVPTGKPGLGPGTGQPTSRWHAVPPQHTLGSVPGSSIALRPRPGEPGRDLASSENGTECRSGFVRHNGSCRSVCDLFPSYCHNGGQCYLVENIGAFCRCNTQDYIWHKGMRCESIITDFQVMCVAVGSAALVLLLLFMMTVFFAKKLYLLKTENTKLRRTNKFRTPSELHNDNFSLSTIAEGSHPNVRKLCNTPRTSSPHARALAHYDNVICQDDPSAPHKIQEVLKSCLKEEESFNIQNSMSPKLEGGKGDQADLDVNCLQNNLT

SEQ ID NO: 1623 - protein, 445 aa, Homo sapiens
MTGSSFSLAHLLIISGLLCYSAGCLALPSLDQKKRGGHKACCLLTPPPPPLFPPPFFRGGRSPLLSPDMKNLMLELETSQSPCMQGSLGSPGPPGPQGPPGLPGKTGPKGEKGELGRPGRKGRPGPPGVPGMPGPIGWPGPEGPRGEKGDLGMMGLPGSRGPMGSKGYPGSRGEKGSRGEKGDLGPKGEKGFPGFPGMLGQKGEMGPKGEPGIAGHRGPTGRPGKRGKQGQKGDSGVMGPPGKPGPSGQPGRPGPPGPPPAGQLIMGPKGERGFPGPPGRCLCGPTMNVNNPSYGESVYGPSSPRVPVIFVVNNQEELERLNTQNAIAFRRDQRSLYFKDSLGWLPIQLTPFYPVDYTADQHGTCGDGLLQPGEECDDGNSDVGDDCIRCHRAYCGDGHRHEGVEDCDGSDFGYLTCETYLPGSYGDLQCTQYCYIDSTPCRYFT

SEQ ID NO: 1624 - protein, 421 aa, Homo sapiens
MVVLNPMTLGIYLQLFFLSIVSQPTFINSVLPISAALPSLDQKKRGGHKACCLLTPPPPPLFPPPFFRGGRSPGPPGLPGKTGPKGEKGELGRPGRKGRPGPPGVPGMPGPIGWPGPEGPRGEKGDLGMMGLPGSRGPMGSKGYPGSRGEKGSRGEKGDLGPKGEKGFPGFPGMLGQKGEMGPKGEPGIAGHRGPTGRPGKRGKQGQKGDSGVMGPPGKPGPSGQPGRPGPPGPPPAGQLIMGPKGERGFPGPPGRCLCGPTMNVNNPSYGESVYGPSSPRVPVIFVVNNQEELERLNTQNAIAFRRDQRSLYFKDSLGWLPIQLTPFYPVDYTADQHGTCGDGLLQPGEECDDGNSDVGDDCIRCHRAYCGDGHRHEGVEDCDGSDFGYLTCETYLPGSYGDLQCTQYCYIDSTPCRYFT

SEQ ID NO: 1625 - protein, 455 aa, Homo sapiens
MVVLNPMTLGIYLQLFFLSIVSQPTFINSVLPISAALPSLDQKKRGGHKACCLLTPPPPPLFPPPFFRGGRSPLLSPDMKNLMLELETSQSPCMQGSLGSPGPPGPQGPPGLPGKTGPKGEKGELGRPGRKGRPGPPGVPGMPGPIGWPGPEGPRGEKGDLGMMGLPGSRGPMGSKGYPGSRGEKGSRGEKGDLGPKGEKGFPGFPGMLGQKGEMGPKGEPGIAGHRGPTGRPGKRGKQGQKGDSGVMGPPGKPGPSGQPGRPGPPGPPPAGQLIMGPKGERGFPGPPGRCLCGPTMNVNNPSYGESVYGPSSPRVPVIFVVNNQEELERLNTQNAIAFRRDQRSLYFKDSLGWLPIQLTPFYPVDYTADQHGTCGDGLLQPGEECDDGNSDVGDDCIRCHRAYCGDGHRHEGVEDCDGSDFGYLTCETYLPGSYGDLQCTQYCYIDSTPCRYFT

SEQ ID NO: 1626 - protein, 2391 aa, Homo sapiens
MTDLLRSVVTVIDVFYKYTKQDGECGTLSKGELKELLEKELHPVLKNPDDPDTVDVIMHMLDRDHDRRLDFTEFLLMIFKLTMACNKVLSKEYCKASGSKKHRRGHRHQEEESETEEDEEDTPGHKSGYRHSSWSEGEEHGYSSGHSRGTVKCRHGSNSRRLGRQGNLSSSGNQEGSQKRYHRSSCGHSWSGGKDRHGSSSVELRERINKSHISPSRESGEEYESGSGSNSWERKGHGGLSCGLETSGHESNSTQSRIREQKLGSSCSGSGDSGRRSHACGYSNSSGCGRPQNASSSCQSHRFGGQGNQFSYIQSGCQSGIKGGQGHGCVSGGQPSGCGQPESNPCSQSYSQRGYGARENGQPQNCGGQWRTGSSQSSCCGQYGSGGSQSCSNGQHEYGSCGRFSNSSSSNEFSKCDQYGSGSSQSTSFEQHGTGLSQSSGFEQHVCGSGQTCGQHESTSSQSLGYDQHGSSSGKTSGFGQHGSGSGQSSGFGQCGSGSGQSSGFGQHGSVSGQSSGFGQHGSVSGQSSGFGQHESRSRQSSYGQHGSGSSQSSGYGQYGSRETSGFGQHGLGSGQSTGFGQYGSGSGQSSGFGQHGSGSGQSSGFGQHESRSGQSSYGQHSSGSSQSSGYGQHGSRQTSGFGQHGSGSSQSTGFGQYGSGSGQSSGFGQHVSGSGQSSGFGQHESRSGHSSYGQHGFGSSQSSGYGQHGSSSGQTSGFGQHELSSGQSSSFGQHGSGSGQSSGFGQHGSGSGQSSGFGQHESRSGQSSYGQHSSGSSQSSGYGQHGSRQTSGFGQHGSGSSQSTGFGQYGSGSGQSAGFGQHGSGSGQSSGFGQHESRSHQSSYGQHGSGSSQSSGYGQHGSSSGQTSGFGQHRSSSGQYSGFGQHGSGSGQSSGFGQHGTGSGQYSGFGQHESRSHQSSYGQHGSGSSQSSGYGQHGSSSGQTFGFGQHRSGSGQSSGFGQHGSGSGQSSGFGQHESGSGKSSGFGQHESRSSQSNYGQHGSGSSQSSGYGQHGSSSGQTTGFGQHRSSSGQYSGFGQHGSGSDQSSGFGQHGTGSGQSSGFGQYESRSRQSSYGQHGSGSSQSSGYGQHGSNSGQTSGFGQHRPGSGQSSGFGQYGSGSGQSSGFGQHGSGTGKSSGFAQHEYRSGQSSYGQHGTGSSQSSGCGQHESGSGPTTSFGQHVSGSDNFSSSGQHISDSGQSTGFGQYGSGSGQSTGLGQGESQQVESGSTVHGRQETTHGQTINTTRHSQSGQGQSTQTGSRVTRRRRSSQSENSDSEVHSKVSHRHSEHIHTQAGSHYPKSGSTVRRRQGTTHGQRGDTTRHGHSGHGQSTQTGSRTSGRQRFSHSDATDSEVHSGVSHRPHSQEQTHSQAGSQHGESESTVHERHETTYGQTGEATGHGHSGHGQSTQRGSRTTGRRGSGHSESSDSEVHSGGSHRPQSQEQTHGQAGSQHGESGSTVHGRHGTTHGQTGDTTRHAHYHHGKSTQRGSSTTGRRGSGHSESSDSEVHSGGSHTHSGHTHGQSGSQHGESESIIHDRHRITHGQTGDTTRHSYSGHEQTTQTGSRTTGRQRTSHSESTDSEVHSGGSHRPHSREHTYGQAGSQHEEPEFTVHERHGTTHGQIGDTTGHSHSGHGQSTQRGSRTTGRQRSSHSESSDSEVHSGVSHTHTGHTHGQAGSQHGQSESIVPERHGTTHGQTGDTTRHAHYHHGLTTQTGSRTTGRRGSGHSEYSDSEGYSGVSHTHSGHTHGQARSQHGESESIVHERHGTIHGQTGDTTRHAHSGHGQSTQTGSRTTGRRSSGHSEYSDSEGHSGFSQRPHSRGHTHGQAGSQHGESESIVDERHGTTHGQTGDTSGHSQSGHGQSTQSGSSTTGRRRSGHSESSDSEVHSGGSHTHSGHTHSQARSQHGESESTVHKRHQTTHGQTGDTTEHGHPSHGQTIQTGSRTTGRRGSGHSEYSDSEGPSGVSHTHSGHTHGQAGSHYPESGSSVHERHGTTHGQTADTTRHGHSGHGQSTQRGSRTTGRRASGHSEYSDSEGHSGVSHTHSGHAHGQAGSQHGESGSSVHERHGTTHGQTGDTTRHAHSGHGQSTQRGSRTAGRRGSGHSESSDSEVHSGVSHTHSGHTYGQARSQHGESGSAIHGRQGTIHGQTGDTTRHGQSGHGQSTQTGSRTTGRQRSSHSESSDSEVHSEASPTHSGHTHSQAGSRHGQSGSSGHGRQGTTHGQTGDTTRHAHYGYGQSTQRGSRTTGRRGSGHSESSDSEVHSWGSHTHSGHIQGQAGSQQRQPGSTVHGRLETTHGQTGDTTRHGHSGYGQSTQTGSRSSRASHFQSHSSERQRHGSSQVWKHGSYGPAEYDYGHTGYGPSGGSRKSISNSHLSWSTDSTANKQLSRH

SEQ ID NO: 1627 - protein, 1686 aa, Homo sapiens
MPGGPSPRSPAPLLRPLLLLLCALAPGAPGPAPGRATEGRAALDIVHPVRVDAGGSFLSYELWPRALRKRDVSVRRDAPAFYELQYRGRELRFNLTANQHLLAPGFVSETRRRGGLGRAHIRAHTPACHLLGEVQDPELEGGLAAISACDGLKGVFQLSNEDYFIEPLDSAPARPGHAQPHVVYKRQAPERLAQRGDSSAPSTCGVQVYPELESRRERWEQRQQWRRPRLRRLHQRSVSKEKWVETLVVADAKMVEYHGQPQVESYVLTIMNMVAGLFHDPSIGNPIHITIVRLVLLEDEEEDLKITHHADNTLKSFCKWQKSINMKGDAHPLHHDTAILLTRKDLCAAMNRPCETLGLSHVAGMCQPHRSCSINEDTGLPLAFTVAHELGHSFGIQHDGSGNDCEPVGKRPFIMSPQLLYDAAPLTWSRCSRQYITRFLDRGWGLCLDDPPAKDIIDFPSVPPGVLYDVSHQCRLQYGAYSAFCEDMDNVCHTLWCSVGTTCHSKLDAAVDGTRCGENKWCLSGECVPVGFRPEAVDGGWSGWSAWSICSRSCGMGVQSAERQCTQPTPKYKGRYCVGERKRFRLCNLQACPAGRPSFRHVQCSHFDAMLYKGQLHTWVPVVNDVNPCELHCRPANEYFAEKLRDAVVDGTPCYQVRASRDLCINGICKNVGCDFEIDSGAMEDRCGVCHGNGSTCHTVSGTFEEAEGLGYVDVGLIPAGAREIRIQEVAEAANFLALRSEDPEKYFLNGGWTIQWNGDYQVAGTTFTYARRGNWENLTSPGPTKEPVWIQLLFQESNPGVHYEYTIHREAGGHDEVPPPVFSWHYGPWTKCTVTCGRGVQRQNVYCLERQAGPVDEEHCDPLGRPDDQQRKCSEQPCPARWWAGEWQLCSSSCGPGGLSRRAVLCIRSVGLDEQSALEPPACEHLPRPPTETPCNRHVPCPATWAVGNWSQCSVTCGEGTQRRNVLCTNDTGVPCDEAQQPASEVTCSLPLCRWPLGTLGPEGSGSGSSSHELFNEADFIPHHLAPRPSPASSPKPGTMGNAIEEEAPELDLPGPVFVDDFYYDYNFINFHEDLSYGPSEEPDLDLAGTGDRTPPPHSHPAAPSTGSPVPATEPPAAKEEGVLGPWSPSPWPSQAGRSPPPPSEQTPGNPLINFLPEEDTPIGAPDLGLPSLSWPRVSTDGLQTPATPESQNDFPVGKDSQSQLPPPWRDRTNEVFKDDEEPKGRGAPHLPPRPSSTLPPLSPVGSTHSSPSPDVAELWTGGTVAWEPALEGGLGPVDSELWPTVGVASLLPPPIAPLPEMKVRDSSLEPGTPSFPTPGPGSWDLQTVAVWGTFLPTTLTGLGHMPEPALNPGPKGQPESLSPEVPLSSRLLSTPAWDSPANSHRVPETQPLAPSLAEAGPPADPLVVRNAGWQAGNWSECSTTCGLGAVWRPVRCSSGRDEDCAPAGRPQPARRCHLRPCATWHSGNWSKCSRSCGGGSSVRDVQCVDTRDLRPLRPFHCQPGPAKPPAHRPCGAQPCLSWYTSSWRECSEACGGGEQQRLVTCPEPGLCEEALRPNTTRPCNTHPCTQWVVGPWGQCSGPCGGGVQRRLVKCVNTQTGLPEEDSDQCGHEAWPESSRPCGTEDCEPVEPPRCERDRLSFGFCETLRLLGRCQLPTIRTQCCRSCSPPSHGAPSRGHQRVARR

SEQ ID NO: 1628 - protein, 447 aa, Homo sapiens
MPAPALPTSAMAVQVPLWHHYLQAIRSREAPRAQDFQRAENVLLTVLERVHALDPRFIVDYSRGLEAFQFALRSSEDPMDMEVPLWVDAEALLIEEPEATQPEDGLELCHLGVPREGAGLERWTTEDTFTASSEGDAKCRGHIVPSKVLCVLKDLLVAAIVHCKHHSLIAPGSLNAASLREEQLHLSLLVSSGWRTISFHVVPVVRRKLGAPALEGVQQMPGFPEGSLRRILSQGVDLVPASAQLWRTSTDYLLTRLLGELGSLQGHRLDSLSILDRVNHESWRDSGQTDGLTFGHLKMVLLWASVLFLAPEDWAELQGAVYRLLVVLLCCLATRKLPHFLHPQRNLLQGSGLDLGAIYQRVEGFASQPEAALRIHATHLGRSPPPRIGSGLKALLQLPASDPTYWATAYFDVLLDKFQVFNIQDKDRISAMQSIFQKTRTLGGEES

SEQ ID NO: 1629 - protein, 2015 aa, Homo sapiens
MAGMSQRPPSMYWCVGPEESAVCPERAMETLNGAGDTGGKPSTRGGDPAARSRRTEGIRAAYRRGDRGGARDLLEEACDQCASQLEKGQLLSIPAAYGDLEMVRYLLSKRLVELPTEPTDDNPAVVAAYFGHTAVVQELLESLPGPCSPQRLLNWMLALACQRGHLGVVKLLVLTHGADPESYAVRKNEFPVIVRLPLYAAIKSGNEDIAIFLLRHGAYFCSYILLDSPDPSKHLLRKYFIEASPLPSSYPGKTALRVKWSHLRLPWVDLDWLIDISCQITELDLSANCLATLPSVIPWGLINLRKLNLSDNHLGELPGVQSSDEIICSRLLEIDISSNKLSHLPPGFLHLSKLQKLTASKNCLEKLFEEENATNWIGLRKLQELDISDNKLTELPALFLHSFKSLNSLNVSRNNLKVFPDPWACPLKCCKASRNALECLPDKMAVFWKNHLKDVDFSENALKEVPLGLFQLDALMFLRLQGNQLAALPPQEKWTCRQLKTLDLSRNQLGKNEDGLKTKRIAFFTTRGRQRSGTEAASVLEFPAFLSESLEVLCLNDNHLDTVPPSVCLLKSLSELYLGNNPGLRELPPELGQLGNLWQLDTEDLTISNVPAEIQKEGPKAMLSYLRAQLRKAEKCKLMKMIIVGPPRQGKSTLLEILQTGRAPQVVHGEATIRTTKWELQRPAGSRAKVESVEFNVWDIGGPASMATVNQCFFTDKALYVVVWNLALGEEAVANLQFWLLNIEAKAPNAVVLVVGTHLDLIEAKFRVERIATLRAYVLALCRSPSGSRATGFPDITFKHLHEISCKSLEGQEGLRQLIFHVTCSMKDVGSTIGCQRLAGRLIPRSYLSLQEAVLAEQQRRSRDDDVQYLTDRQLEQLVEQTPDNDIKDYEDLQSAISFLIETGTLLHFPDTSHGLRNLYFLDPIWLSECLQRIFNIKGSRSVAKNGVIRAEDLRMLLVGTGFTQQTEEQYFQFLAKFEIALPVANDSYLLPHLLPSKPGLDTHGMRHPTANTIQRVFKMSFVPVGFWQRFIARMLISLAEMDLQLFENKKNTKSRNRKVTIYSFTGNQRNRCSTFRVKRNQTIYWQEGLLVTFDGGYLSVESSDVNWKKKKSGGMKIVCQSEVRDFSAMAFITDHVNSLIDQWFPALTATESDGTPLMEQYVPCPVCETAWAQHTDPSEKSEDVQYFDMEDCVLTAIERDFISCPRHPDLPVPLQELVPELFMTDFPARLFLENSKLEHSEDEGSVLGQGGSGTVIYRARYQGQPVAVKRFHIKKFKNFANVPADTMLRHLRATDAMKNFSEFRQEASMLHALQHPCIVALIGISIHPLCFALELAPLSSLNTVLSENARDSSFIPLGHMLTQKIAYQIASGLAYLHKKNIIFCDLKSDNILVWSLDVKEHINIKLSDYGISRQSFHEGALGVEGTPGYQAPEIRPRIVYDEKVDMFSYGMVLYELLSGQRPALGHHQLQIAKKLSKGIRPVLGQPEEVQFRRLQALMMECWDTKPEKRPLALSVVSQMKDPTFATFMYELCCGKQTAFFSSQGQEYTVVFWDGKEESRNYTVVNTEKGLMEVQRMCCPGMKVSCQLQVQRSLWTATEDQKIYIYTLKGMCPLNTPQQALDTPAVVTCFLAVPVIKKNSYLVLAGLADGLVAVFPVVRGTPKDSCSYLCSHTANRSKFSIADEDARQNPYPVKAMEVVNSGSEVWYSNGPGLLVIDCASLEICRRLEPYMAPSMVTSVVCSSEGRGEEVVWCLDDKANSLVMYHSTTYQLCARYFCGVPSPLRDMFPVRPLDTEPPAASHTANPKVPEGDSIADVSIMYSEELGTQILIHQESLTDYCSMSSYSSSPPRQAARSPSSLPSSPASSSSVPFSTDCEDSDMLHTPGAASDRSEHDLTPMDGETFSQHLQAVKILAVRDLIWVPRRGGDVIVIGLEKDSGAQRGRVIAVLKARELTPHGVLVDAAVVAKDTVVCTFENENTEWCLAVWRGWGAREFDIFYQSYEELGRLEACTRKRR

SEQ ID NO: 1630 - protein, 373 aa, Homo sapiens
MSSGNYQQSEALSKPTFSEEQASALVESVFGLKVSKVRPLPSYDDQNFHVYVSKTKDGPTEYVLKISNTKASKNPDLIEVQNHIIMFLKAAGFPTASVCHTKGDNTASLVSVDSGSEIKSYLVRLLTYLPGRPIAELPVSPQLLYEIGKLAAKLDKTLQRFHHPKLSSLHRENFIWNLKNVPLLEKYLYALGQNRNREIVEHVIHLFKEEVMTKLSHFRECINHGDLNDHNILIESSKSASGNAEYQVSGILDFGDMSYGYYVFEVAITIMYMMIESKSPIQVGGHVLAGFESITPLTAVEKGALFLLVCSRFCQSLVMAAYSCQLYPENKDYLMVTAKTGWKHLQQMFDMGQKAVEEIWFETAKSYESGISM

SEQ ID NO: 1631 - protein, 1087 aa, Homo sapiens
MSLKPQQQQQQQQQQQQQQQQQQQQQQQPPPAAANVRKPGGSGLLASPAAAPSPSSSSVSSSSATAPSSVVAATSGGGRPGLGRGRNSNKGLPQSTISFDGIYANMRMVHILTSVVGSKCEVQVKNGGIYEGVFKTYSPKCDLVLDAAHEKSTESSSGPKREEIMESILFKCSDFVVVQFKDMDSSYAKRDAFTDSAISAKVNGEHKEKDLEPWDAGELTANEELEALENDVSNGWDPNDMFRYNEENYGVVSTYDSSLSSYTVPLERDNSEEFLKREARANQLAEEIESSAQYKARVALENDDRSEEEKYTAVQRNSSEREGHSINTRENKYIPPGQRNREVISWGSGRQNSPRMGQPGSGSMPSRSTSHTSDFNPNSGSDQRVVNGGVPWPSPCPSPSSRPPSRYQSGPNSLPPRAATPTRPPSRPPSRPSRPPSHPSAHGSPAPVSTMPKRMSSEGPPRMSPKAQRHPRNHRVSAGRGSISSGLEFVSHNPPSEAATPPVARTSPSGGTWSSVVSGAKDSRLQDQRQNSPAGNKENIKPNETSPSFSKAENKGISPVVSEHRKQIDDLKKFKNDFRLQPSSTSESMDQLLNKNREGEKSRDLIKDKIEPSAKDSFIENSSSNCTSGSSKPNSPSISPSILSNTEHKRGPEVTSQGVQTSSPACKQEKDDKEEKKDAAEQVRKSTLNPNAKEFNPRSFSQPKPSTTPTSPRPQAQPSPSMVGHQQPTPVYTQPVCFAPNMMYPVPVSPGVQPLYPIPMTPMPVNQAKTYRAVPNMPQQRQDQHHQSAMMHPASAAGPPIAATPPAYSTQYVAYSPQQFPNQPLVQHVPHYQSQHPHVYSPVIQGNARMMAPPTHAQPGLVSSSATQYGAHEQTHAMYACPKLPYNKETSPSFYFAISTGSLAQQYAHPNATLHPHTPHPQPSATPTGQQQSQHGGSHPAPSPVQHHQHQAAQALHLASPQQQSAIYHAGLAPTPPSMTPASNTQSPQNSFPAAQQTVFTIHPSHVQPAYTNPPHMAHVPQAHVQSGMVPSHPTAHAPMMLMTTQPPGGPQAALAQSALQPIPVSTTAHFPYMTHPSVQAHHQQQL

SEQ ID NO: 1632 - protein, 923 aa, Homo sapiens
MKVGWPGESCWQVGLAVEDSPALGAPRVGALPDVVPEGTLLNMVLRRMHRPRSCSYQLLLEHQRPSCIQGLRWTPLTNSEESLDFSESLEQASTERVLRAGRQLHRHLLATCPNLIRDRKYHLRLYRQCCSGRELVDGILALGLGVHSRSQVVGICQVLLDEGALCHVKHDWAFQDRDAQFYRFPGPEPEPVRTHEMEEELAEAVALLSQRGPDALLTVALRKPPGQRTDEELDLIFEELLHIKAVAHLSNSVKRELAAVLLFEPHSKAGTVLFSQGDKGTSWYIIWKGSVNVVTHGKGLVTTLHEGDDFGQLALVNDAPRAATIILREDNCHFLRVDKQDFNRIIKDVEAKTMRLEEHGKVVLVLERASQGAGPSRPPTPGRNRYTVMSGTPEKILELLLEAMGPDSSAHDPTETFLSDFLLTHRVFMPSAQLCAALLHHFHVEPAGGSEQERSTYVCNKRQQILRLVSQWVALYGSMLHTDPVATSFLQKLSDLVGRDTRLSNLLREQWPERRRCHRLENGCGNASPQMKARNLPVWLPNQDEPLPGSSCAIQVGDKVPYDICRPDHSVLTLQLPVTASVREVMAALAQEDGWTKGQVLVKVNSAGDAIGLQPDARGVATSLGLNERLFVVNPQEVHELIPHPDQLGPTVGSAEGLDLVSAKDLAGQLTDHDWSLFNSIHQVELIHYVLGPQHLRDVTTANLERFMRRFNELQYWVATELCLCPVPGPRAQLLRKFIKLAAHLKEQKNLNSFFAVMFGLSNSAISRLAHTWERLPHKVRKLYSALERLLDPSWNHRVYRLALAKLSPPVIPFMPLLLKDMTFIHEGNHTLVENLINFEKMRMMARAARMLHHCRSHNPVPLSPLRSRVSHLHEDSQVARISTCSEQSLSTRSPASTWAYVQQLKVIDNQRELSRLSRELEP

SEQ ID NO: 1633 - protein, 911 aa, Homo sapiens
MVQLRKLLRVLTLMKFPCCVLEVLLCALAAAARGQEMYAPHSIRIEGDVTLGGLFPVHAKGPSGVPCGDIKRENGIHRLEAMLYALDQINSDPNLLPNVTLGARILDTCSRDTYALEQSLTFVQALIQKDTSDVRCTNGEPPVFVKPEKVVGVIGASGSSVSIMVANILRLFQIPQISYASTAPELSDDRRYDFFSRVVPPDSFQAQAMVDIVKALGWNYVSTLASEGSYGEKGVESFTQISKEAGGLCIAQSVRIPQERKDRTIDFDRIIKQLLDTPNSRAVVIFANDEDIKQILAAAKRADQVGHFLWVGSDSWGSKINPLHQHEDIAEGAITIQPKRATVEGFDAYFTSRTLENNRRNVWFAEYWEENFNCKLTISGSKKEDTDRKCTGQERIGKDSNYEQEGKVQFVIDAVYAMAHALHHMNKDLCADYRGVCPEMEQAGGKKLLKYIRNVNFNGSAGTPVMFNKNGDAPGRYDIFQYQTTNTSNPGYRLIGQWTDELQLNIEDMQWGKGVREIPASVCTLPCKPGQRKKTQKGTPCCWTCEPCDGYQYQFDEMTCQHCPYDQRPNENRTGCQDIPIIKLEWHSPWAVIPVFLAMLGIIATIFVMATFIRYNDTPIVRASGRELSYVLLTGIFLCYIITFLMIAKPDVAVCSFRRVFLGLGMCISYAALLTKTNRIYRIFEQGKKSVTAPRLISPTSQLAITSSLISVQLLGVFIWFGVDPPNIIIDYDEHKTMNPEQARGVLKCDITDLQIICSLGYSILLMVTCTVYAIKTRGVPENFNEAKPIGFTMYTTCIVWLAFIPIFFGTAQSAEKLYIQTTTLTISMNLSASVALGMLYMPKVYIIIFHPELNVQKRKRSFKAVVTAATMSSRLSHKPSDRPNGEAKTELCENVDPNITSEDLSLHKED

SEQ ID NO: 1634 - protein, 906 aa, Homo sapiens
MVQLRKLLRVLTLMKFPCCVLEVLLCALAAAARGQEMYAPHSIRIEGDVTLGGLFPVHAKGPSGVPCGDIKRENGIHRLEAMLYALDQINSDPNLLPNVTLGARILDTCSRDTYALEQSLTFVQALIQKDTSDVRCTNGEPPVFVKPEKVVGVIGASGSSVSIMVANILRLFQIPQISYASTAPELSDDRRYDFFSRVVPPDSFQAQAMVDIVKALGWNYVSTLASEGSYGEKGVESFTQISKEAGGLCIAQSVRIPQERKDRTIDFDRIIKQLLDTPNSRAVVIFANDEDIKQILAAAKRADQVGHFLWVGSDSWGSKINPLHQHEDIAEGAITIQPKRATVEGFDAYFTSRTLENNRRNVWFAEYWEENFNCKLTISGSKKEDTDRKCTGQERIGKDSNYEQEGKVQFVIDAVYAMAHALHHMNKDLCADYRGVCPEMEQAGGKKLLKYIRNVNFNGSAGTPVMFNKNGDAPGRYDIFQYQTTNTSNPGYRLIGQWTDELQLNIEDMQWGKGVREIPASVCTLPCKPGQRKKTQKGTPCCWTCEPCDGYQYQFDEMTCQHCPYDQRPNENRTGCQDIPIIKLEWHSPWAVIPVFLAMLGIIATIFVMATFIRYNDTPIVRASGRELSYVLLTGIFLCYIITFLMIAKPDVAVCSFRRVFLGLGMCISYAALLTKTNRIYRIFEQGKKSVTAPRLISPTSQLAITSSLISVQLLGVFIWFGVDPPNIIIDYDEHKTMNPEQARGVLKCDITDLQIICSLGYSILLMVTCTVYAIKTRGVPENFNEAKPIGFTMYTTCIVWLAFIPIFFGTAQSAEKLYIQTTTLTISMNLSASVALGMLYMPKVYIIIFHPELNVQKRKRSFKAVVTAATMSSRLSHKPSDRPNGEAKTELCENVDPNSEKCNCY

SEQ ID NO: 1635 - protein, 402 aa, Homo sapiens
MLFEGKVNPQTQSLLAECGEWTRRSLHLRVLGRQLILPTDKGVQHFQGSTPASAVHRPPLSACGHSSNIRELCISGSQIVPAALSASALPGPDDTGVADLTARSSLEEEVYHVDGKIEEYFAFDRKEDDDECLEQKPAQPGRKWRKLGLPPVSPRDCVKDAVAAEVFDHVWTNMVELLEELIRKHWETTLTEGKKQRETLKVAGNRFPHVLVPHAHADGASGPPSGHAEAHGISLASRLNPPQIHHFSSSFYSDMNGVMTIQAKPLQRRPAYFADRTQNEKEDKASGGGAGALSSAPHRLGRASDTHGLSPSAKKTPVPWRLPSLASDSQRLKTPNIYSDEVLRGTTADWRGPHGFPTGSNVTEQVPPASHGDQGAEYSSSWMPPCFLQRKASTKPCVECHA

SEQ ID NO: 1636 - protein, 377 aa, Homo sapiens
MDIPPLAGKIAALSLSALPVSYALNHVSALSHPLWVALMSALILGLLFVAVYSLSHGEVSYDPLYAVFAVFAFTSVVDLIIALQEDSYVVGFMEFYTKEGEPYLRTAHGVFICYWDGTVHYLLYLAMAGAICRRKRYRNFGLYWLGSFAMSILVFLTGNILGKYSSEIRPAFFLTIPYLLVPCWAGMKVFSQPRALTRCTANMVQEEQRKGLLQRPADLALVIYLILAGFFTLFRGLVVLDCPTDACFVYIYQYEPYLRDPVAYPKVQMLMYMFYVLPFCGLAAYALTFPGCSWLPDWALVFAGGIGQAQFSHMGASMHLRTPFTYRVPEDTWGCFFVCNLLYALGPHLLAYRCLQWPAFFHQPPPSDPLALHKKQH

SEQ ID NO: 1637 - protein, 886 aa, Homo sapiens
MRAEEPCAPGAPSALGAQRTPGPELRLSSQLLPELCTFVVRVLFYLGPVYLAGYLGLSITWLLLGALLWMWWRRNRRGKLGRLAAAFEFLDNEREFISRELRGQHLPAWIHFPDVERVEWANKIISQTWPYLSMIMESKFREKLEPKIREKSIHLRTFTFTKLYFGQKCPRVNGVKAHTNTCNRRRVTVDLQICYIGDCEISVELQKIQAGVNGIQLQGTLRVILEPLLVDKPFVGAVTVFFLQKPHLQINWTGLTNLLDAPGINDVSDSLLEDLIATHLVLPNRVTVPVKKGLDLTNLRFPLPCGVIRVHLLEAEQLAQKDNFLGLRGKSDPYAKVSIGLQHFRSRTIYRNLNPTWNEVFEFMVYEVPGQDLEVDLYDEDTDRDDFLGSLQICLGDVMTNRVVDEWFVLNDTTSGRLHLRLEWLSLLTDQEVLTEDHGGLSTAILVVFLESACNLPRNPFDYLNGEYRAKKLSRFARNKVSKDPSSYVKLSVGKKTHTSKTCPHNKDPVWSQVFSFFVHNVATERLHLKVLDDDQECALGMLEVPLCQILPYADLTLEQRFQLDHSGLDSLISMRLVLRFLQVEERELGSPYTGPEALKKGPLLIKKVATNQGPKAQPQEEGPTDLPCPPDPASDTKDVSRSTTTTTSATTVATEPTSQETGPEPKGKDSAKRFCEPIGEKKSPATIFLTVPGPHSPGPIKSPRPMKCPASPFAWPPKRLAPSMSSLNSLASSCFDLADISLNIEGGDLRRRQLGEIQLTVRYVCLRRCLSVLINGCRNLTPCTSSGADPYVRVYLLPERKWACRKKTSVKRKTLEPLFDETFEFFVPMEEVKKRSLDVAVKNSRPLGSHRRKELGKVLIDLSKEDLIKGFSQWYELTPNGQPRS

SEQ ID NO: 1638 - protein, 537 aa, Homo sapiens
MRLVHYRYKPEFAASAGIEATAPETGVIAQEVKEILPEAVKDTGDMVFANGKTIENFLVVNKERIFMENVGAVKELCKLTDNLETRIDELERWSHKLAKLRRLDSLKSTGSSGAFSHAGSQFSRAGSVPHKKRPPKVASKSSSVVPDQACISQRFLQGTIIALVVVMAFSVVSMSTLYVLSLRTEEDLVDTDGSFAVSTSCLLALLRPQPPGGSEALCPWSSQSFGTTQLRQSPLTTGLPGIQPSLLLVTTSLTSSAPGSAVRTLDMCSSHPCPVICCSSPTTNPTTGPSLGPSFNPGHVLSPSPSPSTNRSGPSQMALLPVTNIRAKSWGLSVNGIGHSKHHKSLEPLASPAVPFPGGQGKAKNSPSLGFHGRARRGALQSSVGPAEPTWAQGQSEPVPSLTSIQVLENSMSITSQYCAPGDACRPGNFTYHIPVSSGTPLHLSLTLQMNSSSPVSVVLCSLRSKEEPCEEGSLPQSLHTHQDTQGTSHRWPITILSFREFTYHFRVALLGQANCSSEALAQPATDYHFHFYRLCD

SEQ ID NO: 1639 - protein, 190 aa, Homo sapiens
MAFIAKSFYDLSAISLDGEKVDFNTFRGRAVLIENVASLUGTTTRDFTQLNELQCRFPRRLVVLGFPCNQFGHQENCQNEEILNSLKYVRPGGGYQPTFTLVQKCEVNGQNEHPVFAYLKDKLPYPYDDPFSLMTDPKLIIWSPVRRSDVAWNFEKFLIGPEGEPFRRYSRTFPTINIEPDIKRLLKVAI

SEQ ID NO: 1640 - protein, 3075 aa, Homo sapiens
MRGGVLLVLLLCVAAQCRQRGLFPAILNLASNAHISTNATCGEKGPEMFCKLVEHVPGRPVRNPQCRICDGNSANPRERHPISHAIDGTNNWWQSPSIQNGREYHWVTITLDLRQVFQVAYVIIKAANAPRPGNWILERSLDGTTFSPWQYYAVSDSECLSRYNITPRRGPPTYRADDEVICTSYYSRLVPLEHGEIHTSLINGRPSADDLSPKLLEFTSARYIRLRLQRIRTLNADLMTLSHREPKELDPIVTRRYYYSIKDISVGGMCICYGHASSCPWDETTKKLQCQCEHNTCGESCNRCCPGYHQQPWRPGTVSSGNTCEACNCHNKAKDCYYDESVAKQKKSLNTAGQFRGGGVCINCLQNTMGINCETCIDGYYRPHKVSPYEDEPCRPCNCDPVGSLSSVCIKDDLHSDLHNGKQPGQCPCKEGYTGEKCDRCQLGYKDYPTCVSCGCNPVGSASDEPCTGPCVCKENVEGKACDRCKPGFYNLKEKNPRGCSECFCFGVSDVCSSLSWPVGQVNSMSGWLVTDLISPRKIPSQQDALGGRHQVSINNTAVMQRLAPKYYWAAPEAYLGNKLTAFGGFLKYTVSYDIPVETVDSNLMSHADVIIKGNGLTLSTQAEGLSLQPYEEYLNVVRLVPENFQDFHSKRQIDRDQLMTVLANVTHLLIRANYNSAKMALYRLESVSLDIASSNAIDLVVAADVEHCECPQGYTGTSCESCLSGYYRVDGILFGGICQPCECHGHAAECNVHGVCIACAHNTTGVHCEQCLPGFYGEPSRGTPGDCQPCACPLTIASNNFSPTCHLNDGDEVVCDWCAPGYSGAWCERCADGYYGNPTVPGESCVPCDCSGNVDPSEAGHCDSVTGECLKCLGNTDGAHCERCADGFYGDAVTAKNCRACECHVKGSHSAVCHLETGLCDCKPNVTGQQCDQCLHGYYGLDSGHGCRPCNCSVAGSVSDGCTDEGQCHCVPGVAGKRCDRCAHGFYAYQDGSCTPCDCPHTQNTCDPETGECVCPPHTQGVKCEECEDGHWGYDAEVGCQACNCSLVGSTHHRCDVVTGHCQCKSKFGGRACDQCSLGYRDFPDCVPCDCDLRGTSGDACNLEQGLCGCVEETGACPCKENVFGPQCNECREGTFALRADNPLGCSPCFCSGLSHLCSELEDYVRTPVTLGSDQPLLRVVSQSNLRGTTEGVYYQAPDFLLDAATVRQHIRAEPFYWRLPQQFQGDQLMAYGGKLKYSVAFYSLDGVGTSNFEPQVLIKGGRIRKQVIYMDAPAPENGVRQEQEVAMRENFWKYFNSVSEKPVTREDFMSVLSDIEYILIKASYGQGLQQSRISDISMEVGRKAEKLHPEEEVASLLENCVCPPGTVGFSCQDCAPGYHRGKLPAGSDRGPRPLVAPCVPCSCNNHSDTCDPNTGKCLNCGDNTAGDHCDVCTSGYYGKVTGSASDCALCACPHSPPASFSPTCVLEGDHDFRCDACLLGYEGKHCERCSSSYYGNPQTPGGSCQKCDCNPHGSVHGDCDRTSGQCVCRLGASGLRCDECEPRHILMETDCVSCDDECVGVLLNDLDEIGDAVLSLNLTGIIPVPYGILSNLENTTKYLQESLLKENMQKDLGKIKLEGVAEETDNLQKKLTRMLASTQKVNRATERIFKESQDLAIAIERLQMSITEIMEKTTLNQTLDEDFLLPNSTLQNMQQNGTSLLEIMQIRDFTQLHQNATLELKAAEDLLSQIQENYQKPLEELEVLKEAASHVLSKHNNELKAAEALVREAEAKMQESNHLLLMVNANLREFSDKKLHVQEEQNLTSELIVQGRGLIDAAAAQTDAVQDALEHLEDHQDKLLLWSAKIRHHIDDLVMHMSQRNAVDLVYRAEDHAAEFQRLADVLYSGLENIRNVSLNATSAAYVHYNIQSLIEESEELARDAHRTVTETSLLSESLVSNGKAAVQRSSRFLKEGNNLSRKLPGIALELSELRNKTNRFQENAVEITRQTNESLLILRAIPKGIRDKGAKTKELATSASQSAVSTLRDVAGLSQELLNTSASLSRVNTTLRETHQLLQDSTMATLLAGRKVKDVEIQANLLFDRLKPLKMLEENLSRNLSEIKLLISQARKQAASIKVAVSADRDCIRAYQPQISSTNYNTLTLNVKTQEPDNLLFYLGSSTASDFLAVEMRRGRVAFLWDLGSGSTRLEFPDFPIDDNRWHSIHVARFGNIGSLSVKEMSSNQKSPTKTSKSPGTANVLDVNNSTLMFVGGLGGQIKKSPAVKVTHFKGCLGEAFLNGKSIGLWNYIEREGKCRGCFGSSQNEDPSFHFDGSGYSVVEKSLPATVTQIIMLFNTFSPNGLLLYLGSYGTKDFLSIELFRGRVKVMTDLGSGPITLLTDRRYNNGTWYKIAFQRNRKQGVLAVIDAYNTSNKETKQGETPGASSDLNRLDKDPIYVGGLPRSRVVRRGVTTKSFVGCIKNLEISRSTFDLLRNSYGVRKGCLLEPIRSVSFLKGGYIELPPKSLSPESEWLVTFATTNSSGIILAALGGDVEKRGDREEAHVPFFSVMLIGGNIEVHVNPGDGTGLRKALLHAPTGTCSDGQAHSISLVRNRRIITVQLDENNPVEMKLGTLVESRTINVSNLYVGGIPEGEGTSLLTMRRSFHGCIKNLIFNLELLDFNSAVGHEQVDLDTCWLSERPKLAPDAEDSKLLPEPRAFPEQCVVDAALEYVPGAHQFGLTQNSHFILPFNQSAVRKKLSVELSIRTFASSGLIYYMAHQNQADYAVLQLHGGRLHFMFDLGKGRTKVSHPALLSDGKWHTVKTDYVKRKGFITVDGRESPMVTVVGDGTMLDVEGLFYLGGLPSQYQARKIGNITHSIPACIGDVTVNSKQLDKDSPVSAFTVNRCYAVAQEGTYFDGSGYAALVKEGYKVQSDVNITLEFRTSSQNGVLLGISTAKVDAIGLELVDGKVLFHVNNGAGRITAAYEPKTATVLCDGKWHTLQANKSKHRITLIVDGNAVGAESPHTQSTSVDTNNPIYVGGYPAGVKQKCLRSQTSFRGCLRKLALIKSPQVQSFDFSRAFELHGVFLHSCPGTES

SEQ ID NO: 1641 - protein, 489 aa, Homo sapiens
MSPKCSADAENSFKESMEKSSYSDWLINNSIAELVASTGLPVNISDAYQDPRFDAEADQISGFHIRSVLCVPIWNSNHQIIGVAQVLNRLDGKPFDDADQRLFEAFVIFCGLGINNTIMYDQVKKSWAKQSVALDVLSYHATCSKAEVDKFKAANIPLVSELAIDDIHFDDFSLDVDAMITAALRMFMELGMVQKFKIDYETLCRWLLTVRKNYRMVLYHNWRHAFNVCQLMFAMLTTAGFQDILTEVEILAVIVGCLCHDLDHRGTNNAFQAKSGSALAQLYGTSATLEHHHFNHAVMILQSEGHNIFANLSSKEYSDLMQLLKQSILATDLTLYFERRTEFFELVSKGEYDWNIKNHRDIFRSMLMTACDLGAVTKPWEISRQVAELVTSEFFEQGDRERLELKLTPSAIFDRNRKDELPRLQLEWIDSICMPLYQALVKVNVKLKPMLDSVATNRSKWEELHQKRLLASTASSSPASVMVAKEDRN

SEQ ID NO: 1642 - protein, 464 aa, Homo sapiens
MAGQDPALSTSHPFYDVARHGILQVAGDDRFGRRVVTFSCCRMPPSHELDHQRLLEYLKYTLDQYVENDYTIVYFHYGLNSRNKPSLGWLQSAYKEFDRKDGDLTMWPRLVSNSKLKRSSHLSLPKYWDYRYKKNLKALYVVHPTSFIKVLWNILKPLISHKFGKKVIYFNYLSELHEHLKYDQLVIPPEVLRYDEKLQSLHEGRTPPPTKTPPPRPPLPTQQFGVSLQYLKDKNQGELIPPVLRFTVTYLREKGLRTEGLFRRSASVQTVREIQRLYNQGKPVNFDDYGDIHIPAVILKTFLRELPQPLLTFQAYEQILGITCVESSLRVTGCRQILRSLPEHNYVVLRYLMGFLHAVSRESIFNKMNSSNLACVFGLNLIWPSQGVSSLSALVPLNMFTELLIEYYEKIFSTPEAPGEHGLAPWEQGSRAAPLQEAVPRTQATGLTKPTLPPSPLMAARRRL

SEQ ID NO: 1643 - protein, 547 aa, Homo sapiens
MRALTVQRVKFAMDLPLLKRAGQDLAEKTKNFVSRSLVIGEVLSMADMATGVKCGIIYWLFGGAIRNLGSPEHVTKWFQPLQEQKYTGMFAMTERGHGSNARGIQTEATFDLSAQEFVIDTPCENAEKMYIGNAMYGNYAAVFAQLIIDGRSQGPHCFIVPVRDENGSLYPGVTAIDMMYKEGLHGVDNGILIFDKVRIPRENLLDKFGSVAPDGQYHSPIRNKSARFNAMLAALTPSRLAVAFQAMGAMKLGLTIAIRYSHSRRQFGPKTKEEVKIIEHQTQTLRLMPHLATALALTFVSRYAGALLDEDVFQGKELVNSRSLQALVAGLKAYSTWENIRCLQDCRECTGGMGYMMENRISGLKCDTDVFATFEGDDVVMLQVVGRELLAQYTKQYEEKPLFGLLQNWAESVGDKLRTSFLAFNMDTVDDLAFLLKAVKFRERVLQRGLVARIYYKVKTKKEDFFHAWNSCLHHVASLSLAHTHRVTLEQFSLAVKSCPDQEDQTLLMKFCLLYGTKLVFQERAWYLEHKYLTPMASTRIRNQERC

SEQ ID NO: 1644 - protein, 1581 aa, Homo sapiens
MPLAFCGSENHSAAYRVDQGVLNNGCFVDALNVVPHVFLLFITFPILFIGWGSQSSKVHIHHSTWLHFPGHNLRWILTFMLLFVLVCEIAEGILSDGVTESHHLHLYMPAGMAFMAAVTSVVYYHNIETSNFPKLLIALLVYWTLAFITKTIKFVKFLDHAIGFSQLRFCLTGLLVILYGMLLLVEVNVIRVRRYIFFKTPREVKPPEDLQDLGVRFLQPFVNLLSKGTYWWMNAFIKTAHKKPIDLRAIGKLPIAMRALTNYQRLCEAFDAQVRKDIQGTQGARAIWQALSHAFGRRLVLSSTFRILADLLGFAGPLCIFGIVDHLGKENDVFQPKTQFLGVYFVSSQEFLANAYVLAVLLFLALLLQRTFLQASYYVAIETGINLRGAIQTKIYNKIMHLSTSNLSMGEMTAGQICNLVAIDTNQLMWFFFLCPNLWAMPVQIIVGVILLYYILGVSALIGAAVIILLAPVQYFVATKLSQAQRSTLEYSNERLKQTNEMLRGIKLLKLYAWENIFRTRVETTRRKEMTSLRAFAIYTSISIFMNTAIPIAAVLITFVGHVSFFKEADFSPSVAFASLSLFHILVTPLFLLSSVVRSTVKALVSVQKLSEFLSSAEIREEQCAPHEPTPQGPASKYQAVPLRVVNRKRPAREDCRGLTGPLQSLVPSADGDADNCCVQIMGGYFTWTPDGIPTLSNITIRIPRGQLTMIVGQVGCGKSSLLLAALGEMQKVSGAVFWSSLPDSEIGEDPSPERETATDLDIRKRGPVAYASQKPWLLNATVEENIIFESPFNKQRYKMVIEACSLQPDIDILPHGDQTQIGERGINLSGGQRQRISVARALYQHANVVFLDDPFSALDIHLSDHLMQAGILELLRDDKRTVVLVTHKLQYLPHADWIIAMKDGTIQREGTLKDFQRSECQLFEHWKTLMNRQDQELEKETVTERKATEPPQGLSRAMSSRDGLLQDEEEEEEEAAESEEDDNLSSMLHQRAEIPWRACAKYLSSAGILLLSLLVFSQLLKHMVLVAIDYWLAKWTDSALTLTPAARNCSLSQECTLDQTVYAMVFTVLCSLGIVLCLVTSVTVEWTGLKVAKRLHRSLLNRIILAPMRFFETTPLGSILNRFSSDCNTIDQHIPSTLECLSRSTLLCVSALAVISYVTPVFLVALLPLAIVCYFIQKYFRVASRDLQQLDDTTQLPLLSHFAETVEGLTTIRAFRYEARFQQKLLEYTDSNNIASLFLTAANRWLEVRMEYIGACVVLIAAVTSISNSLHRELSAGLVGLGLTYALMVSNYLNWMVRNLADMELQLGAVKRIHGLLKTEAESYEGLLAPSLIPKNWPDQGKIQIQNLSVRYDSSLKPVLKHVNALIAPGQKIGICGRTGSGKSSFSLAFFRMVDTFEGHIIIDGIDIAKLPLHTLRSRLSIILQDPVLFSGTIRFNLDPERKCSDSTLWEALEIAQLKLVVKALPGGLDAIITEGGENFSQGQRQLFCLARAFVRKTSIFIMDEATASIDMATENILQKVVMTAFADRTVVTIAHRVHTILSADLVIVLKRGAILEFDKPEKLLSRKDSVFASFVRADK

SEQ ID NO: 1645 - protein, 312 aa, Homo sapiens
MMEPREAGQHVGAANGAQEDVAFNLIILSLTEGLGLGGLLGNGAVLWLLSSNVYRNPFAIYLLDVACADLIFLGCHMVAIVPDLLQGRLDFPGFVQTSLATLRFFCYIVGLSLLAAVSVEQCLAALFPAWYSCRRPRHLTTCVCALTWALCLLLHLLLSGACTQFFGEPSRHLCRTLWLVAAVLLALLCCTMCGASLMLLLRVERGPQRPPPRGFPGLILLTVLLFLFCGLPFGIYWLSRNLLWYIPHYFYHFSFLMAAVHCAAKPVVYFCLGSAQGRRLPLRLVLQRALGDEAELGAVRETSRRGLVDIAA

SEQ ID NO: 1646 - protein, 662 aa, Homo sapiens
MVSQSTVRQDSPVEPWEGISDHSGIIDGSPRLLNTDHPPCQLDIRLMRHKAVWINPQDVQQQPQDLQSQVPAAGNSGTHFVTDAASPSGPSPSCLGDSLAETTLSEDTTDSVGSASPHGSSEKSSSFSLSSTEVHMVRPGYSHRVSLPTSPGILATSPYPETDSAFFEPSHLTSAADEGAVQVSRRTISSNSFSPEVFVLPVDVEKENAHFYVADMIISAMEKMKCNILSQQQTESWSKEVSGLLGSDQPDSEMTFDTNIKQESGSSTSSYSGYEGCAVLQVSPVTETRTYHDVKEICKCDVDEFVILELGDFNDITETCSCSCSSSKSVTYEPDFNSAELLAKELYRVFQKCWILSVVNSQLAGSLSAAGSIVVNEECVRKDFESSMNVVQEIKFKSRIRGTEDWAPPRFQIIFNIHPPLKRDLVVAAQNFFCAGCGTPVEPKFVKRLRYCEYLGKYFCDCCHSYAESCIPARILMMWDFKKYYVSNFSKQLLDSIWHQPIFNLLSIGQSLYAKAKELDRVKEIQEQLFHIKKLLKTCRFANSALKEFEQVPGHLTDELHLFSLEDLVRIKKGLLAPLLKDILKASLAHVAGCELCQGKGFICEFCQNTTVIFPFQTATCRRCSACRACFHKQCFQSSECPRCARITARRKLLESVASAAT

SEQ ID NO: 1647 - protein, 494 aa, Homo sapiens [sequence omitted]

SEQ ID NO: 1648 - protein, 111 aa, Homo sapiens
MLLLLLLLGPGSGLGAVVSQHPSRVICKSGTSVKIECRSLDFQATTMFWYRQFPKQSLMLMATSNEGSKATYEQGVEKDKFLINHASLTLSTLTVTSAHPEDSSFYICSAR

SEQ ID NO: 1649 - protein, 453 aa, Homo sapiens
GSASAPTLFPLVSCENSPSDTSSVAVGCLAQDFLPDSITFSWKYKNNSDISSTRGFPSVLRGGKYAATSQVLLPSKDVMQGTDEHVVCKVQHPNGNKEKNVPLPVIAELPPKVSVFVPPRDGFFGNPRKSKLICQATGFSPRQIQVSWLREGKQVGSGVTTDQVQAEAKESGPTTYKVTSTLTIKESDWLGQSMFTCRVDHRGLTFQQNASSMCVPDQDTAIRVFAIPPSFASIFLTKSTKLTCLVTDLTTYDSVTISWTRQNGEAVKTHTNISESHPNATFSAVGEASICEDDWNSGERFTCTVTHTDLPSPLKQTISRPKGVALHRPDVYLLPPAREQLNLRESATITCLVTGFSPADVFVQWMQRGQPLSPEKYVTSAPMPEPQAPGRYFAHSILTVSEEEWNTGETYTCVVAHEALPNRVTERTVDKSTGKPTLYNVSLVMSDTAGTCY

SEQ ID NO: 1650 - protein, 118 aa, Homo sapiens
MKHLWFFLLLVAAPRWVLSQVQLQESGPGLVKPSETLSLTCTVSGGSVSSGSYYWSWIRQPPGKGLEWIGYIYYSGSTNYNPSLKSRVTISVDTSKNQFSLKLSSVTAADTAVYYCAR

SEQ ID NO: 1651 - protein, 540 aa, Homo sapiens
MGPGERAGGGGDAGKGNAAGGGGGGRSATTAGSRAVSALCLLLSVGSAAACLLLGVQAAALQGRVAALEEERELLRRAGPPGALDAWAEPHLERLLREKLDGLAKIRTAREAPSECVCPPGPPGRRGKPGRRGDPGPPGQSGRDGYPGPLGLDGKPGLPGPKGEKGAPGDFGPRGDQGQDGAAGPPGPPGPPGARGPPGDTGKDGPRGAQGPAGPKGEPGQDGEMGPKGPPGPKGEPGVPGKKGDDGTPSQPGPPGPKGEPGSMGPRGENGVDGAPGPKGEPGHRGTDGAAGPRGAPGLKGEQGDTVVIDYDGRILDALKGPPGPQGPPGPPGIPGAKGELGLPGAPGIDGEKGPKGQKGDPGEPGPAGLKGEAGEMGLSGLPGADGLKGEKGESASDSLQESLAQLIVEPGPPGPPGPPGPMGLQGIQGPKGLDGAKGEKGASGERGPSGLPGPVGPPGLIGLPGTKGEKGRPGEPGLDGFPGPRGEKGDRSERGEKGERGVPGRKGVKGQKGEPGPPGLDQPCPVGPDGLPVPGCWHK

SEQ ID NO: 1652 - protein, 465 aa, Homo sapiens
MALLQGLLTFRDVAIEFSQEEWKCLDPAQRTLYRDVMLENYRNLVSLDTSSKCMMKMFSSTGQGNTEVVHTGTLQIHASHHIGDTCFQEIEKDIHDFVFQWQENETNGHEALMTKTKKLMSSTERHDQRHAGNKPIKNELGSSFHSHLPEVHIFHPEGKIGNQVEKAINDAFSVSASQRISCRPKTRISNKYRNNFLQSSLLTQKREVHTREKSFQRNESGKAFNGSSLLKKHQIIHLGDKQYKCDVCGKDFHQKRYLACHRCHTGENPYTCNECGKTFSHNSALLVHKAIHTGEKPYKCNECGKVFNQQSNLARHHRVHTGEKPYKCEECDKVFSRKSHLERHRRIHTGEKPYKCKVCDKAFRRDSHLAQHTVIHTGEKPYKCNECGKTFVQNSSLVMHKVIHTGEKRYKCNECGKVFNHKSNLACHRRLHTGEKPYKCNECGKVFNRKSNLERHHRLHTGKKS

SEQ ID NO: 1653 - protein, 343 aa, Homo sapiens
MLVVQMPFSFPMAHFILFVFTVSTIFHVQQRLAKIQAMWELPVQIPVLASTSKALGPSQLRGMWTINAIGRLGNQMGEYATLYALAKMNGRPAFIPAQMHSTLAPIFRITLPVLHSATASRIPWQNYHLNDWMEEEYRHIPGEYVRFTGYPCSWTFYHHLRQEILQEFTLHDHVREEAQKFLRGLQVNGSRPGTFVGVHVRRGDYVHVMPKVWKGVVADRRYLQQALDWFRARYSSLIFVVTSNGMAWCRENIDTSHGDVVFAGDGIEGSPAKDFALLTQCNHTIMTIGTFGIWAAYLTGGDTIYLANYTLPDSPFLKIFKPEAAFLPEWTGIAADLSPLLKH

SEQ ID NO: 1654 - protein, 682 aa, Homo sapiens
MKLNVDGLLVYFPYDYIYPEQFSYMRELKRTLDAKGHGVLEMPSGTGKTVSLLALIMAYQRAYPLEVTKLIYCSRTVPEIEKVIEELRKLLNFYEKQEGEKLPFLGLALSSRKNLCIHPEILHANVVVYSYHYLLDPKIADLVSKELARKAVVVFDEAHNIDNVCIDSMSVNLTRRTLDRCQGNLETLQKTVLRIKETDEQRLRDEYRRLVEGLREASAARETDAHLANPVLPDEVLQEAVPGSIRTAEHFLGFLRRLLEYVKWRLRVQHVVQESPPAFLSGLAQRVCIQRKPLRFCAERLRSLLHTLEITDLADFSPLTLLANFATLVSTYAKGFTIIIEPFDDRTPTIANPILHFSCMDASLAIKPVFERFQSVIITSGTLSPLDIYPKILDFHPVTMATFTMTLARVCLCPMIIGRGNDQVAISSKFETREDIAVIRNYGNLLLEMSAVVPDGIVAFFTSYQYMESTVASWYEQGILENIQRNKLLFIETQDGAETSVALEKYQEACENGRGAILLSVARGKVSEGIDFVHHYGRAVIMFGVPYVYTQSRILKARLEYLRDQFQIRENDFLTFDAMRHAAQCVGRAIRGKTDYGLMVFADKRFARGDKRGKLPRWIQEHLTDANLNLTVDEGVQVAKYFLRQMAQPFHREDQLGLSLLSLEQLESEETLKRIEQIAQQL

SEQ ID NO: 1655 - protein, 760 aa, Homo sapiens
MKLNVDGLLVYFPYDYIYPEQFSYMRELKRTLDAKGHGVLEMPSGTGKTVSLLALIMAYQRAYPLEVTKLIYCSRTVPEIEKVIEELRKLLNFYEKQEGEKLPFLGLALSSRKNLCIHPEVTPLRFGKDVDGKCHSLTASYVRAQYQHDTSLPHCRFYEEFDAHGREVPLPAGIYNLDDLKALGRRQGWCPYFLARYSILHANVVVYSYHYLLDPKIADLVSKELARKAVVVFDEAHNIDNVCIDSMSVNLTRRTLDRCQGNLETLQKTVLRIKETDEQRLRDEYRRLVEGLREASAARETDAHLANPVLPDEVLQEAVPGSIRTAEHFLGFLRRLLEYVKWRLRVQHVVQESPPAFLSGLAQRVCIQRKPLRFCAERLRSLLHTLEITDLADFSPLTLLANFATLVSTYAKGFTIIIEPFDDRTPTIANPILHFSCMDASLAIKPVFERFQSVIITSGTLSPLDIYPKILDFHPVTMATFTMTLARVCLCPMIIGRGNDQVAISSKFETREDIAVIRNYGNLLLEMSAVVPDGIVAFFTSYQYMESTVASWYEQGILENIQRNKLLFIETQDGAETSVALEKYQEACENGRGAILLSVARGKVSEGIDFVHHYGRAVIMFGVPYVYTQSRILKARLEYLRDQFQIRENDFLTFDAMRHAAQCVGRAIRGKTDYGLMVFADKRFARGDKRGKLPRWIQEHLTDANLNLTVDEGVQVAKYFLRQMAQPFHREDQLGLSLLSLEQLESEETLKRIEQIAQQL

SEQ ID NO: 1656 - protein, 808 aa, Homo sapiens
MTSPAAAQSREIDCLSPEAQKLAEARLAAKRAARAEAREIRMKELERQQKEEDSERYSRRSRRNTSASDEDERMSVGSRGSLRVEERPEKDFTEKGSRNMPGLSAATLASLGGTSSRRGSGDTSISIDTEASIREIKELNELKDQIQDVEGKYMQGLKEMKDSLAEVEEKYKKAMVSNAQLDNEKTNFMYQVDTLKDMLLELEEQLAESRRQYEEKNKEFEREKHAHSILQFQFAEVKEALKQREEMLEKHGIILNSEIATNGETSDTLNNVGYQGPTKMTKEELNALKSTGDGTLGRASEVEVKNEIVANVGKREILHNTEKEQHTEDTVKDCVDIEVFPAGENTEDQKSSEDTAPFLGTLAGATYEEQVQSQILESSSLPENTVQVESNEVMGAPDDRTRTPLEPSNCWSDLDGGNHTENVGEAAVTQVEEQAGTVASCPLGHSDDTVYHDDKCMVEVPQELETSTGHSLEKEFTNQEAAEPKEVPAHSTEVGRDHNEEEGEETGLRDEKPIKTEVPGSPAGTEGNCQEATGPSTVDTQNEPLDMKEPDEEKSDQQGEALDSSQKKTKNKKKKNKKKKSPVPVETLKDVKKELTYQNTDLSEIKEEEQVKSTDRKSAVEAQNEVTENPKQKIAAESSENVDCPENPKIKLDGKLDQEGDDVQTAAEEVLADGDTLDFEDDTVQSSGPRAGGEELDEGVAKDNAKIDGATQSSPAEPKSEDADRCTLPEHESPSQDISDACEAESTERCEMSEHPSQTVRKALDSNSLENDDLSAPGREPGHFNPESREDTRGGNEKGKSKEDCTMS

SEQ ID NO: 1657 - protein, 1036 aa, Homo sapiens
MRKHRHLPLVAVFCLFLSGFPTTHAQQQQAVIEVNKRDIVFLVDGSSALGLANFNAIRDFIAKVIQRLEIGQDLIQVAVAQYADTVRPEFYFNTHPTKREVITAVRKMKPLDGSALYTGSALDFVRNNLFTSSAGYRAAEGIPKLLVLITGGKSLDEISQPAQELKRSSIMAFAIGNKGADQAELEEIAFDSSLVFIPAEFRAAPLQGMLPGLLAPLRTLSGTPEVHSNKRDIIFLLDGSANVGKTNFPYVRDFVMNLVNSLDIGNDNIRVGLVQFSDTPVTEFSLNTYQTKSDILGHLRQLQLQGGSGLNTGSALSYVYANHFTEAGGSRIREHVPQLLLLLTAGQSEDSYLQAANALTRAGILTFCVGASQANKAELEQIAFNPSLVYLMDDFSSLPALPQQLIQPLTTYVSGGVEEVPLAQPESKRDILFLFDGSANLVGQFPVVRDFLYKIIDELNVKPEGTRIAVAQYSDDVKVESRFDEHQSKPEILNLVKRMKIKTGKALNLGYALDYAQRYIFVKSAGSRIEDGVLQFLVLLVAGRSSDRVDGPASNLKQSGVVPFIFQAKNADPAELEQIVLSPAFILAAESLPKIGDLHPQIVNLLKSVHNGAPAPVSGEKDVVFLLDGSEGVRSGFPLLKEFVQRVVESLDVGQDRVRVAVVQYSDRTRPEFYLNSYMNKQDVVNAVRQLTLLGGPTPNTGAALEFVLRNILVSSAGSRITEGVPQLLIVLTADRSGDDVRNPSVVVKRGGAVPIGIGIGNADITEMQTISFIPDFAVAIPTFRQLGTVQQVISERVTQLTREELSRLQPVLQPLPSPGVGGKRDVVFLIDGSQSAGPEFQYVRTLIERLVDYLDVGFDTTRVAVIQFSDDPKVEFLLNAHSSKDEVQNAVQRLRPKGGRQINVGNALEYVSRNIFKRPLGSRIEEGVPQFLVLISSGKSDDEVDDPAVELKQFGVAPFTIARNADQEELVKISLSPEYVFSVSTFRELPSLEQKLLTPITTLTSEQIQKLLASTRYPPPGEMGASEVLLGAFSI

SEQ ID NO: 1658 - protein, 1237 aa, Homo sapiens
MRKHRHLPLVAVFCLFLSGFPTTHAQQQQAAQDSADIIFLIDGSNNTGSVNFAVILDFLVNLLEKLPIGTQQIRVGVVQFSDEPRTMFSLDTYSTKAQVLGAVKALGFAGGELANIGLALDFVVENHFTRAGGSRVEEGVPQVLVLISAGPSSDEIRYGVVALKQASVFSFGLGAQAASRAELQHIATDDNLVFTVPEFRSFGDLQEKLLPYIVGVAQRHIVLKPPTIVTQVIEVNKRDIVFLVDGSSALGLANFNAIRDFIAKVIQRLEIGQDLIQVAVAQYADTVRPEFYFNTHPTKREVITAVRKMKPLDGSALYTGSALDFVRNNLFTSSAGYRAAEGIPKLLVLITGGKSLDEISQPAQELKRSSIMAFAIGNKGADQAELEEIAFDSSLVFIPAEFRAAPLQGMLPGLLAPLRTLSGTPEVHSNKRDIIFLLDGSANVGKTNFPYVRDFVMNLVNSLDIGNDNIRVGLVQFSDTPVTEFSLNTYQTKSDILGHLRQLQLQGGSGLNTGSALSYVYANHFTEAGGSRIREHVPQLLLLLTAGQSEDSYLQAANALTRAGILTFCVGASQANKAELEQIAFNPSLVYLMDDFSSLPALPQQLIQPLTTYVSGGVEEVPLAQPESKRDILFLFDGSANLVGQFPVVRDFLYKIIDELNVKPEGTRIAVAQYSDDVKVESRFDEHQSKPEILNLVKRMKIKTGKALNLGYALDYAQRYIFVKSAGSRIEDGVLQFLVLLVAGRSSDRVDGPASNLKQSGVVPFIFQAKNADPAELEQIVLSPAFILAAESLPKIGDLHPQIVNLLKSVHNGAPAPVSGEKDVVFLLDGSEGVRSGFPLLKEFVQRVVESLDVGQDRVRVAVVQYSDRTRPEFYLNSYMNKQDVVNAVRQLTLLGGPTPNTGAALEFVLRNILVSSAGSRITEGVPQLLIVLTADRSGDDVRNPSVVVKRGGAVPIGIGIGNADITEMQTISFIPDFAVAIPTFRQLGTVQQVISERVTQLTREELSRLQPVLQPLPSPGVGGKRDVVFLIDGSQSAGPEFQYVRTLIERLVDYLDVGFDTTRVAVIQFSDDPKVEFLLNAHSSKDEVQNAVQRLRPKGGRQINVGNALEYVSRNIFKRPLGSRIEEGVPQFLVLISSGKSDDEVDDPAVELKQFGVAPFTIARNADQEELVKISLSPEYVFSVSTFRELPSLEQKLLTPITTLTSEQIQKLLASTRYPPPGEMGASEVLLGAFSI

SEQ ID NO: 1659 - protein, 607 aa, Homo sapiens
MSSGLRAADFPRWKRHISEQLRRRDRLQRQAFEEIILQYNKLLEKSDLHSVLAQKLQAEKHDVPNRHEISPGHDGTWNDNQLQEMAQLRIKHQEELTELHKKRGELAQLVIDLNNQMQRKDREMQMNEAKIAECLQTISDLETECLDLRTKLCDLERANQTLKDEYDALQITFTALEGKLRKTTEENQELVTRWMAEKAQEANRLNAENEKDSRRRQARLQKELAEAAKEPLPVEQDDDIEVIVDETSDHTEETSPVRAISRAATKRLSQPAGGLLDSITNIFGRRSVSSFPVPQDNVDTHPGSGKEVRVPATALCVFDAHDGEVNAVQFSPGSRLLATGGMDRRVKLWEVFGEKCEFKGSLSGSNAGITSIEFDSAGSYLLAASNDFASRIWTVDDYRLRHTLTGHSGKVLSAKFLLDNARIVSGSHDRTLKLWDLRSKVCIKTVFAGSSCNDIVCTEQCVMSGHFDKKIRFWDIRSESIVREMELLGKITALDLNPERTELLSCSRDDLLKVIDLRTNAIKQTFSAPGFKCGSDWTRVVFSPDGSYVAAGSAEGSLYIWSVLTGKVEKVLSKQHSSSINAVAWSPSGSHVVSVDKGCKAVLWAQY

SEQ ID NO: 1660 - protein, 624 aa, Homo sapiens
MSSGLRAADFPRWKRHISEQLRRRDRLQRQAFEEIILQYNKLLEKSDLHSVLAQKLQAEKHDVPNRHEISPGHDGTWNDNQLQEMAQLRIKHQEELTELHKKRGELAQLVIDLNNQMQRKDREMQMNEAKIAECLQTISDLETECLDLRTKLCDLERANQTLKDEYDALQITFTALEGKLRKTTEENQELVTRWMAEKAQEANRLNAENEKDSRRRQARLQKELAEAAKEPLPVEQDDDIEVIVDETSDHTEETSPVRAISRAATKRLSQPAGGLLDSITNIFGLSESPLLGHHSSSDAARRRSVSSFPVPQDNVDTHPGSGKEVRVPATALCVFDAHDGEVNAVQFSPGSRLLATGGMDRRVKLWEVFGEKCEFKGSLSGSNAGITSIEFDSAGSYLLAASNDFASRIWTVDDYRLRHTLTGHSGKVLSAKFLLDNARIVSGSHDRTLKLWDLRSKVCIKTVFAGSSCNDIVCTEQCVMSGHFDKKIRFWDIRSESIVREMELLGKITALDLNPERTELLSCSRDDLLKVIDLRTNAIKQTFSAPGFKCGSDWTRVVFSPDGSYVAAGSAEGSLYIWSVLTGKVEKVLSKQHSSSINAVAWSPSGSHVVSVDKGCKAVLWAQY

SEQ ID NO: 1661 - protein, 588 aa, Homo sapiens
MSSGLRAADFPRWKRHISEQLRRRDRLQRQAFEEIILQYNKLLEKSDLHSVLAQKLQAEKHDVPNRHEISPGHDGTWNDNQLQEMAQLRIKHQEELTELHKKRGELAQLVIDLNNQMQRKDREMQMNEAKIAECLQTISDLETECLDLRTKLCDLERANQTLKDEYDALQITFTALEGKLRKTTEENQELVTRWMAEKAQEANRLNAENEKDSRRRQARLQKELAEAAKEPLPVEQDDDIEVIVDETSDHTEETSPVRAISRAATRRSVSSFPVPQDNVDTHPGSGKEVRVPATALCVFDAHDGEVNAVQFSPGSRLLATGGMDRRVKLWEVFGEKCEFKGSLSGSNAGITSIEFDSAGSYLLAASNDFASRIWTVDDYRLRHTLTGHSGKVLSAKFLLDNARIVSGSHDRTLKLWDLRSKVCIKTVFAGSSCNDIVCTEQCVMSGHFDKKIRFWDIRSESIVREMELLGKITALDLNPERTELLSCSRDDLLKVIDLRTNAIKQTFSAPGFKCGSDWTRVVFSPDGSYVAAGSAEGSLYIWSVLTGKVEKVLSKQHSSSINAVAWSPSGSHVVSVDKGCKAVLWAQY

SEQ ID NO: 1662 - protein, 1294 aa, Homo sapiens
MEKYHVLEMIGEGSFGRVYKGRRKYSAQVVALKFIPKLGRSEKELRNLQREIEIMRGLRHPNIVHMLDSFETDKEVVVVTDYAEGELFQILEDDGKLPEDQVQAIAAQLVSALYYLHSHRILHRDMKPQNILLAKGGGIKLCDFGFARAMSTNTMVLTSIKGTPLYMSPELVEERPYDHTADLWSVGCILYELAVGTPPFYATSIFQLVSLILKDPVRWPSTISPCFKNFLQGLLTKDPRQRLSWPDLLYHPFIAGHVTIITEPAGPDLGTPFTSRLPPELQVLKDEQAHRLAPKGNQSRILTQAYKRMAEEAMQKKHQNTGPALEQEDKTSKVAPGTAPLPRLGATPQESSLLAGILASELKSSWAKSGTGEVPSAPRENRTTPDCERAFPEERPEVLGQRSTDVVDLENEEPDSDNEWQHLLETTEPVPIQLKAPLTLLCNPDFCQRIQSQLHEAGGQILKGILEGASHILPAFRVLSSLLSSCSDSVALYSFCREAGLPGLLLSLLRHSQESNSLQQQSWYGTFLQDLMAVIQAYFACTFNLERSQTSDSLQVFQEAANLFLDLLGKLLAQPDDSEQTLRRDSLMCFTVLCEAMDGNSRAISKAFYSSLLTTQQVVLDGLLHGLTVPQLPVHTPQGAPQVSQPLREQSEDIPGAISSALAAICTAPVGLPDCWDAKEQVCWHLANQLTEDSSQLRPSLISGLQHPILCLHLLKVLYSCCLVSEGLCRLLGQEPLALESLFMLIQGKVKVVDWEESTEVTLYFLSLLVFRLQNLPCGMEKLGSDVATLFTHSHVVSLVSAAACLLGQLGQQGVTFDLQPMEWMAAATHALSAPAELLTEQGKASLIRDMSSSEMWTVLWHRFSMVLRLPEEASAQEGELSLSSPPSPEPDWTLISPQGMAALLSLAMATFTQEPQLCLSCLSQHGSILMSILKHLLCPSFLNQLRQAPHGSEFLPVVVLSVCQLLCFPFALDMDADLLIGVLADLRDSEVAAHLLQVCCYHLPLMQVELPISLLTRLALMDPTSLNQFVNTVSASPRTIVSFLSVALLSDQPLLTSDLLSLLAHTARVLSPSHLSFIQELLAGSDESYRPLRSLLGHPENSVRAHTYRLLGHLLQHSMALRGALQSQSGLLSLLLLGLGDKDPVVRCSASFAVGNAAYQAGPLGPALAAAVPSMTQLLGDPQAGIRRNVASALGNLGPEGLGEELLQCEVPQRLLEMACGDPQPNVKEAALIALRSLQQEPGIHQVLVSLGASEKLSLLSLGNQSLPHSSPRPASAKHCRKLIHLLRPAHSM

SEQ ID NO: 1663 - protein, 422 aa, Homo sapiens
MYPNPLIYCTCWDPWNLGPRKLIKTPQLPRKNSTGSSKLTPLVPAPKNHNYLQPTKPVVSPKMKIHSARQEETNKSFYEVINVSPGYQLVRNREQISVTLGDEMFDRKKRWESEIPDKGRFSRTNIISDLEEQISELTAIIEQMNRDHQSAQKLLSSEMDLRCAEMKQNFENKNRELKEAHEAELSELENNYKAALKAEKLAAQEKLEEMGKEYKYLKNMFRTYQDSIYDEMEEKWSKQKAKWKKDEKFERENILLQQKKKMTKKFEMESGEEDKKINESCSAVFENFIQEKEELLKQHQSDTLQLEELRKTKEVMQEELHAQALILESLNTNLYYTQLELQKEKAIVGNLEKMLQTKFAETEEKYKHTIQILTEENIHLKQKIISKNEEICEGCSGRLASITVSKDDSDTVQDGSKKGQES

SEQ ID NO: 1664 - protein, 399 aa, Homo sapiens
MEFPLAQICPQGSHEAPIPTFSTFQITDMTRRSCQNLGYTAASPQAPEAASNTGNAERAEEVPGEGSLFLQAETRAWFQKTQAHWLLQHGAAPAWFHGFITRRVRPPLSVTHREAERLLEPKPQGCYLVRFSESAVTFVLTYRSRTCCRHFLLAQLRDGRHVVLGEDSAHARLQDLLLHYTAHPLSPYGETLTEPLARQTPEPAGLSLRTEESNFGSKSQDPNPQYSPIIKQGQAPVPMQKEGAGEKEPSQLLRPKPPIPAKPQLPPEVYTIPVPRHRPAPRPKPSNPIYNEPDEPIAFYAMGRGSPGEAPSNIYVEVEDEGLPATLGHPVLRKSWSRPVPGGQNTGGSQLHSENSVIGQGPPLPHQPPPAWRHTLPHNLSRQVLQDRGQAWLPLGPPQ

SEQ ID NO: 1665 - protein, 543 aa, Homo sapiens
MEGPAGYLRRASVAQLTQELGTAFFQQQQLPAAMADTFLEHLCLLDIDSEPVAARSTSIIATIGPASRSVERLKEMIKAGMNIARLNFSHGSHEYHAESIANVREAVESFAGSPLSYRPVAIALDTKGPEIRTGILQGGPESEVELVKGSQVLVTVDPAFRTRGNANTVWVDYPNIVRVVPVGGRIYIDDGLISLVVQKIGPEGLVTQVENGGVLGSRKGVNLPGAQVDLPGLSEQDVRDLRFGVEHGVDIVFASFVRKASDVAAVRAALGPEGHGIKIISKIENHEGVKRFDEILEVSDGIMVARGDLGIEIPAEKVFLAQKMMIGRCNLAGKPVVCATQMLESMITKPRPTRAETSDVANAVLDGADCIMLSGETAKGNFPVEAVKMQHAIAREAEAAVYHRQLFEELRRAAPLSRDPTEVTAIGAVEAAFKCCAAAIIVLTTTGRSAQLLSRYRPRAAVIAVTRSAQAARQVHLCRGVFPLLYREPPEAIWADDVDRRVQFGIESGKLRGFLRVGDLVIVVTGWRPGSGYTNIMRVLSIS

SEQ ID NO: 1666 - protein, 384 aa, Homo sapiens
MDPAGGPRGVLPRPCRVLVLLNPRGGKGKALQLFRSHVQPLLAEAEISFTLMLTERRNHARELVRSEELGRWDALVVMSGDGLMHEVVNGLMERPDWETAIQKPLCSLPAGSGNALAASLNHYAGYEQVTNEDLLTNCTLLLCRRLLSPMNLLSLHTASGLRLFSVLSLAWGFIADVDLESEKYRRLGEMRFTLGTFLRLAALRTYRGRLAYLPVGRVGSKTPASPVVVQQGPVDAHLVPLEEPVPSHWTVVPDEDFVLVLALLHSHLGSEMFAAPMGRCAAGVMHLFYVRAGVSRAMLLRLFLAMEKGRHMEYECPYLVYVPVVAFRLEPKDGKGVFAVDGELMVSEAVQGQVHPNYFWMVSGCVEPPPSWKPQQMPPPEEPL

SEQ ID NO: 1667 - protein, 898 aa, Homo sapiens
MRKGVLKDPEIADLFYKDDPEELFIGLHEIGHGSFGAVYFATNAHTSEVVAIKKMSYSGKQTHEKWQDILKEVKFLRQLKHPNTIEYKGCYLKEHTAWLVMEYCLGSASDLLEVHKKPLQEVEIAAITHGALHGLAYLHSHALIHRDIKAGNILLTEPGQVKLADFGSASMASPANSFVGTPYWMAPEVILAMDEGQYDGKVDIWSLGITCIELAERKPPLFNMNAMSALYHIAQNDSPTLQSNEWTDSFRRFVDYCLQKIPQERPTSAELLRHDFVRRDRPLRVLIDLIQRTKDAVRELDNLQYRKMKKILFQETRNGPLNESQEDEEDSEHGTSLNREMDSLGSNHSIPSMSVSTGSQSSSVNSMQEVMDESSSELVMMHDDESTINSSSSVVHKKDHVFIRDEAGHGDPRPEPRPTQSVQSQALHYRNRERFATIKSASLVTRQIHEHEQENELREQMSGYKRMRRQHQKQLIALENKLKAEMDEHRLKLQKEVETHANNSSIELEKLAKKQVAIIEKEAKVAAADEKKFQQQILAQQKKDLTTFLESQKKQYKICKEKIKEEMNEDHSTPKKEKQERISKHKENLQHTQAEEEAHLLTQQRLYYDKNCRFFKRKIMIKRHEVEQQNIREELNKKRTQKEMEHAMLIRHDESTRELEYRQLHTLQKLRMDLIRLQHQTELENQLEYNKRRERELHRKHVMELRQQPKNLKAMEMQIKKQFQDTCKVQTKQYKALKNHQLEVTPKNEHKTILKTLKDEQTRKLAILAEQYEQSINEMMASQALRLDEAQEAECQALRLQLQQEMELLNAYQSKIKMQTEAQHERELQKLEQRVSLRRAHLEQKIEEELAALQKERSERIKNLLERQEREIETFDMESLRMGFGNLVTLDFPKEDYR

SEQ ID NO: 1668 - protein, 2172 aa, Homo sapiens
MWGLLIWTLLALHQIRAARAQDDVSPYFKTEPVRTQVHLEGNRLVLTCMAEGSWPLEFKWLHNNRELTKFSLEYRYMITSLDRTHAGFYRCIVRNRMGALLQRQTEVQVAYMGSFEEGEKHQSVSHGEAAVIRAPRIASFPQPQVTWFRDGRKIPPSSRIAITLENTLVILSTVAPDAGRYYVQAVNDKNGDNKTSQPITLTVENVGGPADPIAPTIIIPPKNTSVVAGTSEVTLECVANARPLIKLHIIWKKDGVLLSGGISDHNRRLTIPNPTGSDAGYYECEAVLRSSSVPSVVRGAYLSVLEPPQFVKEPERHITAEMEKVVDIPCQAKGVPPPSITWYKDAAVVEVEKLTRFRQRNDGGLQISGLVPDDTGMFQCFARNAAGEVQTSTYLAVTSIAPNITRGPLDSTVIDGMSVVLACETSGAPRPAITWQKGERILASGSVQLPRFTPLESGSLLISPTHISDAGTYTCLATNSRGVDEASADLVVWARTRITKPPQDQSVIKGTQASMVCGVTHDPRVTIRYIWEKDGATLGTESHPRIRLDRNGSLHISQTWSGDIGTYTCRVISAGGNDSRSAHLRVRQLPHAPEHPVATLSTVERRAINLTWTKPFDGNSPLIRYILEMSENNAPWTVLLASVDPKATSVTVKGLVPARSYQFRLCAVNDVGKGQFSKDTERVSLPEEPPTAPPQNVIASGRTNQSIMIQWQPPPESHQNGILKGYIIRYCLAGLPVGYQFKNITDADVNNLLLEDLIIWTNYEIEVAAYNSAGLGVYSSKVTEWTLQGVPTVPPGNVHAEATNSTTIRFTWNAPSPQFINGINQGYKLIAWEPEQEEEVTMVTARPNFQDSIHVGFVSGLKKFTEYFTSVLCFTTPGDGPRSTPQLVRTHEDVPGPVGHLSFSEILDTSLKVSWQEPGEKNGILTGYRISWEEYNRTNTRVTHYLPNVTLEYRVTGLTALTTYTIEVAAMTSKGQGQVSASTISSGVPPELPGPPTNLGISNIGPRSVTLQFRPGYDGKTSISRWLVEAQVGVVGEGEEWLLIHQLSNEPDARSMEVPDLNPFTCYSFRMRQVNIVGTSPPSQPSRKIQTLQAPPDMAPANVSLRTASETSLWLRWMPLPEMEYNGNPESVGYKIKYSRSDGHGKTLSHVVQDRVERDYTIEDLEEWTEYRVQVQAFNAIGSGPWSQTVVGRTRESVPSSGPTNVSALATTSSSMLVRWSEVPEADRNGLVLGYKVMYKEKDSDTQPRFWLVEGNSSRSAQLTGLGKYVLYEVQVLAFTRIGDGSPSHPPILERTLDDVPGPPMGILFPEVRTTSVRLIWQPPAAPNGIILAYQITHRLNTTTANTATVEVLAPSARQYTATGLKPESVYLFRITAQTRKGWGEAAEALVVTTEKRDRPQPPSRPMVQQEDVRARSVLLSWEPGSDGLSPVRYYTIQTRELPSGRWALHSASVSHNASSFIVDRLKPFTSYKFRVKATNDIGDSEFSEESESLTTLQAAPDEAPTILSVTPHTTTSVLIRWQPPAEDKINGILLGFRIRYRELLYEGLRGFTLRGINNPGATWAELTSMYSMRNLSRPSLTQYELDNLNKHRRYEIRMSVYNAVGEGPSSPPQEVFVGEAVPTAAPRNVVVHGATATQLDVTWEPPPLDSQNGDIQGYKIYFWEAQRGNLTERVKTLFLAENSVKLKNLTGYTAYMVSVAAFNAAGDGPRSTPTQGQTQQAAPSAPSSVKFSELTTTSVNVSWEAPQFPNGILEGYRLVYEPCSPVDGVSKIVTVDVKGNSPLWLKVKDLAEGVTYRFRIRAKTFTYGPEIEANVTTGPGEGAPGPPGVPIIVRYSSAIAIHWSSGDPGKGPITRYVIEARPSDEGLWDILIKDIPKEVSSYTFSMDILKPGVSYDFRVIAVNDYGFGTPSSPSQSVPAQKANPFYEEWWFLVVIALVGLIFILLLVFVLIIRGQSKKYAKKTDSGNSAKSGALGHSEMMSLDESSFPALELNNRRLSVKNSFCRKNGLYTRSPPRPSPGSLHYSDEDVTKYNDLIPAESSSLTEKPSEISDSQGSDSEYEVDSNHQKAHSFVNHYISDPTYYNSWRRQQKGISRAQAYSYTESDSGEPDHTTVTNSTSTQQGSLFRPKASRTPTPQNPPNPPSQQSTLYRPPSSLAPGSRAPIAGFSSFV

SEQ ID NO: 1669 - protein, 1738 aa, Homo sapiens
MKSRPTKQKLKQRGILKERVFGCDLGEHLLNSGFEVPQVLQSCTAFIERYGIVDGIYRLSGVASNIQRLRHEFDSEHVPDLTKEPYVQDIHSVGSLCKLYFRELPNPLLTYQLYEKFSDAVSAATDEERLIKIHDVIQQLPPPHYRTLEFLMRHLSLLADYCSITNMHAKNLAIVWAPNLLRSKQIESACFSGTAAFMEVRIQSVVVEFILNHVDVLFSGRISMAMQEGAASLSRPKSLLVSSPSTKLLTLEEAQARTQAQVNSPIVTENKYIEVGEGPAALQGKFHTIIEFPLERKRPQNKMKKSPVGSWRSFFNLGKSSSVSKRKLQRNESEPSEMKAMALKGGRAEGTLRSAKSEESLTSLHAVDGDSKLFRPRRPRSSSDALSASFNGEMLGNRCNSYDNLPHDNESEEEGGLLHIPALMSPHSAEDVDLSPPDIGVASLDFDPMSFQCSPPKAESECLESGASFLDSPGYSKDKPSANKKDAETGSSQCQTPGSTASSEPVSPLQEKLSPFFTLDLSPTEDKSSKPSSFTEKVVYAFSPKIGRKLSKSPSMSISEPISVTLPPRVSEVIGTVSNTTAQNASSSTWDKCVEERDATNRSPTQIVKMKTNETVAQEAYESEVQPLDQVAAEEVELPGKEDQSVSSSQSKAVASGQTQTGAVTHDPPQDSVPVSSVSLIPPPPPPKNVARMLALALAESAQQASTQSLKRPGTSQAGYTNYGDIAVATTEDNLSSSYSAVALDKAYFQTDRPAEQFHLQNNAPGNCDHPLPETTATGDPTHSNTTESGEQHHQVDLTGNQPHQAYLSGDPEKARITSVPLDSEKSDDHVSFPEDQSGKNSMPTVSFLDQDQSPPRFYSGDQPPSYLGASVDKLHHPLEFADKSPTPPNLPSDKIYPPSGSPEENTSTATMTYMTTTPATAQMSTKEASWDVAEQPTTADFAAATLQRTHRTNRPLPPPPSQRSAEQPPVVGQVQAATNIGLNNSHKVQGVVPVPERPPEPRAMDDPASAFISDSGAAAAQCPMATAVQPGLPEKVRDGARVPLLHLRAESVPAHPCGFPAPLPPTRMMESKMIAAIHSSSADATSSSNYHSFVTASSTSVDDALPLPLPVPQPKHASQKTVYSSFARPDVTTEPFGPDNCLHFNMTPNCQYRPQSVPPHHNKLEQHQVYGARSEPPASMGLRYNTYVAPGRNASGHHSKPCSRVEYVSSLSSSVRNTCYPEDIPPYPTIRRVQSLHAPPSSMIRSVPISRTEVPPDDEPAYCPRPLYQYKPYQSSQARSDYHVTQLQPYFENGRVHYRYSPYSSSSSSYYSPDGALCDVDAYGTVQLRPLHRLPNRDFAFYNPRLQGKSLYSYAGLAPRPRANVTGYFSPNDHNVVSMPPAADVKHTYTSWDLEDMEKYRMQSIRRESRARQKVKGPVMSQYDNMTPAVQDDLGGIYVIHLRSKSDPGKTGLLSVAEGKESRHAAKAISPEGEDRFYRRHPEAEMDRAHHHGGHGSTQPEKPSLPQKQSSLRSRKLPDMGCSLPEHRAHQEASHRQFCESKNGPPYPQGAGQLDYGSKGIPDTSEPVSYHNSGVKYAASGQESLRLNHKEVRLSKEMERPWVRQPSAPEKHSRDCYKEEEHLTQSIVPPPKPERSHSLKLHHTQNVERDPSVLYQYQPHGKRQSSVTVVSQYDNLEDYHSLPQHQRGVFGGGGMGTYVPPGFPHPQSRTYATALGQGAFLPAELSLQHPETQIHAE

SEQ ID NO: 1670 - protein, 1642 aa, Homo sapiens
MSTAIREVGVWRQTRTLLLKNYLIKCRTKKSSVQEILFPLFFLFWLILISMMHPNKKYEEVPNIELNPMDKFTLSNLILGYTPVTNITSSIMQKVSTDHLPDVIITEEYTNEKEMLTSSLSKPSNFVGVVFKDSMSYELRFFPDMIPVSSIYMDSRAGCSKSCEAAQYWSSGFTVLQASIDAAIIQLKTNVSLWKELESTKAVIMGETAVVEIDTFPRGVILIYLVIAFSPFGYFLAIHIVAEKEKKIKEFLKIMGLHDTAFWLSWVLLYTSLIFLMSLLMAVIATASLLFPQSSSIVIFLLFFLYGLSSVFFALMLTPLFKKSKHVGIVEFFVTVAFGFIGLMIILIESFPKSLVWLFSPFCHCTFVIGIAQVMHLEDFNEGASFSNLTAGPYPLIITIIMLTLNSIFYVLLAVYLDQVIPGEFGLRRSSLYFLKPSYWSKSKRNYEELSEGNVNGNISFSEIIEPVSSEFVGKEAIRISGIQKTYRKKGENVEALRNLSFDIYEGQITALLGHSGTGKSTLMNILCGLCPPSDGFASIYGHRVSEIDEMFEARKMIGICPQLDIHFDVLTVEENLSILASIKGIPANNIIQEVQKVLLDLDMQTIKDNQAKKLSGGQKRKLSLGIAVLGNPKILLLDEPTAGMDPCSRHIVWNLLKYRKANRVTVFSTHFMDEADILADRKAVISQGMLKCVGSSMFLKSKWGIGYRLSMYIDKYCATESLSSLVKQHIPGATLLQQNDQQLVYSLPFKDMDKFSGLFSALDSHSNLGVISYGVSMTTLEDVFLKLEVEAEIDQADYSVFTQQPLEEEMDSKSFDEMEQSLLILSETKAALVSTMSLWKQQMYTIAKFHFFTLKRESKSVRSVLLLLLIFFTVQIFMFLVHHSFKNAVVPIKLVPDLYFLKPGDKPHKYKTSLLLQNSADSDISDLISFFTSQNIMVTMINDSDYVSVAPHSAALNVMHSEKDYVFAAVFNSTMVYSLPILVNIISNYYLYHLNVTETIQIWSTPFFQEITDIVFKIELYFQAALLGIIVTAMPPYFAMENAENHKIKAYTQLKLSGLLPSAYWIGQAVVDIPLFFIILILMLGSLLAFHYGLYFYTVKFLAVVFCLIGYVPSVILFTYIASFTFKKILNTKEFWSFIYSVAALACIAITEITFFMGYTIATILHYAFCIIIPIYPLLGCLISFIKISWKNVRKNVDTYNPWDRLSVAVISPYLQCVLWIFLLQYYEKKYGGRSIRKDPFFRNLSTKSKNRKLPEPPDNEDEDEDVKAERLKVKELMGCQCCEEKPSIMVSNLHKEYDDKKDFLLSRKVKKVATKYISFCVKKGEILGLLGPNGAGKSTIINILVGDIEPTSGQVFLGDYSSETSEDDDSLKCMGYCPQINPLWPDTTLQEHFEIYGAVKGMSASDMKEVISRITHALDLKEHLQKTVKKLPAGIKRKLCFALSMLGNPQITLLDEPSTGMDPKAKQHMWRAIRTAFKNRKRAAILTTHYMEEAEAVCDRVAIMVSGQLRCIGTVQHLKSKFGKGYFLEIKLKDWIENLEVDRLQREIQYIFPNASRQESFSSILAYKIPKEDVQSLSQSFFKLEEAKHAFAIEEYSFSQATLEQVFVELTKEQEEEDNSCGTLNSTLWWERTQEDRVVF

SEQ ID NO: 1671 - protein, 235 aa, Homo sapiens
MASSTSLPAPGSRPKKPLGKMADWFRQTLLKKPKKRPNSPESTSSDASQPTSQDSPLPPSLSSVTSPSLPPTHASDSGSSRWSKDYDVCVCHSEEDLVAAQDLVSYLEGSTASLRCFLQLRDATPGGAIVSELCQALSSSHCRVLLITPGFLQDPWCKYQMLQALTEAPGAEGCTIPLLSGLSRAAYPPELRFMYYVDGRGPDGGFRQVKEAVMRCKLLQEGEGERDSATVSDLL

SEQ ID NO: 1672 - protein, 221 aa, Homo sapiens
MASSTSLPAPGSRPKKPLGKMADWFRQTLLKKPKKRPNSPESTSSDASQPTSQDSPLPPSLSSVTSPSLPPTHASDSGSSRWSKDYDVCVCHSEEDLVAAQDLVSYLEGSTASLRCFLQLRDATPGGAIVSELCQALSSSHCRVLLITPGFLQDPWCKYQMLQALTEAPGAEGCTIPLLSGLSRAAYPPELRFMYYVDGRGPDGGFRQVKEAVMRYLQTLS

SEQ ID NO: 1673 - protein, 1204 aa, Homo sapiens
MCGRAAEAAASSRTPGREMGQAVTRRLGAGARAAPRRAMDGRTPRPQDAPARRKPKAKAPLPPAETKYTDVSSAADSVESTAFIMEQKENMIDKDVELSVVLPGDIIKSTTVHGSKPMMDLLIFLCAQYHLNPSSYTIDLLSAEQNHIKFKPNTPIGMLEVEKVILKPKMLDKKKPTPIIPEKTVRVVINFKKTQKTIVRVSPHASLQELAPIICSKCEFDPLHTLLLKDYQSQEPLDLTKSLNDLGLRELYAMDVNRESCQISQNLDIMKEKENKGFFSFFQRSKKKRDQTASAPATPLVNKHRPTFTRSNTISKPYISNTLPSDAPKKRRAPLPPMPASQSVPQDLAHIQERPASCIVKSMSVDETDKSPCEAGRVRAGSLQLSSMSAGNSSLRRTKRKAPSPPSKIPPHQSDENSRVTALQPVDGVPPDSASEANSPEELSSPETFHPGLSSQEQCTAPKLMEETSVFECPGTPEAAITSLTSGISSDYSLEEIDEKEELSEVPKVEAENISPKSQDIPFVSTDIINTLKNDPDSALGNGSGEFSQNSMEEKQETKSTDGQEPHSVVYDTSNGKKVVDSIRNLKSLGPNQENVQNEIIVYPENTEDNMKNGVKKTEINVEGVAKNNNIDMEVERPSNSEAHETDTAISYKENHLAASSVPDQKLNQPSAEKTKDAAIQTTPSCNSFDGKHQDHNLSDSKVEECVQTSNNNISTQHSCLSSQDSVNTSREFRSQGTLIIHSEDPLTVKDPICAHGNDDLLPPVDRIDKNSTASYLKNYPLYRQDYNPKPKPSNEITREYIPKIGMTTYKIVPPKSLEISKDWQSETIEYKDDQDMHALGKKHTHENVKETAIQTEDSAISESPEEPLPNLKPKPNLRTEHQVPSSVSSPDDAMVSPLKPAPKMTRDTGTAPFAPNLEEINNILESKFKSRASNAQAKPSSFFLQMQKRVSGHYVTSAAAKSVHAAPNPAPKELTNKEAERDMLPSPEQTLSPLSKMPHSVPQPLVEKTDDDVIGQAPAEASPPPIAPKPVTIPASQVSTQNLKTLKTFGAPRPYSSSGPSPFALAVVKRSQSFSKERTESPSASALVQPPANTEEGKTHSVNKFVDIPQLGVSDKENNSAHNEQNSQIPTPTDGPSFTVMRQSSLTFQSSDPEQMRQSLLTAIRSGEAAAKLKRVTIPSNTISVNGRSRLSHSMSPDAQDGH

SEQ ID NO: 1674 - protein, 568 aa, Homo sapiens
MESSKKMDSPGALQTNPPLKLHTDRSAGTPVFVPEQGGYKEKFVKTVEDKYKCEKCHLVLCSPKQTECGHRFCESCMAALLSSSSPKCTACQESIVKDKVFKDNCCKREILALQIYCRNESRGCAEQLMLGHLLVHLKNDCHFEELPCVRPDCKEKVLRKDLRDHVEKACKYREATCSHCKSQVPMIALQKHEDTDCPCVVVSCPHKCSVQTLLRSELSAHLSECVNAPSTCSFKRYGCVFQGTNQQIKAHEASSAVQHVNLLKEWSNSLEKKVSLLQNESVEKNKSIQSLHNQICSFEIEIERQKEMLRNNESKILHLQRVIDSQAEKLKELDKEIRPFRQNWEEADSMKSSVESLQNRVTELESVDKSAGQVARNTGLLESQLSRHDQMLSVHDIRLADMDLRFQVLETASYNGVLIWKIRDYKRRKQEAVMGKTLSLYSQPFYTGYFGYKMCARVYLNGDGMGKGTHLSLFFVIMRGEYDALLPWPFKQKVTLMLMDQGSSRRHLGDAFKPDPNSSSFKKPTGEMNIASGCPVFVAQTVLENGTYIKDDTIFIKVIVDTSDLPDP

SEQ ID NO: 1675 - protein, 786 aa, Homo sapiens
MVHFCGLLTLHREPVPLKSISVSVNIYEFVAGVSATLNYENEEKVPLEAFFVFPMDEDSAVYSFEALVDGKKIVAELQDKMKARTNYEKAISQGHQAFLLEGDSSSRDVFSCNVGNLQPGSKAAVTLKYVQELPLEADGALRFVLPAVLNPRYQFSGSSKDSCLNVKTPIVPVEDLPYTLSMVATIDSQHGIEKVQSNCPLSPTEYLGEDKTSAQVSLAAGHKFDRDVELLIYYNEVHTPSVVLEMGMPNMKPGHLMGDPSAMVSFYPNIPEDQPSNTCGEFIFLMDRSGSMQSPMSSQDTSQLRIQAAKETLILLLKSLPIGCYFNIYGFGSSYEACFPESVKYTQQTMEEALGRVKLMQADLGGTEILAPLQNIYRGPSIPGHPLQLFVFTDGEVTDTFSVIKEVRINRQKHRCFSFGIGEGTSTSLIKGIARASGGTSEFITGKDRMQSKALRTLKRSLQPVVEDVSLSWHLPPGLSAKMLSPEQTVIFRGQRLISYAQLTGRMPAAETTGEVCLKYTLQGKTFEDKVTFPLQPKPDVNLTIHRLAAKSLLQTKDMGLRETPASDKKDALNLSLESGVISSFTAFIAINKELNKPVQGPLAHRDVPRPILLGASAPLKIKCQSGFRKALHSDRPPSASQPRGELMCYKAKTFQMDDYSLCGLISHKDQHSPGFGENHLVQLIYHQNANGSWDLNEDLAKILGMSLEEIMAAQPAELVDSSGWATILAVIWLHSNGKDLKCEWELLERKAVAWMRAHAGSTMPSVVKAAITFLKSSVDPAIFAF

SEQ ID NO: 1676 - protein, 443 aa, Homo sapiens
MRNAIIQGLFYGSLTFGIWTALLFIYLHHNHVSSWQKKSQEPLSAWSPGKKVHQQIIYGSEQIPKPHVIVKRTDEDKAKSMLGTDFNHTNPELHKELLKYGFNVIISRSLGIEREVPDTRSKMCLQKHYPARLPTASIVICFYNEECNALFQTMSSVTNLTPHYFLEEIILVDDMSKVDDLKEKLDYHLETFRGKVKIIRNKKREGLIRARLIGASHASGDVLVFLDSHCEVNRVWLEPLLHAIAKDPKMVVCPLIDVIDDRTLEYKPSPLVRGTFDWNLQFKWDNVFSYEMDGPEGSTKPIRSPAMSGGIFAIRRHYFNEIGQYDKDMDFWGRENLELSLRIWMCGGQLFIIPCSRVGHISKKQTGKPSTIISAMTHNYLRLVHVWLDEYKEQFFLRKPGLKYVTYGNIRERVELRKRLGCKSFQWYLDNVFPELEASVNSL

SEQ ID NO: 1677 - protein, 415 aa, Homo sapiens
MTKNDPFKARVSSGYVPPPVATPFSSKSSTKPAAGGTAPLPPWKSPSSSQPLPQVPAPAQSQTQFHVQPQPQPKPQVQLHVQSQTQPVSLANTQPRGPPASSPAPAPKFSPVTPKFTPVASKFSPGAPGGSGSQPNQKLGHPEALSAGTGSPQPPSFTYAQQREKPRVQEKQHPVPPPAQNQNQVRSPGAPGPLTLKEVEELEQLTQQLMQDMEHPQRQNVAVNELCGRCHQPLARAQPAVRALGQLFHIACFTCHQCAQQLQGQQFYSLEGAPYCEGCYTDTLEKCNTCGEPITDRMLRATGKAYHPHCFTCVVCARPLEGTSFIVDQANRPHCVPDYHKQYAPRCSVCSEPIMPEPGRDETVRVVALDKNFHMKCYKCEDCGKPLSIEADDNGCFPLDGHVLCRKCHTARAQT

SEQ ID NO: 1678 - protein, 379 aa, Homo sapiens
MGGRVFLVFLAFCVWLTLPGAETQDSRGCARWCPQDSSCVNATACRCNPGFSSFSEIITTPMETCDDINECATLSKVSCGKFSDCWNTEGSYDCVCSPGYEPVSGAKTFKNESENTCQDVDECQQNPRLCKSYGTCVNTLGSYTCQCLPGFKLKPEDPKLCTDVDECSSGQHQCDSSTVCFNTVGSYSCRCRPGWKPRHGIPNNQKDTVCEDMTFSTWTPPPGVHSQTLSRFFDKVQDLGRDYKPGLANNTIQSILQALDELLEAPGDLETLPRLQQHCVASHLLDGLEDVLRGLSKNLSNGLLNFSYPAGTELSLEVQKQVDRSVTLRQNQAVMQLDWNQAQKSGDPGGGSRADCHHLHGAERLSAVPPPGGPHFSPV

SEQ ID NO: 1679 - protein, 765 aa, Homo sapiens
MGGRVFLVFLAFCVWLTLPGAETQDSRGCARWCPQDSSCVNATACRCNPGFSSFSEIITTPMETCDDINECATLSKVSCGKFSDCWNTEGSYDCVCSPGYEPVSGAKTFKNESENTCQDVDECQQNPRLCKSYGTCVNTLGSYTCQCLPGFKLKPEDPKLCTDVNECTSGQNPCHSSTHCLNNVGSYQCRCRPGWQPIPGSPNGPNNTVCEDVDECSSGQHQCDSSTVCFNTVGSYSCRCRPGWKPRHGIPNNQKDTVCEDMTFSTWTPPPGVHSQTLSRFFDKVQDLGRDYKPGLANNTIQSILQALDELLEAPGDLETLPRLQQHCVASHLLDGLEDVLRGLSKNLSNGLLNFSYPAGTELSLEVQKQVDRSVTLRQNQAVMQLDWNQAQKSGDPGPSVVGLVSIPGMGKLLAEAPLVLEPEKQMLLHETHQGLLQDGSPILLSDVISAFLSNNDTQNLSSPVTFTFSHREEDPVLTVITYMGLSVSLLCLLLAALTFLLCKAIQNTSTSLHLQLSLCLFLAHLLFLVAIDQTGHKVLCSIIAGTLHYLYLATLTWMLLEALYLFLTARNLTVVNYSSINRFMKKLMFPVGYGVPAVTVAISAASRPHLYGTPSRCWLQPEKGFIWGFLGPVCAIFSVNLVLFLVTLWILKNRLSSLNSEVSTLRNTRMLAFKATAQLFILGCTWCLGILQVGPAARVMAYLFTIINSLQGVFIFLVYCLLSQQVREQYGKWSKGIRKLKTESEMHTLSSSAKADTSKPSTVN

SEQ ID NO: 1680 - protein, 617 aa, Homo sapiens
MPALSRWASLPGPSMREAAFMYSTAVAIFLVILVAALQGSAPRESPLPYHIPLDPEGSLELSWNVSYTQEAIHFQLLVRRLKAGVLFGMSDRGELENADLVVLWTDGDTAYFADAWSDQKGQIHLDPQQDYQLLQVQRTPEGLTLLFKRPFGTCDPKDYLIEDGTVHLVYGILEEPFRSLEAINGSGLQMGLQRVQLLKPNIPEPELPSDACTMEVQAPNIQIPSQETTYWCYIKELPKGFSRHHIIKYEPIVTKGNEALVHHMEVFQCAPEMDSVPHFSGPCDSKMKPDRLNYCRHVLAAWALGAKAFYYPEEAGLAFGGPGSSRYLRLEVHYHNPLVIEGRNDSSGIRLYYTAKLRRFNAGIMELGLVYTPVMAIPPRETAFILTGYCTDKCTQLALPPSGIHIFASQLHTHLTGRKVVTVLVRDGREWEIVNQDNHYSPHFQEIRMLKKVVSVHPGDVLITSCTYNTEDRELATVGGFGILEEMCVNYVHYYPQTQLELCKSAVDAGFLQKYFHLINRFNNEDVCTCPQASVSQQFTSVPWNSFNRDVLKALYSFAPISMHCNKSSAVRFQGEWNLQPLPKVISTLEEPTPQCPTSQGRSPAGPTVVSIGGGKG

SEQ ID NO: 1681 - protein, 412 aa, Homo sapiens
MDTSPSRKYPVKKRVKIHPNTVMVKYTSHYPQPGDDGYEEINEGYGNFMEENPKKGLLSEMKKKGRAFFGTMDTLPPPTEDPMINEIGQFQSFAEKNIFQSRKMWIVLFGSALAHGCVALITRLVSDRSKVPSLELIFIRSVFQVLSVLVVCYYQEAPFGPSGYRLRLFFYGVCNVISITCAYTSFSIVPPSNGTTMWRATTTVFSAILAFLLVDEKMAYVDMATVVCSILGVCLVMIPNIVDEDNSLLNAWKEAFGYTMTVMAGLTTALSMIVYRSIKEKISMWTALFTFGWTGTIWGISTMFILQEPIIPLDGETWSYLIAICVCSTAAFLGVYYALDKFHPALVSTVQHLEIVVAMVLQLLVLHIFPSIYDVFGGVIIMISVFVLAGYKLYWRNLRKQDYQEILDSPIK

SEQ ID NO: 1682 - protein, 262 aa, Homo sapiens
MGTTGLESLSLGDRGAAPTVTSSERLVPDPPNDLRKEDVAMELERVGEDEEQMMIKRSSECNPLLQEPIASAQFGATAGTECQDTIPRTQIERRKTSLYFSSKYNKEALSPPRRKAFKKWTPPRSPFNLVQETLFHDPWKLLIATIFLNRTSGKMAIPVLWKFLEKYPSAEVARTADWRDVSELLKPLGLYDLRAKTIVKFSDEYLTKQWKYPIELHGIGKYGNDSYRIFCVNEWKQVHPEDHKLNKYHDWLWENHEKLSLS

SEQ ID NO: 1683 - protein, 503 aa, Homo sapiens
MVEALRVWASTHMSPSWTLLKLCDVQPMQYFDLTCQLLGKAEVDGASFLLKVWDGTRTPFPSWRVLIQDLVLEGDLSHIHRLQNLTIDILVYDNHVHVARSLKVGSFLRIYSLHTKLQSMNSENQTMLSLEFHLHGGTSYGRGIRVLPESNSDVDQLKKDLESANLTANQHSDVICQSEPDDSFPSSGSVSLYEVERCQQLSATILTDHQYLERTPLCAILKQKAPQQYRIRAKLRSYKPRRLFQSVKLHCPKCHLLQEVPHEGDLDIIFQDGATKTPDVKLQNTSLYDSKIWTTKNQKGRKVAVHFVKNNGILPLSNECLLLIEGGTLSEICKLSNKFNSVIPVRSGHEDLELLDLSAPFLIQGTIHHYGCKQCSSLRSIQNLNSLVDKTSWIPSSVAEALGIVPLQYVFVMTFTLDDGTGVLEAYLMDSDKFFQIPASEVLMDDDLQKSVDMIMDMFCPPGIKIDAYPWLECFIKSYNVTNGTDNQICYQIFDTTVAEDVI

SEQ ID NO: 1684 - protein, 891 aa, Homo sapiens
MGALLLHPSRRGPAGVVASWTSSPAGRDGGVGIAGAWYFPRASSQAREMPQCPTLESQEGENSEEKGDSSKEDPKETVALAFVRENPGAQNGLQNAQQQGKKKRKKKRLVINLSSCRYESVRRAAQQYGFREGGEDDDWTLYWTDYSVSLERVMEMKSYQKINHFPGMSEICRKDLLARNMSRMLKMFPKDFRFFPRTWCLPADWGDLQTYSRSRKNKTYICKPDSGCQGKGIFITRTVKEIKPGEDMICQLYISKPFIIDGFKFDLRIYVLVTSCDPLRIFVYNEGLARFATTSYSRPCTDNLDDICMHLTNYSINKHSSNFSRDAHSGSKRKLSTFSAYLEDHSYNVEQIWRDIEDVIIKTLISAHPIIRHNYHTCFPNHTLNSACFEILGFDILLDHKLKPWLLEVNHSPSFSTDSRLDKEVKDGLLYDTLVLINLESCDKKKVLEEERQRGQFLQQCCSREMRIEEAKGFRAVQLKKTETYEKENCGGFRLIYPSLNSEKYEKFFQDNNSLFQNTVASRAREEYARQLIQELRLKREKKPFQMKKKVEMQGESAGEQVRKKGMRGWQQKQQQKDKAATQASKQYIQPLTLVSYTPDLLLSVRGERKNETDSSLNQEAPTEEASSVFPKLTSAKPFSSLPDLRNINLSSSKLEPSKPNFSIKEAKSASAVNVFTGTVHLTSVETTPESTTQLSISPKSPPTLAVTASSEYSGPETDRVVSFKCKKQQTPPHLTQKKMLKSFLPTKSKSFWESPNTNWTLLKSDMNKPHLISELLTKLQLSGKLSFFPAHYNPKLGMNNLSQNPSLPGECHSRSDSSGEKRQLDVSSLLLQSPQSYNVTLRDLLVIATPAQLDPRPCRSHASAMRDPCMQDQEAYSHCLISGQKGCERS

SEQ ID NO: 1685 - protein, 2315 aa, Homo sapiens
MRILKRFLACIQLLCVCRLDWANGYYRQQRKLVEEIGWSYTGALNQKNWGKKYPTCNSPKQSPINIDEDLTQVNVNLKKLKFQGWDKTSLENTFIHNTGKTVEINLTNDYRVSGGVSEMVFKASKITFHWGKCNMSSDGSEHSLEGQKFPLEMQIYCFDADRFSSFEEAVKGKGKLRALSILFEVGTEENLDFKAIIDGVESVSRFGKQAALDPFILLNLLPNSTDKYYIYNGSLTSPPCTDTVDWIVFKDTVSISESQLAVFCEVLTMQQSGYVMLMDYLQNNFREQQYKFSRQVFSSYTGKEEIHEAVCSSEPENVQADPENYTSLLVTWERPRVVYDTMIEKFAVLYQQLDGEDQTKHEFLTDGYQDLGAILNNLLPNMSYVLQIVAICTNGLYGKYSDQLIVDMPTDNPELDLFPELIGTEEIIKEEEEGKDIEEGAIVNPGRDSATNQIRKKEPQISTTTHYNRIGTKYNEAKTNRSPTRGSEFSGKGDVPNTSLNSTSQPVTKLATEKDISLTSQTVTELPPHTVEGTSASLNDGSKTVLRSPHMNLSGTAESLNTVSITEYEEESLLTSFKLDTGAEDSSGSSPATSAIPFISENISQGYIFSSENPETITYDVLIPESARNASEDSTSSGSEESLKDPSMEGNVWFPSSTDITAQPDVGSGRESFLQTNYTEIRVDESEKTTKSFSAGPVMSQGPSVTDLEMPHYSTFAYFPTEVTPHAFTPSSRQQDLVSTVNVVYSQTTQPVYNGETPLQPSYSSEVFPLVTPLLLDNQILNTTPAASSSDSALHATPVFPSVDVSFESILSSYDGAPLLPFSSASFSSELFRHLHTVSQILPQVTSATESDKVPLHASLPVAGGDLLLEPSLAQYSDVLSTTHAASETLEFGSESGVLYKTLMFSQVEPPSSDAMMHARSSGPEPSYALSDNEGSQHIFTVSYSSAIPVHDSVGVTYQGSLFSGPSHIPIPKSSLITPTASLLQPTHALSGDGEWSGASSDSEFLLPDTDGLTALNISSPVSVAEFTYTTSVFGDDNKALSKSEIIYGNETELQIPSFNEMVYPSESTVMPNMYDNVNKLNASLQETSVSISSTKGMFPGSLAHTTTKVFDHEISQVPENNFSVQPTHTVSQASGDTSLKPVLSANSEPASSDPASSEMLSPSTQLLFYETSASFSTEVLLQPSFQASDVDTLLKTVLPAVPSDPILVETPKVDKISSTMLHLIVSNSASSENMLHSTSVPVFDVSPTSHMHSASLQGLTISYASEKYEPVLLKSESSHQVVPSLYSNDELFQTANLEINQAHPPKGRHVFATPVLSIDEPLNTLINKLIHSDEILTSTKSSVTGKVFAGIPTVASDTFVSTDHSVPIGNGHVAITAVSPHRDGSVTSTKLLFPSKATSELSHSAKSDAGLVGGGEDGDTDDDGDDDDDDRGSDGLSIHKCMSCSSYRESQEKVMNDSDTHENSLMDQNNPISYSLSENSEEDNRVTSVSSDSQTGMDRSPGKSPSANGLSQKHNDGKEENDIQTGSALLPLSPESKAWAVLTSDEESGSGQGTSDSLNENETSTDFSFADTNEKDADGILAAGDSEITPGFPQSPTSSVTSENSEVFHVSEAEASNSSHESRIGLAEGLESEKKAVIPLVIVSALTFICLVVLVGILIYWRKCFQTAHFYLEDSTSPRVISTPPTPIFPISDDVGAIPIKHFPKHVADLHASSGFTEEFETLKEFYQEVQSCTVDLGITADSSNHPDNKHKNRYINIVAYDHSRVKLAQLAEKDGKLTDYINANYVDGYNRPKAYIAAQGPLKSTAEDFWRMIWEHNVEVIVMITNLVEKGRRKCDQYWPADGSEEYGNFLVTQKSVQVLAYYTVRNFTLRNTKIKKGSQKGRPSGRVVTQYHYTQWPDMGVPEYSLPVLTFVRKAAYAKRHAVGPVVVHCSAGVGRTGTYIVLDSMLQQIQHEGTVNIFGFLKHIRSQRNYLVQTEEQYVFIHDTLVEAILSKETEVLDSHIHAYVNALLIPGPAGKTKLEKQFQLLSQSNIQQSDYSAALKQCNREKNRTSSIIPVERSRVGISSLSGEGTDYINASYIMGYYQSNEFIITQHPLLHTIKDFWRMIWDHNAQLVVMIPDGQNMAEDEFVYWPNKDEPINCESFKVTLMAEEHKCLSNEEKLIIQDFILEATQDDYVLEVRHFQCPKWPNPDSPISKTFELISVIKEEAANRDGPMIVHDEHGGVTAGTFCALTTLMHQLEKENSVDVYQVAKMINLMRPGVFADIEQYQFLYKVILSLVSTRQEENPSTSLDSNGAALPDGNIAESLESLV

SEQ ID NO: 1686 - protein, 888 aa, Homo sapiens
MNHLNVLAKALYDNVAESPDELSFRKGDIMTVLEQDTQGLDGWWLCSLHGRQGIVPGNRLKILVGMYDKKPAGPGPGPPATPAQPQPGLHAPAPPASQYTPMLPNTYQPQPDSVYLVPTPSKAQQGLYQVPGPSPQFQSPPAKQTSTFSKQTPHHPFPSPATDLYQVPPGPGGPAQDIYQVPPSAGMGHDIYQVPPSMDTRSWEGTKPPAKVVVPTRVGQGYVYEAAQPEQDEYDIPRHLLAPGPQDIYDVPPVRGLLPSQYGQEVYDTPPMAVKGPNGRDPLLEVYDVPPSVEKGLPPSNHHAVSKCQGNARARLRLWGVWVYDVPPSVSKDVPDGPLLREETYDVPPAFAKAKPFDPARTPLVLAAPPPDSPPAEDVYDVPPPAPDLYDVPPGLRRPGPGTLYDVPRERVLPPEVADGGVVDSGVYAVPPPAEREAPAEGKRLSASSTGSTRSSQSASSLEVAGPGREPLELEVAVEALARLQQGVSATVAHLLDLAGSAGATGSWRSPSEPQEPLVQDLQAAVAAVQSAVHELLEFARSAVGNAAHTSDRALHAKLSRQLQKMEDVHQTLVAHGQALDAGRGGSGATLEDLDRLVACSRAVPEDAKQLASFLHGNASLLFRRTKATAPGPEGGGTLHPNPTDKTSSIQSRPLPSPPKFTSQDSPDGQYENSEGGWMEDYDYVHLQGKEEFEKTQKELLEKGSITRQGKSQLELQQLKQFERLEQEVSRPIDHDLANWTPAQPLAPGRTGGLGPSDRQLLLFYLEQCEANLTTLTNAVDAFFTAVATNQPPKIFVAHSKFVILSAHKLVFIGDTLSRQAKAADVRSQVTHYSNLLCDLLRGIVATTKAAALQYPSPSAAQDMVERVKELGHSTQQFRRVLGQLAAA

SEQ ID NO: 1687 - protein, 888 aa, Homo sapiens
MHCPGEAPLAAPRPTPKDPCLRNVLAKALYDNVAESPDELSFRKGDIMTVLEQDTQGLDGWWLCSLHGRQGIVPGNRLKILVGMYDKKPAGPGPGPPATPAQPQPGLHAPAPPASQYTPMLPNTYQPQPDSVYLVPTPSKAQQGLYQVPGPSPQFQSPPAKQTSTFSKQTPHHPFPSPATDLYQVPPGPGGPAQDIYQVPPSAGMGHDIYQVPPSMDTRSWEGTKPPAKVVVPTRVGQGYVYEAAQPEQDEYDIPRHLLAPGPQDIYDVPPVRGLLPSQYGQEVYDTPPMAVKGPNGRDPLLEVYDVPPSVEKGLPPSNHHAVYDVPPSVSKDVPDGPLLREETYDVPPAFAKAKPFDPARTPLVLAAPPPDSPPAEDVYDVPPPAPDLYDVPPGLRRPGPGTLYDVPRERVLPPEVADGGVVDSGVYAVPPPAEREAPAEGKRLSASSTGSTRSSQSASSLEVAGPGREPLELEVAVEALARLQQGVSATVAHLLDLAGSAGATGSWRSPSEPQEPLVQDLQAAVAAVQSAVHELLEFARSAVGNAAHTSDRALHAKLSRQLQKMEDVHQTLVAHGQALDAGRGGSGATLEDLDRLVACSRAVPEDAKQLASFLHGNASLLFRRTKATAPGPEGGGTLHPNPTDKTSSIQSRPLPSPPKFTSQDSPDGQYENSEGGWMEDYDYVHLQGKEEFEKTQKELLEKGSITRQGKSQLELQQLKQFERLEQEVSRPIDHDLANWTPAQPLAPGRTGGLGPSDRQLLLFYLEQCEANLTTLTNAVDAFFTAVATNQPPKIFVAHSKFVILSAHKLVFIGDTLSRQAKAADVRSQVTHYSNLLCDLLRGIVATTKAAALQYPSPSAAQDMVERVKELGHSTQQFRRVLGQLAAA

SEQ ID NO: 1688 - protein, 716 aa, Homo sapiens
MERTAGKELALAPLQDWGEETEDGAVYSVSLRRQRSQRRSPAEGPGGSQAPSPIANTFLHYRTSKVRVLRAARLERLVGELVFGDREQDPSFMPAFLATYRTFVPTACLLGFLLPPMPPPPPPGVEIKKTAVQDLSFNKNLRAVVSVLGSWLQDHPQDFRDHPAHSDLGSVRTFLGWAAPGSAEAQKAEKLLEDFLEEAEREQEEEPPQVWTGPPRVAQTSDPDSSEACAEEEEGLMPQGPQLLDFSVDEVAEQLTLIDLELFSKVRLYECLGSVWSQRDRPGAAGASPTVRATVAQFNTVTGCVLGSVLGAPGLAAPQRAQRLEKWIRIAQRCRELRNFSSLRAILSALQSNPIYRLKRSWGAVSREPLSTFRKLSQIFSDENNHLSSREILFQEEATEGSQEEDNTPGSLPSKPPPGPVPYLGTFLTDLVMLDTALPDMLEGDLINFEKRRKEWEILARIQQLQRRCQSYTLSPHPPILAALHAQNQLTEEQSYRLSRVIEPPAASCPSSPRIRRRISLTKRLSAKLAREKSSSPSGSPGDPSSPTSSLCISPSVSPGSPPSSPRSRDAPAGSPPASPGPQGPSTKLPLSLDLPSPRPFALPLGSPRIPLPAQQSSEARVIRVSIDNDHGNLYRSILLTSQDKAPSVVRRALQKHNVPQPWACDYQLFQVLPGDRVLLIPDNANVFYAMSPVAPRDFMLRRKEGTRNTLSVSPS

SEQ ID NO: 1689 - protein, 122 aa, Homo sapiens
MTSPEIASLSWGQMKVKGSNTTYKDCKVWPGGSRTWDWRETGTEHSPGVQPADVKEVVEKGVQTLVIGRGMSEALKVPSSTVEYLKKHGIDVRVLQTEQAVKEYNALVAQGVRVGGVFHSTC

SEQ ID NO: 1690 - protein, 754 aa, Homo sapiens
MSPEPVPPPPPPQCPGCDRAEPIAQRLEEGDEAFRAGDYEMAAELFRSMLAGLAQPDRGLCLRLGDALARAGRLPEALGAFRGAARLGALRPEELEELAGGLVRAVGLRDRPLSAENPGGEPEAPGEGGPAPEPRAPRDLLGCPRCRRLLHKPVTLPCGLTVCKRCVEPGPARPQVRRVNVVLSGLLEKCFPAECRLRRLAGQARSLQRQQQPEAALLRCDQALELAPDDNSLLLLRAELYLTMKNYEQALQDASAACQNEPLLIKGHQVKAQALSGLGRSKEVLKEFLYCLALNPECNSVKKEAQKVMCEVLFSATANVHENLTSSIQSRLKAQGHSHMNAQALLEEGDAGSSENSSEKSDMLGNTNSSVLYFILGLHFEEDKKALESILPTAPSAGLKRQFPDDVEDAPDLNAPGKIPKKDLSLQRSPNSETEESQGLSLDVTDFECALCMRLLFEPVTTPCGHTFCLKCLERCLDHAPHCPLCKDKLSELLASRNFNITVLAEELIFRYLPDELSDRKRIYDEEMSELSNLTRDVPIFVCAMAFPTVPCPLHVFEPRYRLMIRRCMETGTKRFGMCLSAEHAGLSEYGCMLEIKDVRTFPDGSSVVDAIGISRFRVLSHRHRDGYNTADIEYLEDEKVEGPEYEELAALHDSVHQQSVSWFASLQDRMKEQILSHFGVMPDREPEPQSNPSGPAWSWWILAVLPLERKAQLAILGMTSLKERLLAIRRILVIITRKMNSRQELANARERNN

SEQ ID NO: 1691 - protein, 329 aa, Homo sapiens
MRPPPALALAGLCLLALPAAAASYFGLTGREVLTPFPGLGTAAAPAQGGAHLKQCDLLKLSRRQKQLCRREPGLAETLRDAAHLGLLECQFQFRHERWNCSLEGRMGLLKRGFKETAFLYAVSSAALTHTLARACSAGRMERCTCDDSPGLESRQAWQWGVCGDNLKYSTKFLSNFLGSKRGNKDLRARADAHNTHVGIKAVKSGLRTTCKCHGVSGSCAVRTCWKQLSPFRETGQVLKLRYDSAVKVSSATNEALGRLELWAPARQGSLTKGLAPRSGDLVYMEDSPSFCRPSKYSPGTAGWSAVARSQLITTSTSRIQAILPSQLPE

SEQ ID NO: 1692 - protein, 1210 aa, Homo sapiens
MTLSGSRGQEEPPPSRVPRAVRVASLLSEGEELSGDDQGDEEEDDHAYEGVPNGGWHTSSLSLSLPSTIAAPHPMDGPPGGSTPVTPVIKAGWLDKNPPQGSYIYQKRWVRLDTDHLRYFDSNKDAYSKRFISVACISHVAAIGDQKFEVITNNRTFAFRAESDVERKEWMQALQQAMAEQRARARLSSAYLLGVPGSEQPDRAGSLELRGFKNKLYVAVVGDKVQLYKNLEEYHLGIGITFIDMSVGNVKEVDRRSFDLTTPYRIFSFSADSELEKEQWLEAMQGAIAEALSTSEVAERIWAAAPNRFCADCGAPQPDWASINLCVVICKRCAGEHRGLGAGVSKVRSLKMDRKVWTETLIELFLQLGNGAGNRFWAANVPPSEALQPSSSPSTRRCHLEAKYREGKYRRYHPLFGNQEELDKALCAAVTTTDLAETQALLGCGAGINCFSGDPEAPTPLALAEQAGQTLQMEFLRNNRTTEVPRLDSMKPLEKHYSVVLPTVSHSGFLYKTASAGKLLQDRRAREEFSRRWCVLGDGVLSYFENERAVTPNGEIRASEIVCLAVPPPDTHGFEHTFEVYTEGERLYLFGLESAEQAHEWVKCIAKAFVPPLAEDLLARDFERLGRLPYKAGLSLQRAQEGWFSLSGSELRAVFPEGPCEEPLQLRKLQELSIQGDSENQVLVLVERRRTLYIQGERRLDFMGWLGAIQKAAASMGDTLSEQQLGDSDIPVIVYRCVDYITQCGLTSEGIYRKCGQTSKTQRLLESLRQDARSVHLKEGEQHVDDVSSALKRFLRDLPDGLFTRAQRLTWLEASEIEDEEEKVSRYRELLVRLPPVNRATVKALISHLYCVQCFSDTNQMNVHNLAIVFGPTLFQTDGQDYKAGRVVEDLINHYVVVFSVDEEELRKQREEITAIVKMRVAGTASGTQHAGDFICTVYLEEKKAETEQHIKVPASMTAEELTLEILDRRNVGIREKDYWTCFEVNEREEAERPLHFAEKVLPILHGLGTDSHLVVKKHQAMEAMLLYLASRVGDTKHGMMKFREDRSLLGLGLPSGGFHDRYFILNSSCLRLYKEVRSQRPWSGAPETSHRPEKEWPIKSLKVYLGVKKKLRPPTCWGFTVVHETEKHEKQQWYLCCDTQMELREWFATFLFVQHDGLVWPSEPSRVSRAVPEVRLGSVSLIPLRGSENEMRRSVAAFTADPLSLLRNV

SEQ ID NO: 1693 - protein, 1450 aa, Homo sapiens
MAEAGDAALSVAEWLRALHLEQYTGLFEQHGLVWATECQGLSDTRLMDMGMLLPGHRRRILAGLLRAHTSPAPAPRPTPRPVPMKRHIFRSPPVPATPPEPLPTTTEDEGLPAAPPIPPRRSCLPPTCFTTPSTAAPDPVLPPLPAKRHLAELSVPPVPPRTGPPRLLVSLPTKEEESLLPSLSSPPQPQSEEPLSTLPQGPPQPPSPPPCPPEIPPKPVRLFPEFDDSDYDEVPEEGPGAPARVMTKKEEPPPSRVPRAVRVASLLSEGEELSGDDQGDEEEDDHAYEGVPNGGWHTSSLSLSLPSTIAAPHPMDGPPGGSTPVTPVIKAGWLDKNPPQGSYIYQKRWVRLDTDHLRYFDSNKDAYSKRFISVACISHVAAIGDQKFEVITNNRTFAFRAESDVERKEWMQALQQAMAEQRARARLSSAYLLGVPGSEQPDRAGSLELRGFKNKLYVAVVGDKVQLYKNLEEYHLGIGITFIDMSVGNVKEVDRRSFDLTTPYRIFSFSADSELEKEQWLEAMQGAIAEALSTSEVAERIWAAAPNRFCADCGAPQPDWASINLCVVICKRCAGEHRGLGAGVSKVRSLKMDRKVWTETLIELFLQLGNGAGNRFWAANVPPSEALQPSSSPSTRRCHLEAKYREGKYRRYHPLFGNQEELDKALCAAVTTTDLAETQALLGCGAGINCFSGDPEAPTPLALAEQAGQTLQMEFLRNNRTTEVPRLDSMKPLEKHYSVVLPTVSHSGFLYKTASAGKLLQDRRAREEFSRRWCVLGDGVLSYFENERAVTPNGEIRASEIVCLAVPPPDTHGFEHTFEVYTEGERLYLFGLESAEQAHEWVKCIAKAFVPPLAEDLLARDFERLGRLPYKAGLSLQRAQEGWFSLSGSELRAVFPEGPCEEPLQLRKLQELSIQGDSENQVLVLVERRRTLYIQGERRLDFMGWLGAIQKAAASMGDTLSEQQLGDSDIPVIVYRCVDYITQCGLTSEGIYRKCGQTSKTQRLLESLRQDARSVHLKEGEQHVDDVSSALKRFLRDLPDGLFTRAQRLTWLEASEIEDEEEKVSRYRELLVRLPPVNRATVKALISHLYCVQCFSDTNQMNVHNLAIVFGPTLFQTDGQDYKAGRVVEDLINHYVVVFSVDEEELRKQREEITAIVKMRVAGTASGTQHAGDFICTVYLEEKKAETEQHIKVPASMTAEELTLEILDRRNVGIREKDYWTCFEVNEREEAERPLHFAEKVLPILHGLGTDSHLVVKKHQAMEAMLLYLASRVGDTKHGMMKFREDRSLLGLGLPSGGFHDRYFILNSSCLRLYKEVRSQRPWSGAPETSHRPEKEWPIKSLKVYLGVKKKLRPPTCWGFTVVHETEKHEKQQWYLCCDTQMELREWFATFLFVQHDGLVWPSEPSRVSRAVPEVRLGSVSLIPLRGSENEMRRSVAAFTADPLSLLRNV

SEQ ID NO: 1694 - protein, 768 aa, Homo sapiens
MGTKMADLDSPPKLSGVQQPSEGVGGGRCSEISAELIRSLTELQELEAVYERLCGEEKVVERELDALLEQQNTIESKMVTLHRMGPNLQLIEGDAKQLAGMITFTCNLAENVSSKVRQLDLAKNRLYQAIQRADDILDLKFCMDGVQTALRSEDYEQAAAHTHRYLCLDKSVIELSRQGKEGSMIDANLKLLQEAEQRLKAIVAEKFAIATKEGDLPQVERFFKIFPLLGLHEEGLRKFSEYLCKQVASKAEENLLMVLGTDMSDRRAAVIFADTLTLLFEGIARIVETHQPIVETYYGPGRLYTLIKYLQVECDRQVEKVVDKFIKQRDYHQQFRHVQNNLMRNSTTEKIEPRELDPILTEVTLMNARSELYLRFLKKRISSDFEVGDSMASEEVKQEHQKCLDKLLNNCLLSCTMQELIGLYVTMEEYFMRETVNKAVALDTYEKGQLTSSMVDDVFYIVKKCIGRALSSSSIDCLCAMINLATTELESDFRDVLCNKLRMGFPATTFQDIQRGVTSAVNIMHSSLQQGKFDTKGIESTDEAKMSFLSDCTKLFSQGIGGEQAQAKFDSCLSDLAAVSNKFRDLLQEGLTELNSTAIKPQVQPWINSFFSVSHNIEEEEFNDYEANDPWVQQFILNLEQQMAEFKASLSPVIYDSLTGLMTSLVAVELEKVVLKSTFNRLGGLQFDKELRSLIAYLTTVTTWTIRDKFARLSQMATILNLERVTEILDYWGPNSGPLTWRLTPAEVRQVLALRIDFRSEDIKRLRL

SEQ ID NO: 1695 - protein, 323 aa, Homo sapiens
MGLSNILFVMAFLLSGAAPLKIQAYFNETADLPCQFANSQNQSLSELVVFWQDQENLVLNEVYLGKEKFDSVHSKYMGRTSFDSDSWTLRLHNLQIKDKGLYQCIIHHKKPTGMIRIHQMNSELSVLANFSQPEIVPISNITENVYINLTCSSIHGYPEPKKMSVLLRTKNSTIEYDGVMQKSQDNVTELYDVSISLSVSFPDVTSNMTIFCILETDKTRLLSSPFSIELEDPQPPPDHIPWITAVLPTVIICVMVFCLILWKWKKKKRPRNSYKCGTNTMEREESEQTKKREKIHIPERSDEAQRVFKSSKTSSCDKSDTCF

SEQ ID NO: 1696 - protein, 762 aa, Homo sapiens
MRLLLALLGVLLSVPGPPVLSLEASEEVELEPCLAPSLEQQEQELTVALGQPVRLCCGRAERGGHWYKEGSRLAPAGRVRGWRGRLEIASFLPEDAGRYLCLARGSMIVLQNLTLITGDSLTSSNDDEDPKSHRDPSNRHSYPQQAPYWTHPQRMEKKLHAVPAGNTVKFRCPAAGNPTPTIRWLKDGQAFHGENRIGGIRLRHQHWSLVMESVVPSDRGTYTCLVENAVGSIRYNYLLDVLERSPHRPILQAGLPANTTAVVGSDVELLCKVYSDAQPHIQWLKHIVINGSSFGADGFPYVQVLKTADINSSEVEVLYLRNVSAEDAGEYTCLAGNSIGLSYQSAWLTVLPGTGRIPHLTCDSLTPAGRTKSPTLQFSLESGSSGKSSSSLVRGVRLSSSGPALLAGLVSLDLPLDPLWEFPRDRLVLGKPLGEGCFGQVVRAEAFGMDPARPDQASTVAVKMLKDNASDKDLADLVSEMEVMKLIGRHKNIINLLGVCTQEGPLYVIVECAAKGNLREFLRARRPPGPDLSPDGPRSSEGPLSFPVLVSCAYQVARGMQYLESRKCIHRDLAARNVLVTEDNVMKIADFGLARGVHHIDYYKKTSNGRLPVKWMAPEALFDRVYTHQSDVWSFGILLWEIFTLGGSPYPGIPVEELFSLLREGHRMDRPPHCPPELYGLMRECWHAAPSQRPTFKQLVEALDKVLLAVSEEYLDLRLTFGPYSPSGGDASSTCSSSDSVFSHDPLPLGSSSFPFGSGVQT

SEQ ID NO: 1697 - protein, 734 aa, Homo sapiens
MRLLLALLGVLLSVPGPPVLSLEASEEVELEPCLAPSLEQQEQELTVALGQPVRLCCGRAERGGHWYKEGSRLAPAGRVRGWRGRLEIASFLPEDAGRYLCLARGSMIVLQNLTLITGDSLTSSNDDEDPKSHRDPSNRHSYPQQAPYWTHPQRMEKKLHAVPAGNTVKFRCPAAGNPTPTIRWLKDGQAFHGENRIGGIRLRHQHWSLVMESVVPSDRGTYTCLVENAVGSIRYNYLLDVLERSPHRPILQAGLPANTTAVVGSDVELLCKVYSDAQPHIQWLKHIVINGSSFGADGFPYVQVLKTADINSSEVEVLYLRNVSAEDAGEYTCLAGNSIGLSYQSAWLTVLPEEDPTWTAAAPEASSPWSQALPASQAHPWYEACVSPPAAPPCSPASLVLGKPLGEGCFGQVVRAEAFGMDPARPDQASTVAVKMLKDNASDKDLADLVSEMEVMKLIGRHKNIINLLGVCTQEGPLYVIVECAAKGNLREFLRARRPPGPDLSPDGPRSSEGPLSFPVLVSCAYQVARGMQYLESRKCIHRDLAARNVLVTEDNVMKIADFGLARGVHHIDYYKKTSNGRLPVKWMAPEALFDRVYTHQSDVWSFGILLWEIFTLGGSPYPGIPVEELFSLLREGHRMDRPPHCPPELYGLMRECWHAAPSQRPTFKQLVEALDKVLLAVSEEYLDLRLTFGPYSPSGGDASSTCSSSDSVFSHDPLPLGSSSFPFGSGVQT

SEQ ID NO: 1698 - protein, 682 aa, Homo sapiens
MAGGPGPGEPAAPGAQHFLYEVPPWVMCRFYKVMDALEPADWCQFAALIVRDQTELRLCERSGQRTASVLWPWINRNARVADLVHILTHLQLLRARDIITAWHPPAPLPSPGTTAPRPSSIPAPAEAEAWSPRKLPSSASTFLSPAFPGSQTHSGPELGLVPSPASLWPPPPSPAPSSTKPGPESSVSLLQGARPFPFCWPLCEISRGTHNFSEELKIGEGGFGCVYRAVMRNTVYAVKRLKENADLEWTAVKQSFLTEVEQLSRFRHPNIVDFAGYCAQNGFYCLVYGFLPNGSLEDRLHCQTQACPPLSWPQRLDILLGTARAIQFLHQDSPSLIHGDIKSSNVLLDERLTPKLGDFGLARFSRFAGSSPSQSSMVARTQTVRGTLAYLPEEYIKTGRLAVDTDTFSFGVVVLETLAGQRAVKTHGARTKYLKDLVEEEAEEAGVALRSTQSTLQAGLAADAWAAPIAMQIYKKHLDPRPGPCPPELGLGLGQLACCCLHRRAKRRPPMTQENSYVSSTGRAHSGAAPWQPLAAPSGASAQAAEQLQRGPNQPVESDESLGGLSAALRSWHLTPSCPLDPAPLREAGCPQGDTAGESSWGSGPGSRPTAVEGLALGSSASSSSEPPQIIINPARQKMVQKLALYEDGALDSLQLLSSSSLPGLGLEQDRQGPEESDEFQS

SEQ ID NO: 1699 - protein, 186 aa, Homo sapiens
MHVMAASMARGGVSARVLLQAARGTWWNRPGGTSGSGEGVALGTTRKFQATGSRPAGEEDAGGPERPGDVVNVVFVDRSGQRIPVSGRVGDNVLHLAQRHGVDLEGACEASLACSTCHVYVSEDHLDLLPPPEEREDDMLDMAPLLQENSRLGCQIVLTPELEGAEFTLPKITRNFYVDGHVPKPH

SEQ ID NO: 1700 - protein, 714 aa, Homo sapiens
MDHAEENEILAATQRYYVERPIFSHPVLQERLHTKDKVPDSIADKLKQAFTCTPKKIRNIIYMFLPITKWLPAYKFKEYVLGDLVSGISTGVLQLPQGLAFAMLAAVPPIFGLYSSFYPVIMYCFLGTSRHISIGPFAVISLMIGGVAVRLVPDDIVIPGGVNATNGTEARDALRVKVAMSVTLLSGIIQFCLGVCRFGFVAIYLTEPLVRGFTTAAAVHVFTSMLKYLFGVKTKRYSGIFSVVYSTVAVLQNVKNLNVCSLGVGLMVFGLLLGGKEFNERFKEKLPAPIPLEFFAVVMGTGISAGFNLKESYNVDVVGTLPLGLLPPANPDTSLFHLVYVDAIAIAIVGFSVTISMAKTLANKHGYQVDGNQELIALGLCNSIGSLFQTFSISCSLSRSLVQEGTGGKTQLAGCLASLMILLVILATGFLFESLPQTIWLTTFVSSLFLGLDYGLITAVIIALLTVIYRTQSPSYKVLGKLPETDVYIDIDAYEEVKEIPGIKIFQINAPIYYANSDLYSNALKRKTGVNPAVIMGARRKAMRKYAKEVGNANMANATVVKATQDAEVDGEDATKPEEEDGEVKYPPIVIKSTFPEEMQRFMPPGDNVHTVILDFTQVNFIDSVGVKTLAGIVKEYGDVGIYVYLAGCSAQVVNDLTRNRFFENPALWELLFHSIHDAVLGSQLREALAEQEASAPPSQEDLEPNATPATPEA

SEQ ID NO: 1701 - protein, 707 aa, Homo sapiens
MDHAEENEILAATQRYYVERPIFSHPVLQERLHTKDKVPDSIADKLKQAFTCTPKKIRNIIYMFLPITKWLPAYKFKEYVLGDLVSGISTGVLQLPQGPFAVISLMIGGVAVRLVPDDIVIPGGVNATNGTEARDALRVKVAMSVTLLSGIIQFCLGVCRFGFVAIYLTEPLVRGFTTAAAVHVFTSMLKYLFGVKTKRYSGIFSVVYSTVAVLQNVKNLNVCSLGVGLMVFGLLLGGKEFNERFKEKLPAPIPLEFFAVVMGTGISAGFNLKESYNVDVVGTLPLGLLPPANPDTSLFHLVYVDAIAIAIVGFSVTISMAKTLANKHGYQVDGNQELIALGLCNSIGSLFQTFSISCSLSRSLVQEGTGGKTQLAGCLASLMILLVILATGFLFESLPQAVLSAIVIVNLKGMFMQFSDLPFFWRTSKIELTIWLTTFVSSLFLGLDYGLITAVIIALLTVIYRTQSPSYKVLGKLPETDVYIDIDAYEEVKEIPGIKIFQINAPIYYANSDLYSNALKRKTGVNPAVIMGARRKAMRKYAKEVGNANMANATVVKADAEVDGEDATKPEEEDGEVKYPPIVIKSTFPEEMQRFMPPGDNVHTVILDFTQVNFIDSVGVKTLAGIVKEYGDVGIYVYLAGCSAQVVNDLTRNRFFENPALWELLFHSIHDAVLGSQLREALAEQEASAPPSQEDLEPNATPATPEA

SEQ ID NO: 1702 - protein, 712 aa, Homo sapiens
MDHAEENEILAATQRYYVERPIFSHPVLQERLHTKDKVPDSIADKLKQAFTCTPKKIRNIIYMFLPITKWLPAYKFKEYVLGDLVSGISTGVLQLPQGLAFAMLAAVPPIFGLYSSFYPVIMYCFLGTSRHISIGPFAVISLMIGGVAVRLVPDDIVIPGGVNATNGTEARDALRVKVAMSVTLLSGIIQFCLGVCRFGFVAIYLTEPLVRGFTTAAAVHVFTSMLKYLFGVKTKRYSGIFSVVYSTVAVLQNVKNLNVCSLGVGLMVFGLLLGGKEFNERFKEKLPAPIPLEFFAVVMGTGISAGFNLKESYNVDVVGTLPLGLLPPANPDTSLFHLVYVDAIAIAIVGFSVTISMAKTLANKHGYQVDGNQELIALGLCNSIGSLFQTFSISCSLSRSLVQEGTGGKTQLAGCLASLMILLVILATGFLFESLPQTIWLTTFVSSLFLGLDYGLITAVIIALLTVIYRTQSPSYKVLGKLPETDVYIDIDAYEEVKEIPGIKIFQINAPIYYANSDLYSNALKRKTGVNPAVIMGARRKAMRKYAKEVGNANMANATVVKADAEVDGEDATKPEEEDGEVKYPPIVIKSTFPEEMQRFMPPGDNVHTVILDFTQVNFIDSVGVKTLAGIVKEYGDVGIYVYLAGCSAQVVNDLTRNRFFENPALWELLFHSIHDAVLGSQLREALAEQEASAPPSQEDLEPNATPATPEA

SEQ ID NO: 1703 - protein, 516 aa, Homo sapiens
MDHAEENEILAATQRYYVERPIFSHPVLQERLHTKDKVPDSIADKLKQAFTCTPKKIRNIIYMFLPITKWLPAYKFKEYVLGDLVSGISTGVLQLPQGLAFAMLAAVPPIFGLYSSFYPVIMYCFLGTSRHISIGPFAVISLMIGGVAVRLVPDDIVIPGGVNATNGTEARDALRVKVAMSVTLLSGIIQFCLGVCRFGFVAIYLTEPLVRGFTTAAAVHVFTSMLKYLFGVKTKRYSGIFSVVYSTVAVLQNVKNLNVCSLGVGLMVFGLLLGGKEFNERFKEKLPAPIPLEFFAVVMGTGISAGFNLKESYNVDVVGTLPLGLLPPANPDTSLFHLVYVDAIAIAIVGFSVTISMAKTLANKHGYQVDGNQELIALGLCNSIGSLFQTFSISCSLSRSLVQEGTGGKTQLAGCLASLMILLVILATGFLFESLPQAVLSAIVIVNLKGMFMQFSDLPFFWRTSKIELTIWLTTFVSSLFLGLDYGLITAVIIALLTVIYRTQSFHTEMTRRWRP

SEQ ID NO: 1704 - protein, 1854 aa, Homo sapiens
MKEPDDQDTDGEKSVTSKSDGKKSLRSSKSESRSPVQEDNTFLEDDTDETFTKGEGSYLEEDSDEERLEGSLSSFQYGDLQSTTVPQQTPAPAVEEAEEEVKKKISESFFYDYMELASMPFVTLDSNIPLDLLTLVHSFGYDCRKRANLQLLDDSIAIYIAGNQLIFLNLKTKEQIYLRSSSGEGIGVIGVHPHKTYFTVAEKGSFPDIIIYEYPSLRPYRVLRDGTEKGYAYVDFNYSGNLLASVGSNPDYTLTIWNWKEEQPILRTKAFSQEVFKVTFNPDKEEQLTTSGSGHIKFWEMAFTFTGLKLQGSLGRFGKTITTDIEGYMELPDGKVLSGSEWGNMLLWEGGLIKVELCRGTSKSCHNGPINQIMLYEGEVITVGSDGYVRIWDFETIDTADVIDETGLLEIEPINELQVDKNVNLFSMIKMNETGNNFWLAQDANGAIWKLDLSFSNITQDPECLFSFHSGAIEAVAVSPLTYLMATTALDCSVRIYDFASKTPLAQMKFKQGGTALVWVPRMVNFTGAQIIVGFEDGVVRILELYDPKGLTIFAGRKKILDADIQLKQVFKPHTACVTALAYERDGEILATGSKDQTVFFFEVERDYKPIGYINTPGPVCQLMWSPMSHPESTLLIICENGYILEAPLPTIKQEEDDHDVVSYEIKDMCIKCFHFSSVKSKILRLIEIEKRERQRELKEKIREERRNKLAAEMGEDGEKEFQEEEEEKEEEEEEEEPLPEIFIPSTPSPILCGFYSEPGKFWVSLGGYDSGFLYHCEFPPCDESSDFKEQKDEPIDVRYLADTEDNPIQTITFNINKVMMFCGMKNGAIRVYVLNQNDPSLTSLVDYWHFNMHDNNYGCIKSIANSFDDRFLVTAGADGNIFVFNIFSEFMLRKDMKAKVPSPRFGIETEPIPEDIEDPKAYSIENARRKREHDKLMKEVGEIKARKREQIKALRSEFCNLLEMNEKLPKHMQFKRTDFDVDSQIRAEMHRKTAFKIQQVEKELAWEKEKHELGLMKLKNRFRDPLESDTIVVHAILSDHKISSYRLVQPSKYSKFKRASQSERKPSKLDRFEKEGPGRKDSQRDAGGSVTIQEESIIEKGKKFRPKTLSEIIVENQIEKTRKLILKAERAQLKIQQRKKEWEELYKSKPGDDYEDPKDLQAIKEAQVYMGDFNLKTAPDYKIPEHMRINAAKKEEELGHLDSLVHGNKRHMNKCILSLRDLKVAVVEEIQCLVQELKNIQSTLHISKHIPIPKIPQIHPEEVPEKRFQYDEETLLNFKQQQMKSKDEKSPGVEQTGSGGPVGGFLKLSSRKDGDLTTRDSISRSSKASTFSLDIPKCLEFEKAEPTDVELEIMKRDEIKHVYMQQYLVNRIKELVVTFDAELRLLRHQKLKLDTQMKLSDLHHVTLFQEILLLKNFEKQENILQERVNSLDKEEQYMQWKINETLKEMEEKKNEITKLQEQEKALYAGFQAAIGENNKFANFLMKVLKKKIKRVKKKEVEGDADEDEESEESSEEESSLESDEDESESEDEVFDDSICPTNCDVALFELALHLREKRLDIEEALVEEKKIVDNLKKEYDTLSKKVKIVATNLNAAEEALEAYQREKQQRLNELLVVIPLKLHQIEYVVFGEIPSDLSGTLVFSNHALRRLQERIHELQEENSKQQKLNKEWRERRKQLIREKREMTKTIHKMEETVRQLMISKFGRVVNLEALQTLSVNTTLEELKIRKLRKELANAKEMKMWEEKIAQMRWELMMKTKEHTRKLYQMNDLCIEKKKLDSRLNTLQNQQGNAFQGPREADVVAREEVTELIQLQAERISALKEEIALLRRKGSLILPPIQSPREKEIQPADL

SEQ ID NO: 1705 - protein, 594 aa, Homo sapiens
MRPKRLGRCCAGSRLGPGDPAALTCAPSPSASPAPEPSAQPQARGTGQRVGSRATSGSQFLSEARTGARPASEAGAKAGARRPSAFSAIQGDVRSMPDNSDAPWTRFVFQGPFGSRATGRGTGKAAGIWKTPAAYVGRRPGVSGPERAAFIRELEEALCPNLPPPVKKITQEDVKVMLYLLEELLPPVWESVTYGMVLQRERDLNTAARIGQSLVKQNSVLMEENSKLEALLGSAKEEILYLRHQVNLRDELLQLYSDSDEEDEDEEEEEEEKEAEEEQEEEEAEEDLQCAHPCDAPKLISQEALLHQHHCPQLEALQEKLRLLEEENHQLREEASQLDTLEDEEQMLILECVEQFSEASQQMAELSEVLVLRLENYERQQQEVARLQAQVLKLQQRCRMETLPGFQETLAEELRTSLRRMISDPVYFMERNYEMPRGDTSSLRYDFRYSEDREQVRGFEAEEGLMLAADIMRGEDFTPAEEFVPQEELGAAKKVPAEEGVMEEAELVSEETEGWEEVELELDEATRMNVVTSALEASGLGPSHLDMNYVLQQLANWQDAHYRRQLRWKMLQKGECPHGALPAASRTSCRSSCR

SEQ ID NO: 1706 - protein, 368 aa, Homo sapiens
MSGAPTAGAALMLCAATAVLLSAQGGPVQSKSPRFASWDEMNVLAHGLLQLGQGLREHAERTRSQLSALERRLSACGSACQGTEGSTDLPLAPESRVDPEVLHSLQTQLKAQNSRIQQLFHKVAQQQRHLEKQHLRIQHLQSQFGLLDHKHLDHEVAKPARRKRLPEMAQPVDPAHNVSRLHHGGWTVIQRRHDGSVDFNRPWEAYKAGFGDPHGEFWLGLEKVHSITGDRNSRLAVQLRDWDGNAELLQFSVHLGGEDTAYSLQLTAPVAGQLGATTVPPSGLSVPFSTWDQDHDLRRDKNCAKSLSGGWWFGTCSHSNLNGQYFRSIPQQRQKLKKGIFWKTWRGRYYPLQATTMLIQPMAAEAAS

SEQ ID NO: 1707 - protein, 175 aa, Homo sapiens
MGRPLLLPLLPLLLPPAFLQPSGSTGSGPSYLYGVTQPKHLSASMGGSVEIPFSFYYPWELATAPDVRISWRRGHFHRQSFYSTRPPSIHKDYVNRLFLNWTEGQKSGFLRISNLQKQDQSVYFCRVELDTRSSGRQQWQSIEGTKLSITQGNPSKTQRSHMRISGMKDKIQIPS

SEQ ID NO: 1708 - protein, 423 aa, Homo sapiens
MQRVNMIMAESPGLITICLLGYLLSAECTVFLDHENANKILNRPKRYNSGKLEEFVQGNLERECMEEKCSFEEAREVFENTERTTEFWKQYVDVTCNIKNGRCEQFCKNSADNKVVCSCTEGYRLAENQKSCEPAVPFPCGRVSVSQTSKLTRAETVFPDVDYVNSTEAETILDNITQSTQSFNDFTRVVGGEDAKPGQFPWQVVLNGKVDAFCGGSIVNEKWIVTAAHCVETGVKITVVAGEHNIEETEHTEQKRNVIRIIPHHNYNAAINKYNHDIALLELDEPLVLNSYVTPICIADKEYTNIFLKFGSGYVSGWGRVFHKGRSALVLQYLRVPLVDRATCLRSTKFTIYNNMFCAGFHEGGRDSCQGDSGGPHVTEVEGTSFLTGIISWGEECAMKGKYGIYTKVSRYVNWIKEKTKLT

SEQ ID NO: 1709 - protein, 1014 aa, Homo sapiens
MSFSLAPFLSPQSWPPPLPPAQSEIMKVVNLKQAILQAWKERWSDYQWAINMKKFFPKGATWDILNLADALLEQAMIGPSPNPLILSYLKYAISSQMVSYSSVLTAISKFDDFSRDLCVQALLDIMDMFCDRLSCHGKAEECIGLCRALLSALHWLLRCTAASAERLREGLEAGTPAAGEKQLAMCLQRLEKTLSSTKNRALLHIAKLEEASSWTAIEHSLLKLGEILANLSNPQLRSQAEQCGTLIRSIPTMLSVHAEQMHKTGFPTVHAVILLEGTMNLTGETQSLVEQLTMVKRMQHIPTPLFVLEIWKACFVGLIESPEGTEELKWTAFTFLKIPQVLVKLKKYSHGDKDFTEDVNCAFEFLLKLTPLLDKADQRCNCDCTNFLLQECGKQGLLSEASVNNLMAKRKADREHAPQQKSGENANIQPNIQLILRAEPTVTNILKTMDADHSKSPEGLLGVLGHMLSGKSLDLLLAAAAATGKLKSFARKFINLNEFTTYGSEESTKPASVRALLFDISFLMLCHVAQTYGSEVILSESRTGAEVPFFETWMQTCMPEEGKILNPDHPCFRPDSTKVESLVALLNNSSEMKLVQMKWHEACLSISAAILEILNAWENGVLAFESIQKITDNIKGKVCSLAVCAVAWLVAHVRMLGLDEREKSLQMIRQLAGPLFSENTLQFYNERVVIMNSILERMCADVLQQTATQIKFPSTGVDTMPYWNLLPPKRPIKEVLTDIFAKVLEKGWVDSRSIHIFDTLLHMGGVYWFCNNLIKELLKETRKEHTLRAVELLYSIFCLDMQQVTLVLLGHILPGLLTDSSKWHSLMDPPGTALAKLAVWCALSSYSSHKGQASTRQKKRHREDIEDYISLFPLDDVQPSKLMRLLSSNEDDANILSSPTDRSMSSSLSASQLHTVNMRDPLNRVLANLFLLISSILGSRTAGPHTQFVQWFMEECVDCLEQGGRGSVLQFMPFTTVSELVKVSAMSSPKVVLAITDLSLPLGRQVAAKAIAAL

SEQ ID NO: 1710 - protein, 989 aa, Homo sapiens
MKVVNLKQAILQAWKERWSDYQWAINMKKFFPKGATWDILNLADALLEQAMIGPSPNPLILSYLKYAISSQMVSYSSVLTAISKFDDFSRDLCVQALLDIMDMFCDRLSCHGKAEECIGLCRALLSALHWLLRCTAASAERLREGLEAGTPAAGEKQLAMCLQRLEKTLSSTKNRALLHIAKLEEASSWTAIEHSLLKLGEILANLSNPQLRSQAEQCGTLIRSIPTMLSVHAEQMHKTGFPTVHAVILLEGTMNLTGETQSLVEQLTMVKRMQHIPTPLFVLEIWKACFVGLIESPEGTEELKWTAFTFLKIPQVLVKLKKYSHGDKDFTEDVNCAFEFLLKLTPLLDKADQRCNCDCTNFLLQECGKQGLLSEASVNNLMAKRKADREHAPQQKSGENANIQPNIQLILRAEPTVTNILKTMDADHSKSPEGLLGVLGHMLSGKSLDLLLAAAAATGKLKSFARKFINLNEFTTYGSEESTKPASVRALLFDISFLMLCHVAQTYGSEVILSESRTGAEVPFFETWMQTCMPEEGKILNPDHPCFRPDSTKVESLVALLNNSSEMKLVQMKWHEACLSISAAILEILNAWENGVLAFESIQKITDNIKGKVCSLAVCAVAWLVAHVRMLGLDEREKSLQMIRQLAGPLFSENTLQFYNERVVIMNSILERMCADVLQQTATQIKFPSTGVDTMPYWNLLPPKRPIKEVLTDIFAKVLEKGWVDSRSIHIFDTLLHMGGVYWFCNNLIKELLKETRKEHTLRAVELLYSIFCLDMQQVTLVLLGHILPGLLTDSSKWHSLMDPPGTALAKLAVWCALSSYSSHKGQASTRQKKRHREDIEDYISLFPLDDVQPSKLMRLLSSNEDDANILSSPTDRSMSSSLSASQLHTVNMRDPLNRVLANLFLLISSILGSRTAGPHTQFVQWFMEECVDCLEQGGRGSVLQFMPFTTVSELVKVSAMSSPKVVLAITDLSLPLGRQVAAKAIAAL

SEQ ID NO: 1711 - protein, 394 aa, Homo sapiens
MFSVFEEITRIVVKEMDAGGDMIAVRSLVDADRFRCFHLVGEKRTFFGCRHYTTGLTLMDILDTDGDKWLDELDSGLQGQKAEFQILDNVDSTGELIVRLPKEITISGSFQGFHHQKIKISENRISQQYLATLENRKLKRELPFSFRSINTRENLYLVTETLETVKEETLKSDRQYKFWSQISQGHLSYKHKGQREVTIPPNRVLSYRVKQLVFPNKETMRKSLGSEDSRNMKEKLEDMESVLKDLTEEKRKDVLNSLAKCLGKEDIRQDLEQRVSEVLISGELHMEDPDKPLLSSLFNAAGVLVEARAKAILDFLDALLELSEEQQFVAEALEKGTLPLLKDQVKSVMEQNWDELASSPPDMDYDPEARILCALYVVVSILLELAEGPTSVSS

SEQ ID NO: 1712 - protein, 1042 aa, Homo sapiens
MPMWAGGVGSPRRGMAPASTDDLFARKLRQPARPPLTPHTFEPRPVRGPLLRSGSDAGEARPPTPASPRARAHSHEEASRPAATSTRLFTDPLALLGLPAEEPEPAFPPVLEPRWFAHYDVQSLLFDWAPRSQGMGSHSEASSGTLASAEDQAASSDLLHGAPGFVCELGGEGELGLGGPASPPVPPALPNAAVSILEEPQNRTSAYSLEHADLGAGYYRKYFYGKEHQNFFGMDESLGPVAVSLRREEKEGSGGGTLHSYRVIVRTTQLRTLRGTISEDALPPGPPRGLSPRKLLEHVAPQLSPSCLRLGSASPKVPRTLLTLDEQVLSFQRKVGILYCRAGQGSEEEMYNNQEAGPAFMQFLTLLGDVVRLKGFESYRAQLDTKTDSTGTHSLYTTYQDHEIMFHVSTMLPYTPNNQQQLLRKRHIGNDIVTIVFQEPGSKPFCPTTIRSHFQHVFLVVRAHTPCTPHTTYRVAVSRTQDTPAFGPALPAGGGPFAANADFRAFLLAKALNGEQAAGHARQFHAMATRTRQQYLQDLATNEVTTTSLDSASRFGLPSLGGRRRAAPRGPGAELQAAGSLVWGVRAAPGARVAAGAQASGPEGIEVPCLLGISAEALVLVAPRDGRVVFNCACRDVLAWTFSEQQLDLYHGRGEAITLRFDGSPGQAVGEVVARLQLVSRGCETRELALPRDGQGRLGFEVDAEGFVTHVERFTFAETAGLRPGARLLRVCGQTLPSLRPEAAAQLLRSAPKVCVTVLPPDESGRPRRSFSELYTLSLQEPSRRGAPDPVQDEVQGVTLLPTTKQLLHLCLQDGGSPPGPGDLAEERTEFLHSQNSLSPRSSLSDEAPVLPNTTPDLLLATTAKPSVPSADSETPLTQDRPGSPSGSEDKGNPAPELRASFLPRTLSLRNSISRIMSEAGSGTLEDEWQAISEIASTCNTILESLSREGQPIPESGDPKGTPKSDAEPEPGNLSEKVSHLESMLRKLQEDLQKEKADRAALEEEVRSLRHNNRRLQAESESAATRLLLASKQLGSPTADLA

SEQ ID NO: 1713 - protein, 396 aa, Homo sapiens
MSIVTVQLGQCGNQIGFEVFDALLSDSHSSQGLCSMRENEAYQASCKERFFSEEENGVPIARAVLVDMEPKVINQMLSKAAQSGQWKYGQHACFCQKQGSGNNWAYGYSVHGPRHEESIMNIIRKEVEKCDSFSGFFIIMSMAGGTGSGLGAFVTQNLEDQYSNSLKMNQIIWPYGTGEVIVQNYNSILTLSHLYRSSDALLLHENDAIHKICAKLMNIKQISFSDINQVLAHQLGSVFQPTYSAESSFHYRRNPLGDLMEHLVPHPEFKMLSVRNIPHMSENSLAYTTFTWAGLLKHLRQMLISNAKMEEGIDRHVWPPLSGLPPLSKMSLNKDLHFNTSIANLVILRGKDVQSADVGKKFRAYIHQYTKFGIEEEDFLDSFTSLEQVVASYCNL

SEQ ID NO: 1714 - protein, 312 aa, Homo sapiens
MSPQGPAVLSLGSLCLDTNQAPNWTGLQTLLQQLPPQDIDERYCLALGEEERAELQLFCARRKQEALGQGVARLVLPKLEGHTCEKCRELLKPGEYGVFAARAGEQRCWHQPCFACQACGQALINLIYFYHDGQLYCGRHHAELLRPRCPACDQLIFSWRCTEAEGQRWHENHFCCQDCAGPLGGGRYALPGGSPCCPSCFENRYSDAGSSWAGALEGQAFLGAPPPHPPDPSLGARSSHRASLAGAFQGPPEPTPRRGRGCGARLPPRRGRRTPSGGGGGPWRGLSAAAAARTAQGLGGAGGWASPPLAAV

SEQ ID NO: 1715 - protein, 1017 aa, Homo sapiens
MAGNDCGALLDEELSSFFLNYLADTQGGGSGEEQLYADFPELDLSQLDASDFDSATCFGELQWCPENSETEPNQYSPDDSELFQIDSENEALLAELTKTLDDIPEDDVGLAAFPALDGGDALSCTSASPAPSSAPPSPAPEKPSAPAPEVDELSLLQKLLLATSYPTSSSDTQKEGTAWRQAGLRSKSQRPCVKADSTQDKKAPMMQSQSRSCTELHKHLTSAQCCLQDRGLQPPCLQSPRLPAKEDKEPGEDCPSPQPAPASPRDSLALGRADPGAPVSQEDMQAMVQLIRYMHTYCLPQRKLPPQTPEPLPKACSNPSQQVRSRPWSRHHSKASWAEFSILRELLAQDVLCDVSKPYRLATPVYASLTPRSRPRPPKDSQASPGRPSSVEEVRIAASPKSTGPRPSLRPLRLEVKREVRRPARLQQQEEEDEEEEEEEEEEEKEEEEEWGRKRPGRGLPWTKLGRKLESSVCPVRRSRRLNPELGPWLTFADEPLVPSEPQGALPSLCLAPKAYDVERELGSPTDEDSGQDQQLLRGPQIPALESPCESGCGDMDEDPSCPQLPPRDSPRCLMLALSQSDPTFGKKSFEQTLTVELCGTAGLTPPTTPPYKPTEEDPFKPDIKHSLGKEIALSLPSPEGLSLKATPGAAHKLPKKHPERSELLSHLRHATAQPASQAGQKRPFSCSFGDHDYCQVLRPEGVLQRKVLRSWEPSGVHLEDWPQQGAPWAEAQAPGREEDRSCDAGAPPKDSTLLRDHEIRASLTKHFGLLETALEEEDLASCKSPEYDTVFEDSSSSSGESSFLPEEEEEEGEEEEEDDEEEDSGVSPTCSDHCPYQSPPSKANRQLCSRSRSSSGSSPCHSWSPATRRNFRCESRGPCSDRTPSIRHARKRREKAIGEGRVVYIQNLSSDMSSRELKRRFEVFGEIEECEVLTRNRRGEKYGFITYRCSEHAALSLTKGAALRKRNEPSFQLSYGGLRHFCWPRYTDYGKPLKPSHSLVRLKAWEAVPSLNKTQS

SEQ ID NO: 1716 - protein, 419 aa, Homo sapiens
MLEMLEYNHYQVQTHLENPTKYHIQQAQRQQVKQYLSTTLANKHANQVLSLPCPNQPGDHVMPPVPGSSAPNSPMAMLTLNSNCEKEGFYKFEEQNRAESECPGMNTHSRASCMQMDDVIDDIISLESSYNEEILGLMDPALQMANTLPVSGNLIDLYGNQGLPPPGLTISNSCPANLPNIKRELTACIFPTESEARALAKERQKKDNHNLIERRRRFNINDRIKELGTLIPKSNDPDMRWNKGTILKASVDYIRKLQREQQRAKELENRQKKLEHANRHLLLRIQELEMQARAHGLSLIPSTGLCSPDLVNRIIKQEPVLENCSQDLLQHHADLTCTTTLDLTDGTITFNNNLGTGTEANQAYSVPTKMGSKLEDILMDDTLSPVGVTDPLLSSVSPGASKTSSRRSSMSMEETEHTC

SEQ ID NO: 1717 - protein, 1113 aa, Homo sapiens
MGPRKKSVKTCIMNNEIPEEMTADETKDYMNQLSHEVLCHIFRYLPLQDIMCMECLSRKLKEAVTLYLRVVRVVDLCAGRWWEYMPSGFTDASFLTLLKKMPDVEQLYGLHPRYLERRRVRGHEAFSIPGVLEALQACPNLVGVETSHLELVESIWTYMPHVHILGKFRNRNGAFPIPPENKLKIPIGAKIQTLHLVGVNVPEIPCIPMLRHLYMKWVRLTKPQPFKDFLCISLRTFVMRNCAGPTNSLKYVPLVTGLASARNLEHLEMVRVPFLGGLIQHVVEDSWRSGGFRNLHTIVLGACKNALEVDLGYLIITAARRLHEVRIQPSLTKDGVFSALKMAELEFPQFETLHLGYVDEFLLQSRMANADLVKYGLADVVENPGIITDIGMKAVNEVFSCIKYLAIYNCPHLHNPYNWISDHSRWTRLVDINLVRCHALKLDSFGQFIELLPSLEFISLDQMFREPPKGCARVGLSAGTGIGVSSALVSNQNSNNDDNNAQNNNANIHDNNHHHPDDSDEENDFRQDLQPGEQQFAADALNEMEDIVQEDGEVVAESGNNTPAHSQAIIPVDVDEEQAGPSGLQRVVKPTSITVHDSESDDEEDSLELQEVWIPKNGTRRYSEREEKTGESVQSRELSVSGKGKTPLRKRYNSHQMGQSKQFPLEESSCEKGCQVTSEQIKADMKAARDIPEKKKNKDVYPSCSSTTASTVGNSSSHNTASQSPDFVRTVNSGGSSEPSPTEVDVSRQCACSPGGSEDSEAMEEGDAESSVCPRCCCHRPQESQRRTSRCSDEERPSTSRACVVNGPDEVAKTKPRHAMKRKRTADKSTSTSDPVIEDDHVQVLVLKSKNLVGVTMTNCGITDLVLKDCPKMMFIHATRCRVLKHLKVENAPIVNRFDYAQCKKLNMDQVLDQILRMPPERNRIIYLRPMQQVDTLTLEQKLFSGPYPYHICIIHEFSNPPNVRNKVRIRSWMDTIANINQELIKYEFFPEATRSEEDLKKYPKYPWGREIYTLEGVVDGAPYSMISDFPWLRSLRAAEPNSFARYDFEDDEESTIYAPRRKGQLSADICMETIGEEISEMRQMKKGVFQRVVAIFIHYCDVNGEPVEDDYI

SEQ ID NO: 1718 - protein, 382 aa, Homo sapiens
MVPSSPSPPPPPRVYKPCFVCNDKSSGYHYGVSSCEGCKGFFRRSIQKNMVYTCHRDKNCIINKVTRNRCQYCRLQKCFEVGMSKEAVRNDRNKKKKEVKEEGSPDSYELSPQLEELITKVSKAHQETFPSLCQLGKYTTNSSADHRVQLDLGLWDKFSELATKCIIKIVEFAKRLPGFTGLSIADQITLLKAACLDILMLRICTRYTPEQDTMTFSDGLTLNRTQMHNAGFGPLTDLVFAFAGQLLPLEMDDTETGLLSAICLICGDRMDLEEPEKVDKLQEPLLEALRLYARRRRPSQPYMFPRMLMKITDLRGISTKGAERAITLKMEIPGPMPPLIREMLENPEMFEDDSSQPGPHPNASSEDEVPGGQGKGGLKSPA

SEQ ID NO: 1719 - protein, 669 aa, Homo sapiens
MWTPVRRGAAWLGTLLGPGEGPPEPRGGAAHAHKPPAGSRKSTDQAVRFGPSQGMCSEARLARRLRDALREEEPWAVEELLRCGADPNLVLEDGAAAVHLAAGARHPRGLRCLGALLRQGGDPNARSVEALTPLHVAAAWGCRRGLELLLSQGADPALRDQDGLRPLDLALQQGHLECARVLQDLDTRTRTRTRIGAETQEPEPAPGTPGLSGPTDETLDSIALQKQPCRGDNRDIGLEADPGPPSLPVPLETVDKHGSSASPPGHWDYSSDASFVTAVEVSGAEDPASDTPPWAGSLPPTRQGLLHVVHANQRVPRSQGTEAELNARLQALTLTPPNAAGFQSSPSSMPLLDRSPAHSPPRTPTPGASDCHCLWEHQTSIDSDMATLWLTEDEASSTGGREPVGPCRHLPVSTVSDLELLKGLRALGENPHPITPFTRQLYHQQLEEAQIAPGPEFSGHSLELAAALRTGCIPDVQADEDALAQQFEQPDPARRWREGVVKSSFTYLLLDPRETQDLPARAFSLTPAERLQTFIRAIFYVGKGTRARPYVHLWEALGHHGRSRKQPHQACPKVRQILDIWASGCGVVSLHCFQHVVAVEAYTREACIVEALGIQTLTNQKQGHCYGVVAGWPPARRRRLGVHLLHRALLVFLAEGERQLHPQDIQARG

SEQ ID NO: 1720 - protein, 799 aa, Homo sapiens
MELNFYKIPDNLPFSTKNLDLSFNPLRHLGSYSFFSFPELQVLDLSRCEIQTIEDGAYQSLSHLSTLILTGNPIQSLALGAFSGLSSLQKLVAVETNLASLENFPIGHLKTLKELNVAHNLIQSFKLPEYFSNLTNLEHLDLSSNKIQSIYCTDLRVLHQMPLLNLSLDLSLNPMNFIQPGAFKEIRLHKLTLRNNFDSLNVMKTCIQGLAGLEVHRLVLGEFRNEGNLEKFDKSALEGLCNLTIEEFRLAYLDYYLDDIIDLFNCLTNVSSFSLVSVTIERVKDFSYNFGWQHLELVNCKFGQFPTLKLKSLKRLTFTSNKGGNAFSEVDLPSLEFLDLSRNGLSFKGCCSQSDFGTTSLKYLDLSFNGVITMSSNFLGLEQLEHLDFQHSNLKQMSEFSVFLSLRNLIYLDISHTHTRVAFNGIFNGLSSLEVLKMAGNSFQENFLPDIFTELRNLTFLDLSQCQLEQLSPTAFNSLSSLQVLNMSHNNFFSLDTFPYKCLNSLQVLDYSLNHIMTSKKQELQHFPSSLAFLNLTQNDFACTCEHQSFLQWIKDQRQLLVEVERMECATPSDKQGMPVLSLNITCQMNKTIIGVSVLSVLVVSVVAVLVYKFYFHLMLLAGCIKYGRGENIYDAFVIYSSQDEDWVRNELVKNLEEGVPPFQLCLHYRDFIPGVAIAANIIHEGFHKSRKVIVVVSQHFIQSRWCIFEYEIAQTWQFLSSRAGIIFIVLQKVEKTLLRQQVELYRLLSRNTYLEWEDSVLGRHIFWRRLRKALLDGKSWNPEGTVGTGCNWQEATSI

SEQ ID NO: 1721 - protein, 255 aa, Homo sapiens
MNFSGGGRQEAAGSRGRRAPRPREQDRDVQLSKALSYALRHGALKLGLPMGADGFVPLGTLLQLPQFRGFSAEDVQRVVDTNRKQRFALQLGDPSTGLLIRANQGHSLQVGVPKLELMPLETPQALPPMLVHGTFWKHWPSILLKGLSCQGRTHIHLAPGLPGDPGIISGMRSHCEIAVFIDGPLALADGIPFFRSANGVILTPGNTDGFLLPKYFKEALQLRPTRKPLSLAGDEETECQSSPKHSSRERRRIQQ

SEQ ID NO: 1722 - protein, 204 aa, Homo sapiens
MGADGFVPLGTLLQLPQFRGFSAEDVQRVVDTNRKQRFALQLGDPSTGLLIRANQGHSLQVPKLELMPLETPQALPPMLVHGTFWKHWPSILLKGLSCQGRTHIHLAPGLPGDPGIISGMRSHCEIAVFIDGPLALADGIPFFRSANGVILTPGNTDGFLLPKYFKEALQLRPTRKPLSLAGDEETECQSSPKHSSRERRRIQQ

SEQ ID NO: 1723 - protein, 305 aa, Homo sapiens
MSRELAPLLLLLLSIHSALAMRICSFNVRSFGESKQEDKNAMDVIVKVIKRCDIILVMEIKDSNNRICPILMEKLNRNSRRGITYNYVISSRLGRNTYKEQYAFLYKEKLVSVKRSYHYHDYQDGDADVFSREPFVVWFQSPHTAVKDFVIIPLHTTPETSVKEIDELVEVYTDVKHRWKAENFIFMGDFNAGCSYVPKKAWKNIRLRTDPRFVWLIGDQEDTTVKKSTNCAYDRIVLRGQEIVSSVVPKSNSVFDFQKAYKLTEEEALDVSDHFPVEFKLQSSRAFTNSKKSVTLRKKTKSKRS

SEQ ID NO: 1724 - protein, 154 aa, Homo sapiens
MARRAGGARMFGSLLLFALLAAGVAPLSWDLPEPRSRASKIRVHSRGNLWATGHFMGKKSLEPSSPSPLGTAPHTSLRDQRLQLSHDLLGILLLKKALGVSLSRPAPQIQEAAGTNTAEMTPIMGQTQQRGLDCAHPGKVLNGTLLMAPSGCKS

SEQ ID NO: 1725 - protein, 583 aa, Homo sapiens
MKLLHVFLLFLCFHLRFCKVTYTSQEDLVEKKCLAKKYTHLSCDKVFCQPWQRCIEGTCVCKLPYQCPKNGTAVCATNRRSFPTYCQQKSLECLHPGTKFLNNGTCTAEGKFSVSLKHGNTDSEGIVEVKLVDQDKTMFICKSSWSMREANVACLDLGFQQGADTQRRFKLSDLSINSTECLHVHCRGLETSLAECTFTKRRTMGYQDFADVVCYTQKADSPMDDFFQCVNGKYISQMKACDGINDCGDQSDELCCKACQGKGFHCKSGVCIPSQYQCNGEVDCITGEDEVGCAGFASVTQEETEILTADMDAERRRIKSLLPKLSCGVKNRMHIRRKRIVGGKRAQLGDLPWQVAIKDASGITCGGIYIGGCWILTAAHCLRASKTHRYQIWTTVVDWIHPDLKRIVIEYVDRIIFHENYNAGTYQNDIALIEMKKDGNKKDCELPRSIPACVPWSPYLFQPNDTCIVSGWGREKDNERVFSLQWGEVKLISNCSKFYGNRFYEKEMECAGTYDGSIDACKGDSGGPLVCMDANNVTYVWGVVSWGENCGKPEFPGVYTKVANYFDWISYHVGRPFISQYNV

SEQ ID NO: 1726 - protein, 591 aa, Homo sapiens
MKLLHVFLLFLCFHLRFCKVTYTSQEDLVEKKCLAKKYTHLSCDKVFCQPWQRCIEGTCVCKLPYQCPKNGTAVCATNRRSFPTYCQQKSLECLHPGTKFLNNGTCTAEGKFSVSLKHGNTDSEGIVEVKLVDQDKTMFICKSSWSMREANVACLDLGFQQGADTQRRFKLSDLSINSTECLHVHCRGLETSLAECTFTKRRTMGYQDFADVVCYTQKADSPMDDFFQCVNGKYISQMKACDGINDCGDQSDELCCKACQGKGFHCKSGVCIPSQYQCNGEVDCITGEDEVGCAAARHPTIQGFASVTQEETEILTADMDAERRRIKSLLPKLSCGVKNRMHIRRKRIVGGKRAQLGDLPWQVAIKDASGITCGGIYIGGCWILTAAHCLRASKTHRYQIWTTVVDWIHPDLKRIVIEYVDRIIFHENYNAGTYQNDIALIEMKKDGNKKDCELPRSIPACVPWSPYLFQPNDTCIVSGWGREKDNERVFSLQWGEVKLISNCSKFYGNRFYEKEMECAGTYDGSIDACKGDSGGPLVCMDANNVTYVWGVVSWGENCGKPEFPGVYTKVANYFDWISYHVGRPFISQYNV

SEQ ID NO: 1727 - protein, 631 aa, Homo sapiens
MDYSFDTTAEDPWVRISDCIKNLFSPIMSENHGHMPLQPNASLNEEEGTQGHPDGTPPKLDTANGTPKVYKSADSSTVKKGPPVAPKPAWFRQSLKGLRNRASDPRGLPDPALSTQPAPASREHLGSHIRASSSSSSIRQRISSFETFGSSQLPDKGAQRLSLQPSSGEAAKPLGKHEEGRFSGLLGRGAAPTLVPQQPEQVLSSGSPAASEARDPGVSESPPPGRQPNQKTLPPGPDPLLRLLSTQAEESQGPVLKMPSQRARSFPLTRSQSCETKLLDEKTSKLYSISSQVSSAVMKSLLCLPSSISCAQTPCIPKEGASPTSSSNEDSAANGSAETSALDTGFSLNLSELREYTEGLTEAKEDDDGDHSSLQSGQSVISLLSSEELKKLIEEVKVLDEATLKQLDGIHVTILHKEEGAGLGFSLAGGADLENKVITVHRVFPNGLASQEGTIQKGNEVLSINGKSLKGTTHHDALAILRQAREPRQAVIVTRKLTPEAMPDLNSSTDSAASASAASDVSVESTAEATVCTVTLEKMSAGLGFSLEGGKGSLHGDKPLTINRIFKGAASEQSETVQPGDEILQLGGTAMQGLTRFEAWNIIKALPDGPVTIVIRRKSLQSKETTAAGDS

SEQ ID NO: 1728 - protein, 1331 aa, Homo sapiens
MESHSRAGKSRKSAKFRSISRSLMLCNAKTSDDGSSPDEKYPDPFEISLAQGKEGIFHSSVQLADTSEAGPSSVPDLALASEAAQLQAAGNDRGKTCRRIFFMKESSTASSREKPGKLEAQSSNFLFPKACHQRARSNSTSVNPYCTREIDFPMTKKSAAPTDRQPYSLCSNRKSLSQQLDCPAGKAAGTSRPTRSLSTAQLVQPSGGLQASVISNIVLMKGQAKGLGFSIVGGKDSIYGPIGIYVKTIFAGGAAAADGRLQEGDEILELNGESMAGLTHQDALQKFKQAKKGLLTLTVRTRLTAPPSLCSHLSPPLCRSLSSSTCITKDSSSFALESPSAPISTAKPNYRIMVEVSLQKEAGVGLGIGLCSVPYFQCISGIFVHTLSPGSVAHLDGRLRCGDEIVEISDSPVHCLTLNEVYTILSHCDPGPVPIIVSRHPDPQVSEQQLKEAVAQAVENTKFGKERHQWSLEGVKRLESSWHGRPTLEKEREKNSAPPHRRAQKVMIRSSSDSSYMSGSPGGSPGSGSAEKPSSDVDISTHSPSLPLAREPVVLSIASSRLPQESPPLPESRDSHPPLRLKKSFEILVRKPMSSKPKPPPRKYFKSDSDPQKSLEERENSSCSSGHTPPTCGQEARELLPLLLPQEDTAGRSPSASAGCPGPGIGPQTKSSTEGEPGWRRASPVTQTSPIKHPLLKRQARMDYSFDTTAEDPWVRISDCIKNLFSPIMSENHGHMPLQPNASLNEEEGTQGHPDGTPPKLDTANGTPKVYKSADSSTVKKGPPVAPKPAWFRQSLKGLRNRASDPRGLPDPALSTQPAPASREHLGSHIRASSSSSSIRQRISSFETFGSSQLPDKGAQRLSLQPSSGEAAKPLGKHEEGRFSGLLGRGAAPTLVPQQPEQVLSSGSPAASEARDPGVSESPPPGRQPNQKTLPPGPDPLLRLLSTQAEESQGPVLKMPSQRARSFPLTRSQSCETKLLDEKTSKLYSISSQVSSAVMKSLLCLPSSISCAQTPCIPKEGASPTSSSNEDSAANGSAETSALDTGFSLNLSELREYTEGLTEAKEDDDGDHSSLQSGQSVISLLSSEELKKLIEEVKVLDEATLKQLDGIHVTILHKEEGAGLGFSLAGGADLENKVITVHRVFPNGLASQEGTIQKGNEVLSINGKSLKGTTHHDALAILRQAREPRQAVIVTRKLTPEAMPDLNSSTDSAASASAASDVSVESTEATVCTVTLEKMSAGLGFSLEGGKGSLHGDKPLTINRIFKGAASEQSETVQPGDEILQLGGTAMQGLTRFEAWNIIKALPDGPVTIVIRRKSLQSKETTAAGDS

SEQ ID NO: 1729 - protein, 494 aa, Homo sapiens
MGRKKKKQLKPWCWYCNRDFDDEKILIQHQKAKHFKCHICHKKLYTGPGLAIHCMQVHKETIDAVPNAIPGRTDIELEIYGMEGIPEKDMDERRRLLEQKTQESQKKKQQDDSDEYDDDDSAASTSFQPQPVQPQQGYIPPMAQPGLPPVPGAPGMPPGIPPLMPGVPPLMPGMPPVMPGMPPGLHHQRKYTQSFCGENIMMPMGGMMPPGPGIPPLMPGMPPGMPPPVPRPGIPPMTQAQAVSAPGILNRPPAPTATVPAPQPPVTKPLFPSAGQMGTPVTSSSTASSNSESLSASSKALFPSTAQAQAAVQGPVGTDFKPLNSTPATTTEPPKPTFPAYTQSTASTTSTTNSTAAKPAASITSKPATLTTTSATSKLIHPDEDISLEERRAQLPKYQRNLPRPGQAPIGNPPVGPIGGMMPPQPGIPQQQGMRPPMPPHGQYGGHHQGMPGYLPGAMPPYGQGPPMVPPYQGGPPRPPMGMRPPVMSQGGRY

SEQ ID NO: 1730 - protein, 463 aa, Homo sapiens
MGRKKKKQLKPWCWYCNRDFDDEKILIQHQKAKHFKCHICHKKLYTGPGLAIHCMQVHKETIDAVPNAIPGRTDIELEIYGMEGIPEKDMDERRRLLEQKTQESQKKKQQDDSDEYDDDDSAASTSFQPQPVQPQQGYIPPMAQPGLPPVPGAPGMPPGIPPLMPGVPPLMPGMPPVMPGMPPGLHHQRKYTQSFCGENIMMPMGGMMPPGPGIPPLMPGMPPGMPPPVPRPGIPPMTQAQAVSAPGILNRPPAPTATVPAPQPPVTKPLFPSAGQAQAAVQGPVGTDFKPLNSTPATTTEPPKPTFPAYTQSTASTTSTTNSTAAKPAASITSKPATLTTTSATSKLIHPDEDISLEERRAQLPKYQRNLPRPGQAPIGNPPVGPIGGMMPPQPGIPQQQGMRPPMPPHGQYGGHHQGMPGYLPGAMPPYGQGPPMVPPYQGGPPRPPMGMRPPVMSQGGRY

SEQ ID NO: 1731 - protein, 198 aa, Homo sapiens
MQVHKETIDAVPNAIPGRTDIELEIYGMEGIPEKDMDERRRLLEQKTQESQKKKQQDDSDEYDDDDSAASTSFQPQPVQPQQGYIPPMAQPGLPPVPGAPGMPPGIPPLMPGVPPLMPGMPPVMPGMPPGLHHQRKYTQSFCGENIMMPMGGMMPPGPGIPPLMPGMPPGMPPPVPRPGIPPMTQAQAVSAPGILNRP

SEQ ID NO: 1732 - protein, 546 aa, Homo sapiens
MKAIKKSLTEEEYLYLDFSHQTEGCIFPLHTSVTLFLLSYCDCKIFKICLVVTKEVSQWTRLCELTIPLAIENFLRESSDQPPTIPVEILQLEKKLSEPVRVHNDDKLRRQKLKQQKADGVGPPLTKGKAKSKVHTQETSEGLDSSSKSLELKVAFSKLTVQEEPATTNREPSHIRKAKASDLPPLEHVFAEGLYFTLADIVLLPCIHHFLVIISRKFSEKLVEFPLLASWYQRIQEVPGVKTAASKCGIQFLHLPKLLTTSTEQHPNLCEVPGVEEQSDPLFIGGPRPTMAKLMEKGIEVMFSPHPCPTWTLDWNVLPAAVSPKEGKMSSDRALRKQQQLNNLVYVVTNQAKPGDRIVDFCSGGGHVGIVLAHMLPSCQVTLIENKELSLIRAKKRSDELGLSNIWFIQANMEYFTGMFNIGVALHACGVATDMVIEHCIKTRASFVTCPCCYGFIQNTSKFNFPKSEQFKKTLSYKEHMILCRFADQTAVQLPPQRRLIGKQCMCLVDLDRARAAEECGYSVQVISMEPESCSPKNNMIVGVPI

SEQ ID NO: 1733 - protein, 866 aa, Homo sapiens
MNGEQQLDADAGSGMEEVELSWEDYLEETGSTAVPYGSFKHVDTRLQNGFAPGMKLEVAVRTDPETYWVATVITTCEQLLLLRYDGYGEDRRADFWCDIRKADLYPIGWCEQNKKTLEAPEGIRDKVSDWDEFLRQTLIGACSPPVPLLEGLRNGRNPLDLIAPGSRLECQAFQDSLSTWIVTVVENIGGRLKLRYEGLESSDNYEHWLYYLDPFLHHVGWAAQQGYELQPPSAIRHLKNEAEWQEILAKVKEEEEEPLPSYLFKDKQVIGIHTFSVNMKLEAVDPWSPFGISPATVVKVFDEKYFLVEMDDLRPENHARRSFVCHADSPGIFPVQWSLKNGLHISPPPGYPSQDFDWADYLKQCGAEAAPQRCFPPLISEHEFKENMKLEAVNPILPEEVCVATITAVRGSYLWLQLEGSKKPIPECIVSVESMDIFPLGWCETNGHPLSTPRRARVYKQRKIAVVQPEKQVPSSRTVHEGLRNQELNSTESVMINGKYCCPKIYFNHRCFSGPYLNKGRIAELPQCVGPGNCVLVLREVLTLLINAAYKPSRVLRELQLDKDSVWHGCGEVLKAKYKGKSYRATVEIVKTADRVTEFCRQTCIKLECCPNLFGPRMVLDKCSENCSVLTKTKYTHYYGKKKNKRIGRPPGGHSNLACALKKASKRRKRRKNVFVHKKKRSSASVDNTPAGSPQGSGGEDEDDPDEGDDDSLSEGSTSEQQDELQEESEMSEKKSCSSSPTQSEISTSLPPDRQRRKRELRTFSFSDDENKPPSPKEIRIEVAERLHLDSNPLKWSVADVVRFIRSTDCAPLARIFLDQEIDGQALLLLTLPTVQECMDLKLGPAIKLCHHIERIKFAFYEQFAN

SEQ ID NO: 1734 - protein, 537 aa, Homo sapiens
MTCHKRYKIQKKVREHHRKLRKEAKKRGHKKPRKDPGVPNSAPFKEALLREAELRKQRLEELKQQQKLDRQKELEKKRKLETNPDIKPSNVEPMEKEFGLCKTENKAKSGKQNSKKLYCQELKKVIEASDVVLEVLDARDPLGCRCPQVEEAIVQSGQKKLVLILNKSDLVPKENLESWLNYLKKELPTVVFRASTKPKDKGKITKRVKAKKNAAPFRSEVCFGKEGLWKLLGGFQETCSKAIRVGVIGFPNVGKSSIINSLKQEQMCNVGVSMGLTRSMQVVPLDKQITIIDSPSFIVSPLNSSSALALRSPASIEVVKPMEAASAILSQADARQVVLKYTVPGYRNSLEFFTVLAQRRGMHQKGGIPNVEGAAKLLWSEWTGASLAYYCHPPTSWTPPPYFNESIVVDMKSGFNLEELEKNNAQSIRAIKGPHLANSILFQSSGLTNGIIEEKDIHEELPKRKERKQEEREDDKDSDQETVDEEVDENSSGMFAAEETGEALSEETTAGEQSTRSFILDKIIEEDDAYDFSTDYV

SEQ ID NO: 1735 - protein, 181 aa, Homo sapiens
RPVEHLNDKIKIKFGLAISQLVDVDEKNQLMTTNVWLKQEWIDVKLRWNPDDYGGIKVIRVPSDSVWTPDIVLFDNADGRFEGTSTKTVIRYNGTVTWTPPANYKSSCTIDVTFFPFDLQNCSMKFGSWTYDGSQVDIILEDQDVDKRDFFDNGEWEIVSATGSKGNRTDSCCWLLKIGNS

SEQ ID NO: 1736 - protein, 918 aa, Homo sapiens
MGTTAPGPIHLLELCDQKLMEFLCNMDNKDLVWLEEIQEEAERMFTREFSKEPELMPKTPSQKNRRKKRRISYVQDENRDPIRRRLSRRKSRSSQLSSRRLRSKDSVEKLATVVGENGSVLRRVTRAAAAAAAATMALAAPSSPTPESPTMLTKKPEDNHTQCQLVPVVEIGISERQNAEQHVTQLMSTEPLPRTLSPTPASATAPTSQGIPTSDEESTPKKSKARILESITVSSLMATPQDPKGQGVGTGRSASKLRIAQVSPGPRDSPAFPDSPWRERVLAPILPDNFSTPTGSRTDSQSVRHSPIAPSSPSPQVLAQKYSLVAKQESVVRRASRRLAKKTAEEPAASGRIICHSYLERLLNVEVPQKVGSEQKEPPEEAEPVAAAEPEVPENNGNNSWPHNDTEIANSTPNPKPAASSPETPSAGQQEAKTDQADGPREPPQSARRKRSYKQAVSELDEEQHLEDEELQPPRSKTPSSPCPASKVVRPLRTFLHTVQRNQMLMTPTSAPRSVMKSFIKRNTPLRMDPKCSFVEKERQRLENLRRKEEAEQLRRQKVEEDKRRRLEEVKLKREERLRKVLQARERVEQMKEEKKKQIEQKFAQIDEKTEKAKEERLAEEKAKKKAAAKKMEEVEARRKQEEEARRLRWLQQEEEERRHQELLQKKKEEEQERLRKAAEAKRLAEQREQERREQERREQERREQERREQERREQERQLAEQERRREQERLQAERELQEREKALRLQKEQLQRELEEKKKKEEQQRLAERQLQEEQEKKAKEAAGASKALNVTVDVQSPACTSYQMTPQGHRAPPKINPDNYGMDLNSDDSTDDEAHPRKPIPTWARGTPLSQAIIHQYYHPPNLLELFGTILPLDLEDIFKKSKPRYHKRTSSAVWNSPPLQGARVPSSLAYSLKKH

SEQ ID NO: 1737 - protein, 1503 aa, Homo sapiens
MNESASQEELRPAQENRKEDKERKWNLTEVKELHETLQSVPDVPVKEDTNSVVEKAMDEIKSQELNLEGQRKISPGSIKDSKTEASGNIAIRKSAKVIFALDETELKSKPEHTWKKNLFERMEARAQAMQQKIIDKENLKKELEKKAEKKLPRDNLAKEWFNTDSMTLNNTAYLLDKLLPTLVPGVENMLTQVEKKKVLTEADTPSKFDPINYLGEYLIRNNPNYIKDPGMSGYQRLMKEVTEDLKIYVPDTICNRVSKMKENVKQNRKQRESIDKIIVKVANTRKQALQEQFDEWILDPKGMIPKSVIQNVLQEFFQNPDFKLGSHCKQLDITDSTEPRLNKMEFTEYISSHIKDLKSEMFEELLKHLCHSADEFREVIKADMRRQMFAELFLHCDHGKVGFLDRQRTLALLELFYDHSSQMLRSLLRNPRQWPFIEFEEINLTELWGDMDNQKHIYEGFDKVLLEMNTLLSANHASKTQSKLLESPDQPKLNEQRTSTPSPNPPEQQRGVTAEQGPQRISIEEQQQGKKPTAEQELYIESVIEPGTHTESTLEQGSSRRLLTEQETHRESTTEQGQHKGSIEGQGPRRVSVSEQGSSRESVAEQGSRRESIAEQDRHKGSVAEQGSRRMSAAEQGSLRESVIEEPYQKSEQGPYGEIISEEQEDIGSTSQSRKDSILKSTKYGEPITSEYIEVPLQEKRSWEQTYEEEIFLSSELQEEVPTLSRKDHFPETTKKEVQKDKPCEPKSQKIEGKSWSGEFFTCNWKMKYVTFEDEEQANLIYGNSRFTDLHSIIRNIQSCKEVKGRTAFNGVSFNLLQFVQLLETFVGEDAPLSVSETLTSFFKEGYVETEQEKMNALEQFSQNAFQVRQRLLLEAIFQKWDSDGSGFLDLKEVDELLYTYKEGMEKESMKKAKLHIQFPKPHPGHEVRLSSKQFQNYIELVVSELRGNEDQVLESVVEFLMNALERSHIESLRNSARRKWLHQIQCAAETSGVSLEPVYSETFKALMQDAEAHGNKKISAHISLLEENLLLPEKGNVLLRNVACTLDDAQFVLNRVLYRDMKGISFTVVDEGKPIHVPQVQYHGNIFFWNQSRNKHDYNGSFLALPLQDAYMRIFGVLAVDTLRDPHEINIFLPHEIRFYQGVANVFSTAYHYVHSREHILHIVITGIGWLYDVTSSITSITTYFVEPSPAQDSDYVLRNMMVTGQLGLTEIHKNPPTIHRKSCIFRDFLFKCTDSSEVVLASACGETHIVVPLRERTGEALGVLDFNIGQNRMLLCQEYKDLQKMMKVVQVACYEILGEFSGEIKKKYILEIENVREVQRAGILFFRIMLLELQESIQLLNSMEFVSLLLYDHTLVTEPNSPQDSKSMELEANVKLVRDILKAVILFFHPELEFSSDFGSWDKCKFYVNKYLVNNICAFDPTAKHVEVNVQLIDEYIRDHSRTEVWKFGNVVIEHLYHWIHICSALMKITKQLNSGITPPLPSKTDNYMYAKMPGEGLQEK

SEQ ID NO: 1738 - protein, 1829 aa, Homo sapiens
MEDTPPSLSCSDCQRHFPSLPELSRHRELLHPSPNQDSEEADSIPRPYRCQQCGRGYRHPGSLVNHRRTHETGLFPCTTCGKDFSNPMALKSHMRTHAPEGRRRHRPPRPKEATPHLQGETVSTDSWGQRLGSSEGWENQTKHTEETPDCESVPDPRAASGTWEDLPTRQREGLASHPGPEDGADGWGPSTNSARAPPLPIPASSLLSNLEQYLAESVVNFTGGQEPTQSPPAEEERRYKCSQCGKTYKHAGSLTNHRQSHTLGIYPCAICFKEFSNLMALKNHSRLHAQYRPYHCPHCPRVFRLPRELLEHQQSHEGERQEPRWEEKGMPTTNGHTDESSQDQLPSAQMLNGSAELSTSGELEDSGLEEYRPFRCGDCGRTYRHAGSLINHRKSHQTGVYPCSLCSKQLFNAAALKNHVRAHHRPRQGVGENGQPSVPPAPLLLAETTHKEEEDPTTTLDHRPYKCSECGRAYRHRGSLVNHRHSHRTGEYQCSLCPRKYPNLMALRNHVRVHCKAARRSADIGAEGAPSHLKVELPPDPVEAEAAPHTDQDHVCKHEEEATDITPAADKTAAHICSICGLLFEDAESLERHGLTHGAGEKENSRTETTMSPPRAFACRDCGKSYRHSGSLINHRQTHQTGDFSCGACAKHFHTMAAMKNHLRRHSRRRSRRHRKRAGGASGGREAKLLAAESWTRELEDNEGLESPQDPSGESPHGAEGNLESDGDCLQAESEGDKCGLERDETHFQGDKESGGTGEGLERKDASLLDNLDIPGEEGGGTHFCDSLTGVDEDQKPATGQPNSSSHSANAVTGWQAGAAHTCSDCGHSFPHATGLLSHRPCHPPGIYQCSLCPKEFDSLPALRSHFQNHRPGEATSAQPFLCCLCGMIFPGRAGYRLHRRQAHSSSGMTEGSEEEGEEEGVAEAAPARSPPLQLSEAELLNQLQREVEALDSAGYGHICGCCGQTYDDLGSLERHHQSQSSGTTADKAPSPLGVAGDAMEMVVDSVLEDIVNSVSGEGGDAKSQEGAGTPLGDSLCIQGGESLLEAQPRPFRCNQCGKTYRHGGSLVNHRKIHQTGDFLCPVCSRCYPNLAAYRNHLRNHPRCKGSEPQVGPIPEAAGSSELQVGPIPEGGSNKPQHMAEEGPGQAEVEKLQEELKVEPLEEVARVKEEVWEETTVKGEEIEPRLETAEKGCQTEASSERPFSCEVCGRSYKHAGSLINHRQSHQTGHFGCQACSKGFSNLMSLKNHRRIHADPRRFRCSECGKAFRLRKQLASHQRVHMERRGGGGTRKATREDRPFRCGQCGRTYRHAGSLLNHRRSHETGQYSCPTCPKTYSNRMALKDHQRLHSENRRRRAGRSRRTAVRCALCGRSFPGRGSLERHLREHEETEREPANGQGGLDGTAASEANLTGSQGLETQLGGAEPVPHLEDGVPRPGERSQSPIRAASSEAPEPLSWGAGKAGGWPVGGGLGNHSGGWVPQFLTRSEEPEDSVHRSPCHAGDCQLNGPTLSHMDSWDNRDNSSQLQPGSHSSCSQCGKTYCQSGSLLNHNTNKTDRHYCLLCSKEFLNPVATKSHSHNHIDAQTFACPDCGKAFESHQELASHLQAHARGHSQVPAQMEEARDPKAGTGEDQVVLPGQGKAQEAPSETPRGPGESVERARGGQAVTSMAAEDKERPFRCTQCGRSYRHAGSLLNHQKAHTTGLYPCSLCPKLLPNLLSLKNHSRTHTDPKRHCCSICGKAFRTAARLEGHGRVHAPREGPFTCPHCPRHFRRRISFVQHQQQHQEEWTVAGSGRGHEGSQEEVGTQWRGKSSPKVGGGARSERREPRGF

SEQ ID NO: 1739 - protein, 669 aa, Homo sapiens
MACEIMPLQSSQEDERPLSPFYLSAHVPQVSNVSATGELLERTIRSAVEQHLFDVNNSGGQSSEDSESGTLSASSATSARQRRRQSKEQDEVRHGRDKGLINKENTPSGFNHLDDCILNTQEVEKVHKNTFGCAGERSKPKRQKSSTKLSELHDNQDGLVNMESLNSTRSHERTGPDDFEWMSDERKGNEKDGGHTQHFESPTMKIQEHPSLSDTKQQRNQDAGDQEESFVSEVPQSDLTALCDEKNWEEPIPAFSSWQRENSDSDEAHLSPQAGRLIRQLLDEDSDPMLSPRFYAYGQSRQYLDDTEVPPSPPNSHSFMRRRSSSLGSYDDEQEDLTPAQLTRRIQSLKKKIRKFEDRFEEEKKYRPSHSDKAANPEVLKWTNDLAKFRRQLKESKLKISEEDLTPRMRQRSNTLPKSFGSQLEKEDEKKQELVDKAIKPSVEATLESIQRKLQEKRAESSRPEDIKDMTKDQIANEKVALQKALLYYESIHGRPVTKNERQVMKPLYDRYRLVKQILSRANTIPIIEEEEGSEDDSNVKPDFMVTLKTDFSARCFLDQFEDDADGFISPMDDKIPSKCSQDTGLSNLHAASIPELLEHLQEMREEKKRIRKKLRDFEDNFFRQNGRNVQKEDRTPMAEEYSEYKHIKAKLRLLEVLISKRDTDSKSM

SEQ ID NO: 1740 - protein, 193 aa, Homo sapiens
MLPGLRRLLQAPASACLLLMLLALPLAAPSCPMLCTCYSSPPTVSCQANNFSSVPLSLPPSTQRLFLQNNLIRTLRPGTFGSNLLTLWLFSNNLSTIYPGTFRHLQALEELDLGDNRHLRSLEPDTFQGLERLQSLHLYRCQLSSLPGNIFRGLVSLQYLYLQENSLLHLQGPLPKGLCSCFSHPPSSLPTSR

SEQ ID NO: 1741 - protein, 347 aa, Homo sapiens
MLGKIHLLEGDLDKAIEVYKKAVEFSPENTELLTTLGLLYLQLGIYQKAFEHLGNALTYDPTNYKAILAAGSMMQTHGDFDVALTKYRVVACAVPESPPLWNNIGMCFFGKKKYVAAISCLKRANYLAPFDWKILYNLGLVHLTMQQYASAFHFLSAAINFQPKMGELYMLLAVALTNLEDIENAKRAYAEAVHLDKCNPLVNLNYAVLLYNQGEKKNALAQYQEMEKKVSLLKDNSSLEFDSEMVEMAQKLGAALQVGEALVWTKPVKDPKSKHQTTSTSKPASFQQPLGSNQALGQAMSSAAAYRTLPSGAGGTSQFTKPPSLPLEPEPAVESSPTETSEQIREK

SEQ ID NO: 1742 - protein, 1581 aa, Homo sapiens
MVQKKKFCPRLLDYLVIVGARHPSSDSVAQTPELLRRYPLEDHTEFPLPPDVVFFCQPEGCLSVRQRRMSLRDDTSFVFTLTDKDTGVTRYGICVNFYRSFQKRISKEKGEGGAGSRGKEGTHATCASEEGGTESSESGSSLQPLSADSTPDVNQSPRGKRRAKAGSRSRNSTLTSLCVLSHYPFFSTFRECLYTLKRLVDCCSERLLGKKLGIPRGVQRDTMWRIFTGSLLVEEKSSALLHDLREIEAWIYRLLRSPVPVSGQKRVDIEVLPQELQPALTFALPDPSRFTLVDFPLHLPLELLGVDACLQVLTCILLEHKVVLQSRDYNALSMSVMAFVAMIYPLEYMFPVIPLLPTCMASAEQLLLAPTPYIIGVPASFFLYKLDFKMPDDVWLVDLDSNRVIAPTNAEVLPILPEPESLELKKHLKQALASMSLNTQPILNLEKFHEGQEIPLLLGRPSNDLQSTPSTEFNPLIYGNDVDSVDVATRVAMVRFFNSANVLQGFQMHTRTLRLFPRPVVAFQAGSFLASRPRQTPFAEKLARTQAVEYFGEWILNPTNYAFQRIHNNMFDPALIGDKPKWYAHQLQPIHYRVYDSNSQLAEALSVPPERDSDSEPTDDSGSDSMDYDDSSSSYSSLGDFVSEMMKCDINGDTPNVDPLTHAALGDASEVEIDELQNQKEAEEPGPDSENSQENPPLRSSSSTTASSSPSTVIHGANSEPADSTEMDDKAAVGVSKPLPSVPPSIGKSNVDRRQAEIGEGSVRRRIYDNPYFEPQYGFPPEEDEDEQGESYTPRFSQHVSGNRAQKLLRPNSLRLASDSDAESDSRASSPNSTVSNTSTEGFGGIMSFASSLYRNHSTSFSLSNLTLPTKGAREKATPFPSLKVFGLNTLMEIVTEAGPGSGEGNRRALVDQKSSVIKHSPTVKREPPSPQGRSSNSSENQQFLKEVVHSVLDGQGVGWLNMKKVRRLLESEQLRVFVLSKLNRMVQSEDDARQDIIPDVEISRKVYKGMLDLLKCTVLSLEQSYAHAGLGGMASIFGLLEIAQTHYYSKEPDKRKRSPTESVNTPVGKDPGLAGRGDPKAMAQLRVPQLGPRAPSATGKGPKELDTRSLKEENFIASIELWNKHQEVKKQKALEKQRPEVIKPVFDLGETEEKKSQISADSGVSLTSSSQRTDQDSVIGVSPAVMIRSSSQDSEVSTVVSNSSGETLGADSDLSSNAGDGPGGEGSVHLASSRGTLSDSEIETNSATSTIFGKAHSLKPSIKEKLAGSPIRTSEDVSQRVYLYEGLLGRDKGSMWDQLEDAAMETFSISKERSTLWDQMQFWEDAFLDAVMLEREGMGMDQGPQEMIDRYLSLGEHDRKRLEDDEDRLLATLLHNLISYMLLMKVNKNDIRKKVRRLMGKSHIGLVYSQQINEVLDQLANLNGRDLSIWSSGSRHMKKQTFVVHAGTDTNGDIFFMEVCDDCVVLRSNIGTVYERWWYEKLINMTYCPKTKVLCLWRRNGSETQLNKFYTKKCRELYYCVKDSMERAAARQQSIKPGPELGGEFPVQDLKTGEGGLLQVTLEGINLKFMHNQFLKLKKW

SEQ ID NO: 1743 - protein, 252 aa, Homo sapiens
MALLDVCGAPRGQRPESALPVAGSGRRSDPGHYSFSMRSPELALPRGMQPTEFFQSLGGDGERNVQIEMAHGTTTLAFKFQHGVIAAVDSRASAGSYINCQYWERLLAKECRLYYLRNGERISVSAASKLLSNMMCQYRGMGLSMGSMICGWDKKGPGLYYVDEHGTRLSGNMFSTGSGNTYAYGVMDSGYRPNLSPEEAYDLGRRAIAYATHRDSYSGGVVNMYHMKEDGWVKVESTDVSDLLHQYREANQ

SEQ ID NO: 1744 - protein, 598 aa, Homo sapiens
MKVGWPGESCWQVGLAVEDSPALGAPRVGALPDVVPEGTLLNMVLRRMHRPRSCSYQLLLEHQRPSCIQGLRWTPLTNSEESLDFSESLEQASTERVLRAGRQLHRHLLATCPNLIRDRKYHLRLYRQCCSGRELVDGILALGLGVHSRSQVVGICQVLLDEGALCHVKHDWAFQDRDAQFYRFPGPEPEPVRTHEMEEELAEAVALLSQRGPDALLTVALRKPPGQRTDEELDLIFEELLHIKAVAHLSNSVKRELAAVLLFEPHSKAGTVLFSQGDKGTSWYIIWKGSVNVVTHGKGLVTTLHEGDDFGQLALVNDAPRAATIILREDNCHFLRVDKQDFNRIIKDVEAKTMRLEEHGKVVLVLERASQGAGPSRPPTPGRNRYTVMSGTPEKILELLLEAMGPDSSAHDPTETFLSDFLLTHRVFMPSAQLCAALLHHFHVEPAGGSEQERSTYVCNKRQQILRLVSQWVALYGSMLHTDPVATSFLQKLSDLVGRDTRLSNLLREQWPERRRCHRLENGCGNASPQMKVSAWPQFLSSAPPGLQAPPSPPDPEGLCGRGKLSSHRHTLGSLIGVHGALAACGALGQAVPGGAEA

SEQ ID NO: 1745 - protein, 254 aa, Homo sapiens
MAISGVPVLGFFIIAVLMSAQESWAIKEEHVIIQAEFYLNPDQSGEFMFDFDGDEIFHVDMAKKETVWRLEEFGRFASFEAQGALANIAVDKANLEIMTKRSNYTPITNVPPEVTVLTNSPVELREPNVLICFIDKFTPPVVNVTWLRNGKPVTTGVSETVFLPREDHLFRKFHYLPFLPSTEDVYDCRVEHWGLDEPLLKHWEFDAPSPLPETTENVVCALGLTVGLVGIIIGTIFIIKGLRKSNAAERRGPL

SEQ ID NO: 1746 - protein, 603 aa, Homo sapiens
MSPGLLTTRKEALMAFRDVAVAFTQKEWKLLSSAQRTLYREVMLENYSHLVSLGIAFSKPKLIEQLEQGDEPWREENEHLLDLCPEPRTEFQPSFPHLVAFSSSQLLRQYALSGHPTQIFPSSSAGGDFQLEAPRCSSEKGESGETEGPDSSLRKRPSRISRTFFSPHQGDPVEWVEGNREGGTDLRLAQRMSLGGSDTMLKGADTSESGAVIRGNYRLGLSKKSSLFSHQKHHVCPECGRGFCQRSDLIKHQRTHTGEKPYLCPECGRRFSQKASLSIHQRKHSGEKPYVCRECGRHFRYTSSLTNHKRIHSGERPFVCQECGRGFRQKIALLLHQRTHLEEKPFVCPECGRGFCQKASLLQHQSSHTGERPFLCLECGRSFRQQSLLLSHQVTHSGEKPYVCAECGHSFRQKVTLIRHQRTHTGEKPYLCPQCGRGFSQKVTLIGHQRTHTGEKPYLCPDCGRGFGQKVTLIRHQRTHTGEKPYLCPKCGRAFGFKSLLTRHQRTHSEEELYVDRVCGQGLGQKSHLISDQRTHSGEKPCICDECGRGFGFKSALIRHQRTHSGEKPYVCRECGRGFSQKSHLHRHRRTKSGHQLLPQEVF

SEQ ID NO: 1747 - protein, 1952 aa, Homo sapiens
MFRQFYLWTCLASGIILGSLFEICLGQYDDDCKLARGGPPATIVAIDEESRNGTILVDNMLIKGTAGGPDPTIELSLKDNVDYWVLMDPVKQMLFLNSTGRVLDRDPPMNIHSIVVQVQCINKKVGTIIYHEVRIVVRDRNDNSPTFKHESYYATVNELTPVGTTIFTGFSGDNGATDIDDGPNGQIEYVIQYNPDDPTSNDTFEIPLMLTGNIVLRKRLNYEDKTRYFVIIQANDRAQNLNERRTTTTTLTVDVLDGDDLGPMFLPCVLVPNTRDCRPLTYQAAIPELRTPEELNPIIVTPPIQAIDQDRNIQPPSDRPGILYSILVGTPEDYPRFFHMHPRTAELSLLEPVNRDFHQKFDLVIKAEQDNGHPLPAFAGLHIEILDENNQSPYFTMPSYQGYILESAPVGATISDSLNLTSPLRIVALDKDIEDTKDPELHLFLNDYTSVFTVTQTGITRYLTLLQPVDREEQQTYTFSITAFDGVQESEPVIVNIQVMDANDNTPTFPEISYDVYVYTDMRPGDSVIQLTAVDADEGSNGEITYEILVGAQGDFIINKTTGLITIAPGVEMIVGRTYALTVQAADNAPPAERRNSICTVYIEVLPPNNQSPPRFPQLMYSLEISEAMRVGAVLLNLQATDREGDSITYAIENGDPQRVFNLSETTGILTLGKALDRESTDRYILIITASDGRPDGTSTATVNIVVTDVNDNAPVFDPYLPRNLSVVEEEANAFVGQVKATDPDAGINGQVHYSLGNFNNLFRITSNGSIYTAVKLNREVRDYYELVVVATDGAVHPRHSTLTLAIKVLDIDDNSPVFTNSTYTVLVEENLPAGTTILQIEAKDVDLGANVSYRIRSPEVKHFFALHPFTGELSLLRSLDYEAFPDQEASITFLVEAFDIYGTMPPGIATVTVIVKDMNDYPPVFSKRIYKGMVAPDAVKGTPITTVYAEDADPPGLPASRVRYRVDDVQFPYPASIFEVEEDSGRVITRVNLNEEPTTIFKLVVVAFDDGEPVMSSSATVKILVLHPGEIPRFTQEEYRPPPVSELATKGTMVGVISAAAINQSIVYSIVSGNEEDTFGINNITGVIYVNGPLDYETRTSYVLRVQADSLEVVLANLRVPSKSNTAKVYIEIQDENNHPPVFQKKFYIGGVSEDARMFTSVLRVKATDKDTGNYSVMAYRLIIPPIKEGKEGFVVETYTGLIKTAMLFHNMRRSYFKFQVIATDDYGKGLSGKADVLVSVVNQLDMQVIVSNVPPTLVEKKIEDLTEILDRYVQEQIPGAKVVVESIGARRHGDAFSLEDYTKCDLTVYAIDPQTNRAIDRNELFKFLDGKLLDINKDFQPYYGEGGRILEIRTPEAVTSIKKRGESLGYTEGALLALAFIIILCCIPAILVVLVSYRQRQAECTKTARIQAALPAAKPAVPAPAPVAAPPPPPPPPPGAHLYEELGDSSILFLLYHFQQSRGNNSVSEDRKHQQVVMPFSSNTIEAHKSAHVDGSLKSNKLKSARKFTFLSDEDDLSAHNPLYKENISQVSTNSDISQRTDFVDPFSPKIQAKSKSLRGPREKIQRLWSQSVSLPRRLMRKVPNRPEIIDLQQWQGTRQKAENENTGICTNKRGSSNPLLTTEEANLTEKEEIRQGETLMIEGTEQLKSLSSDSSFCFPRPHFSFSTLPTVSRTVELKSEPNVISSPAECSLELSPSRPCVLHSSLSRRETPICMLPIETERNIFENFAHPPNISPSACPLPPPPPISPPSPPPAPAPLAPPPDISPFSLFCPPPSPPSIPLPLPPPTFFPLSVSTSGPPTPPLLPPFPTPLPPPPPSIPCPPPPSASFLSTECVCITGVKCTTNLMPAEKIKSSMTQLSTTTVCKTDPQREPKGILRHVKNLAELEKSVANMYSQIEKNYLRTNVSELQTMCPSEVTNMEITSEQNKGSLNNIVEGTEKQSHSQSTSL

SEQ ID NO: 1748 - protein, 1915 aa, Homo sapiens
MFRQFYLWTCLASGIILGSLFEICLGQYDDDCKLARGGPPATIVAIDEESRNGTILVDNMLIKGTAGGPDPTIELSLKDNVDYWVLMDPVKQMLFLNSTGRVLDRDPPMNIHSIVVQVQCINKKVGTIIYHEVRIVVRDRNDNSPTFKHESYYATVNELTPVGTTIFTGFSGDNGATDIDDGPNGQIEYVIQYNPDDPDRAQNLNERRTTTTTLTVDVLDGDDLGPMFLPCVLVPNTRDCRPLTYQAAIPELRTPEELNPIIVTPPIQAIDQDRNIQPPSDRPGILYSILVGTPEDYPRFFHMHPRTAELSLLEPVNRDFHQKFDLVIKAEQDNGHPLPAFAGLHIEILDENNQSPYFTMPSYQGYILESAPVGATISDSLNLTSPLRIVALDKDIEDTKDPELHLFLNDYTSVFTVTQTGITRYLTLLQPVDREEQQTYTFSITAFDGVQESEPVIVNIQVMDANDNTPTFPEISYDVYVYTDMRPGDSVIQLTAVDADEGSNGEITYEILVGAQGDFIINKTTGLITIAPGVEMIVGRTYALTVQAADNAPPAERRNSICTVYIEVLPPNNQSPPRFPQLMYSLEISEAMRVGAVLLNLQATDREGDSITYAIENGDPQRVFNLSETTGILTLGKALDRESTDRYILIITASDGRPDGTSTATVNIVVTDVNDNAPVFDPYLPRNLSVVEEEANAFVGQVKATDPDAGINGQVHYSLGNFNNLFRITSNGSIYTAVKLNREVRDYYELVVVATDGAVHPRHSTLTLAIKVLDIDDNSPVFTNSTYTVLVEENLPAGTTILQIEAKDVDLGANVSYRIRSPEVKHFFALHPFTGELSLLRSLDYEAFPDQEASITFLVEAFDIYGTMPPGIATVTVIVKDMNDYPPVFSKRIYKGMVAPDAVKGTPITTVYAEDADPPGLPASRVRYRVDDVQFPYPASIFEVEEDSGRVITRVNLNEEPTTIFKLVVVAFDDGEPVMSSSATVKILVLHPGEIPRFTQEEYRPPPVSELATKGTMVGVISAAAINQSIVYSIVSGNEEDTFGINNITGVIYVNGPLDYETRTSYVLRVQADSLEVVLANLRVPSKSNTAKVYIEIQDENNHPPVFQKKFYIGGVSEDARMFTSVLRVKATDKDTGNYSVMAYRLIIPPIKEGKEGFVVETYTGLIKTAMLFHNMRRSYFKFQVIATDDYGKGLSGKADVLVSVVNQLDMQVIVSNVPPTLVEKKIEDLTEILDRYVQEQIPGAKVVVESIGARRHGDAFSLEDYTKCDLTVYAIDPQTNRAIDRNELFKFLDGKLLDINKDFQPYYGEGGRILEIRTPEAVTSIKKRGESLGYTEGALLALAFIIILCCIPAILVVLVSYRQRQAECTKTARIQAALPAAKPAVPAPAPVAAPPPPPPPPPGAHLYEELGDSSILFLLYHFQQSRGNNSVSEDRKHQQVVMPFSSNTIEAHKSAHVDGSLKSNKLKSARKFTFLSDEDDLSAHNPLYKENISQVSTNSDISQRTDFVDPFSPKIQAKSKSLRGPREKIQRLWSQSVSLPRRLMRKVPNRPEIIDLQQWQGTRQKAENENTGICTNKRGSSNPLLTTEEANLTEKEEIRQGETLMIEGTEQLKSLSSDSSFCFPRPHFSFSTLPTVSRTVELKSEPNVISSPAECSLELSPSRPCVLHSSLSRRETPICMLPIETERNIFENFAHPPNISPSACPLPPPPPISPPSPPPAPAPLAPPPDISPFSLFCPPPSPPSIPLPLPPPTFFPLSVSTSGPPTPPLLPPFPTPLPPPPPSIPCPPPPSASFLSTECVCITGVKCTTNLMPAEKIKSSMTQLSTTTVCKTDPQREPKGILRHVKNLAELEKSVANMYSQIEKNYLRTNVSELQTMCPSEVTNMEITSEQNKGSLNNIVEGTEKQSHSQSTSL

SEQ ID NO: 1749 - protein, 1932 aa, Homo sapiens
MFRQFYLWTCLASGIILGSLFEICLGQYDDGTILVDNMLIKGTAGGPDPTIELSLKDNVDYWVLMDPVKQMLFLNSTGRVLDRDPPMNIHSIVVQVQCINKKVGTIIYHEVRIVVRDRNDNSPTFKHESYYATVNELTPVGTTIFTGFSGDNGATDIDDGPNGQIEYVIQYNPDDPTSNDTFEIPLMLTGNIVLRKRLNYEDKTRYFVIIQANDRAQNLNERRTTTTTLTVDVLDGDDLGPMFLPCVLVPNTRDCRPLTYQAAIPELRTPEELNPIIVTPPIQAIDQDRNIQPPSDRPGILYSILVGTPEDYPRFFHMHPRTAELSLLEPVNRDFHQKFDLVIKAEQDNGHPLPAFAGLHIEILDENNQSPYFTMPSYQGYILESAPVGATISDSLNLTSPLRIVALDKDIEDTKDPELHLFLNDYTSVFTVTQTGITRYLTLLQPVDREEQQTYTFSITAFDGVQESEPVIVNIQVMDANDNTPTFPEISYDVYVYTDMRPGDSVIQLTAVDADEGSNGEITYEILVGAQGDFIINKTTGLITIAPGVEMIVGRTYALTVQAADNAPPAERRNSICTVYIEVLPPNNQSPPRFPQLMYSLEISEAMRVGAVLLNLQATDREGDSITYAIENGDPQRVFNLSETTGILTLGKALDRESTDRYILIITASDGRPDGTSTATVNIVVTDVNDNAPVFDPYLPRNLSVVEEEANAFVGQVKATDPDAGINGQVHYSLGNFNNLFRITSNGSIYTAVKLNREVRDYYELVVVATDGAVHPRHSTLTLAIKVLDIDDNSPVFTNSTYTVLVEENLPAGTTILQIEAKDVDLGANVSYRIRSPEVKHFFALHPFTGELSLLRSLDYEAFPDQEASITFLVEAFDIYGTMPPGIATVTVIVKDMNDYPPVFSKRIYKGMVAPDAVKGTPITTVYAEDADPPGLPASRVRYRVDDVQFPYPASIFEVEEDSGRVITRVNLNEEPTTIFKLVVVAFDDGEPVMSSSATVKILVLHPGEIPRFTQEEYRPPPVSELATKGTMVGVISAAAINQSIVYSIVSGNEEDTFGINNITGVIYVNGPLDYETRTSYVLRVQADSLEVVLANLRVPSKSNTAKVYIEIQDENNHPPVFQKKFYIGGVSEDARMFTSVLRVKATDKDTGNYSVMAYRLIIPPIKEGKEGFVVETYTGLIKTAMLFHNMRRSYFKFQVIATDDYGKGLSGKADVLVSVVNQLDMQVIVSNVPPTLVEKKIEDLTEILDRYVQEQIPGAKVVVESIGARRHGDAFSLEDYTKCDLTVYAIDPQTNRAIDRNELFKFLDGKLLDINKDFQPYYGEGGRILEIRTPEAVTSIKKRGESLGYTEGALLALAFIIILCCIPAILVVLVSYRQRQAECTKTARIQAALPAAKPAVPAPAPVAAPPPPPPPPPGAHLYEELGDSSMHNLFLLYHFQQSRGNNSVSEDRKHQQVVMPFSSNTIEAHKSAHVDGSLKSNKLKSARKFTFLSDEDDLSAHNPLYKENISQVSTNSDISQRTDFVDPFSPKIQAKSKSLRGPREKIQRLWSQSVSLPRRLMRKVPNRPEIIDLQQWQGTRQKAENENTGICTNKRGSSNPLLTTEEANLTEKEEIRQGETLMIEGTEQLKSLSSDSSFCFPRPHFSFSTLPTVSRTVELKSEPNVISSPAECSLELSPSRPCVLHSSLSRRETPICMLPIETERNIFENFAHPPNISPSACPLPPPPPISPPSPPPAPAPLAPPPDISPFSLFCPPPSPPSIPLPLPPPTFFPLSVSTSGPPTPPLLPPFPTPLPPPPPSIPCPPPPSASFLSTECVCITGVKCTTNLMPAEKIKSSMTQLSTTTVCKTDPQREPKGILRHVKNLAELEKSVANMYSQIEKNYLRTNVSELQTMCPSEVTNMEITSEQNKGSLNNIVEGTEKQSHSQSTSL

SEQ ID NO: 1750 - protein, 1540 aa, Homo sapiens
MFRQFYLWTCLASGIILGSLFEICLGQYDDDCKLARGGPPATIVAIDEESRNGTILVDNMLIKGTAGGPDPTIELSLKDNVDYWVLMDPVKQMLFLNSTGRVLDRDPPMNIHSIVVQVQCINKKVGTIIYHEVRIVVRDRNDNSPTFKHESYYATVNELTPVGTTIFTGFSGDNGATDIDDGPNGQIEYVIQYNPDDPTSNDTFEIPLMLTGNIVLRKRLNYEDKTRYFVIIQANDRAQNLNERRTTTTTLTVDVLDGDDLGPMFLPCVLVPNTRDCRPLTYQAAIPELRTPEELNPIIVTPPIQAIDQDRNIQPPSDRPGILYSILVGTPEDYPRFFHMHPRTAELSLLEPVNRDFHQKFDLVIKAEQDNGHPLPAFAGLHIEILDENNQSPYFTMPSYQGYILESAPVGATISDSLNLTSPLRIVALDKDIEDTKDPELHLFLNDYTSVFTVTQTGITRYLTLLQPVDREEQQTYTFSITAFDGVQESEPVIVNIQVMDANDNTPTFPEISYDVYVYTDMRPGDSVIQLTAVDADEGSNGEITYEILVGAQGDFIINKTTGLITIAPGVEMIVGRTYALTVQAADNAPPAERRNSICTVYIEVLPPNNQSPPRFPQLMYSLEISEAMRVGAVLLNLQATDREGDSITYAIENGDPQRVFNLSETTGILTLGKALDRESTDRYILIITASDGRPDGTSTATVNIVVTDVNDNAPVFDPYLPRNLSVVEEEANAFVGQVKATDPDAGINGQVHYSLGNFNNLFRITSNGSIYTAVKLNREVRDYYELVVVATDGAVHPRHSTLTLAIKVLDIDDNSPVFTNSTYTVLVEENLPAGTTILQIEAKDVDLGANVSYRIRSPEVKHFFALHPFTGELSLLRSLDYEAFPDQEASITFLVEAFDIYGTMPPGIATVTVIVKDMNDYPPVFSKRIYKGMVAPDAVKGTPITTVYAEDADPPGLPASRVRYRVDDVQFPYPASIFEVEEDSGRVITRVNLNEEPTTIFKLVVVAFDDGEPVMSSSATVKILVLHPGEIPRFTQEEYRPPPVSELATKGTMVGVISAAAINQSIVYSIVSGNEEDTFGINNITGVIYVNGPLDYETRTSYVLRVQADSLEVVLANLRVPSKSNTAKVYIEIQDENNHPPVFQKKFYIGGVSEDARMFTSVLRVKATDKDTGNYSVMAYRLIIPPIKEGKEGFVVETYTGLIKTAMLFHNMRRSYFKFQVIATDDYGKGLSGKADVLVSVVNQLDMQVIVSNVPPTLVEKKIEDLTEILDRYVQEQIPGAKVVVESIGARRHGDAFSLEDYTKCDLTVYAIDPQTNRAIDRNELFKFLDGKLLDINKDFQPYYGEGGRILEIRTPEAVTSIKKRGESLGYTEGALLALAFIIILCCIPAILVVLVSYRQVFKGRQAECTKTARIQAALPAAKPAVPAPAPVAAPPPPPPPPPGAHLYEELGDSSMNRNYPWSLELILARNMDKIITVMSMGMKCLNMGVAVDCYHQLDRRNMVRWLVKLRKNMRRKRKSQRKLKNQRLKLESLVRRKK

SEQ ID NO: 1751 - protein, 719 aa, Homo sapiens
MFRQFYLWTCLASGIILGSLFEICLGQYDDDCKLARGGPPATIVAIDEESRNGTILVDNMLIKGTAGGPDPTIELSLKDNVDYWVLMDPVKQMLFLNSTGRVLDRDPPMNIHSIVVQVQCINKKVGTIIYHEVRIVVRDRNDNSPTFKHESYYATVNELTPVGTTIFTGFSGDNGATDIDDGPNGQIEYVIQYNPDDPTSNDTFEIPLMLTGNIVLRKRLNYEDKTRYFVIIQANDRAQNLNERRTTTTTLTVDVLDGDDLGPMFLPCVLVPNTRDCRPLTYQAAIPELRTPEELNPIIVTPPIQAIDQDRNIQPPSDRPGILYSILVGTPEDYPRFFHMHPRTAELSLLEPVNRDFHQKFDLVIKAEQDNGHPLPAFAGLHIEILDENNQSPYFTMPSYQGYILESAPVGATISDSLNLTSPLRIVALDKDIEDEEPKKIKKPKVEIREPSEEEEVVVTIEKPPAAEPTYTTWKRARIFPMIFKKVRGLADKRGIVDLEGEEWQRRLEEEDKDYLKLTLDQEEATESTVESEEESSSDYTEYSEEESEFSESETTEEESESETPSEEEESSTPESEESESTESEGEKARKNIVLARRRPMVEEVKEVKGRKEEPQEEQKEPKMEEEEHSEEEESGPAPVEESTDPEAQDIPEEGSAESASVEGGVESEEESESGSSSSSSESQSGGPWGYQVPAYDRSKNANQKKSPGANSEGYNTAL

SEQ ID NO: 1752 - protein, 1783 aa, Homo sapiens
MFRQFYLWTCLASGIILGSLFEICLGQYDDDCKLARGGPPATIVAIDEESRNGTILVDNMLIKGTAGGPDPTIELSLKDNVDYWVLMDPVKQMLFLNSTGRVLDRDPPMNIHSIVVQVQCINKKVGTIIYHEVRIVVRDRNDNSPTFKHESYYATVNELTPVGTTIFTGFSGDNGATDIDDGPNGQIEYVIQYNPDDPTSNDTFEIPLMLTGNIVLRKRLNYEDKTRYFVIIQANDRAQNLNERRTTTTTLTVDVLDGDDLGPMFLPCVLVPNTRDCRPLTYQAAIPELRTPEELNPIIVTPPIQAIDQDRNIQPPSDRPGILYSILVGTPEDYPRFFHMHPRTAELSLLEPVNRDFHQKFDLVIKAEQDNGHPLPAFAGLHIEILDENNQSPYFTMPSYQGYILESAPVGATISDSLNLTSPLRIVALDKDIEDVPPSGVPTKDPELHLFLNDYTSVFTVTQTGITRYLTLLQPVDREEQQTYTFSITAFDGVQESEPVIVNIQVMDANDNTPTFPEISYDVYVYTDMRPGDSVIQLTAVDADEGSNGEITYEILVGAQGDFIINKTTGLITIAPGVEMIVGRTYALTVQAADNAPPAERRNSICTVYIEVLPPNNQSPPRFPQLMYSLEISEAMRVGAVLLNLQATDREGDSITYAIENGDPQRVFNLSETTGILTLGKALDRESTDRYILIITASDGRPDGTSTATVNIVVTDVNDNAPVFDPYLPRNLSVVEEEANAFVGQVKATDPDAGINGQVHYSLGNFNNLFRITSNGSIYTAVKLNREVRDYYELVVVATDGAVHPRHSTLTLAIKVLDIDDNSPVFTNSTYTVLVEENLPAGTTILQIEAKDVDLGANVSYRIRSPEVKHFFALHPFTGELSLLRSLDYEAFPDQEASITFLVEAFDIYGTMPPGIATVTVIVKDMNDYPPVFSKRIYKGMVAPDAVKGTPITTVYAEDADPPGLPASRVRYRVDDVQFPYPASIFEVEEDSGRVITRVNLNEEPTTIFKLVVVAFDDGEPVMSSSATVKILVLHPGEIPRFTQEEYRPPPVSELATKGTMVGVISAAAINQSIVYSIVSGNEEDTFGINNITGVIYVNGPLDYETRTSYVLRVQADSLEVVLANLRVPSKSNTAKVYIEIQDENNHPPVFQKKFYIGGVSEDARMFTSVLRVKATDKDTGNYSVMAYRLIIPPIKEGKEGFVVETYTGLIKTAMLFHNMRRSYFKFQVIATDDYGKGLSGKADVLVSVVNQLDMQVIVSNVPPTLVEKKIEDLTEILDRYVQEQIPGAKVVVESIGARRHGDAFSLEDYTKCDLTVYAIDPQTNRAIDRNELFKFLDGKLLDINKDFQPYYGEGGRILEIRTPEAVTSIKKRGESLGYTEGALLALAFIIILCCIPAILVVLVSYRQFKVRQAECTKTARIQAALPAAKPAVPAPAPVAAPPPPPPPPPGAHLYEELGDSSMYEMPQYGSRRRLLPPAGQEEYGEVVGEAEEEYEEEEEEPKKIKKPKVEIREPSEEEEVVVTIEKPPAAEPTYTTWKRARIFPMIFKKVRGLADKRGIVDLEGEEWQRRLEEEDKDYLKLTLDQEEATESTVESEEESSSDYTEYSEEESEFSESETTEEESESETPSEEEESSTPESEESESTESEGEKARKNIVLARRRPMVEEVKEVKGRKEEPQEEQKEPKMEEEEHSEEEESGPAPVEESTDPEAQDIPEEGSAESASVEGGVESEEESESGSSSSSSESQSGGPWGYQVPAYDRSKNANQKKSPGANSEGYNTAL

SEQ ID NO: 1753 - protein, 981 aa, Homo sapiens
MFRQFYLWTCLASGIILGSLFEICLGQYDDDCKLARGGPPATIVAIDEESRNGTILVDNMLIKGTAGGPDPTIELSLKDNVDYWVLMDPVKQMLFLNSTGRVLDRDPPMNIHSIVVQVQCINKKVGTIIYHEVRIVVRDRNDNSPTFKHESYYATVNELTPVGTTIFTGFSGDNGATDIDDGPNGQIEYVIQYNPDDPTSNDTFEIPLMLTGNIVLRKRLNYEDKTRYFVIIQANDRAQNLNERRTTTTTLTVDVLDGDDLGPMFLPCVLVPNTRDCRPLTYQAAIPELRTPEELNPIIVTPPIQAIDQDRNIQPPSDRPGILYSILVGTPEDYPRFFHMHPRTAELSLLEPVNRDFHQKFDLVIKAEQDNGHPLPAFAGLHIEILDENNQSPYFTMPSYQGYILESAPVGATISDSLNLTSPLRIVALDKDIEDTKDPELHLFLNDYTSVFTVTQTGITRYLTLLQPVDREEQQTYTFSITAFDGVQESEPVIVNIQVMDANDNTPTFPEISYDVYVYTDMRPGDSVIQLTAVDADEGSNGEITYEILVGAQGDFIINKTTGLITIAPGVEMIVGRTYALTVQAADNAPPAERRNSICTVYIEVLPPNNQSPPRFPQLMYSLEISEAMRVGAVLLNLQATDREGDSITYAIENGDPQRVFNLSETTGILTLGKALDRESTDRYILIITASDGRPDGEEPKKIKKPKVEIREPSEEEEVVVTIEKPPAAEPTYTTWKRARIFPMIFKKVRGLADKRGIVDLEGEEWQRRLEEEDKDYLKLTLDQEEATESTVESEEESSSDYTEYSEEESEFSESETTEEESESETPSEEEESSTPESEESESTESEGEKARKNIVLARRRPMVEEVKEVKGRKEEPQEEQKEPKMEEEEHSEEEESGPAPVEESTDPEAQDIPEEGSAESASVEGGVESEEESESGSSSSSSESQSGGPWGYQVPAYDRSKNANQKKSPGANSEGYNTAL

SEQ ID NO: 1754 - protein, 602 aa, Homo sapiens
MEAVCLGTCPEPEASMSTAIPGLKKGNNALQSIILQTLLEKENGQRKYGGPPPGWDAAPPERGCEIFIGKLPRDLFEDELIPLCEKIGKIYEMRMMMDFNGNNRGYAFVTFSNKVEAKNAIKQLNNYEIRNGRLLGVCASVDNCRLFVGGIPKTKKREEILSEMKKVTEGVVDVIVYPSAADKTKNRGFAFVEYESHRAAAMARRKLLPGRIQLWGHGIAVDWAEPEVEVDEDTMSSVKILYVRNLMLSTSEEMIEKEFNNIKPGAVERVKKIRDYAFVHFSNREDAVEAMKALNGKVLDGSPIEVTLAKPVDKDSYVRYTRGTGGRGTMLQGEYTYSLGQVYDPTTTYLGAPVFYAPQTYAAIPSLHFPATKGHLSNRAIIRAPSVREIYMNVPVGAAGVRGLGGRGYLAYTGLGRGYQVKGDKREDKLYDILPGMELTPMNPVTLKPQGIKLAPQILEEICQKNNWGQPVYQLHSAIGQDQRQLFLYKITIPALASQNPAIHPFTPPKLSAFVDEAKTYAAEYTLQTLGIPTDGGDGTMATAAAAATAFPGYAVPNATAPVSAAQLKQAVTLGQDLAAYTTYEVYPTFAVTARGDGYGTF

SEQ ID NO: 1755 - protein, 604 aa, Homo sapiens
MRGAGPSPRQSPRTLRPDPGPAMSFFRRKVKGKEQEKTSDVKSIKASISVHSPQKSTKNHALLEAAGPSHVAINAISANMDSFSSSRTATLKKQPSHMEAAHFGDLGRSCLDYQTQETKSSLSKTLEQVLHDTIVLPYFIQFMELRRMEHLVKFWLEAESFHSTTWSRIRAHSLNTVKQSSLAEPVSPSKKHETTASFLTDSLDKRLEDSGSAQLFMTHSEGIDLNNRTNSTQNHLLLSQECDSAHSLRLEMARAGTHQVSMETQESSSTLTVASRNSPASPLKELSGKLMKSIEQDAVNTFTKYISPDAAKPIPITEAMRNDIIARICGEDGQVDPNCFVLAQSIVFSAMEQEHFSEFLRSHHFCKYQIEVLTSGTVYLADILFCESALFYFSEYMEKEDAVNILQFWLAADNFQSQLAAKKGQYDGQEAQNDAMILYDKYFSLQATHPLGFDDVVRLEIESNICREGGPLPNCFTTPLRQAWTTMEKSSVKKASIKILKNFDEAIIVDAASLDPESLYQRTYAGKMTFGRVSDLGQFIRESEPEPDVRKSKGSMFSQAMKKWVQGNTDEAQEELAWKIAKMIVSDIMQQAQYDQPLEKSTKL

SEQ ID NO: 1756 - protein, 1140 aa, Homo sapiens
MVLSLTGLIAFSFLQATLALNPEDPNVCSHWESYAVTVQESYAHPFDQIYYTRCTDILNWFKCTRHRISYKTAYRRGLRTMYRRRSQCCPGYYESGDFCIPLCTEECVHGRCVSPDTCHCEPGWGGPDCSSGCDSDHWGPHCSNRCQCQNGALCNPITGACVCAAGFRGWRCEELCAPGTHGKGCQLPCQCRHGASCDPRAGECLCAPGYTGVYCEELCPPGSHGAHCELRCPCQNGGTCHHITGECACPPGWTGAVCAQPCPPGTFGQNCSQDCPCHHGGQCDHVTGQCHCTAGYMGDRCQEECPFGSFGFQCSQHCDCHNGGQCSPTTGACECEPGYKGPRCQERLCPEGLHGPGCTLPCPCDADNTISCHPVTGACTCQPGWSGHHCNESCPVGYYGDGCQLPCTCQNGADCHSITGGCTCAPGFMGEVCAVSCAAGTYGPNCSSICSCNNGGTCSPVDGSCTCKEGWQGLDCTLPCPSGTWGLNCNESCTCANGAACSPIDGSCSCTPGWLGDTCELPCPDGTFGLNCSEHCDCSHADGCDPVTGHCCCLAGWTGIRCDSTCPPGRWGPNCSVSCSCENGGSCSPEDGSCECAPGFRGPLCQRICPPGFYGHGCAQPCPLCVHSSRPCHHISGICECLPGFSGALCNQVCAGGYFGQDCAQLCSCANNGTCSPIDGSCQCFPGWIGKDCSQACPPGFWGPACFHACSCHNGASCSAEDGACHCTPGWTGLFCTQRCPAAFFGKDCGRVCQCQNGASCDHISGKCTCRTGFTGQHCEQRCAPGTFGYGCQQLCECMNNSTCDHVTGTCYCSPGFKGIRCDQAALMMEELNPYTKISPALGAERHSVGAVTGIMLLLFLIVVLLGLFAWHRRRQKEKGRDLAPRVSYTPAMRMTSTDYSLSDLSQSSSHAHCFSNSSYHALACGGPATSQASTLDRNSPTKLSNKSLDRDTAGWTPYSYVNVLDSHFQISALEARYPPEDFYIELRHLSRPAEPHSPGACGMDRRQNTYIMDKGFKDYMKESVCSSSTCSLNSSENPYATIKDPPILTCKLPESSYVEMKSPVHMGSPYTDVPSLSTSNKNIYEVEPTVSVVQEGCGHNSSYIQNAYDLPRNSHIPGHYDLLPVRQSPANGPSQDKQS

SEQ ID NO: 1757 - protein, 594 aa, Homo sapiens
MVLRSHPFPRQDRPQGSVPRAVPGSPVGPSTSTHSEDRHGPSSSVGTVIGTGTGGLVEAGGQPQPRSSETNGSPSPDPPPGLRGEGTREKSLDPLPQAAMPRGPAQPPAQRPPGPAASSSARRSQPVPQLRKRSRCEIAPSSEQEVRPAASGDPQGEAPGEGGSPAGRSGALTEKQEEARKLMVFLQRPGGWGVVEGPRKPSSRALEPATAAALRRRLDLGSCLDVLAFAQQHGEPGLAQETYALMSDNLLRVLGDPCLYRRLSAADRERILSLRTGRGRAVLGVLVLPSLYQGGRSGLPRGPRGEEPPAAAPVSLPLPAHLHVFNPRENTWRPLTQVPEEAPLRGCGLCTMHNYLFLAGGIRGSGAKAVCSNEVFCYNPLTNIWSQVRPMQQARAQLKLVALDGLLYAIGGECLYSMECYDPRTDAWTPRAPLPAGTFPVAHEAVACRGDIYVTGGHLFYRLLRYSPVKDAWDECPYSASHRRSSDIVALGGFLYRFDLLRGVGAAVMRYNTVTGSWSRAASLPLPAPAPLHCTTLGNTIYCLNPQVTATFTVSGGTAQFQAKELQPFPLGSTGVLSPFILTLPPEDRLQTSL

SEQ ID NO: 1758 - protein, 650 aa, Homo sapiens
MSNRNNNKLPSNLPQLQNLIKRDPPAYIEEFLQQYNHYKSNVEIFKLQPNKPSKELAELVMFMAQISHCYPEYLSNFPQEVKDLLSCNHTVLDPDLRMTLYTHIVTDIKNINAKHKNNKVNVVLQNFMYTMLRDSNATAAKMSLDVMIELYRRNIWNDAKTVNVITTACFSKVTKILVAALTFFLGKDEDEKQDSDSESEDDGPTARDLLVQYATGKKSSKNKKKLEKAMKVLKKQKKKKKPEVFNFSAIHLIHDPQDFAEKLLKQLECCKERFEVKMMLMNLISRLVGIHELFLFNFYPFLQRFLQPHQREVTKILLFAAQASHHLVPPEIIQSLLMTVANNFVTDKNSGEVMTVGINAIKEITARCPLAMTEELLQDLAQYKTHKDKNVMMSARTLIHLFRTLNPQMLQKKFRGKPTEASIEARVQEYGELDAKDYIPGAEVLEVEKEENAENDEDGWESTSLSEEEDADGEWIDVQHSSDEEQQEISKKLNSMPMEERKAKAAAISTSRVLTQEDFQKIRMAQMRKELDAAPGKSQKRKYIEIDSDEEPRGELLSLRDIERLHKKPKSDKETRLATAMAGKTDRKEFVRKKTKTNPFSSSTNKEKKKQKNFMMMRYSQNVRSKNKRSFREKQLALRDALLKKRKRMK

SEQ ID NO: 1759 - protein, 1267 aa, Homo sapiens
MRGLPRGRGLMRARGRGRAAPPGSRGRGRGGPHRGRGRPRSLLSLPRAQASWTPQLSTGLTSPPVPCLPSQGEAPAEMGALLLEKETRGATERVHGSLGDTPRSEETLPKATPDSLEPAGPSSPASVTVTVGDEGADTPVGATPLIGDESENLEGDGDLRGGRILLGHATKSFPSSPSKGGSCPSRAKMSMTGAGKSPPSVQSLAMRLLSMPGAQGAAAAGSEPPPATTSPEGQPKVHRARKTMSKPGNGQPPVPEKRPPEIQHFRMSDDVHSLGKVTSDLAKRRKLNSGGGLSEELGSARRSGEVTLTKGDPGSLEEWETVVGDDFSLYYDSYSVDERVDSDSKSEVEALTEQLSEEEEEEEEEEEEEEEEEEEEEEEEDEESGNQSDRSGSSGRRKAKKKWRKDSPWVKPSRKRRKREPPRAKEPRGVNGVGSSGPSEYMEVPLGSLELPSEGTLSPNHAGVSNDTSSLETERGFEELPLCSCRMEAPKIDRISERAGHKCMATESVDGELSGCNAAILKRETMRPSSRVALMVLCETHRARMVKHHCCPGCGYFCTAGTFLECHPDFRVAHRFHKACVSQLNGMVFCPHCGEDASEAQEVTIPRGDGVTPPAGTAAPAPPPLSQDVPGRADTSQPSARMRGHGEPRRPPCDPLADTIDSSGPSLTLPNGGCLSAVGLPLGPGREALEKALVIQESERRKKLRFHPRQLYLSVKQGELQKVILMLLDNLDPNFQSDQQSKRTPLHAAAQKGSVEICHVLLQAGANINAVDKQQRTPLMEAVVNNHLEVARYMVQRGGCVYSKEEDGSTCLHHAAKIGNLEMVSLLLSTGQVDVNAQDSGGWTPIIWAAEHKHIEVIRMLLTRGADVTLTDNEENICLHWASFTGSAAIAEVLLNARCDLHAVNYHGDTPLHIAARESYHDCVLLFLSRGANPELRNKEGDTAWDLTPERSDVWFALQLNRKLRLGVGNRAIRTEKIICRDVARGYENVPIPCVNGVDGEPCPEDYKYISENCETSTMNIDRNITHLQHCTCVDDCSSSNCLCGQLSIRCWYDKDGRLLQEFNKIEPPLIFECNQACSCWRNCKNRVVQSGIKVRLQLYRTAKMGWGVRALQTIPQGTFICEYVGELISDAEADVREDDSYLFDLDNKDGEVYCIDARYYGNISRFINHLCDPNIIPVRVFMLHQDLRFPRIAFFSSRDIRTGEELGFDYGDRFWDIKSKYFTCQCGSEKCKHSAEAIALEQSRLARLDPHPELLPELGSLPPVNT

SEQ ID NO: 1760 - protein, 178 aa, Homo sapiens
MDRAARCSGASSLPLLLALALGLVILHCVVADGNSTRSPETNGLLCGDPEENCAATTTQSKRKGHFSRCPKQYKHYCIKGRCRFVVAEQTPSCVCDEGYIGARCERVDLFYLRGDRGQILVICLIAVMVVFIILVIGVCTCCHPLRKRRKRKKKEEEMETLGKDITPINEDIEETNIA

SEQ ID NO: 1761 - protein, 666 aa, Homo sapiens
MATTVTCTRFTDEYQLYEDIGKGAFSVVRRCVKLCTGHEYAAKIINTKKLSARDHQKLEREARICRLLKHSNIVRLHDSISEEGFHYLVFDLVTGGELFEDIVAREYYSEADASHCIQQILEAVLHCHQMGVVHRDLKPENLLLASKCKGAAVKLADFGLAIEVQGDQQAWFGFAGTPGYLSPEVLRKEAYGKPVDIWACGVILYILLVGYPPFWDEDQHKLYQQIKAGAYDFPSPEWDTVTPEAKNLINQMLTINPAKRITAHEALKHPWVCQRSTVASMMHRQETVECLKKFNARRKLKGAILTTMLATRNFSVGRQTTAPATMSTAASGTTMGLVEQAKSLLNKKADGVKPQTNSTKNSAAATSPKGTLPPAALEPQTTVIHNPVDGIKESSDSANTTIEDEDAKAPRVPDILSSVRRGSGAPEAEGPLPCPSPAPFSPLPAPSPRISDILNSVRRGSGTPEAEGPLSAGPPPCLSPALLGPLSSPSPRISDILNSVRRGSGTPEAEGPSPVGPPPCPSPTIPGPLPTPSRKQEIIKTTEQLIEAVNNGDFEAYAKICDPGLTSFEPEALGNLVEGMDFHRFYFENLLAKNSKPIHTTILNPHVHVIGEDAACIAYIRLTQYIDGQGRPRTSQSEETRVWHRRDGKWQNVHFHCSGAPVAPLQ

SEQ ID NO: 1762 - protein, 825 aa, Homo sapiens
MGWLCSGLLFPVSCLVLLQVASSGNMKVLQEPTCVSDYMSISTCEWKMNGPTNCSTELRLLYQLVFLLSEAHTCIPENNGGAGCVCHLLMDDVVSADNYTLDLWAGQQLLWKGSFKPSEHVKPRAPGNLTVHTNVSDTLLLTWSNPYPPDNYLYNHLTYAVNIWSENDPADFRIYNVTYLEPSLRIAASTLKSGISYRARVRAWAQCYNTTWSEWSPSTKWHNSYREPFEQHLLLGVSVSCIVILAVCLLCYVSITKIKKEWWDQIPNPARSRLVAIIIQDAQGSQWEKRSRGQEPAKCPHWKNCLTKLLPCFLEHNMKRDEDPHKAAKEMPFQGSGKSAWCPVEISKTVLWPESISVVRCVELFEAPVECEEEEEVEEEKGSFCASPESSRDDFQEGREGIVARLTESLFLDLLGEENGGFCQQDMGESCLLPPSGSTSAHMPWDEFPSAGPKEAPPWGKEQPLHLEPSPPASPTQSPDNLTCTETPLVIAGNPAYRSFSNSLSQSPCPRELGPDPLLARHLEEVEPEMPCVPQLSEPTTVPQPEPETWEQILRRNVLQHGAAAAPVSAPTSGYQEFVHAVEQGGTQASAVVGLGPPGEAGYKAFSSLLASSAVSPEKCGFGASSGEEGYKPFQDLIPGCPGDPAPVPVPLFTFGLDREPPRSPQSSHLPSSSPEHLGLEPGEKVEDMPKPPLPQEQATDPLVDSLGSGIVYSALTCHLCGHLKQCHGQEDGGQTPVMASPCCGCCCGDRSSPPTTPLRAPDPSPGGVPLEASLCPASLAPSGISEKSKSSSSFHPAPGNAQSSSQTPKIVNFVSVGPTYMRVS

SEQ ID NO: 1763 - protein, 303 aa, Homo sapiens
MTMMAHQYPSWIFINEKTFITREQLNSLLKTYNIFYENQKNLHILYGETEDGKLIVEGMLDIFWGVKRPIQLKIQDEKPFSSFTSMKSSDVFSSKGMTRWGEFDDLYRISELDRTQIPMSEKRNSQEDYLSYHSNTLKPHAKDEPDSPVLYRTMSEAALVRKRMKPLMMDRKERQKNRASINGHFYNHEIENSPQDFALHIIFATGEQRRLKKTDIPLLQRLLQGPSEKNARIFLMDKDAEEISSDVAQYINFHFSLLESILQRLNEEEKREIQRIVTKFNKEKAIILKCLQNKLVIKTETTV

SEQ ID NO: 1764 - protein, 464 aa, Homo sapiens
MPRPRSQLPQPNSQVEQILAEFQLQEEDLKKVMRRMQKEMDRGLRLETHEEASVKMLPTYVRSTPEGSEVGDFLSLDLGGTNFRVMLVKVGEGEEGQWSVKTKHQMYSIPEDAMTGTAEMLFDYISECISDFLDKHQMKHKKLPLGFTFSFPVRHEDIDKGILLNWTKGFKASGAEGNNVVGLLRDAIKRRGDFEMDVVAMVNDTVATMISCYYEDHQCEVGMIVGTGCNACYMEEMQNVELVEGDEGRMCVNTEWGAFGDSGELDEFLLEYDRLVDESSANPGQQLYEKLIGGKYMGELVRLVLLRLVDENLLFHGEASEQLRTRGAFETRFVSQVESDTGDRKQIYNILSTLGLRPSTTDCDIVRRACESVSTRAAHMCSAGLAGVINRMRESRSEDVMRITVGVDGSVYKLHPSFKERFHASVRRLTPSCEITFIESEEGSGRGAALVSAVACKKACMLGQ

SEQ ID NO: 1765 - protein, 1962 aa, Homo sapiens
MRELEAKATKDVERNLSRDLVQEEEQLMEEKKKKKDDKKKKEAAQKKATEQKIKVPEQIKPSVSQPQPANSNNGTSTATSTNNNAKRATANNQQPQQQQQQQQPQQQQPQQQPQPQPQQQQPQQQPQALPRYPREVPPRFRHQEHKQLLKRGQHFPVIAANLGSAVKVLNSQSESSALTNQQPQNNGEVQNSKNQSDINHSTSGSHYENSQRGPVSSTSDSSTNCKNAVVSDLSEKEAWPSAPGSDPELASECMDADSASSSESERNITIMASGNTGGEKDGLRNSTGLGSQNKFVVGSSSNNVGHGSSTGPWGFSHGAIISTCQVSVDAPESKSESSNNRMNAWGTVSSSSNGGLNPSTLNSASNHGAWPVLENNGLALKGPVGSGSSGINIQCSTIGQMPNNQSINSKVSGGSTHGTWGSLQETCESEVSGTQKVSFSGQPQNITTEMTGPNNTTNFMTSSLPNSGSVQNNELPSSNTGAWRVSTMNHPQMQAPSGMNGTSLSHLSNGESKSGGSYGTTWGAYGSNYSGDKCSGPNGQANGDTVNATLMQPGVNGPMGTNFQVNTNKGGGVWESGAANSQSTSWGSGNGANSGGSRRGWGTPAQNTGTNLPSVEWNKLPSNQHSNDSANGNGKTFTNGWKSTEEEDQGSATSQTNEQSSVWAKTGGTVESDGSTESTGRLEEKGTGESQSRDRRKIDQHTLLQSIVNRTDLDPRVLSNSGWGQTPIKQNTAWDTETSPRGERKTDNGTEAWGSSATQTFNSGACIDKTSPNGNDTSSVSGWGDPKPALRWGDSKGSNCQGGWEDDSAATGMVKSNQWGNCKEEKAAWNDSQKNKQGWGDGQKSSQGWSVSASDNWGETSRNNHWGEANKKSSSGGSDSDRSVSGWNELGKTSSFTWGNNINPNNSSGWDESSKPTPSQGWGDPPKSNQSLGWGDSSKPVSSPDWNKQQDIVGSWGIPPATGKPPGTGWLGGPIPAPAKEEEPTGWEEPSPESIRRKMEIDDGTSAWGDPSKYNYKNVNMWNKNVPNGNSRSDQQAQVHQLLTPASAISNKEASSGSGWGEPWGEPSTPATTVDNGTSAWGKPIDSGPSWGEPIAAASSTSTWGSSSVGPQALSKSGPKSMQDGWCGDDMPLPGNRPTGWEEEEDVEIGMWNSNSSQELNSSLNWPPYTKKMSSKGLSGKKRRRERGMMKGGNKQEEAWINPFVKQFSNISFSRDSPEENVQSNKMDLSGGMLQDKRMEIDKHSLNIGDYNRTVGKGPGSRPQISKESSMERNPYFDKDGIVADESQNMQFMSSQSMKLPPSNSALPNQALGSIAGLGMQNLNSVRQNGNPSMFGVGNTAAQPRGMQQPPAQPLSSSQPNLRAQVPPPLLSPQVPVSLLKYAPNNGGLNPLFGPQQVAMLNQLSQLNQLSQISQLQRLLAQQQRAQSQRSVPSGNRPQQDQQGRPLSVQQQMMQQSRQLDPNLLVKQQTPPSQQQPLHQPAMKSFLDNVMPHTTPELQKGPSPINAFSNFPIGLNSNLNVNMDMNSIKEPQSRLRKWTTVDSISVNTSLDQNSSKHGAISSGFRLEESPFVPYDFMNSSTSPASPPGSIGDGWPRAKSPNGSSSVNWPPEFRPGEPWKGYPNIDPETDPYVTPGSVINNLSINTVREVDHLRDRNSGSSSSLNTTLPSTSAWSSIRASNYNVPLSSTAQSTSARNSDSKLTWSPGSVTNTSLAHELWKVPLPPKNITAPSRPPPGLTGQKPPLSTWDNSPLRIGGGWGNSDARYTPGSSWGESSSGRITNWLVLKNLTPQIDGSTLRTLCMQHGPLITFHLNLPHGNALVRYSSKEEVVKAQKSLHMCVLGNTTILAEFASEEEISRFFAQSQSLTPSPGWQSLGSSQSRLGSLDCSHSFSSRTDLNHWNGAGLSGTNCGDLHGTSLWGTPHYSTSLWGPPSSSDPRGISSPSPINAFLSVDHLGGGGESM

SEQ ID NO: 1766 - protein, 354 aa, Homo sapiens
MAQAPADPGREAERPQQHAATIPETPGPQFSQQREEDIYRFLKDNGPQRALVIAQALGMRTAKDVNRDLYRMKSRHLLDMDEQSKAWTIYRPEDSGRRAKSASIIYQHNPINMICQNGPNSWISIANSEAIQIGHGNIITRQTVSREDGSAGPRHLPSMAPGDSSTWGTLVDPWGPQDIHMEQSILRRVQLGHSNEMRLHGVPSEGPAHIPPGSPPVSATAAGPEASFEARIPSPGTHPEGEAAQRIHMKSCFLEDATIGNSNKMSISPGVAGPGGVAGSGEGEPGEDAGRRPADTQSRSHFPRDIGQPITPSHSKLTPKLETMTLGNRSHKAAEGSHYVDEASHEGSWWGGGI

SEQ ID NO: 1767 - protein, 158 aa, Homo sapiens
MSSAIERKSLDPSEEPVDEVLQIPPSLLTCGGCQQNIGDRYFLKAIDQYWHEDCLSCDLCGCRLGEVGRRLYYKLGRKLCRRDYLRLFGQDGLCASCDKRIRAYEMTMRVKDKVYHLECFKCAACQKHFCVGDRYLLINSDIVCEQDIYEWTKINGMI

SEQ ID NO: 1768 - protein, 1606 aa, Homo sapiens
MLLHLCSVKNLYQNRFLGLAAMASPSRNSQSRRRCKEPLRYSYNPDQFHNMDLRGGPHDGVTIPRSTSDTDLVTSDSRSTLMVSSSYYSIGHSQDLVIHWDIKEEVDAGDWIGMYLIDEVLSENFLDYKNRGVNGSHRGQIIWKIDASSYFVEPETKICFKYYHGVSGALRATTPSVTVKNSAAPIFKSIGADETVQGQGSRRLISFSLSDFQAMGLKKGMFFNPDPYLKISIQPGKHSIFPALPHHGQERRSKIIGNTVNPIWQAEQFSFVSLPTDVLEIEVKDKFAKSRPIIKRFLGKLSMPVQRLLERHAIGDRVVSYTLGRRLPTDHVSGQLQFRFEITSSIHPDDEEISLSTEPESAQIQDSPMNNLMESGSGEPRSEAPESSESWKPEQLGEGSVPDGPGNQSIELSRPAEEAAVITEAGDQGMVSVGPEGAGELLAQVQKDIQPAPSAEELAEQLDLGEEASALLLEDGEAPASTKEEPLEEEATTQSRAGREEEEKEQEEEGDVSTLEQGEGRLQLRASVKRKSRPCSLPVSELETVIASACGDPETPRTHYIRIHTLLHSMPSAQGGSAAEEEDGAEEESTLKDSSEKDGLSEVDTVAADPSALEEDREEPEGATPGTAHPGHSGGHFPSLANGAAQDGDTHPSTGSESDSSPRQGGDHSCEGCDASCCSPSCYSSSCYSTSCYSSSCYSASCYSPSCYNGNRFASHTRFSSVDSAKISESTVFSSQDDEEEENSAFESVPDSMQSPELDPESTNGAGPWQDELAAPSGHVERSPEGLESPVAGPSNRREGECPILHNSQPVSQLPSLRPEHHHYPTIDEPLPPNWEARIDSHGRVFYVDHVNRTTTWQRPTAAATPDGMRRSGSIQQMEQLNRRYQNIQRTIATERSEEDSGSQSCEQAPAGGGGGGGSDSEAESSQSSLDLRREGSLSPVNSQKITLLLQSPAVKFITNPEFFTVLHANYSAYRVFTSSTCLKHMILKVRRDARNFERYQHNRDLVNFINMFADTRLELPRGWEIKTDQQGKSFFVDHNSRATTFIDPRIPLQNGRLPNHLTHRQHLQRLRSYSAGEASEVSRNRGASLLARPGHSLVAAIRSQHQHESLPLAYNDKIVAFLRQPNIFEMLQERQPSLARNHTLREKIHYIRTEGNHGLEKLSCDADLVILLSLFEEEIMSYVPLQAAFHPGYSFSPRCSPCSSPQNSPGLQRASARAPSPYRRDFEAKLRNFYRKLEAKGFGQGPGKIKLIIRRDHLLEGTFNQVMAYSRKELQRNKLYVTFVGEEGLDYSGPSREFFFLLSQELFNPYYGLFEYSANDTYTVQISPMSAFVENHLEWFRFSGRILGLALIHQYLLDAFFTRPFYKALLRLPCDLSDLEYLDEEFHQSLQWMKDNNITDILDLTFTVNEEVFGQVTERELKSGGANTQVTEKNKKEYIERMVKWRVERGVVQQTEALVRGFYEVVDSRLVSVFDARELELVIAGTAEIDLNDWRNNTEYRGGYHDGHLVIRWFWAAVERFNNEQRLRLLQFVTGTSSVPYEGFAALRGSNGLRRFCIEKWGKITSLPRAHTCFNRLDLPPYPSYSMLYEKLLTAVEETSTFGLE

SEQ ID NO: 1769 - protein, 584 aa, Homo sapiens
MGNQMSVPQRVEDQENEPEAETYQDNASALNGVPVVVSTHTVQHLEEVDLGISVKTDNVATSSPETTEISAVADANGKNLGKEAKPEAPAAKSRFFLMLSRPVPGRTGDQAADSSLGSVKLDVSSNKAPANKDPSESWTLPVAAGPGQDTDKTPGHAPAQDKVLSAARDPTLLPPETGGAGGEAPSKPKDSSFFDKFFKLDKGQEKVPGDSQQEAKRAEHQDKVDEVPGLSGQSDDVPAGKDIVDGKEKEGQELGTADCSVPGDPEGLETAKDDSQAAAIAENNNSIMSFFKTLVSPNKAETKKDPEDTGAEKSPTTSADLKSDKANFTSQETQGAGKNSKGCNPSGHTQSVTTPEPAKEGTKEKSGPTSLPLGKLFWKKSVKEDSVPTGAEENVVCESPVEIIKSKEVESALQTVDLNEGDAAPEPTEAKLKREESKPRTSLMAFLRQMSVKGDGGITHSEEINGKDSSCQTSDSTEKTITPPEPEPTGAPQKGKEGSSKDKKSAAEMNKQKSNKQEAKEPAQCTEQATVDTNSLQNGDKLQKRPEKRQQSLGGFFKGLGPKRMLDAQVQTDPVSIGPVGKSK

SEQ ID NO: 1770 - protein, 262 aa, Homo sapiens
MQSREEEWFHQVRRVMTILFLTMVISYFGCMKAAPMKEANIRGQGGLAYPGVRTHGTLESVNGPKAGSRGLTSLADTFEHVIEELLDEDQKVRPNEENNKDADLYTSRVMLSSQVPLEPPLLFLLEEYKNYLDAANMSMRVRRHSDPARRGELSVCDSISEWVTAADKKTAVDMSGGTVTVLEKVPVSKGQLKQYFYETKCNPMGYTKEGCRGIDKRHWNSQCRTTQSYVRALTMDSKKRIGWRFIRIDTSCVCTLTIKRGR

SEQ ID NO: 1771 - protein, 906 aa, Homo sapiens
MERGLPLLCAVLALVLAPAGAFRNDKCGDTIKIESPGYLTSPGYPHSYHPSEKCEWLIQAPDPYQRIMINFNPHFDLEDRDCKYDYVEVFDGENENGHFRGKFCGKIAPPPVVSSGPFLFIKFVSDYETHGAGFSIRYEIFKRGPECSQNYTTPSGVIKSPGFPEKYPNSLECTYIVFVPKMSEIILEFESFDLEPDSNPPGGMFCRYDRLEIWDGFPDVGPHIGRYCGQKTPGRIRSSSGILSMVFYTDSAIAKEGFSANYSVLQSSVSEDFKCMEALGMESGEIHSDQITASSQYSTNWSAERSRLNYPENGWTPGEDSYREWIQVDLGLLRFVTAVGTQGAISKETKKKYYVKTYKIDVSSNGEDWITIKEGNKPVLFQGNTNPTDVVVAVFPKPLITRFVRIKPATWETGISMRFEVYGCKITDYPCSGMLGMVSGLISDSQITSSNQGDRNWMPENIRLVTSRSGWALPPAPHSYINEWLQIDLGEEKIVRGIIIQGGKHRENKVFMRKFKIGYSNNGSDWKMIMDDSKRKAKSFEGNNNYDTPELRTFPALSTRFIRIYPERATHGGLGLRMELLGCEVEAPTAGPTTPNGNLVDECDDDQANCHSGTGDDFQLTGGTTVLATEKPTVIDSTIQSEFPTYGFNCEFGWGSHKTFCHWEHDNHVQLKWSVLTSKTGPIQDHTGDGNFIYSQADENQKGKVARLVSPVVYSQNSAHCMTFWYHMSGSHVGTLRVKLRYQKPEEYDQLVWMAIGHQGDHWKEGRVLLHKSLKLYQVIFEGEIGKGNLGGIAVDDISINNHISQEDCARSTPGYEGEGEGDKNISRKPGNVLKTLDPILITIIAMSALGVLLGAVCGVVLYCACWHNGMSERNLSALENYNFELVDGVKLKKDKLNTQSTYSEA

SEQ ID NO: 1772 - protein, 616 aa, Homo sapiens
MSRRKQAKPQHINSEEDQGEQQPQQQTPEFADAAPAAPAAGELGAPVNHPGNDEVASEDEATVKRLRREETHVCEKCCAEFFSISEFLEHKKNCTKNPPVLIMNDSEGPVPSEDFSGAVLSHQPTSPGSKDCHRENGGSSEDMKEKPDAESVVYLKTETALPPTPQDISYLAKGKVANTNVTLQALRGTKVAVNQRSADALPAPVPGANSIPWVLEQILCLQQQQLQQIQLTEQIRIQVNMWASHALHSSGAGADTLKTLGSHMSQQVSAAVALLSQKAGSQGLSLDALKQAKLPHANIPSATSSLSPGLAPFTLKPDGTRVLPNVMSRLPSALLPQAPGSVLFQSPFSTVALDTSKKGKGKPPNISAVDVKPKDEAALYKHKCRSSLPSTFIRAPPTYVKVEVPGTFVGPSTLSPGMTPLLAAQPRRQAKQHGCTRCGKNFSSASALQIHERTHTGEKPFVCNICGRAFTTKGNLKVHYMTHGANNNSARRGRKLAIENTMALLGTDGKRVSEIFPKEILAPSVNVDPVVWNQYTSMLNGGLAVKTNEISVIQSGGVPTLPVSLGATSVVNNATVSKMDGSQSGISADVEKPSATDGVPKHQFPHFLEENKIAVS

SEQ ID NO: 1773 - protein, 2432 aa, Homo sapiens
MPAILVASKMKSGLPKPVHSAAPILHVPPARAGPQPCYLKLGSKVEVSKTTYPSQIPLKSQVLQGLQEPAGEGLPLRKSGSVENGFDTQIYTDWANHYLAKSGHKRLIRDLQQDVTDGVLLAQIIQVVANEKIEDINGCPKNRSQMIENIDACLNFLAAKGINIQGLSAEEIRNGNLKAILGLFFSLSRYKQQQQQPQKQHLSSPLPPAVSQVAGAPSQCQAGTPQQQVPVTPQAPCQPHQPAPHQQSKAQAEMQSRLPGPTARVSAAGSEAKTRGGSTTANNRRSQSFNNYDKSKPVTSPPPPPSSHEKEPLASSASSHPGMSDNAPASLESGSSSTPTNCSTSSAIPQPGAATKPWRSKSLSVKHSATVSMLSVKPPGPEAPRPTPEAMKPAPNNQKSMLEKLKLFNSKGGSKAGEGPGSRDTSCERLETLPSFEESEELEAASRMLTTVGPASSSPKIALKGIAQRTFSRALTNKKSSLKGNEKEKEKQQREKDKEKSKDLAKRASVTERLDLKEEPKEDPSGAAVPEMPKKSSKIASFIPKGGKLNSAKKEPMAPSHSGIPKPGMKSMPGKSPSAPAPSKEGERSRSGKLSSGLPQQKPQLDGRHSSSSSSLASSEGKGPGGTTLNHSISSQTVSGSVGTTQTTGSNTVSVQLPQPQQQYNHPNTATVAPFLYRSQTDTEGNVTAESSSTGVSVEPSHFTKTGQPALEELTGEDPEARRLRTVKNIADLRQNLEETMSSLRGTQVTHSTLETTFDTNVTTEMSGRSILSLTGRPTPLSWRLGQSSPRLQAGDAPSMGNGYPPRANASRFINTESGRYVYSAPLRRQLASRGSSVCHVDVSDKAGDEMDLEGISMDAPGYMSDGDVLSKNIRTDDITSGYMTDGGLGLYTRRLNRLPDGMAVVRETLQRNTSLGLGDADSWDDSSSVSSGISDTIDNLSTDDINTSSSISSYANTPASSRKNLDVQTDAEKHSQVERNSLWSGDDVKKSDGGSDSGIKMEPGSKWRRNPSDVSDESDKSTSGKKNPVISQTGSWRRGMTAQVGITMPRTKPSAPAGALKTPGTGKTDDAKVSEKGRLSPKASQVKRSPSDAGRSSGDESKKPLPSSSRTPTANANSFGFKKQSGSAAGLAMITASGVTVTSRSATLGKIPKSSALVSRSAGRKSSMDGAQNQDDGYLALSSRTNLQYRSLPRPSKSNSRNGAGNRSSTSSIDSNISSKSAGLPVPKLREPSKTALGSSLPGLVNQTDKEKGISSDNESVASCNSVKVNPAAQPVSSPAQTSLQPGAKYPDVASPTLRRLFGGKPTKQVPIATAENMKNSVVISNPHATMTQQGNLDSPSGSGVLSSGSSSPLYSKNVDLNQSPLASSPSSAHSAPSNSLTWGTNASSSSAVSKDGLGFQSVSSLHTSCESIDISLSSGGVPSHNSSTGLIASSKDDSLTPFVRTNSVKTTLSESPLSSPAASPKFCRSTLPRKQDSDPHLDRNTLPKKGLRYTPTSQLRTQEDAKEWLRSHSAGGLQDTAANSPFSSGSSVTSPSGTRFNFSQLASPTTVTQMSLSNPTMLRTHSLSNADGQYDPYTDSRFRNSSMSLDEKSRTMSRSGSFRDGFEEVHGSSLSLVSSTSSVYSTPEEKCQSEIRKLRRELDASQEKVSALTTQLTANAHLVAAFEQSLGNMTIRLQSLTMTAEQKDSELNELRKTIELLKKQNAAAQAAINGVINTPELNCKGNGTAQSADLRIRRQHSSDSVSSINSATSHSSVGSNIESDSKKKKRKNWVNELRSSFKQAFGKKKSPKSASSHSDIEEMTDSSLPSSPKLPHNGSTGSTPLLRNSHSNSLISECMDSEAETVMQLRNELRDKEMKLTDIRLEALSSAHQLDQLREAMNRMQSEIEKLKAENDRLKSESQGSGCSRAPSQVSISASPRQSMGLSQHSLNLTESTSLDMLLDDTGECSARKEGGRHVKIVVSFQEEMKWKEDSRPHLFLIGCIGVSGKTKWDVLDGVVRRLFKEYIIHVDPVSQLGLNSDSVLGYSIGEIKRSNTSETPELLPCGYLVGENTTISVTVKGLAENSLDSLVFESLIPKPILQRYVSLLIEHRRIILSGPSGTGKTYLANRLSEYIVLREGRELTDGVIATFNVDHKSSKELRQYLSNLADQCNSENNAVDMPLVIILDNLHHVSSLGEIFNGLLNCKYHKCPYIIGTMNQATSSTPNLQLHHNFRWVLCANHTEPVKGFLGRFLRRKLMETEISGRVRNMELVKIIDWIPKVWHHLNRFLEAHSSSDVTIGPRLFLSCPIDVDGSRVWFTDLWNYSIIPYLLEAVREGLQLYGRRAPWEDPAKWVMDTYPWAASPQQHEWPPLLQLRPEDVGFDGYSMPREGSTSKQMPPSDAEGDPLMNMLMRLQEAANYSSPQSYDSDSNSNSHHDDILDSSLESTL

SEQ ID NO: 1774 - protein, 2488 aa, Homo sapiens
MPAILVASKMKSGLPKPVHSAAPILHVPPARAGPQPCYLKLGSKVEVSKTTYPSQIPLKSQVLQGLQEPAGEGLPLRKSGSVENGFDTQIYTDWANHYLAKSGHKRLIRDLQQDVTDGVLLAQIIQVVANEKIEDINGCPKNRSQMIENIDACLNFLAAKGINIQGLSAEEIRNGNLKAILGLFFSLSRYKQQQQQPQKQHLSSPLPPAVSQVAGAPSQCQAGTPQQQVPVTPQAPCQPHQPAPHQQSKAQAEMQSSASSKDSSQSKIIRFTLGQKKISRLPGPTARVSAAGSEAKTRGGSTTANNRRSQSFNNYDKSKPVTSPPPPPSSHEKEPLASSASSHPGMSDNAPASLESGSSSTPTNCSTSSAIPQPGAATKPWRSKSLSVKHSATVSMLSVKPPGPEAPRPTPEAMKPAPNNQKSMLEKLKLFNSKGGSKAGEGPGSRDTSCERLETLPSFEESEELEAASRMLTTVGPASSSPKIALKGIAQRTFSRALTNKKSSLKGNEKEKEKQQREKDKEKSKDLAKRASVTERLDLKEEPKEDPSGAAVPEMPKKSSKIASFIPKGGKLNSAKKEPMAPSHSGIPKPGMKSMPGKSPSAPAPSKEGERSRSGKLSSGLPQQKPQLDGRHSSSSSSLASSEGKGPGGTTLNHSISSQTVSGSVGTTQTTGSNTVSVQLPQPQQQYNHPNTATVAPFLYRSQTDTEGNVTAESSSTGVSVEPSHFTKTGQPALEELTGEDPEARRLRTVKNIADLRQNLEETMSSLRGTQVTHSTLETTFDTNVTTEMSGRSILSLTGRPTPLSWRLGQSSPRLQAGDAPSMGNGYPPRANASRFINTESGRYVYSAPLRRQLASRGSSVCHVDVSDKAGDEMDLEGISMDAPGYMSDGDVLSKNIRTDDITSGYMTDGGLGLYTRRLNRLPDGMAVVRETLQRNTSLGLGDADSWDDSSSVSSGISDTIDNLSTDDINTSSSISSYANTPASSRKNLDVQTDAEKHSQVERNSLWSGDDVKKSDGGSDSGIKMEPGSKWRRNPSDVSDESDKSTSGKKNPVISQTGSWRRGMTAQVGITMPRTKPSAPAGALKTPGTGKTDDAKVSEKGRLSPKASQVKRSPSDAGRSSGDESKKPLPSSSRTPTANANSFGFKKQSGSAAGLAMITASGVTVTSRSATLGKIPKSSALVSRSAGRKSSMDGAQNQDDGYLALSSRTNLQYRSLPRPSKSNSRNGAGNRSSTSSIDSNISSKSAGLPVPKLREPSKTALGSSLPGLVNQTDKEKGISSDNESVASCNSVKVNPAAQPVSSPAQTSLQPGAKYPDVASPTLRRLFGGKPTKQVPIATAENMKNSVVISNPHATMTQQGNLDSPSGSGVLSSGSSSPLYSKNVDLNQSPLASSPSSAHSAPSNSLTWGTNASSSSAVSKDGLGFQSVSSLHTSCESIDISLSSGGVPSHNSSTGLIASSKDDSLTPFVRTNSVKTTLSESPLSSPAASPKFCRSTLPRKQDSDPHLDRNTLPKKGLRYTPTSQLRTQEDAKEWLRSHSAGGLQDTAANSPFSSGSSVTSPSGTRFNFSQLASPTTVTQMSLSNPTMLRTHSLSNADGQYDPYTDSRFRNSSMSLDEKSRTMSRSGSFRDGFEEESWEKSSVDNFVSRLHSSLHFSLPLFHHARYELVHGSSLSLVSSTSSVYSTPEEKCQSEIRKLRRELDASQEKVSALTTQLTANAHLVAAFEQSLGNMTIRLQSLTMTAEQKDSELNELRKTIELLKKQNAAAQAAINGVINTPELNCKGNGTAQSADLRIRRQHSSDSVSSINSATSHSSVGSNIESDSKKKKRKNWVNELRSSFKQAFGKKKSPKSASSHSDIEEMTDSSLPSSPKLPHNGSTGSTPLLRNSHSNSLISECMDSEAETVMQLRNELRDKEMKLTDIRLEALSSAHQLDQLREAMNRMQSEIEKLKAENDRLKSESQGSGCSRAPSQVSISASPRQSMGLSQHSLNLTESTSLDMLLDDTGECSARKEGGRHVKIVVSFQEEMKWKEDSRPHLFLIGCIGVSGKTKWDVLDGVVRRLFKEYIIHVDPVSQLGLNSDSVLGYSIGEIKRSNTSETPELLPCGYLVGENTTISVTVKGLAENSLDSLVFESLIPKPILQRYVSLLIEHRRIILSGPSGTGKTYLANRLSEYIVLREGRELTDGVIATFNVDHKSSKELRQYLSNLADQCNSENNAVDMPLVIILDNLHHVSSLGEIFNGLLNCKYHKCPYIIGTMNQATSSTPNLQLHHNFRWVLCANHTEPVKGFLGRFLRRKLMETEISGRVRNMELVKIIDWIPKVWHHLNRFLEAHSSSDVTIGPRLFLSCPIDVDGSRVWFTDLWNYSIIPYLLEAVREGLQLYGRRAPWEDPAKWVMDTYPWAASPQQHEWPPLLQLRPEDVGFDGYSMPREGSTSKQMPPSDAEGDPLMNMLMRLQEAANYSSPQSYDSDSNSNSHHDDILDSSLESTL

SEQ ID NO: 1775 - protein, 594 aa, Homo sapiens
MKVTLSALDTSESSFTPLVVIELAQDVKEETKEWLKNRIIAKKKDGDNNDDFLTMAECQFIIKHELENLRAKDEKMIPGYPQAKLYPGKSLLRRLLTSGIVIQVFPLHDSEALKKLEDTWYTRFALKYQPIDSIRGYFGETIALYFGFLEYFTFALIPMAVIGLPYYLFVWEDYDKYVIFASFNLIWSTVILELWKRGCANMTYRWGTLLMKRKFEEPRPGFHGVLGINSITGKEEPLYPSYKRQLRIYLVSLPFVCLCLYFSLYVMMIYFDMEVWALGLHENSGSEWTSVLLYVPSIIYAIVIEIMNRLYRYAAEFLTSWENHRLESAYQNHLILKVLVFNFLNCFASLFYIAFVLKDMKLLRQSLATLLITSQILNQIMESFLPYWLQRKHGVRVKRKVQALKADIDATLYEQVILEKEMGTYLGTFDDYLELFLQFGYVSLFSCVYPLAAAFAVLNNFTEVNSDALKMCRVFKRPFSEPSANIGVWQLAFETMSVISVVTNCALIGMSPQVNAVFPESKADLILIVVAVEHALLALKFILAFAIPDKPRHIQMKLARLEFESLEALKQQQMKLVTENLKEEPMESGKEKAT

SEQ ID NO: 1776 - protein, 673 aa, Homo sapiens
MGQPSLTWMLMVVVASWFITTAATDTSEARTKYNCPARWSWRTPQRGGDTEQGPDEDFTSQGRWCSECHSNATCTEDEAVTTCTCQEGFTGDGLTCVDLDECAIPGAHNCSANSSCVNTPGSFSCVCPEGFRLSPGLGCTDVDECAEPGLSHCHALATCVNVVGSYLCVCPAGYRGDGWHCECSPGSCGPGLDCVPEGDALVCADPCQAHRTLDEYWRSTEYGEGYACDTDLRGWYRFVGQGGARMAETCVPVLRCNTAAPMWLNGTHPSSDEGIVSRKACAHWSGHCCLWDASVQVKACAGGYYVYNLTAPPECHLAYCTDPSSVEGTCEECSIDEDCKSNNGRWHCQCKQDFNITDISLLEHRLECGANDMKVSLGKCQLKSLGFDKVFMYLSDSRCSGFNDRDNRDWVSVVTPARDGPCGTVLTRNETHATYSNTLYLADEIIIRDLNIKINFACSYPLDMKVSLKTALQPMVSALNIRVGGTGMFTVRMALFQTPSYTQPYQGSSVTLSTEAFLYVGTMLDGGDLSRFALLMTNCYATPSSNATDPLKYFIIQDRCPHTRDSTIQVVENGESSQGRFSVQMFRFAGNYDLVYLHCEVYLCDTMNEKCKPTCSGTRFRSGSVIDQSRVLNLGPITRKGVQATVSRAFSSLGLLKVWLPLLLSATLTLTFQ

SEQ ID NO: 1777 - protein, 689 aa, Homo sapiens
MRHIMTRLTLPFWLQDTRHQRQREKFKGPTRLSFGQVLSRPEVAGRAERMGQPSLTWMLMVVVASWFITTAATDTSEARWCSECHSNATCTEDEAVTTCTCQEGFTGDGLTCVDLDECAIPGAHNCSANSSCVNTPGSFSCVCPEGFRLSPGLGCTDVDECAEPGLSHCHALATCVNVVGSYLCVCPAGYRGDGWHCECSPGSCGPGLDCVPEGDALVCADPCQAHRTLDEYWRSTEYGEGYACDTDLRGWYRFVGQGGARMAETCVPVLRCNTAAPMWLNGTHPSSDEGIVSRKACAHWSGHCCLWDASVQVKACAGGYYVYNLTAPPECHLAYCTDPSSVEGTCEECSIDEDCKSNNGRWHCQCKQDFNITDISLLEHRLECGANDMKVSLGKCQLKSLGFDKVFMYLSDSRCSGFNDRDNRDWVSVVTPARDGPCGTVLTRNETHATYSNTLYLADEIIIRDLNIKINFACSYPLDMKVSLKTALQPMVSALNIRVGGTGMFTVRMALFQTPSYTQPYQGSSVTLSTEAFLYVGTMLDGGDLSRFALLMTNCYATPSSNATDPLKYFIIQDRCPHTRDSTIQVVENGESSQGRFSVQMFRFAGNYDLVYLHCEVYLCDTMNEKCKPTCSGTRFRSGSVIDQSRVLNLGPITRKGVQATVSRAFSSLGLLKVWLPLLLSATLTLTFQ

SEQ ID NO: 1778 - protein, 427 aa, Homo sapiens
MTLVTAGGAWTGPGCWHEVKDEESSSEQSISIAVSHVNTSKAGLPAQTALPCDICGPILKDILHLDEHQGTHHGLKLHTCGACGRQFWFSANLHQYQKCYSIEQPLRRDKSEASIVKNCTVSKEPHPSEKPFTCKEEQKNFQATLGGCQQKAIHSKRKTHRSTESGDAFHGEQMHYKCSECGKAFSRKDTLVQHQRIHSGEKPYECSECGKAFSRKATLVQHQRIHTGERPYECSECGKTFSRKDNLTQHKRIHTGEMPYKCNECGKYFSHHSNLIVHQRVHNGARPYKCSDCGKVFRHKSTLVQHESIHTGENPYDCSDCGKSFGHKYTLIKHQRIHTESKPFECIECGKFFSRSSDYIAHQRVHTGERPFVCSKCGKDFIRTSHLVRHQRVHTGERPYECSECGKAYSLSSHLNRHQKVHTAGRL

SEQ ID NO: 1779 - protein, 769 aa, Homo sapiens
MTDAGNRKEGFKKCRSATFSIDGYSFTIVANEAGDKNARPLARFSRSKSQNCLWNSLIDGLTGNVKEKPRPTIVHDPRPPEEILADELPQLDSPEVLVKTSFRLRSLVKQLERGEASVVDLKKNLEYAATVLESVYIDETRRLLDTEDELSDIQSDAVPSEVRDWLASTFTRQMGMMLRRSDEKPRFKSIVHAVQAGIFVERMYRRTSNMVGLSYPPAVIEALKDVDKWSFDVFSLNEASGDHALKFIFYELLTRYDLISRFKIPISALVSFVEALEVGYSKHKNPYHNLMHAADVTQTVHYLLYKTGVANWLTELEIFAIIFSAAIHDYEHTGTTNNFHIQTRSDPAILYNDRSVLENHHLSAAYRLLQDDEEMNILINLSKDDWREFRTLVIEMVMATDMSCHFQQIKAMKTALQQPEAIEKPKALSLMLHTADISHPAKAWDLHHRWTMSLLEEFFRQGDREAELGLPFSPLCDRKSTMVAQSQVGFIDFIVEPTFTVLTDMTEKIVSPLIDETSQTGGTGQRRSSLNSISSSDAKRSGVKTSGSEGSAPINNSVISVDYKSFKATWTEVVHINRERWRAKVPKEEKAKKEAEEKARLAAEEQQKEMEAKSQAEEGASGKAEKKTSGETKNQVNGTRANKSDNPRGKNSKAEKSSGEQQQNGDFKDGKNKTDKKDHSNIGNDSKKTDGTKQRSHGSPAPSTSSTCRLTLPVIKPPLRHFKRPAYASSSYAPSVSKKTDEHPARYKMLDQRIKMKKIQNISHNWNRK

SEQ ID NO: 1780 - protein, 474 aa, Homo sapiens
MPKVKALQCALALEISSVTCPGVVLKDKEDIYLSICVFGQYKKTQCVPATFPLVFNARMVFEKVFPDAVDPGDVVTQLELGETLSTYDENTRDFMFPGPNQMSGHHDSNRQVTMRRISGLRGNAPRLEFSTTSVITECLISSRKCHTQDKFIYHLAPVEKSHGRLQNRTSRSQKKKSKSPERSKYCINAKNYEQPTISSKSHSPSPYTKRRMCELSEDTRRRLAHLNLGPYEFKKETDKPPFVIRHVDPPSPRADTLLGSSGRDCERDGWSRVHNDHSHLGCCRPKDYKVIRTPHGRDFDDSLEKCEEYLSPRSCSKPRHSARTLLVHSAPSTMPKHSPSPVLNRASLRERFHSDWCSPSNCDEIHDRVKNVLKSHQAHQRHLYDERDLEKDDELELKRSLLCRDSAYDSDPEYSSCQQPRGTFHLDDGEYWSNRAASYKGKSHRPIFENSMDKMYRNLYKKACSSASHTQESF

SEQ ID NO: 1781 - protein, 729 aa, Homo sapiens
MFPPSGSTGLIPPSHFQARPLSTLPRMAPTWLSDIPLVQPPGHQDVSERRLDTQRPQVTMWERDVSSDRQEPGRRGRSWGLEGSQALSQQAEVIVRQLQELRRLEEEVRLLRETSLQQKMRLEAQAMELEALARAEKAGRAEAEGLRAALAGAEVVRKNLEEGSQRELEEVQRLHQEQLSSLTQAHEEALSSLTSKAEGLEKSLSSLETRRAGEAKELAEAQREAELLRKQLSKTQEDLEAQVTLVENLRKYVGEQVPSEVHSQTWELERQKLLETMQHLQEDRDSLHATAELLQVRVQSLTHILALQEEELTRKVQPSDSLEPEFTRKCQSLLNRWREKVFALMVQLKAQELEHSDSVKQLKGQVASLQEKVTSQSQEQAILQRSLQDKAAEVEVERMGAKGLQLELSRAQEARRRWQQQTASAEEQLRLVVNAVSSCPLPPPVTDVSLELQQLREERNRLDAELQLSARLIQQEVGRAREQGEAERQQLSKVAQQLEQELQQTQESLASLGLQLEVARQGQQESTEEAASLRQELTQQQELYGQALQEKVAEVETRLREQLSDTERRLNEARREHAKAVVSLRQIQRRAAQEKERSQELRRLQEEARKEEGQRLARRLQELERDKNLMLATLQQEGLLSRYKQQRLLTVLPSLLDKKKSVVSSPRPPECSASAPVAAAVPTRESIKGSLSVLLDDLQDLSEAISKEEAVCQGDNLDRCSSSNPQMSS

SEQ ID NO: 1782 - protein, 871 aa, Homo sapiens
MWPHSAGARPWASTLTGKDPRVMACWCLDGLPSGLAEPWRELWRWRSRPLHCVPPFSPLARSSRDHRNLRRRGNIDGWRQNLEPSNNVEMFPPSGSTGLIPPSHFQARPLSTLPRMAPTWLSDIPLVQPPGHQDVSERRLDTQRPQVTMWERDVSSDRQEPGRRGRSWGLEGSQALSQQAEVIVRQLQELRRLEEEVRLLRETSLQQKMRLEAQAMELEALARAEKAGRAEAEGLRAALAGAEVVRKNLEEGSQRELEEVQRLHQEQLSSLTQAHEEALSSLTSKAEGLEKSLSSLETRRAGEAKELAEAQREAELLRKQLSKTQEDLEAQVTLVENLRKYVGEQVPSEVHSQTWELERQKLLETMQHLQEDRDSLHATAELLQVRVQSLTHILALQEEELTRKVQPSDSLEPEFTRKCQSLLNRWREKVFALMVQLKAQELEHSDSVKQLKGQVASLQEKVTSQSQEQAILQRSLQDKAAEVEVERMGAKGLQLELSRAQEARRRWQQQTASAEEQLRLVVNAVSSSQIWLETTMAKVEGAAAQLPSLNNRLSYAVRKVHTIRGLIARKLALAQLRQESCPLPPPVTDVSLELQQLREERNRLDAELQLSARLIQQEVGRAREQGEAERQQLSKVAQQLEQELQQTQESLASLGLQLEVARQGQQESTEEAASLRQELTQQQELYGQALQEKVAEVETRLREQLSDTERRLNEARREHAKAVVSLRQIQRRAAQEKERSQELRRLQEEARKEEGQRLARRLQELERDKNLMLATLQQEGLLSRYKQQRLLTVLPSLLDKKKSVVSSPRPPECSASAPVAAAVPTRESIKGSLSVLLDDLQDLSEAISKEEAVCQGDNLDRCSSSNPQMSS

SEQ ID NO: 1783 - protein, 205 aa, Homo sapiens
MSNVRVSNGSPSLERMDARQAEHPKPSACRNLFGPVDHEELTRDLEKHCRDMEEASQRKWNFDFQNHKPLEGKYEWQEVEKGSLPEFYYRPPRPPKGACKVPAQESQDVSGSRPAAPLIGAPANSEDTHLVDPKTDPSDSQTGLAEQCAGIRKRPATDDTSLLDEARKIYMKILKIHIADFMEWTSCISTEKQQHNNTKILGTLK

SEQ ID NO: 1784 - protein, 247 aa, Homo sapiens
MPASSPFLLAPKGPPGNMGGPVREPALSVALWLSWGAALGAVACAMALLTQQTELQSLRREVSRLQGTGGPSQNGEGYPWQSLPEQSSDALEAWENGERSRKRRAVLTQKQKKQHSVLHLVPINATSKDDSDVTEVMWQPALRRGRGLQAQGYGVRIQDAGVYLLYSQVLFQDVTFTMGQVVSREGQGRQETLFRCIRSMPSHPDRAYNSCYSAGVFHLHQGDILSVIIPRARAKLNLSPHGTFLGL

SEQ ID NO: 1785 - protein, 1670 aa, Homo sapiens
MSARTAPRPQVLLLPLLLVLLAAAPAASKGCVCKDKGQCFCDGAKGEKGEKGFPGPPGSPGQKGFTGPEGLPGPQGPKGFPGLPGLTGSKGVRGISGLPGFSGSPGLPGTPGNTGPYGLVGVPGCSGSKGEQGFPGLPGTLGYPGIPGAAGLKGQKGAPAKEEDIELDAKGDPGLPGAPGPQGLPGPPGFPGPVGPPGPPGFFGFPGAMGPRGPKGHMGERVIGHKGERGVKGLTGPPGPPGTVIVTLTGPDNRTDLKGEKGDKGAMGEPGPPGPSGLPGESYGSEKGAPGDPGLQGKPGKDGVPGFPGSEGVKGNRGFPGLMGEDGIKGQKGDIGPPGFRGPTEYYDTYQEKGDEGTPGPPGPRGARGPQGPSGPPGVPGSPGSSRPGLRGAPGWPGLKGSKGERGRPGKDAMGTPGSPGCAGSPGLPGSPGPPGPPGDIVFRKGPPGDHGLPGYLGSPGIPGVDGPKGEPGLLCTQCPYIPGPPGLPGLPGLHGVKGIPGRQGAAGLKGSPGSPGNTGLPGFPGFPGAQGDPGLKGEKGETLQPEGQVGVPGDPGLRGQPGRKGLDGIPGTPGVKGLPGPKGELALSGEKGDQGPPGDPGSPGSPGPAGPAGPPGYGPQGEPGLQGTQGVPGAPGPPGEAGPRGELSVSTPVPGPPGPPGPPGHPGPQGPPGIPGSLGKCGDPGLPGPDGEPGIPGIGFPGPPGPKGDQGFPGTKGSLGCPGKMGEPGLPGKPGLPGAKGEPAVAMPGGPGTPGFPGERGNSGEHGEIGLPGLPGLPGTPGNEGLDGPRGDPGQPGPPGEQGPPGRCIEGPRGAQGLPGLNGLKGQQGRRGKTGPKGDPGIPGLDRSGFPGETGSPGIPGHQGEMGPLGQRGYPGNPGILGPPGEDGVIGMMGFPGAIGPPGPPGNPGTPGQRGSPGIPGVKGQRGTPGAKGEQGDKGNPGPSEISHVIGDKGEPGLKGFAGNPGEKGNRGVPGMPGLKGLKGLPGPAGPPGPRGDLGSTGNPGEPGLRGIPGSMGNMGMPGSKGKRGTLGFPGRAGRPGLPGIHGLQGDKGEPGYSEGTRPGPPGPTGDPGLPGDMGKKGEMGQPGPPGHLGPAGPEGAPGSPGSPGLPGKPGPHGDLGFKGIKGLLGPPGIRGPPGLPGFPGSPGPMGIRGDQGRDGIPGPAGEKGETGLLRAPPGPRGNPGAQGAKGDRGAPGFPGLPGRKGAMGDAGPRGPTGIEGFPGPPGLPGAIIPGQTGNRGPPGSRGSPGAPGPPGPPGSHVIGIKGDKGSMGHPGPKGPPGTAGDMGPPGRLGAPGTPGLPGPRGDPGFQGFPGVKGEKGNPGFLGSIGPPGPIGPKGPPGVRGDPGTLKIISLPGSPGPPGTPGEPGMQGEPGPPGPPGNLGPCGPRGKPGKDGKPGTPGPAGEKGNKGSKGEPGPAGSDGLPGLKGKRGDSGSPATWTTRGFVFTRHSQTTAIPSCPEGTVPLYSGFSFLFVQGNQRAHGQDLGTLGSCLQRFTTMPFLFCNVNDVCNFASRNDYSYWLSTPALMPMNMAPITGRALEPYISRCTVCEGPAIAIAVHSQTTDIPPCPHGWISLWKGFSFIMFTSAGSEGTGQALASPGSCLEEFRASPFLECHGRGTCNYYSNSYSFWLASLNPERMFRKPIPSTVKAGELEKIISRCQVCMKKRH

SEQ ID NO: 1786 - protein, 535 aa, Homo sapiens
MGQGPRSPHKVGRRFPAGGKRGRGAKGSGRPLPGRKRQPWPPPDGRSEPAPDSHPHLSPEALGYFRRALSALKEAPETGEERDLMVHNIMKEVETQALALSTNRTGSEMLQELLGFSPLKPLCRVWAALRSNLRTVACHRCGVHVLQSALLQLPRLLGSAAEEEEEEEEDGKDGPTETLEELVLGLAAEVCDDFLVYCGDTHGSFVVRTLLQVLGGTILESERARPRGSQSSEAQKTPAQECKPADFEVPETFLNRLQDLSSSFLKDIAVFITDKISSFCLQVALQVLHRKLPQFCAHLCNAVIGYLSTRGSSVDGSPLLLFLRDQTSSRLLEQVLLVLEPPRLQSLFEEHLQGQLQTLAAHPIANFPLQRLLDAVTTPELLSPVFEELSPVLEAVLAQGHPGVVIALVGACRRVGAYQAKVLQLLLEAFHCAEPSSRQVACVPLFATLMAYEVYYGLTEEEGAVPAEHQVAMAAARALGDVTVLGSLLLQHLLHFSTPGLVLRSLGALTGPQLLSLAQRPGRKLLLSLGSRTRS

SEQ ID NO: 1787 - protein, 316 aa, Homo sapiens
MENVTTMNEFLLLGLTGVQELQPFFFGIFLIIYLINLIGNGSILVMVVLEPQLHSPMYFFLGNLSCLDISYSSVTLPKLLVNLVCSRRAISFLGCITQLHFFHFLGSTEAILLAIMAFDRFVAICNPLRYTVIMNPQVCILLAAAAWLISFFYALMHSVMTAHLSFCGSQKLNHFFYDVKPLLELACSDTLLNQWLLSIVTGSISMGAFFLTLLSCFYVIGFLLFKNRSCRILHKALSTCASHFMVVCLFYGPVGFTYIRPASATSMIQDRIMAIMYSAVTPVLNPLIYTLRNKEVMMALKKIFGRKLFKDWQQHH

SEQ ID NO: 1788 - protein, 347 aa, Homo sapiens
MASGILVNVKEEVTCPICLELLTQPLSLDCGHSFCQACLTANHKKSMLDKGESSCPVCRISYQPENIRPNRHVANIVEKLREVKLSPEGQKVDHCARHGEKLLLFCQEDGKVICWLCERSQEHRGHHTFLTEEVAREYQVKLQAALEMLRQKQQEAEELEADIREEKASWKTQIQYDKTNVLADFEQLRDILDWEESNELQNLEKEEEDILKSLTNSETEMVQQTQSLRELISDLEHRLQGSVMELLQGVDGVIKRTENVTLKKPETFPKNQRRVFRAPDLKGMLEVFRELTDVRRYWGKEKSHYHKPPCGLSLLLSLSFRILCSLLGSCFKIYDSPSKTHITYPSL

SEQ ID NO: 1789 - protein, 562 aa, Homo sapiens
MIQSDKGADPPDKKDMKLSTATNPQNGLSQILRLVLQELSLFYGRDVNGVCLLYDLLHSPWLQALLKIYDCLQEFKEKKLVPATPHAQVLSYEVVELLRETPTSPEIQELRQMLQAPHFKGATIKRHEMTGDILVARIIHGGLAERSGLLYAGDKLVEVNGVSVEGLDPEQVIHILAMSRGTIMFKVVPVSDPPVNSQQMVYVRAMTEYWPQEDPDIPCMDAGLPFQKGDILQIVDQNDALWWQARKISDPATCAGLVPSNHLLKRKQREFWWSQPYQPHTCLKSTLYKEEFVGYGQKFFIAGFRRSMRLCRRKSHLSPLHASVCCTGSCYSAVGAPYEEVVRYQRRPSDKYRLIVLMGPSGVGVNELRRQLIEFNPSHFQSAVPHTTRTKKSYEMNGREYHYVSKETFENLIYSHRMLEYGEYKGHLYGTSVDAVQTVLVEGKICVMDLEPQDIQGVRTHELKPYVIFIKPSNMRCMKQSRKNAKVITDYYVDMKFKDEDLQEMENLAQRMETQFGQFFDHVIVNDSLHDACAQLLSAIQKAQEEPQWVPATWISSDTESQ

SEQ ID NO: 1790 - protein, 511 aa, Homo sapiens
MEGNKLEEQDSSPPQSTPGLMKGNKREEQGLGPEPAAPQQPTAEEEALIEFHRSYRELFEFFCNNTTIHGAIRLVCSQHNRMKTAFWAVLWLCTFGMMYWQFGLLFGEYFSYPVSLNINLNSDKLVFPAVTICTLNPYRYPEIKEELEELDRITEQTLFDLYKYSSFTTLVAGSRSRRDLRGTLPHPLQRLRVPPPPHGARRARSVASSLRDNNPQVDWKDWKIGFQLCNQNKSDCFYQTYSSGVDAVREWYRFHYINILSRLPETLPSLEEDTLGNFIFACRFNQVSCNQANYSHFHHPMYGNCYTFNDKNNSNLWMSSMPGINNGLSLMLRAEQNDFIPLLSTVTGARVMVHGQDEPAFMDDGGFNLRPGVETSISMRKETLDRLGGDYGDCTKNGSDVPVENLYPSKYTQQVCIHSCFQESMIKECGCAYIFYPRPQNVEYCDYRKHSSWGYCYYKLQVDFSSDHLGCFTKCRKPCRNGSSRCYRDRTITPSTTREMEWPKSTSSSRS

SEQ ID NO: 1791 - protein, 325 aa, Homo sapiens
MGPRARPALLLLMLLQTAVLQGRLLPLGYVDDQLFVFYDHESRRVEPRTPWVSSRISSQMWLQLSQSLKGWDHMFTVDFWTIMENHNHSKESHTLQVILGCEMQEDNSTEGYWKYGYDGQDHLEFCPDTLDWRAAEPRAWPTKLEWERHKIRARQNRAYLERDCPAQLQQLLELGRGVLDQQVPPLVKVTHHVTSSVTTLRCRALNYYPQNITMKWLKDKQPMDAKEFEPKDVLPNGDGTYQGWITLAVPPGEEQRYTCQVEHPGLDQPLIVIWEPSPSGTLVIGVISGIAVFVVILFIGILFIILRKRQGSRGAMGHYVLAERE

SEQ ID NO: 1792 - protein, 40 aa, Homo sapiens
MGETLGDSPIDPESDSFTDTLSANISQVFQDDSCLWMSLS

SEQ ID NO: 1793 - protein, 711 aa, Homo sapiens
MSSVQSQQEQLSQSDPSPSPNSCSSFELIDMDAGSLYEPVSPHWFYCKIIDSKETWIPFNSEDSQQLEEAYSSGKGCNGRVVPTDGGRYDVHLGERMRYAVYWDELASEVRRCTWFYKGDKDNKYVPYSESFSQVLEETYMLAVTLDEWKKKLESPNREIIILHNPKLMVHYQPVAGSDDWGSTPTEQGRPRTVKRGVENISVDIHCGEPLQIDHLVFVVHGIGPACDLRFRSIVQCVNDFRSVSLNLLQTHFKKAQENQQIGRVEFLPVNWHSPLHSTGVDVDLQRITLPSINRLRHFTNDTILDVFFYNSPTYCQTIVDTVASEMNRIYTLFLQRNPDFKGGVSIAGHSLGSLILFDILTNQKDSLGDIDSEKDSLNIVMDQGDTPTLEEDLKKLQLSEFFDIFEKEKVDKEALALCTDRDLQEIGIPLGPRKKILNYFSTRKNSMGIKRPAPQPASGANIPKESEFCSSSNTRNGDYLDVGIGQVSVKYPRLIYKPEIFFAFGSPIGMFLTVRGLKRIDPNYRFPTCKGFFNIYHPFDPVAYRIEPMVVPGVEFEPMLIPHHKGRKRMHLELREGLTRMSMDLKNNLLGSLRMAWKSFTRAPYPALQASETPEETEAEPESTSEKPSDVNTEETSVAVKEEVLPINVGMLNGGQRIDYVLQEKPIESFNEYLFALQSHLCYWESEDTVLLVLKEIYQTQGIFLDQPLQ

SEQ ID NO: 1794 - protein, 643 aa, Homo sapiens
MSPFLRIGLSNFDCGSCQSCQGEAVNPYCAVLVKEYVESENGQMYIQKKPTMYPPWDSTFDAHINKGRVMQIIVKGKNVDLISETTVELYSLAERCRKNNGKTEIWLELKPQGRMLMNARYFLEMSDTKDMNEFETEGFFALHQRRGAIKQAKVHHVKCHEFTATFFPQPTFCSVCHEFVWGLNKQGYQCRQCNAAIHKKCIDKVIAKCTGSAINSRETMFHKERFKIDMPHRFKVYNYKSPTFCEHCGTLLWGLARQGLKCDACGMNVHHRCQTKVANLCGINQKLMAEALAMIESTQQARCLRDTEQIFREGPVEIGLPCSIKNEARPPCLPTPGKREPQGISWESPLDEVDKMCHLPEPELNKERPSLQIKLKIEDFILHKMLGKGSFGKVFLAEFKKTNQFFAIKALKKDVVLMDDDVECTMVEKRVLSLAWEHPFLTHMFCTFQTKENLFFVMEYLNGGDLMYHIQSCHKFDLSRATFYAAEIILGLQFLHSKGIVYRDLKLDNILLDKDGHIKIADFGMCKENMLGDAKTNTFCGTPDYIAPELFVREPEKRLGVRGDIRQHPLFREINWEELERKEIDPPFRPKVKSPFDCSNFDKEFLNEKPRLSFADRALINSMDQNMFRNFSFMNPGMERLIS

SEQ ID NO: 1795 - protein, 218 aa, Homo sapiens
MGLSTVPDLLLPLVLLELLVGIYPSGVIGLVPHLGDREKRDSVCPQGKYIHPQNNSICCTKCHKGTYLYNDCPGPGQDTDCRECESGSFTASENHLRHCLSCSKCRKEMGQVEISSCTVDRDTVCGCRKNQYRHYWSENLFQCFNCSLCLNGTVHLSCQEKQNTVCTCHAGFFLRENECVSCSKVLLCRPGWNAVARSRLTATSASQIQAILLLQPPK

SEQ ID NO: 1796 - protein, 172 aa, Homo sapiens
MSVEHADIWVKSYSLYSRERYICNSGFKRKAGTSSLTECVLNKATNVAHWTTPSLKCIKPAASSPSSNNTAATTAAIVPGSQLMPSKSPSTGTTEISSHESSHGTPSQTTAKNWELTASASHQPPGVYPQGHSDTTVAISTSTVLLCGLSAVSLLACYLKSRQTPPLASVEM

SEQ ID NO: 1797 - protein, 353 aa, Homo sapiens
MRLAGRQVPEQRSPPPPGLGSARPGSPAVSCGAAAMAPRRARGCRTLGLPALLLLLLLRPPATRDARDRLAVLAGRSRISESFNHEVQTHEACVRLRTMENCPQCHHHRTSRQQAGITCPPPMSVEHADIWVKSYSLYSRERYICNSGFKRKAGTSSLTECVLNKATNVAHWTTPSLKCIRDPALVHQRPAPPSTVTTAGVTPQPESLSPSGKEPAASSPSSNNTAATTAAIVPGSQLMPSKSPSTGTTEISSHESSHGTPSQTTAKNWELTASASHQPPGVYPQGHSDTTVAISTSTVLLCGLSAVSLLACYLKSRQTPPLASVEMEAMEALPVTWGTSSRDEDLENCSHHL

SEQ ID NO: 1798 - protein, 169 aa, Homo sapiens
MAPRRARGCRTLGLPALLLLLLLRPPATREPAASSPSSNNTAATTAAIVPGSQLMPSKSPSTGTTEISSHESSHGTPSQTTAKNWELTASASHQPPGVYPQGHSDTTVAISTSTVLLCGLSAVSLLACYLKSRQTPPLASVEMEAMEALPVTWGTSSRDEDLENCSHHL

SEQ ID NO: 1799 - protein, 308 aa, Homo sapiens
MAPRRARGCRTLGLPALLLLLLLRPPATRDARDRLAVLAGRSRISESFNHEVQTHEACVRLRTMENCPQCHHHRTSRQQAGITCPPPMSVEHADIWVKSYSLYSRERYICNSGFKRKAGTSSLTECVLNKATNVAHWTTPSLKCIRDPALVHQRPAPPSTVTTAGVTPQPESLSPSGKEPAASSPSSNNTAATTAAIVPGSQLMPSKSPSTGTTEISSHESSHGTPSQTTAKNWELTASASHQPPGVYPQGHSDTTVAISTSTVLLCGLSAVSLLACYLKSSLDAFIKIRGGFSTWLLGLPHSTVGSG

SEQ ID NO: 1800 - protein, 252 aa, Homo sapiens
MAPRRARGCRTLGLPALLLLLLLRPPATRGITCPPPMSVEHADIWVKSYSLYSRERYICNSGFKRKAGTSSLTECVLNKATNVAHWTTPSLKCIRDPALVHQRPAPPSTVTTAGVTPQPESLSPSGKEPAASSPSSNNTAATTAAIVPGSQLMPSKSPSTGTTEISSHESSHGTPSQTTAKNWELTASASHQPPGVYPQGHSDTTVAISTSTVLLCGLSAVSLLACYLKSRASVCSCHPRSAGHTCSVGSVC

SEQ ID NO: 1801 - protein, 849 aa, Homo sapiens
MLWALWPRWLADKMLPLLGAVLLQKREKRGPLWRHWRRETYPYYDLQVKVLRATNIRGTDLLSKADCYVQLWLPTASPSPAQTRIVANCSDPEWNETFHYQIHGAVKNVLELTLYDKDILGSDQLSLLLFDLRSLKCGQPHKHTFPLNHQDSQELQVEFVLEKSQVPASEVITNGVLVAHPCLRIQGTLRGDGTAPREEYGSRQLQLAVPGAYEKPQLLPLQPPTEPGLPPTFTFHVNPVLSSRLHVELMELLAAVQSGPSAELEAQTSKLGEGGILLSSLPLGQEEQCSVALGEGQEVALSMKVEMSSGDLDLRLGFDLSDGEQEFLDRRKQVVSKALQQVLGLSEALDSGQVPVVAVLGSGGGTRAMSSLYGSLAGLQELGLLDTVTYLSGVSGSTWCISTLYRDPAWSQVALQGPIERAQVHVCSSKMGALSTERLQYYTQELGVRERSGHSVSLIDLWGLLVEYLLYQEENPAKLSDQQEAVRQGQNPYPIYTSVNVRTNLSGEDFAEWCEFTPYEVGFPKYGAYVPTELFGSELFMGRLLQLQPEPRICYLQGMWGSAFATSLDEIFLKTAGSGLSFLEWYRGSVNITDDCQKPQLHNPSRLRTRLLTPQGPFSQAVLDIFTSRFTSAQSFNFTRGLCLHKDYVAGREFVAWKDTHPDAFPNQLTPMRDCLYLVDGGFAINSPFPLALLPQRAVDLILSFDYSLEAPFEVLKMTEKYCLDRGIPFPSIEVGPEDMEEARECYLFAKAEDPRSPIVLHFPLVNRTFRTHLAPGVERQTAEEKAFGDFVINRPDTPYGMMNFTYEPQDFYRLVALSRYNVLNNVETLKCALQLALDRHQARERAGA

SEQ ID NO: 1802 - protein, 2022 aa, Homo sapiens
MSVKEAGSSGRREQAAYHLHIYPQLSTTESQASCRVTATKDSTTSDVIKDAIASLRLDGTKCYVLVEVKESGGEEWVLDANDSPVHRVLLWPRRAQDEHPQEDGYYFLLQERNADGTIKYVHMQLVAQATATRRLVERGLLPRQQADFDDLCNLPELTEGNLLKNLKHRFLQQKIYTYAGSILVAINPFKFLPIYNPKYVKMYENQQLGKLEPHVFALADVAYYTMLRKRVNQCIVISGESGSGKTQSTNFLIHCLTALSQKGYASGVERTILGAGPVLEAFGNAKTAHNNNSSRFGKFIQVSYLESGIVRGAVVEKYLLEKSRLVSQEKDERNYHVFYYLLLGVSEEERQEFQLKQPEDYFYLNQHNLKIEDGEDLKHDFERLKQAMEMVGFLPATKKQIFAVLSAILYLGNVTYKKRATGREEGLEVGPPEVLDTLSQLLKVKREILVEVLTKRKTVTVNDKLILPYSLSEAITARDSMAKSLYSALFDWIVLRINHALLNKKDVEEAVSCLSIGVLDIFGFEDFERNSFEQFCINYANEQLQYYFNQHIFKLEQEEYQGEGITWHNIGYTDNVGCIHLISKKPTGLFYLLDEESNFPHATSQTLLAKFKQQHEDNKYFLGTPVMEPAFIIQHFAGKVKYQIKDFREKNMDYMRPDIVALLRGSDSSYVRELIGMDPVAVFRWAVLRAAIRAMAVLREAGRLRAERAEKAAGMSSPGAQSHPEELPRGASTPSEKLYRDLHNQMIKSIKGLPWQGEDPRSLLQSLSRLQKPRAFILKSKGIKQKQIIPKNLLDSKSLKLIISMTLHDRTTKSLLHLHKKKKPPSISAQFQTSLNKLLEALGKAEPFFIRCIRSNAEKKELCFDDELVLQQLRYTGMLETVRIRRSGYSAKYTFQDFTEQFQVLLPKDAQPCREVISTLLEKMKIDKRNYQIGKTKVFLKETERQALQETLHREVVRKILLLQSWFRMVLERRHFLQMKRAAVTIQACWRSYRVRRALERTQAAVYLQASWRGYWQRKLYRHQKQSIIRLQSLCRGHLQRKSFSQMISEKQKAEEKEREALEAARAGAEEGGQGQAAGGQQVAEQGPEPAEDGGHLASEPEVQPSDRSPLEHSSPEKEAPSPEKTLPPQKTVAAESHEKVPSSREKRESRRQRGLEHVKFQNKHIQSCKEESALREPSRRVTQEQGVSLLEDKKESREDETLLVVETEAENTSQKQPTEQPQAMAVGKVSEETEKTLPSGSPRPGQLERPTSLALDSRVSPPAPGSAPETPEDKSKPCGSPRVQEKPDSPGGSTQIQRYLDAERLASAVELWRGKKLVAAASPSAMLSQSLDLSDRHRATGAALTPTEERRTSFSTSDVSKLLPSLAKAQPAAETTDGERSAKKPAVQKKKPGDASSLPDAGLSPGSQVDSKSTFKRLFLHKTKDKKYSLEGAEELENAVSGHVVLEATTMKKGLEAPSGQQHRHAAGEKRTKEPGGKGKKNRNVKIGKITVSEKWRESVFRQITNANELKYLDEFLLNKINDLRSQKTPIESLFIEATEKFRSNIKTMYSVPNGKIHVGYKDLMENYQIVVSNLATERGQKDTNLVLNLFQSLLDEFTRGYTKNDFEPVKQSKAQKKKRKQERAVQEHNGHVFASYQVSIPQSCEQCLSYIWLMDKALLCSVCKMTCHKKCVHKIQSHCSYTYGRKGEPGVEPGHFGVCVDSLTSDKASVPIVLEKLLEHVEMHGLYTEGLYRKSGAANRTRELRQALQTDPAAVKLENFPIHAITGVLKQWLRELPEPLMTFAQYGDFLRAVELPEKQEQLAAIYAVLEHLPEANHNSLERLIFHLVKVALLEDVNRMSPGALAIIFAPCLLRCPDNSDPLTSMKDVLKITTCVEMLIKEQMRKYKVKMEEISQLEAAESIAFRRLSLLRQNAPWPLKLGFSSPYEGVLNKSPKTRDIQEEELEVLLEEEAAGGDEDREKEILIERIQSIKEEKEDITYRLPELDPRGSDEENLDSETSASTESLLEERAGRGASEGQY

SEQ ID NO: 1803 - protein, 398 aa, Homo sapiens
MEGAALLRVSVLCIWMSALFLGVGVRAEEAGARVQQNVPSGTDTGDPQSKPLGDWAAGTMDPESSIFIEDAIKYFKEKVSTQNLLLLLTDNEAWNGFVAAAELPRNEADELRKALDNLARQMIMKDKNWHDKGQQYRNWFLKEFPRLKSELEDNIRRLRALADGVQKVHKGTTIANVVSGSLSISSGILTLVGMGLAPFTEGGSLVLLEPGMELGITAALTGITSSTMDYGKKWWTQAQAHDLVIKSLDKLKEVREFLGENISNFLSLAGNTYQLTRGIGKDIRALRRARANLQSVPHASASRPRVTEPISAESGEQVERVNEPSILEMSRGVKLTDVAPVSFFLVLDVVYLVYESKHLHEGAKSETAEELKKVAQELEEKLNILNNNYKILQADQEL

SEQ ID NO: 1804 - protein, 666 aa, Homo sapiens
MALFYVARYPGPDAAAAAGPEGAEAGAHGRARALLERLQSRARERQQQREPAQTEAAASTEPATRRRRRPRRRRRVNDAEPGSPEAPQGKRRKADGEDAGAESNEEAPGEPSAGSSEEAPGEPSAGSSEEAPGERSTSASAEAAPDGPALEEAAGPLVPGLVLGGFGKRKAPKVQPFLPRWLAEPNCVRRNVTEDLVPIEDIPDVHPDLQKQLRAHGISSYFPVQAAVIPALLESAACGFLVGRGGYRPSDLCVSAPTGSGKTLAFVIPVVQALLSRVVCHIRALVVLPTKELAQQVSKVFNIYTDATPLRVSLVTGQKSLAKEQESLVQKTADGYRCLADIVVATPGRLVDHIDQTPGFSLQQLRFLIIDEADRMIDSMHQSWLPRVVAAAFQSEDPADPCALLQRRQAQAVTAASTCCPQMPLQKLLFSATLTQNPEKLQQLGLHQPRLFSTGLAHRGLEDTDGDGDSGKYAFPVGLTHHYVPCSLSSKPLVVLHLVLEMGFSRVLCFTNSRENSHRLFLLVQAFGGVDVAEFSSRYGPGQRRMILKQFEQGKIQLLISTDATARGIDVQGVELVVNYDAPQYLRTYVHRVGRTARAGKTGQAFTLLLKVQERRFLRMLTEAGAPELQRHELSSKLLQPLVPRYEEALSQLEESVKEERKQRAA

SEQ ID NO: 1805 - protein, 8525 aa, Homo sapiens
MADDEDYEEVVEYYTEEVVYEEVPGETITKIYETTTTRTSDYEQSETSKPALAQPALAQPASAKPVERRKVIRKKVDPSKFMTPYIAHSQKMQDLFSPNKYKEKFEKTKGQPYASTTDTPELRRIKKVQDQLSEVKYRMDGDVAKTICHVDEKAKDIEHAKKVSQQVSKVLYKQNWEDTKDKYLLPPDAPELVQAVKNTAMFSKKLYTEDWEADKSLFYPYNDSPELRRVAQAQKALSDVAYKKGLAEQQAQFTPLADPPDIEFAKKVTNQVSKQKYKEDYENKIKGKWSETPCFEVANARMNADNISTRKYQEDFENMKDQIYFMQTETPEYKMNKKAGVAASKVKYKEDYEKNKGKADYNVLPASENPQLRQLKAAGDALSDKLYKENYEKTKAKSINYCETPKFKLDTVLQNFSSDKKYKDSYLKDILGHYVGSFEDPYHSHCMKVTAQNSDKNYKAEYEEDRGKGFFPQTITQEYEAIKKLDQCKDHTYKVHPDKTKFTQVTDSPVLLQAQVNSKQLSDLNYKAKHESEKFKCHIPPDTPAFIQHKVNAYNLSDNLYKQDWEKSKAKKFDIKVDAIPLLAAKANTKNTSDVMYKKDYEKNKGKMIGVLSINDDPKMLHSLKVAKNQSDRLYKENYEKTKAKSMNYCETPKYQLDTQLKNFSEARYKDLYVKDVLGHYVGSMEDPYHTHCMKVAAQNSDKSYKAEYEEDKGKCYFPQTITQEYEAIKKLDQCKDHTYKVHPDKTKFTAVTDSPVLLQAQLNTKQLSDLNYKAKHEGEKFKCHIPADAPQFIQHRVNAYNLSDNVYKQDWEKSKAKKFDIKVDAIPLLAAKANTKNTSDVMYKKDYEKSKGKMIGALSINDDPKMLHSLKTAKNQSDREYRKDYEKSKTIYTAPLDMLQVTQAKKSQAIASDVDYKHILHSYSYPPDSINVDLAKKAYALQSDVEYKADYNSWMKGCGWVPFGSLEMEKAKRASDILNEKKYRQHPDTLKFTSIEDAPITVQSKINQAQRSDIAYKAKGEEIIHKYNLPPDLPQFIQAKVNAYNISENMYKADLKDLSKKGYDLRTDAIPIRAAKAARQAASDVQYKKDYEKAKGKMVGFQSLQDDPKLVHYMNVAKIQSDREYKKDYEKTKSKYNTPHDMFNVVAAKKAQDVVSNVNYKHSLHHYTYLPDAMDLELSKNMMQIQSDNVYKEDYNNWMKGIGWIPIGSLDVEKVKKAGDALNEKKYRQHPDTLKFTSIVDSPVMVQAKQNTKQVSDILYKAKGEDVKHKYTMSPDLPQFLQAKCNAYNISDVCYKRDWYDLIAKGNNVLGDAIPITAAKASRNIASDYKYKEAYEKSKGKHVGFRSLQDDPKLVHYMNVAKLQSDREYKKNYENTKTSYHTPGDMVSITAAKMAQDVATNVNYKQPLHHYTYLPDAMSLEHTRNVNQIQSDNVYKDEYNSFLKGIGWIPIGSLEVEKVKKAGDALNERKYRQHPDTVKFTSVPDSMGMVLAQHNTKQLSDLNYKVEGEKLKHKYTIDPELPQFIQAKVNALNMSDAHYKADWKKTIAKGYDLRPDAIPIVAAKSSRNIASDCKYKEAYEKAKGKQVGFLSLQDDPKLVHYMNVAKIQSDREYKKGYEASKTKYHTPLDMVSVTAAKKSQEVATNANYRQSYHHYTLLPDALNVEHSRNAMQIQSDNLYKSDFTNWMKGIGWVPIESLEVEKAKKAGEILSEKKYRQHPEKLKFTYAMDTMEQALNKSNKLNMDKRLYTEKWNKDKTTIHVMPDTPDILLSRVNQITMSDKLYKAGWEEEKKKGYDLRPDAIAIKAARASRDIASDYKYKKAYEQAKGKHIGFRSLEDDPKLVHFMQVAKMQSDREYKKGYEKSKTSFHTPVDMLSVVAAKKSQEVATNANYRNVIHTYNMLPDAMSFELAKNMMQIQSDNQYKADYADFMKGIGWLPLGSLEAEKNKKAMEIISEKKYRQHPDTLKYSTLMDSMNMVLAQNNAKIMNEHLYKQAWEADKTKVHIMPDIPQIILAKANAINMSDKLYKLSLEESKKKGYDLRPDAIPIKAAKASRDIASDYKYKYNYEKGKGKMVGFRSLEDDPKLVHSMQVAKMQSDREYKKNYENTKTSYHTPADMLSVTAAKDAQANITNTNYKHLIHKYILLPDAMNIELTRNMNRIQSDNEYKQDYNEWYKGLGWSPAGSLEVEKAKKATEYASDQKYRQHPSNFQFKKLTDSMDMVLAKQNAHTMNKHLYTIDWNKDKTKIHVMPDTPDILQAKQNQTLYSQKLYKLGWEEALKKGYDLPVDAISVQLAKASRDIASDYKYKQGYRKQLGHHVGFRSLQDDPKLVLSMNVAKMQSEREYKKDFEKWKTKFSSPVDMLGVVLAKKCQELVSDVDYKNYLHQWTCLPDQNDVVQAKKVYELQSENLYKSDLEWLRGIGWSPLGSLEAEKNKRASEIISEKKYRQPPDRNKFTSIPDAMDIVLAKTNAKNRSDRLYREAWDKDKTQIHIMPDTPDIVLAKANLINTSDKLYRMGYEELKRKGYDLPVDAIPIKAAKASREIASEYKYKEGFRKQLGHHIGARNIEDDPKMMWSMHVAKIQSDREYKKDFEKWKTKFSSPVDMLGVVLAKKCQTLVSDVDYKNYLHQWTCLPDQSDVIHARQAYDLQSDNLYKSDLQWLKGIGWMTSGSLEDEKNKRATQILSDHVYRQHPDQFKFSSLMDSIPMVLAKNNAITMNHRLYTEAWDKDKTTVHIMPDTPEVLLAKQNKVNYSEKLYKLGLEEAKRKGYDMRVDAIPIKAAKASRDIASEFKYKEGYRKQLGHHIGARAIRDDPKMMWSMHVAKIQSDREYKKDFEKWKTKFSSPVDMLGVVLAKKCQTLVSDVDYKNYLHQWTCLPDQSDVIHARQAYDLQSDNMYKSDLQWMRGIGWVSIGSLDVEKCKRATEILSDKIYRQPPDRFKFTSVTDSLEQVLAKNNAITMNKRLYTEAWDKDKTQIHIMPDTPEIMLARMNKINYSESLYKLANEEAKKKGYDLRSDAIPIVAAKASRDIISDYKYKDGYCKQLGHHIGARNIEDDPKMMWSMHVAKIQSDREYKKDFEKWKTKFSSPVDMLGVVLAKKCQTLVSDVDYKNYLHEWTCLPDQSDVIHARQAYDLQSDNIYKSDLQWLRGIGWVPIGSMDVVKCKRATEILSDNIYRQPPDKLKFTSVTDSLEQVLAKNNALNMNKRLYTEAWDKDKTQIHIMPDTPEIMLARQNKINYSETLYKLANEEAKKKGYDLRSDAIPIVAAKASRDVISDYKYKDGYRKQLGHHIGARNIEDDPKMMWSMHVAKIQSDREYKKDFEKWKTKFSSPVDMLGVVLAKKCQTLVSDVDYKNYLHEWTCLPDQNDVIHARQAYDLQSDNIYKSDLQWLRGIGWVPIGSMDVVKCKRAAEILSDNIYRQPPDKLKFTSVTDSLEQVLAKNNALNMNKRLYTEAWDKDKTQVHIMPDTPEIMLARQNKINYSESLYRQAMEEAKKEGYDLRSDAIPIVAAKASRDIASDYKYKEAYRKQLGHHIGARAVHDDPKIMWSLHIAKVQSDREYKKDFEKYKTRYSSPVDMLGIVLAKKCQTLVSDVDYKHPLHEWICLPDQNDIIHARKAYDLQSDNLYKSDLEWMKGIGWVPIDSLEVVRAKRAGELLSDTIYRQRPETLKFTSITDTPEQVLAKNNALNMNKRLYTEAWDNDKKTIHVMPDTPEIMLAKLNRINYSDKLYKLALEESKKEGYDLRLDAIPIQAAKASRDIASDYKYKEGYRKQLGHHIGARNIKDDPKMMWSIHVAKIQSDREYKKEFEKWKTKFSSPVDMLGVVLAKKCQILVSDIDYKHPLHEWTCLPDQNDVIQARKAYDLQSDAIYKSDLEWLRGIGWVPIGSVEVEKVKRAGEILSDRKYRQPADQLKFTCITDTPEIVLAKNNALTMSKHLYTEAWDADKTSIHVMPDTPDILLAKSNSANISQKLYTKGWDESKMKDYDLRADAISIKSAKASRDIASDYKYKEAYEKQKGHHIGAQSIEDDPKIMCAIHAGKIQSEREYKKEFQKWKTKFSSPVDMLSILLAKKCQTLVTDIDYRNYLHEWTCMPDQNDIIQAKKAYDLQSDSVYKADLEWLRGIGWMPEGSVEMNRVKVAQDLVNERLYRTRPEALSFTSIVDTPEVVLAKANSLQISEKLYQEAWNKDKSNITIPSDTPEMLQAHINALQISNKLYQKDWNDAKQKGYDIRADAIEIKHAKASREIASEYKYKEGYRKQLGHHMGFRTLQDDPKSVWAIHAAKIQSDREYKKAYEKSKGIHNTPLDMMSIVQAKKCQVLVSDIDYRNYLHQWTCLPDQNDVIQAKKAYDLQSDNLYKSDLEWLKGIGWLPEGSVEVMRVKNAQNLLNERLYRIKPEALKFTSIVDTPEVIQAKINAVQISEPLYRDAWEKEKANVNVPADTPLMLQSKINALQISNKRYQQAWEDVKMTGYDLRADAIGIQHAKASRDIASDYLYKTAYEKQKGHYIGCRSAKEDPKLVWAANVLKMQNDRLYKKAYNDHKAKISIPVDMVSISAAKEGQALASDVDYRHYLHHWSCFPDQNDVIQARKAYDLQSDSVYKADLEWLRGIGWMPEGSVEMNRVKVAQDLVNERLYRTRPEALSFTSIVDTPEVVLAKANSLQISEKLYQEAWNKDKSNITIPSDTPEMLQAHINALQISNKLYQKDWNDTKQKGYDIRADAIEIKHAKASREIASEYKYKEGYRKQLGHHMGFRTLQDDPKSVWAIHAAKIQSDREYKKAYEKSKGIHNTPLDMMSIVQAKKCQVLVSDIDYRNYLHQWTCLPDQNDVIQAKKAYDLQSDNLYKSDLEWLKGIGWLPEGSVEVMRVKNAQNLLNERLYRIKPEALKFTSIVDTPEVIQAKINAVQISEPLYRNAWEKEKANVNVPADTPLMLQSKINALQISNKRYQQAWEDVKMTGYDLRADAIGIQHAKASRDIASDYLYKTAYEKQKGHYIGCRSAKEDPKLVWAANVLKMQNDRLYKKAYNDHKAKISIPVDMVSISAAKEGQALASDVDYRHYLHHWSCFPDQNDVIQARKAYDLQSDSVYKADLEWLRGIGWMPEGSVEMNRVKVAQDLVNERLYRTRPEALSFTSIVDTPEVVLAKANSLQISEKLYQEAWNKDKSNITIPSDTPEMLQAHINALQISNKLYQKDWNDTKQKGYDIRADAIEIKHAKASREIASEYKYKEGYRKQLGHHMGFRTLQDDPKSVWAIHAAKIQSDREYKKAYEKSKGIHNTPLDMMSIVQAKKCQVLVSDIDYRNYLHQWTCLPDQNDVIQAKKAYDLQSDNLYKSDLEWLKGIGWLPEGSVEVMRVKNAQNLLNERLYRIKPEALKFTSIVDTPEVIQAKINAVQISEPLYRDAWEKEKANVNVPADTPLMLQSKINALQISNKRYQQAWEDVKMTGYDLRADAIGIQHAKASRDIASDYLYKTAYEKQKGHYIGCRSAKEDPKLVWAANVLKMQNDRLYKKAYNDHKAKISIPVDMVSISAAKEGQALASDVDYRHYLHRWSCFPDQNDVIQARKAYDLQSDALYKADLEWLRGIGWMPQGSPEVLRVKNAQNIFCDSVYRTPVVNLKYTSIVDTPEVVLAKSNAENISIPKYREVWDKDKTSIHIMPDTPEINLARANALNVSNKLYREGWDEMKAGCDVRLDAIPIQAAKASREIASDYKYKLDHEKQKGHYVGTLTARDDNKIRWALIADKLQNEREYRLDWAKWKAKIQSPVDMLSILHSKNSQALVSDMDYRNYLHQWTCMPDQNDVIQAKKAYELQSDNVYKADLEWLRGIGWMPNDSVSVNHAKHAADIFSEKKYRTKIETLNFTPVDDRVDYVTAKQSGEILDDIKYRKDWNATKSKYTLTETPLLHTAQEAARILDQYLYKEGWERQKATGYILPPDAVPFVHAHHCNDVQSELKYKAEHVKQKGHYVGVPTMRDDPKLVWFEHAGQIQNERLYKEDYHKTKAKINIPADMVSVLAAKQGQTLVSDIDYRNYLHQWMCHPDQNDVIQARKAYDLQSDNVYRADLEWLRGIGWIPLDSVDHVRVTKNQEMMSQIKYKKNALENYPNFRSVVDPPEIVLAKINSVNQSDVKYKETFNKAKGKYTFSPDTPHISHSKDMGKLYSTILYKGAWEGTKAYGYTLDERYIPIVGAKHADLVNSELKYKETYEKQKGHYLAGKVIGEFPGVVHCLDFQKMRSALNYRKHYEDTKANVHIPNDMMNHVLAKRCQYILSDLEYRHYFHQWTSLLEEPNVIRVRNAQEILSDNVYKDDLNWLKGIGCYVWDTPQILHAKKSYDLQSQLQYTAAGKENLQNYNLVTDTPLYVTAVQSGINASEVKYKENYHQIKDKYTTVLETVDYDRTRNLKNLYSSNLYKEAWDRVKATSYILPSSTLSLTHAKNQKHLASHIKYREEYEKFKALYTLPRSVDDDPNTARCLRVGKLNIDRLYRSVYEKNKMKIHIVPDMVEMVTAKDSQKKVSEIDYRLRLHEWICHPDLQVNDHVRKVTDQISDIVYKDDLNWLKGIGCYVWDTPEILHAKHAYDLRDDIKYKAHMLKTRNDYKLVTDTPVYVQAVKSGKQLSDAVYHYDYVHSVRGKVAPTTKTVDLDRALHAYKLQSSNLYKTSLRTLPTGYRLPGDTPHFKHIKDTRYMSSYFKYKEAYEHTKAYGYTLGPKDVPFVHVRRVNNVTSERLYRELYHKLKDKIHTTPDTPEIRQVKKTQEAVSELIYKSDFFKMQGHMISLPYTPQVIHCRYVGDITSDIKYKEDLQVLKGFGCFLYDTPDMVRSRHLRKLWSNYLYTDKARKMRDKYKVVLDTPEYRKVQELKTHLSELVYRAAGKKQKSIFTSVPDTPDLLRAKRGQKLQSQYLYVELATKERPHHHAGNQTTALKHAKDVKDMVSEKKYKIQYEKMKDKYTPVPDTPILIRAKRAYWNASDLRYKETFQKTKGKYHTVKDALDIVYHRKVTDDISKIKYKENYMSQLGIWRSIPDRPEHFHHRAVTDTVSDVKYKEDLTWLKGIGCYAYDTPDFTLAEKNKTLYSKYKYKEVFERTKSDFKYVADSPINRHFKYATQLMNERKYKSSAKMFLQHGCNEILRPDMLTALYNSHMWSQIKYRKNYEKSKDKFTSIVDTPEHLRTTKVNKQISDILYKLEYNKAKPRGYTTIHDTPMLLHVRKVKDEVSDLKYKEVYQRNKSNCTIEPDAVHIKAAKDAYKVNTNLDYKKQYEANKAHWKWTPDRPDFLQAAKSSLQQSDFEYKLDREFLKGCKLSVTDDKNTVLALRNTLIESDLKYKEKHVKERGTCHAVPDTPQILLAKTVSNLVSENKYKDHVKKHLAQGSYTTLPETRDTVHVKEVTKHVSDTNYKKKFVKEKGKSNYSIMLEPPEVKHAMEVAKKQSDVAYRKDAKENLHYTTVADRPDIKKATQAAKQASEVEYRAKHRKEGSHGLSMLGRPDIEMAKKAAKLSSQVKYRENFDKEKGKTPKYNPKDSQLYKVMKDANNLASEVKYKADLKKLHKPVTDMKESLIMNHVLNTSQLASSYQYKKKYEKSKGHYHTIPDNLEQLHLKEATELQSIVKYKEKYEKERGKPMLDFETPTYITAKESQQMQSGKEYRKDYEESIKGRNLTGLEVTPALLHVKYATKIASEKEYRKDLEESIRGKGLTEMEDTPDMLRAKNATQILNEKEYKRDLELEVKGRGLNAMANETPDFMRARNATDIASQIKYKQSAEMEKANFTSVVDTPEIIHAQQVKNLSSQKKYKEDAEKSMSYYETVLDTPEIQRVRENQKNFSLLQYQCDLKNSKGKITVVQDTPEILRVKENQKNFSSVLYKEDVSPGTAIGKTPEMMRVKQTQDHISSVKYKEAIGQGTPIPDLPEVKRVKETQKHISSVMYKENLGTGIPTTVTPEIERVKRNQENFSSVLYKENLGKGIPTPITPEMERVKRNQENFSSILYKENLSKGTPLPVTPEMERVKLNQENFSSVLYKENVGKGIPIPITPEMERVKHNQENFSSVLYKENLGTGIPIPITPEMQRVKHNQENLSSVLYKENMGKGTPLPVTPEMERVKHNQENISSVLYKENMGKGTPLPVTPEMERVKHNQENISSVLYKENMGKGTPLAVTPEMERVKHNQENISSVLYKENVGKATATPVTPEMQRVKRNQENISSVLYKENLGKATPTPFTPEMERVKRNQENFSSVLYKENMRKATPTPVTPEMERAKRNQENISSVLYSDSFRKQIQGKAAYVLDTPEMRRVRETQRHISTVKYHEDFEKHKGCFTPVVTDPITERVKKNMQDFSDINYRGIQRKVVEMEQKRNDQDQETITGLRVWRTNPGSVFDYDPAEDNIQSRSLHMINVQAQRRSREQSRSASALSISGGEEKSEHSEAPDHHLSTYSDGGVFAVSTAYKHAKTTELPQQRSSSVATQQTTVSSIPSHPSTAGKIFRAMYDYMAADADEVSFKDGDAIINVQAIDEGWMYGTVQRTGRTGMLPANYVEAI

SEQ ID NO: 1806 - protein, 208 aa, Homo sapiens
MAGTARHDREMAIQAKKKLTTATDPIERLRLQCLARGSAGIKGLGRVFRIMDDDNNRTLDFKEFMKGLNDYAVVMEKEEVEELFRRFDKDGNGTIDFNEFLLTLRPPMSRARKEVIMQAFRKLDKTGDGVITIEDLREVYNAKHHPKYQNGEWSEEQVFRKFLDNFDSPYDKDGLVTPEEFMNYYAGVSASIDTDVYFIIMMRTAWKL

SEQ ID NO: 1807 - protein, 941 aa, Homo sapiens
MSDAAEAPREATGENGETEMKEEEEPNPNYKEVEDPQQESKDDTIAWRESQEEERKTGEEEGEEEGKEDKKIVMEETEEKAGEVQEKEASGIQEETTVEPQEVTASMIRLETQITDSQSITSGIFPKTQRGSKSKLSLQLEDAETDELLRDLSTQIEFLDLDQISPEEQQISSPERQPSGELEEKTDRMPQDELGQERRDLEPENREEGQERRVSDIQSKAGISRESLVSSTTEDILFQKDKSTPVYPLTMTWSFGWNSSLPVYYIREERQRVLLYVCAHTAIIYNVFRNNQYHLQGHANIISCLCVSEDRRWIATADKGPDCLVIIWDSFTGIPVHTIFDSCPEGNGIMAMAMTHDAKYLATISDAEVQKVCIWKWTLAVETPACTLELPTEYGVQNYVTFNPTNNKELVSNSKTRAIYYAWYEERDTLAHSAPLLTEKTFNKLVGKFSQSIFHLNLTQILSATMEGKLVVWDIHRPPSSASTFLGFPYIKPCKLVHLQKEGITVLTTIDSYIVTGDIKGNIKFYDHTLSIVNWYSHLKLGAIRTLSFSKTPATPPTEKSNYPPDCTLKGDLFVLRNFIIGTSDAAVYHLTTDGTKLEKLFVEPKDAICAISCHPYQPLIAIGSICGMIKVWNYENKQYLFSRVFEKGLGVQSLTYNPEGALLGAGFTEGTVYILDAMSLENESPEPFKYSRTSVTHISFSHDSQYMATADRSFTVAVYMLVVRNGQRVWEYLARLRSHRKSIRSLLFGVYLDSNEPRLLSLGTDRLLIEYDLLRSYKDHLEVLDIHHTDQGCYPTCMVWYPPLTRELFLLICNSGYKVKLFNATTKMCRKTLLGPAYGSPIEQTQVLPVRSMAELQKRYLVFINRDKVGLQILPVDGNPHKTSAIVCHPNGVAGMAVSYDGCYAFTAGGHDRSVVQWKITLSHPGSQAPILSPSDTSRS

SEQ ID NO: 1808 - protein, 262 aa, Homo sapiens
MMCQSEARQGPELRAAKWLHFPQLALRRRLGQLSCMSRPALKLRSWPLTVLYYLLPFGALRPLSRVGWRPVSRVALYKSVPTRLLSRAWGRLNQVELPHWLRRPVYSLYIWTFGVNMKEAAVEDLHHYRNLSEFFRRKLKPQARPVCGLHSVISPSDGRILNFGQVKNCEVEQVKGVTYSLESFLGPRMCTEDLPFPPAASCDSFKNQLVTREGNELYHCVIYLAPGDYHCFHSPTDWTVSHRRHFPGPAHKQPKAQQGLLQ

SEQ ID NO: 1809 - protein, 1142 aa, Homo sapiens
MAEPGGAAGRSHPEDGSASEGEKEGNNESHMVSPPEKDDGQKGEEAVGSTEHPEEVTTQAEAAIEEGEVETEGEAAVEGEEEAVSYGDAESEEEYYYTETSSPEGQISAADTTYPYFSPPQELPGEEAYDSVSGEAGLQGFQQEATGPPESRERRVTSPEPSHGVLGPSEQMGQVTSGPAVGRLTGSTEEPQGQVLPMGVQHRFRLSHGSDIESSDLEEFVSQEPVIPPGVPDAHPREGDLPVFQDQIQQPSTEEGAMAERVESEGSDEEAEDEGSQLVVLDPDHPLMVRFQAALKNYLNRQIEKLKLDLQELVVATKQSRAQRQELGVNLYEVQQHLVHLQKLLEKSHDRHAMASSERRQKEEELQAARALYTKTCAAANEERKKLAALQTEMENLALHLFYMQNIDQDMRDDIRVMTQVVKKAETERIRAEIEKKKQDLYVDQLTTRAQQLEEDIALFEAQYLAQAEDTRILRKAVSEACTEIDAISVEKRRIMQQWASSLVGMKHRDEAHRAVLEALRGCQHQAKSTDGEIEAYKKSIMKEEEKNEKLASILNRTETEATLLQKLTTQCLTKQVALQSQFNTYRLTLQDTEDALSQDQLEQMILTEELQAIRQAIQGELELRRKTDAAIREKLQEHMTSNKTTKYFNQLILRLQKEKTNMMTHLSKINGDIAQTTLDITHTSSRLDAHQKTLVELDQDVKKVNELITNSQSEISRRTILIERKQGLINFLNKQLERMVSELGGEEVGPLELEIKRLSKLIDEHDGKAVQAQVTWLRLQQEMVKVTQEQEEQLASLDASKKELHIMEQKKLRVESKIEQEKKEQKEIEHHMKDLDNDLKKLNMLMNKNRCSSEELEQNNRVTENEFVRSLKASERETIKMQDKLNQLSEEKATLLNQLVEAEHQIMLWEKKIQLAKEMRSSVDSEIGQTEIRAMKGEIHRMKVRLGQLLKQQEKMIRAMELAVARRETVTTQAEGQRKMDRKALTRTDFHHKQLELRRKIRDVRKATDECTKTVLELEETQRNVSSSLLEKQEKLSVIQADFDTLEADLTRLGALKRQNLSEIVALQTRLKHLQAVKEGRYVFLFRSKQSLVLERQRLDKRLALIATILDRVRDEYPQFQEALHKVSQMIANKLESPGPS

SEQ ID NO: 1810 - protein, 487 aa, Homo sapiens
MPVPERPAAGPDSPRPGTRRAAPRVLFGEWLLGEISSGCYEGLQWLDEARTCFRVPWKHFARKDLSEADARIFKAWAVARGRWPPSSRGGGPPPEAETAERAGWKTNFRCALRSTRRFVMLRDNSGDPADPHKVYALSRELCWREGPGTDQTEAEAPAAVPPPQGGPPGPFLAHTHAGLQAPGPLPAPAGDKGDLLLQAVQQSCLADHLLTASWGADPVPTKAPGEGQEGLPLTGACAGGEAAAPESPHQAEPYLSPSPSACTAVQEPSPGALDVTIMYKGRTVLQKVVGHPSCTFLYGPPDPAVRATDPQQVAFPSPAELPDQKQLRYTEELLRHVAPGLHLELRGPQLWARRMGKCKVYWEVGGPPGSASPSTPACLLPRNCDTPIFDFRVFFQELVEFRARQRRGSPRYTIYLGFGQDLSAGRPKEKSLVLVKLEPWLCRVHLEGTQREGVSSLDSSSLSLCLSSANSLYDDIECFLMELEQPA

SEQ ID NO: 1811 - protein, 572 aa, Homo sapiens
MSQLVECVPNFSEGKNQEVIDAISGAITQTPGCVLLDVDAGPSTNRTVYTFVGPPECVVEGALNAARVASRLIDMSRHQGEHPRMGALDVCPFIPVRGVSVDECVLCAQAFGQRLAEELDVPVYLYGEAARMDSRRTLPAIRAGEYEALPKKLQQADWAPDFGPSSFVPSWGATATGARKFLIAFNINLLGTKEQAHRIALNLREQGRGKDQPGRLKKVQGIGWYLDEKNLAQVSTNLLDFEVTALHTVYEETCREAQELSLPVVGSQLVGLVPLKALLDAAAFYCEKENLFILEEEQRIRLVVSRLGLDSLCPFSPKERIIEYLVPERGPERGLGSKSLRAFVGEVGARSAAPGGGSVAAAAAAMGAALGSMVGLMTYGRRQFQSLDTTMRRLIPPFREASAKLTTLVDADAEAFTAYLEAMRLPKNTPEEKDRRTAALQEGLRRAVSVPLTLAETVASLWPALQELARCGNLACRSDLQVAAKALEMGVFGAYFNVLINLRDITDEAFKDQPPAGSQDPGCTGAGLLGDPAGVTVREASPGSVAPPSPIPRGQSCDLETPGTAGPSTLEG

SEQ ID NO: 1812 - protein, 1603 aa, Homo sapiens
MKDSNRCCCGQFTNQHIPPLPSATPSKNEEESKQVETQPEKWSVAKHTQSYPTDSYGVLEFQGGGYSNKAMYIRVSYDTKPDSLLHLMVKDWQLELPKLLISVHGGLQNFEMQPKLKQVFGKGLIKAAMTTGAWIFTGGVSTGVISHVGDALKDHSSKSRGRVCAIGIAPWGIVENKEDLVGKDVTRVYQTMSNPLSKLSVLNNSHTHFILADNGTLGKYGAEVKLRRLLEKHISLQKINTRLGQGVPLVGLVVEGGPNVVSIVLEYLQEEPPIPVVICDGSGRASDILSFAHKYCEEGGIINESLREQLLVTIQKTFNYNKAQSHQLFAIIMECMKKKELVTVFRMGSEGQQDIEMAILTALLKGTNVSAPDQLSLALAWNRVDIARSQIFVFGPHWPPLGSLAPPTDSKATEKEKKPPMATTKGGRGKGKGKKKGKVKEEVEEETDPRKIELLNWVNALEQAMLDALVLDRVDFVKLLIENGVNMQHFLTIPRLEELYNTRLGPPNTLHLLVRDVKKSNLPPDYHISLIDIGLVLEYLMGGAYRCNYTRKNFRTLYNNLFGPKRPKALKLLGMEDDEPPAKGKKKKKKKKEEEIDIDVDDPAVSRFQYPFHELMVWAVLMKRQKMAVFLWQRGEESMAKALVACKLYKAMAHESSESDLVDDISQDLDNNSKDFGQLALELLDQSYKHDEQIAMKLLTYELKNWSNSTCLKLAVAAKHRDFIAHTCSQMLLTDMWMGRLRMRKNPGLKVIMGILLPPTILFLEFRTYDDFSYQTSKENEDGKEKEEENTDANADAGSRKGDEENEHKKQRSIPIGTKICEFYNAPIVKFWFYTISYLGYLLLFNYVILVRMDGWPSLQEWIVISYIVSLALEKIREILMSEPGKLSQKIKVWLQEYWNITDLVAISTFMIGAILRLQNQPYMGYGRVIYCVDIIFWYIRVLDIFGVNKYLGPYVMMIGKMMIDMLYFVVIMLVVLMSFGVARQAILHPEEKPSWKLARNIFYMPYWMIYGEVFADQIDLYAMEINPPCGENLYDEEGKRLPPCIPGAWLTPALMACYLLVANILLVNLLIAVFNNTFFEVKSISNQVWKFQRYQLIMTFHDRPVLPPPMIILSHIYIIIMRLSGRCRKKREGDQEERDRGLKLFLSDEELKRLHEFEEQCVQEHFREKEDEQQSSSDERIRVTSERVENMSMRLEEINERETFMKTSLQTVDLRLAQLEELSNRMVNALENLAGIDRSDLIQARSRASSECEATYLLRQSSINSADGYSLYRYHFNGEELLFEDTSLSTSPGTGVRKKTCSFRIKEEKDVKTHLVPECQNSLHLSLGTSTSATPDGSHLAVDDLKNAEESKLGPDIGISKEDDERQTDSKKEETISPSLNKTDVIHGQDKSDVQNTQLTVETTNIEGTISYPLEETKITRYFPDETINACKTMKSRSFVYSRGRKLVGGVNQDVEYSSITDQQLTTEWQCQVQKITRSHSTDIPYIVSEAAVQAEHKEQFADMQDEHHVAEAIPRIPRLSLTITDRNGMENLLSVKPDQTLGFPSLRSKSLHGHPRNVKSIQGKLDRSGHASSVSSLVIVSGMTAEEKKVKKEKASTETEC

SEQ ID NO: 1813 - protein, 230 aa, Homo sapiens
MPWTILLFAAGSLAIPAPSIRLVPPYPSSQEDPIHIACMAPGNFPGANFTLYRGGQVVQLLQAPTDQRGVTFNLSGGSSKAPGGPFHCQYGVLGELNQSQLSDLSEPVNVSFPVPTWILVLSLSLAGALFLLAGLVAVALVVRKVKLRNLQKKRDRESCWAQINFDSTDMSFDNSLFTVSAKTMPEEDPATLDDHSGTTATPSNSRTRKRPTSTSSSPETPEFSTFRACQ

SEQ ID NO: 1814 - protein, 1544 aa, Homo sapiens
MSGTQSTITDRFPLKKPIRHGSILNRESPTDKKQKVERIASHDFDPTDSSSKKTKSSSEESRSEIYGLVQRCVIIQKDDNGFGLTVSGDNPVFVQSVKEDGAAMRAGVQTGDRIIKVNGTLVTHSNHLEVVKLIKSGSYVALTVQGRPPGSPQIPLADSEVEPSVIGHMSPIMTSPHSPGASGNMERITSPVLMGEENNVVHNQKVEILRKMLQKEQERLQLLQEDYNRTPAQRLLKEIQEAKKHIPQLQEQLSKATGSAQDGAVVTPSRPLGDTLTVSEAETDPGDVLGRTDCSSGDASRPSSDNADSPKSGPKERIYLEENPEKSETIQDTDTQSLVGSPSTRIAPHIIGAEDDDFGTEHEQINGQCSCFQSIELLKSRPAHLAVFLHHVVSQFDPATLLCYLYSDLYKHTNSKETRRIFLEFHQFFLDRSAHLKVSVPDEMSADLEKRRPELIPEDLHRHYIQTMQERVHPEVQRHLEDFRQKRSMGLTLAESELTKLDAERDKDRLTLEKERTCAEQIVAKIEEVLMTAQAVEEDKSSTMQYVILMYMKHLGVKVKEPRNLEHKRGRIGFLPKIKQSMKKDKEGEEKGKRRGFPSILGPPRRPSRHDNSAIGRAMELQKARHPKHLSTPSSVSPEPQDSAKLRQSGLANEGTDAGYLPANSMSSVASGASFSQEGGKENDTGSKQVGETSAPGDTLDGTPRTLNTVFDFPPPPLDQVQEEECEVERVTEHGTPKPFRKFDSVAFGESQSEDEQFENDLETDPPNWQQLVSREVLLGLKPCEIKRQEVINELFYTERAHVRTLKVLDQVFYQRVSREGILSPSELRKIFSNLEDILQLHIGLNEQMKAVRKRNETSVIDQIGEDLLTWFSGPGEEKLKHAAATFCSNQPFALEMIKSRQKKDSRFQTFVQDAESNPLCRRLQLKDIIPTQMQRLTKYPLLLDNIAKYTEWPTEREKVKKAADHCRQILNYVNQAVKEAENKQRLEDYQRRLDTSSLKLSEYPNVEELRNLDLTKRKMIHEGPLVWKVNRDKTIDLYTLLLEDILVLLQKQDDRLVLRCHSKILASTADSKHTFSPVIKLSTVLVRQVATDNKALFVISMSDNGAQIYELVAQTVSEKTVWQDLICRMAASVKEQSTKPIPLPQSTPGEGDNDEEDPSKLKEEQHGISVTGLQSPDRDLGLESTLISSKPQSHSLSTSGKSEVRDLFVAERQFAKEQHTDGTLKEVGEDYQIAIPDSHLPVSEERWALDALRNLGLLKQLLVQQLGLTEKSVQEDWQHFPRYRTASQGPQTDSVIQNSENIKAYHSGEGHMPFRTGTGDIATCYSPRTSTESFAPRDSVGLAPQDSQASNILVMDHMIMTPEMPTMEPEGGLDDSGEHFFDAREAHSDENPSEGDGAVNKEEKDVNLRISGNYLILDGYDPVQESSTDEEVASSLTLQPMTGIPAVESTHQQQHSPQNTHSDGAISPFTPEFLVQQRWGAMEYSCFEIQSPSSCADSQSQIMEYIHKIEADLEHLKKVEESYTILCQRLAGSALTDKHSDKS

SEQ ID NO: 1815 - protein, 2481 aa, Homo sapiens
MEQSPPPAPEPTQGPTPARSRRRREPESPPASAPIPLFGADTIGQRSPDGPVLSKAEFVEKVRQSNQACHDGDFHTAIVLYNEALAVDPQNCILYSNRSAAYMKIQQYDKALDDAIKARLLNPKWPKAYFRQGVALQYLGRHADALAAFASGLAQDPKSLQLLVGMVEAAMKSPMRDSLEPTYQQLQKMKLDKSPFVVVSVVGQELLTAGHHGASVVVLEAALKIGTCSLKLRGSVFSALSSAYWSLGNTEKSTGYMQQDLDVAKTLGDQTGECRAHGNLGSAFFSKGNYREALTNHRHQLVLAMKLKDREAASSALSSLGHVYTAIGDYPNALASHKQCVLLAKQSKDELSEARELGNMGAVYIAMGDFENAVQCHEQHLKIAKDLGNKREEARAYSNLGSAYHYRRNFDKAMSYHNYVLELAQELMEKAIEMRAYAGLGHAARCMQDLERAKQYHEQQLGIAEDLKDRAAEGRASSNLGIIHQMKGDYDTALKLHKTHLCIAQELSDYAAQGRAYGNMGNAYNALGMYDQAVKYHRQELQISMEVNDRASQASTHGNLAVAYQALGAHDRALQHYQNHLNIARELRDIQSEARALSNLGNFHCSRGEYVQAAPYYEQYLRLAPDLQDMEGEGKVCHNLGYAHYCLGNYQEAVKYYEQDLALAKDLHDKLSQAKAYCNLGLAFKALLNFSKAEECQKYLLSLAQSLNNSQAKFRALGNLGDIFICKKDINGAIKFYEQQLGLAHQVKDRRLEASAYAALGTAYRMIQKYDKALGYHTQELEVYQELSDLPGECRAHGHLAAVYMALGKYTMAFKCYEEQLDLGQKLKDPSLEAQVYGNMGITKMNMNVMEEAIGYFEQQLAMLQQLSGNESVLDRGRAYGNLGDCYEALGDYEEAIKYYEQYLSVAQSLNRMQDQAKAYRGLGNGHRAMGSLQQALVCFEKRLVVAHELGEAFNKAQAYGELGSLHSQLGNYEQAISCLERQLNIARDMKDRALESDAACGLGGVYQQMGEYDTALQYHQLDLQIAEETNNPTCQGRAYGNLGLTYESLGTFERAVVYQEQHLSIAAQMNDLAAKTVSYSSLGRTHHALQNYSQAVMYLQEGLRLAEQLGRREDEAKIRHGLGLSLWASGNLEEAQHQLYRASALFETIRHEAQLSTDYKLSLFDLQTSSYQALQRVLVSLGHHDEALAVAERGRTRAFADLLVERQTGQQDSDPYSPVTIDQILEMVNGQRGLVLYYSLAAGYLYSWLLAPGAGIVKFHEHYLGENTVENSSDFQASSSVTLPTATGSALEQHIASVREALGVESHYSRACASSETESEAGDIMDQQFEEMNNKLNSVTDPTGFLRMVRRNNLFNRSCQSMTSLFSNTVSPTQDGTSSLPRRQSSFAKPPLRALYDLLIAPMEGGLMHSSGPVGRHRQLILVLEGELYLIPFALLKGSSSNEYLYERFGLLAVPSIRSLSVQSKSHLRKNPPTYSSSTSMAAVIGNPKLPSAVMDRWLWGPMPSAEEEAYMVSELLGCQPLVGSVATKERVMSALTQAECVHFATHISWKLSALVLTPSMDGNPASSKSSFGHPYTIPESLRVQDDASDGESISDCPPLQELLLTAADVLDLQLPVKLVVLGSSQESNSKVTADGVIALTRAFLAAGAQCVLVSLWPVPVAASKMFIHAFYSSLLNGLKASAALGEAMKVVQSSKAFSHPSNWAGFMLIGSDVKLNSPSSLIGQALTEILQHPERARDALRVLLHLVEKSLQRIQNGQRNAMYTSQQSVENKVGGIPGWQALLTAVGFRLDPPTSGLPAAVFFPTSDPGDRLQQCSSTLQSLLGLPNPALQALCKLITASETGEQLISRAVKNMVGMLHQVLVQLQAGEKEQDLASAPIQVSISVQLWRLPGCHEFLAALGFDLCEVGQEEVILKTGKQANRRTVHFALQSLLSLFDSTELPKRLSLDSSSSLESLASAQSVSNALPLGYQQPPFSPTGADSIASDAISVYSLSSIASSMSFVSKPEGGSEGGGPGGRQDHDRSKNAYLQRSTLPRSQLPPQTRPAGNKDEEEYEGFSIISNEPLATYQENRNTCFSPDHKQPQPGTAGGMRVSVSSKGSISTPNSPVKMTLIPSPNSPFQKVGKLASSDTGESDQSSTETDSTVKSQEESNPKLDPQELAQKILEETQSHLIAVERLQRSGGQVSKSNNPEDGVQAPSSTAVFRASETSAFSRPVLSHQKSQPSPVTVKPKPPARSSSLPKVSSGYSSPTTSEMSIKDSPSQHSGRPSPGCDSQTSQLDQPLFKLKYPSSPYSAHISKSPRNMSPSSGHQSPAGSAPSPALSYSSAGSARSSPADAPDIDKLKMAAIDEKVQAVHNLKMFWQSTPQHSTGPMKIFRGAPGTMTSKRDVLSLLNLSPRHNKKEEGVDKLELKELSLQQHDGAPPKAPPNGHWRTETTSLGSLPLPAGPPATAPARPLRLPSGNGYKFLSPGRFFPSSKC

SEQ ID NO: 1816 - protein, 1553 aa, Homo sapiens
MEPSALRKAGSEQEEGFEGLPRRVTDLGMVSNLRRSNSSLFKSWRLQCPFGNNDKQESLSSWIPENIKKKECVYFVESSKLSDAGKVVCQCGYTHEQHLEEATKPHTFQGTQWDPKKHVQEMPTDAFGDIVFTGLSQKVKKYVRVSQDTPSSVIYHLMTQHWGLDVPNLLISVTGGAKNFNMKPRLKSIFRRGLVKVAQTTGAWIITGGSHTGVMKQVGEAVRDFSLSSSYKEGELITIGVATWGTVHRREGLIHPTGSFPAEYILDEDGQGNLTCLDSNHSHFILVDDGTHGQYGVEIPLRTRLEKFISEQTKERGGVAIKIPIVCVVLEGGPGTLHTIDNATTNGTPCVVVEGSGRVADVIAQVANLPVSDITISLIQQKLSVFFQEMFETFTESRIVEWTKKIQDIVRRRQLLTVFREGKDGQQDVDVAILQALLKASRSQDHFGHENWDHQLKLAVAWNRVDIARSEIFMDEWQWKPSDLHPTMTAALISNKPEFVKLFLENGVQLKEFVTWDTLLYLYENLDPSCLFHSKLQKVLVEDPERPACAPAAPRLQMHHVAQVLRELLGDFTQPLYPRPRHNDRLRLLLPVPHVKLNVQGVSLRSLYKRSSGHVTFTMDPIRDLLIWAIVQNRRELAGIIWAQSQDCIAAALACSKILKELSKEEEDTDSSEEMLALAEEYEHRAIGVFTECYRKDEERAQKLLTRVSEAWGKTTCLQLALEAKDMKFVSHGGIQAFLTKVWWGQLSVDNGLWRVTLCMLAFPLLLTGLISFREKRLQDVGTPAARARAFFTAPVVVFHLNILSYFAFLCLFAYVLMVDFQPVPSWCECAIYLWLFSLVCEEMRQLFYDPDECGLMKKAALYFSDFWNKLDVGAILLFVAGLTCRLIPATLYPGRVILSLDFILFCLRLMHIFTISKTLGPKIIIVKRMMKDVFFFLFLLAVWVVSFGVAKQAILIHNERRVDWLFRGAVYHSYLTIFGQIPGYIDGVNFNPEHCSPNGTDPYKPKCPESDATQQRPAFPEWLTVLLLCLYLLFTNILLLNLLIAMFNYTFQQVQEHTDQIWKFQRHDLIEEYHGRPAAPPPFILLSHLQLFIKRVVLKTPAKRHKQLKNKLEKNEEAALLSWEIYLKENYLQNRQFQQKQRPEQKIEDISNKAGLELWGSRTSSVCKSRQFLHLTVVESRGSEKAPVTTLACLQGCLGKHGRVDAMVDLLDLDPLKRSGSMEQRLASLEEQVAQTAQALHWIVRTLRASGFSSEADVPTLASQKAAEEPDAEPGGRKKTEEPGDSYHVNARHLLYPNCPVTRFPVPNEKVPWETEFLIYDPPFYTAERKDAAAMDPMGDTLEPLSTIQYNVVDGLRDRRSFHGPYTVQAGLPLNPMGRTGLRGRGSLSCFGPNHTLYPMVTRWRRNEDGAICRKSIKKMLEVLVVKLPLSEHWALPGGSREPGEMLPRKLKRILRQEHWPSFENLLKCGMEVYKGYMDDPRNTDNAWIETVAVSVHFQDQNDVELNRLNSNLHACDSGASIRWQVVDRRIPLYANHKTLLQKAAAEFGAHY

SEQ ID NO: 1817 - protein, 375 aa, Homo sapiens
MKLTRKMVLTRAKASELHSVRKLNCWGSRLTDISICQEMPSLEVITLSVNSISTLEPVSRCQRLSELYLRRNRIPSLAELFYLKGLPRLRVLWLAENPCCGTSPHRYRMTVLRTLPRLQKLDNQAVTEEELSRALSEGEEITAAPEREGTGHGGPKLCCTLSSLSSAAETGRDPLDSEEEATGAQDERGLKPPSRGQFPSLSARDASSSHRGRVSGGPLGAAAASAHCTHCTETVGREHGASQGPVGREHGASQGLEELCPRGSCVCGSVNAHTRVTRAPHGAVLAPQPLLLSWSVECGPGPCWAEGNRSHVEEVPHTRPQAGLLCSDSPSVPNVLTAILLLLRELDAEGLEAVQQTVGSRLQALRGEEVQEHAE

SEQ ID NO: 1818 - protein, 162 aa, Homo sapiens
MSRESDVEAQQSHGSSACSQPHGSVTQSQGSSSQSQGISSSSTSTMPNSSQSSHSSSGTLSSLETVSTQELYSIPEDQEPEDQEPEEPTPAPWARLWALQDGFANLECVNDNYWFGRDKSCEYCFDEPLLKRTDKYRTYSKKHFRIFREVGPKNSYIAYIED

SEQ ID NO: 1819 - protein, 500 aa, Homo sapiens
MELENIVANSLLLKARQEKDYSSLCDKQPIGRRLFRQFCDTKPTLKRHIEFLDAVAEYEVADDEDRSDCGLSILDRFFNDKLAAPLPEIPPDVVTECRLGLKEENPSKKAFEECTRVAHNYLRGEPFEEYQESSYFSQFLQWKWLERQPVTKNTFRHYRVLGKGGFGEVCACQVRATGKMYACKKLQKKRIKKRKGEAMALNEKRILEKVQSRFVVSLAYAYETKDALCLVLTIMNGGDLKFHIYNLGNPGFDEQRAVFYAAELCCGLEDLQRERIVYRDLKPENILLDDRGHIRISDLGLATEIPEGQRVRGRVGTVGYMAPEVVNNEKYTFSPDWWGLGCLIYEMIQGHSPFKKYKEKVKWEEVDQRIKNDTEEYSEKFSEDAKSICRMLLTKNPSKRLGCRGEGAAGVKQHPVFKDINFRRLEANMLEPPFCPDPHAVYCKDVLDIEQFSVVKGIYLDTADEDFYARFATGCVSIPWQNEGCLTMVPSEKEVEPKQC

SEQ ID NO: 1820 - protein, 578 aa, Homo sapiens [sequence omitted]

SEQ ID NO: 1821 - protein, 797 aa, Homo sapiens
QIGNLEDYYHFYHSKTFKRSTLSSRGPHTFLRMDPQVKWLQQQEVKRRVKRQVRSDPQALYFNDPIWSNMWYLHCGDKNSRCRSEMNVQAAWKRGYTGKNVVVTILDDGIERNHPDLAPNYDSYASYDVNGNDYDPSPRYDASNENKHGTRCAGEVAASANNSYCIVGIAYNAKIGGIRMLDGDVTDVVEAKSLGIRPNYIDIYSASWGPDDDGKTVDGPGRLAKQAFEYGIKKGRQGLGSIFVWASGNGGREGDYCSCDGYTNSIYTISVSSATENGYKPWYLEECASTLATTYSSGAFYERKIVTTDLRQRCTDGHTGTSVSAPMVAGIIALALEAKSIPLVQVLRTTALTSACAEHSDQRVVYLEHVVVRTSISHPRRGDLQIYLVSPSGTKSQLLAKRLLDLSNEGFTNWEFMTVHCWGEKAEGQWTLEIQDLPSQVRNPEKQGKLKEWSLILYGTAEHPYHTFSAHQSRSRMLELSAPELEPPKAALSPSQVEVPEDEEDYTAQSTPGSANILQTSVCHPECGDKGCDGPNADQCLNCVHFSLGSVKTSRKCVSVCPLGYFGDTAARRCRRCHKGCETCSSRAATQCLSCRRGFYHHQEMNTCVTLCPAGFYADESQKNCLKCHPSCKKCVDEPEKCTVCKEGFSLARGSCIPDCEPGTYFDSELIRCGECHHTCGTCVGPGREECIHCAKNFHFHDWKCVPACGEGFYPEEMPGLPHKVCRRCDENCLSCAGSSRNCSRCKTGFTQLGTSCITNHTCSNADETFCEMVKSNRLCERKLFIQFCCRTCLLAG

SEQ ID NO: 1822 - protein, 344 aa, Homo sapiens
MGENDPPAVEAPFSFRSLFGLDDLKISPVAPDADAVAAQILSLLPLKFFPIIVIGIIALILALAIGLGIHFDCSGKYRCRSSFKCIELIARCDGVSDCKDGEDEYRCVRVGGQNAVLQVFTAASWKTMCSDDWKGHYANVACAQLGFPSYVSSDNLRVSSLEGQFREEFVSIDHLLPDDKVTALHHSVYVREGCASGHVVTLQCTACGHRRGYSSRIVGGNMSLLSQWPWQASLQFQGYHLCGGSVITPLWIITAAHCVYDLYLPKSWTIQVGLVSLLDNPAPSHLVEKIVYHSKYKPKRLGNDIALMKLAGPLTFNGTSGSLCGSAALPLFQEDLQLLIEAFL

SEQ ID NO: 1823 - protein, 451 aa, Homo sapiens
MGENDPPAVEAPFSFRSLFGLDDLKISPVAPDAVAAQILSLLPLKFFPIIVIGIIALILALAIGLGIHFDCSGKYRCRSSFKCIELIARCDGVSDCKDGEDEYRCVRVGGQNAVLQVFTAASWKTMCSDDWKGHYANVACAQLGFPSYVSSDNLRVSSLEGQFREEFVSIDHLLPDDKVTALHHSVYVREGCASGHVVTLQCTACGHRRGYSSRIVGGNMSLLSQWPWQASLQFQGYHLCGGSVITPLWIITAAHCVYDLYLPKSWTIQVGLVSLLDNPAPSHLVEKIVYHSKYKPKRLGNDIALMKLAGPLTFNEMIQPVCLPNSEENFPDGKVCWTSGWGATEDGGDASPVLNHAAVPLISNKICNHRDVYGGIISPSMLCAGYLTGGVDSCQGDSGGPLVCQERRLWKLVGATSFGIGCAEVNKPGVYTRVTSFLDWIHEQMERDLKT

SEQ ID NO: 1824 - protein, 587 aa, Homo sapiens
MFSSLHSALLTDSFIILSFLAQNKLCFIQFTKKMESSDVNKRLEKLSALDYKIFYYEIPGPINKTTERHLAINCVHDRVVCWWPLVNDDAWPWAPISSEKDRANLLLLGYAQGRLEVLSSVRTEWDPLDVRFGTKQPYQVFTVEHSVSVDKEPMADSCIYECIRNKIQCVSVTRIPLKSKAISCCRNVTEDKLILGCEDSSLILYETHRRVTLLAQTELLPSLISCHPSGAILLVGSNQGELQIFDMALSPINIQLLAEDRLPRETLQFSKLFDASSSLVQMQWIAPQVVSQKGEGSDIYDLLFLRFERGPLGVLLFKLGVFTRGQLGLIDIIFQYIHCDEIYEAINILSSMNWDTLGHQCFISMSAIVNHLLRQKLTPEREAQLETSLGTFYAPTRPLLDSTILEYRDQISKYARRFFHHLLRYQRFEKAFLLAVDVGARDLFMDIHYLALDKGELALAEVARKRASDIDAESITSGVELLGPLDRGDMLNEAFIGLSLAPQGEDSFPDNLPPSCPTHRHILQQRILNGSSNRQIIDRRNELEKDICSGFLMTNTCNAEDGELREDGREQEIRDGGSLKMIHFGLV

SEQ ID NO: 1825 - protein, 701 aa, Homo sapiens
MESPSAPPHRWCIPWQRLLLTASLLTFWNPPTTAKLTIESTPFNVAEGKEVLLLVHNLPQHLFGYSWYKGERVDGNRQIIGYVIGTQQATPGPAYSGREIIYPNASLLIQNIIQNDTGFYTLHVIKSDLVNEEATGQFRVYPELPKPSISSNNSKPVEDKDAVAFTCEPETQDATYLWWVNNQSLPVSPRLQLSNGNRTLTLFNVTRNDTASYKCETQNPVSARRSDSVILNVLYGPDAPTISPLNTSYRSGENLNLSCHAASNPPAQYSWFVNGTFQQSTQELFIPNITVNNSGSYTCQAHNSDTGLNRTTVTTITVYEPPKPFITSNNSNPVEDEDAVALTCEPEIQNTTYLWWVNNQSLPVSPRLQLSNDNRTLTLLSVTRNDVGPYECGIQNELSVDHSDPVILNVLYGPDDPTISPSYTYYRPGVNLSLSCHAASNPPAQYSWLIDGNIQQHTQELFISNITEKNSGLYTCQANNSASGHSRTTVKTITVSAELPKPSISSNNSKPVEDKDAVAFTCEPEAQNTTYLWWVNGQSLPVSPRLQLSNGNRTLTLFNVTRNDARAYVCGIQNSVSANRSDPVTLDVLYGPDTPIISPPDSSYLSGANLNLSCHSASNPSPQYSWRINGIPQQHTQVLFIAKITPNNNGTYACFVSNLATGRNNSIVKSITVSASGTSPGLSAGATVGIMIGVLVGVALI

SEQ ID NO: 1826 - protein, 1537 aa, Homo sapiens
MGEKLELRLKSPVGAEPAVYPWPLPVYDKHHDAAHEIIETIRWVCEEIPDLKLAMENYVLIDYDTKSFESMQRLCDKYNRAIDSIHQLWKGTTQPMKLNTRPSTGLLRHILQQVYNHSVTDPEKLNNYEPFSPEVYGETSFDLVAQMIDEIKMTDDDLFVDLGSGVGQVVLQVAAATNCKHHYGVEKADIPAKYAETMDREFRKWMKWYGKKHAEYTLERGDFLSEEWRERIANTSVIFVNNFAFGPEVDHQLKERFANMKEGGRIVSSKPFAPLNFRINSRNLSDIGTIMRVVELSPLKGSVSWTGKPVSYYLHTIDRTILENYFSSLKNPKLREEQEAARRRQQRESKSNAATPTKGPEGKVAGPADAPMDSGAEEEKAGAATVKKPSPSKARKKKLNKKGRKMAGRKRGRPKKMNTANPERKPKKNQTALDALHAQTVSQTAASSPQDAYRSPHSPFYQLPPSVQRHSPNPLLVAPTPPALQKLLESFKIQYLQFLAYTKTPQYKASLQELLGQEKEKNAQLLGAAQQLLSHCQAQKEEIRRLFQQKLDELGVKALTYNDLIQAQKEISAHNQQLREQSEQLEQDNRALRGQSLQLLKARCEELQLDWATLSLEKLLKEKQALKSQISEKQRHCLELQISIVELEKSQRQQELLQLKSCVPPDDALSLHLRGKGALGRELEPDASRLHLELDCTKFSLPHLSSMSPELSMNGQAAGYELCGVLSRPSSKQNTPQYLASPLDQEVVPCTPSHVGRPRLEKLSGLAAPDYTRLSPAKIVLRRHLSQDHTVPGRPAASELHSRAEHTKENGLPYQSPSVPGSMKLSPQDPRPLSPGALQLAGEKSSEKGLRERAYGSSGELITSLPISIPLSTVQPNKLPVSIPLASVVLPSRAERARSTPSPVLQPRDPSSTLEKQIGANAHGAGSRSLALAPAGFSYAGSVAISGALAGSPASLTPGAEPATLDESSSSGSLFATVGSRSSTPQHPLLLAQPRNSLPASPAHQLSSSPRLGGAAQGPLPEASKGDLPSDSGFSDPESEAKRRIVFTITTGAGSAKQSPSSKHSPLTASARGDCVPSHGQDSRRRGRRKRASAGTPSLSAGVSPKRRALPSVAGLFTQPSGSPLNLNSMVSNINQPLEITAISSPETSLKSSPVPYQDHDQPPVLKKERPLSQTNGAHYSPLTSDEEPGSEDEPSSARIERKIATISLESKSPPKTLENGGGLAGRKPAPAGEPVNSSKWKSTFSPISDIGLAKSADSPLQASSALSQNSLFTFRPALEEPSADAKLAAHPRKGFPGSLSGADGLSPGTNPANGCTFGGGLAADLSLHSFSDGASLPHKGPEAAGLSSPLSFPSQRGKEGSDANPFLSKRQLDGLAGLKGEGSRGKEAGEGGLPLCGPTDKTPLLSGKAAKARDREVDLKNGHNLFISAAAVPPGSLLSGPGLAPAASSAGGAASSAQTHRSFLGPFPPGPQFALGPMSLQANLGSVAGSSVLQSLFSSVPAAAGLVHVSSAATRLTNSHAMGSFSGVAGGTVGGN

SEQ ID NO: 1827 - protein, 387 aa, Homo sapiens
MAPPAGGAAAAASDLGSAAVLLAVHAAVRPLGAGPDAEAQLRRLQLSADPERPGRFRLELLGAGPGAVNLEWPLESVSYTIRGPTQHELQPPPGGPGTLSLHFLNPQEAQRWAVLVRGATVEGQNGSKSNSPPALGPEACPVSLPSPPEASTLKGPPPEADLPRSPGNLTEREELAGSLARAIAGGDEKGAAQVAAVLAQHRVALSVQLQEACFPPGPIRLQVTLEDAASAASAASSAHVALQVHPHCTVAALQEQVFSELGFPPAVQRWVIGRCLCVPERSLASYGVRQDGDPAFLYLLSAPREAPATGPSPQHPQKMDGELGRLFPPSLGLPPGPQPAASSLPSPLQPSWSCPSCTFINAPDRPGCEMCSTQRPCTWDPLAAAST

SEQ ID NO: 1828 - protein, 4515 aa, Homo sapiens
MKIVPDERDRVQKKTFTKWVNKHLIKAQRHISDLYEDLRDGHNLISLLEVLSGDSLPREKGRMRFHKLQNVQIALDYLRHRQVKLVNIRNDDIADGNPKLTLGLIWTIILHFQISDIQVSGQSEDMTAKEKLLLWSQRMVEGYQGLRCDNFTSSWRDGRLFNAIIHRHKPLLIDMNKVYRQTNLENLDQAFSVAERDLGVTRLLDPEDVDVPQPDEKSIITYVSSLYDAMPRVPDVQDGVRANELQLRWQEYRELVLLLLQWMRHHTAAFEERRFPSSFEEIEILWSQFLKFKEMELPAKEADKNRSKGIYQSLEGAVQAGQLKVPPGYHPLDVEKEWGKLHVAILEREKQLRSEFERLECLQRIVTKLQMEAGLCEEQLNQADALLQSDVRLLAAGKVPQRAGEVERDLDKADSMIRLLFNDVQTLKDGRHPQGEQMYRRVYRLHERLVAIRTEYNLRLKAGVAAPATQVAQVTLQSVQRRPELEDSTLRYLQDLLAWVEENQHRVDGAEWGVDLPSVEAQLGSHRGLHQSIEEFRAKIERARSDEGQLSPATRGAYRDCLGRLDLQYAKLLNSSKARLRSLESLHSFVAAATKELMWLNEKEEEEVGFDWSDRNTNMTAKKESYSALMRELELKEKKIKELQNAGDRLLREDHPARPTVESFQAALQTQWSWMLQLCCCIEAHLKENAAYFQFFSDVREAEGQLQKLQEALRRKYSCDRSATVTRLEDLLQDAQDEKEQLNEYKGHLSGLAKRAKAVVQLKPRHPAHPMRGRLPLLAVCDYKQVEVTVHKGDECQLVGPAQPSHWKVLSSSGSEAAVPSVCFLVPPPNQEAQEAVTRLEAQHQALVTLWHQLHVDMKSLLAWQSLRRDVQLIRSWSLATFRTLKPEEQRQALHSLELHYQAFLRDSQDAGGFGPEDRLMAEREYGSCSHHYQQLLQSLEQGAQEESRCQRCISELKDIRLQLEACETRTVHRLRLPLDKEPARECAQRIAEQQKAQAEVEGLGKGVARLSAEAEKVLALPEPSPAAPTLRSELELTLGKLEQVRSLSAIYLEKLKTISLVIRGTQGAEEVLRAHEEQLKEAQAVPATLPELEATKASLKKLRAQAEAQQPTFDALRDELRGAQEVGERLQQRHGERDVEVERWRERVAQLLERWQAVLAQTDVRQRELEQLGRQLRYYRESADPLGAWLQDARRRQEQIQAMPLADSQAVREQLRQEQALLEEIERHGEKVEECQRFAKQYINAIKDYELQLVTYKAQLEPVASPAKKPKVQSGSESVIQEYVDLRTHYSELTTLTSQYIKFISETLRRMEEEERLAEQQRAEERERLAEVEAALEKQRQLAEAHAQAKAQAEREAKELQQRMQEEVVRREEAAVDAQQQKRSIQEELQQLRQSSEAEIQAKARQAEAAERSRLRIEEEIRVVRLQLEATERQRGGAEGELQALRARAEEAEAQKRQAQEEAERLRRQVQDESQRKRQAEVELASRVKAEAEAAREKQRALQALEELRLQAEEAERRLRQAEVERARQVQVALETAQRSAEAELQSKRASFAEKTAQLERSLQEEHVAVAQLREEAERRAQQQAEAERAREEAERELERWQLKANEALRLRLQAEEVAQQKSLAQAEAEKQKEEAEREARRRGKAEEQAVRQRELAEQELEKQRQLAEGTAQQRLAAEQELIRLRAETEQGEQQRQLLEEELARLQREAAAATQKRQELEAELAKVRAEMEVLLASKARAEEESRSTSEKSKQRLEAEAGRFRELAEEAARLRALAEEAKRQRQLAEEDAARQRAEAERVLAEKLAAIGEATRLKTEAEIALKEKEAENERLRRLAEDEAFQRRRLEEQAAQHKADIEERLAQLRKASDSELERQKGLVEDTLRQRRQVEEEILALKASFEKAAAGKAELELELGRIRSNAEDTLRSKEQAELEAARQRQLAAEEERRRREAEERVQKSLAAEEEAARQRKAALEEVERLKAKVEEARRLRERAEQESARQLQLAQEAAQKRLQAEEKAHAFAVQQKEQELQQTLQQEQSVLDQLRGEAEAARRAAEEAEEARVQAEREAAQSRRQVEEAERLKQSAEEQAQARAQAQAAAEKLRKEAEQEAARRAQAEQAALRQKQAADAEMEKHKKFAEQTLRQKAQVEQELTTLRLQLEETDHQKNLLDEELQRLKAEATEAARQRSQVEEELFSVRVQMEELSKLKARIEAENRALILRDKDNTQRFLQEEAEKMKQVAEEAARLSVAAQEAARLRQLAEEDLAQQRALAEKMLKEKMQAVQEATRLKAEAELLQQQKELAQEQARRLQEDKEQMAQQLAEETQGFQRTLEAERQRQLEMSAEAERLKLRVAEMSRAQARAEEDAQRFRKQAEEIGEKLHRTELATQEKVTLVQTLEIQRQQSDHDAERLREAIAELEREKEKLQQEAKLLQLKSEEMQTVQQEQLLQETQALQQSFLSEKDSLLQRERFIEQEKAKLEQLFQDEVAKAQQLREEQQRQQQQMEQERQRLVASMEEARRRQHEAEEGVRRKQEELQQLEQQRRQQEELLAEENQRLREQLQLLEEQHRAALAHSEEVTASQVAATKTLPNGRDALDGPAAEAEPEHSFDGLRRKVSAQRLQEAGILSAEELQRLAQGHTTVDELARREDVRHYLQGRSSIAGLLLKATNEKLSVYAALQRQLLSPGTALILLEAQAASGFLLDPVRNRRLTVNEAVKEGVVGPELHHKLLSAERAVTGYKDPYTGQQISLFQAMQKGLIVREHGIRLLEAQIATGGVIDPVHSHRVPVDVAYRRGYFDEEMNRVLADPSDDTKGFFDPNTHENLTYLQLLERCVEDPETGLCLLPLTDKAAKGGELVYTDSEARDVFEKATVSAPFGKFQGKTVTIWEIINSEYFTAEQRRDLLRQFRTGRITVEKIIKIIITVVEEQEQKGRLCFEGLRSLVPAAELLESRVIDRELYQQLQRGERSVRDVAEVDTVRRALRGANVIAGVWLEEAGQKLSIYNALKKDLLPSDMAVALLEAQAGTGHIIDPATSARLTVDEAVRAGLVGPEFHEKLLSAEKAVTGYRDPYTGQSVSLFQALKKGLIPREQGLRLLDAQLSTGGIVDPSKSHRVPLDVACARGCLDEETSRALSAPRADAKAYSDPSTGEPATYGELQQRCRPDQLTGLSLLPLSEKAARARQEELYSELQARETFEKTPVEVPVGGFKGRTVTVWELISSEYFTAEQRQELLRQFRTGKVTVEKVIKILITIVEEVETLRQERLSFSGLRAPVPASELLASGVLSRAQFEQLKDGKTTVKDLSELGSVRTLLQGSGCLAGIYLEDTKEKVSIYEAMRRGLLRATTAALLLEAQAATGFLVDPVRNQRLYVHEAVKAGVVGPELHEQLLSAEKAVTGYRDPYSGSTISLFQAMQKGLVLRQHGIRLLEAQIATGGIIDPVHSHRVPVDVAYQRGYFSEEMNRVLADPSDDTKGFFDPNTHENLTYRQLLERCVEDPETGLRLLPLKGAEKAEVVETTQVYTEEETRRAFEETQIDIPGGGSHGGSTMSLWEVMQSDLIPEEQRAQLMADFQAGRVTKERMIIIIIEIIEKTEIIRQQGLASYDYVRRRLTAEDLFEARIISLETYNLLREGTRSLREALEAESAWCYLYGTGSVAGVYLPGSRQTLSIYQALKKGLLSAEVARLLLEAQAATGFLLDPVKGERLTVDEAVRKGLVGPELHDRLLSAERAVTGYRDPYTEQTISLFQAMKKELIPTEEALRLLDAQLATGGIVDPRLGFHLPLEVAYQRGYLNKDTHDQLSEPSEVRSYVDPSTDERLSYTQLLRRCRRDDGTGQLLLPLSDARKLTFRGLRKQITMEELVRSQVMDEATALQLREGLTSIEEVTKNLQKFLEGTSCIAGVFVDATKERLSVYQAMKKGIIRPGTAFELLEAQAATGYVIDPIKGLKLTVEEAVRMGIVGPEFKDKLLSAERAVTGYKDPYSGKLISLFQAMKKGLILKDHGIRLLEAQIATGGIIDPEESHRLPVEVAYKRGLFDEEMNEILTDPSDDTKGFFDPNTEENLTYLQLMERCITDPQTGLCLLPLKEKKRERKTSSKSSVRKRRVVIVDPETGKEMSVYEAYRKGLIDHQTYLELSEQECEWEEITISSSDGVVKSMIIDRRSGRQYDIDDAIAKNLIDRSALDQYRAGTLSITEFADMLSGNAGGFRSRSSSVGSSSSYPISPAVSRTQLASWSDPTEETGPVAGILDTETLEKVSITEAMHRNLVDNITGQRLLEAQACTGGIIDPSTGERFPVTDAVNKGLVDKIMVDRINLAQKAFCGFEDPRTKTKMSAAQALKKGWLYYEAGQRFLEVQYLTGGLIEPDTPGRVPLDEALQRGTVDARTAQKLRDVGAYSKYLTCPKTKLKISYKDALDRSMVEEGTGLRLLEAAAQSTKGYYSPYSVSGSGSTAGSRTGSRTGSRAGSRRGSFDATGSGFSMTFSSSSYSSSGYGRRYASGSSASLGGPESAVA

SEQ ID NO: 1829 - protein, 345 aa, Homo sapiens
MLPNTGRLAGCTVFITGASRGIGKAIALKAAKDGANIVIAAKTAQPHPKLLGTIYTAAEEIEAVGGKALPCIVDVRDEQQISAAVEKAIKKFGAYTIAKYGMSMYVLGMAEEFKGEIAVNALWPKTAIHTAAMDMLGGPGIESQCRKVDIIADAAYSIFQKPKSFTGNFVIDENILKEEGIENFDVYAIKPGHPLQPDFFLDEYPEAVSKKVESTGAVPEFKEEKLQLQPKPRSGAVEETFRIVKDSLSDDVVKATQAIYLFELSGEDGGTWFLDLKSKGGNVGYGEPSDQADVVMSMTTDDFVKMFSGKLKPTMAFMSGKLKIKGNMALAIKLEKLMNQMNARL

SEQ ID NO: 1830 - protein, 418 aa, Homo sapiens
MLPNTGRLAGCTVFITGASRGIGKAIALKAAKDGANIVIAAKTAQPHPKLLGTIYTAAEEIEAVGGKALPCIVDVRDEQQISAAVEKAIKKFGGIDILVNNASAISLTNTLDTPTKRLDLMMNVNTRGTYLASKACIPYLKKSKVAHILNISPPLNLNPVWFKQHCAYTIAKYGMSMYVLGMAEEFKGEIAVNALWPKTAIHTAAMDMLGGPGIESQCRKVDIIADAAYSIFQKPKSFTGNFVIDENILKEEGIENFDVYAIKPGHPLQPDFFLDEYPEAVSKKVESTGAVPEFKEEKLQLQPKPRSGAVEETFRIVKDSLSDDVVKATQAIYLFELSGEDGGTWFLDLKSKGGNVGYGEPSDQADVVMSMTTDDFVKMFSGKLKPTMAFMSGKLKIKGNMALAIKLEKLMNQMNARL

SEQ ID NO: 1831 - protein, 1380 aa, Homo sapiens
MGRHVATSCHVAWLLVLISGCWGQVNRLPFFTNHFFDTYLLISEDTPVGSSVTQLLAQDMDNDPLVFGVSGEEASRFFAVEPDTGVVWLRQPLDRETKSEFTVEFSVSDHQGVITRKVNIQVGDVNDNAPTFHNQPYSVRIPENTPVGTPIFIVNATDPDLGAGGSVLYSFQPPSQFFAIDSARGIVTVIRELDYETTQAYQLTVNATDQDKTRPLSTLANLAIIITDVQDMDPIFINLPYSTNIYEHSPPGTTVRIITAIDQDKGRPRGIGYTIVSGNTNSIFALDYISGVLTLNGLLDRENPLYSHGFILTVKGTELNDDRTPSDATVTTTFNILVIDINDNAPEFNSSEYSVAITELAQVGFALPLFIQVVDKDENLGLNSMFEVYLVGNNSHHFIISPTSVQGKADIRIRVAIPLDYETVDRYDFDLFANESVPDHVGYAKVKITLINENDNRPIFSQPLYNISLYENVTVGTSVLTVLATDNDAGTFGEVSYFFSDDPDRFSLDKDTGLIMLIARLDYELIQRFTLTIIARDGGGEETTGRVRINVLDVNDNVPTFQKDAYVGALRENEPSVTQLVRLRATDEDSPPNNQITYSIVSASAFGSYFDISLYEGYGVISVSRPLDYEQISNGLIYLTVMAMDAGNPPLNSTVPVTIEVFDENDNPPTFSKPAYFVSVVENIMAGATVLFLNATDLDRSREYGQESIIYSLEGSTQFRINARSGEITTTSLLDRETKSEYILIVRAVDGGVGHNQKTGIATVNITLLDINDNHPTWKDAPYYINLVEMTPPDSDVTTVVAVDPDLGENGTLVYSIQPPNKFYSLNSTTGKIRTTHAMLDRENPDPHEAELMRKIVVSVTDCGRPPLKATSSATVFVNLLDLNDNDPTFQNLPFVAEVLEGIPAGVSIYQVVAIDLDEGLNGLVSYRMPVGMPRMDFLINSSSGVVVTTTELDRERIAEYQLRVVASDAGTPTKSSTSTLTIHVLDVNDETPTFFPAVYNVSVSEDVPREFRVVWLNCTDNDVGLNAELSYFITGGNVDGKFSVGYRDAVVRTVVGLDRETTAAYMLILEAIDNGPVGKRHTGTATVFVTVLDVNDNRPIFLQSSYEASVPEDIPEGHSILQAATDADEGEFGRVWYRILHGNHGNNFRIHVSNGLLMRGPRPLDRERNSSHVLIVEAYNHDLGPMRSSVRVIVYVEDINDEAPVFTQQQYSRLGLRETAGIGTSVIVVQATDRDSGDGGLVNYRILSGAEGKFEIDESTGLIITVNYLDYETKTSYMMNVSATDQAPPFNQGFCSVYITLLNELDEAVQFSNASYEAAILENLALGTEIVRVQAYSIDNLNQITYRFNAYTSTQAKALFKIDAITVRGWGQGAPFLPI

SEQ ID NO: 1832 - protein, 445 aa, Homo sapiens
MDNDPLVFGVSGEEASRFFAVEPDTGVVWLRQPLDRETKSEFTVEFSVSDHQGVITRKVNIQVGDVNDNAPTFHNQPYSVRIPENTPVGTPIFIVNATDPDLGAGGSVLYSFQPPSQFFAIDSARGIVTVIRELDYETTQAYQLTVNALAIIITNLPYSTNIYEHSPPGTTVRIITAIDQDKGRPRGIGYTIVSGNTNSIFALDYISGVLTLNGLLDRENPLYSHGFILTVKGTELNDDRTPSDATVTTTFNILVIDINDNAPEFNSSEYSVAITELAQVGFALPLFIQVVDKDEGLNSMFEVYLVGNNSHHFIISPTSVQGKADIRIRVAIPLDYETVDRYDFDLFANESVPDHVGYAKVKITLINENDNRPIFSQPLYNISLYENVTVGTSVLTVLVSPRFTAGPLSSPGPTVVRHPEGFCPRDLSNQGRRHPQIPELCLLVY

SEQ ID NO: 1833 - protein, 719 aa, Homo sapiens
MAGGVWGRSRAREAPVGALTLTALTEGIRARQGQPQGPPSAGPQPKSWEVKPEAEPQTQALTAPSEAEPGRGATVPEAGSEPCSLNSALEPAPEGPHQVPQSSWEEGVLADLALYTAACLEEAGFAGTQATVLTLSSALEARGERLEDQVHALVRGLLAQVPSLAEGRPWRAALRVLSALALEHARDVVCALLPRSLPADRVAAELWRSLSRNQRVNGQVLVQLLWALKGASGPEPQALAATRALGEMLAVSGCVGATRGFYPHLLLALVTQLHKLARSPCSPDMPKIWVLSHRGPPHSHASCAVEALKALLTGDGGRMVVTCMEQAGGWRRLVGAHTHLEGVLLLASAMVAHADHHLRGLFADLLPRLRSADDPQRLTAMAFFTGLLQSRPTARLLREEVILERLLTWQGDPEPTVRWLGLLGLGHLALNRRKVRHVSTLLPALLGALGEGDARLVGAALGALRRLLLRPRAPVRLLSAELGPRLPPLLDDTRDSIRASAVGLLGTLVRRGRGGLRLGLRGPLRKLVLQSLVPLLLRLHDPSRDAAESSEWTLARCDHAFCWGLLEELVTVAHYDSPEALSHLCCRLVQRYPGHVPNFLSQTQGYLRSPQDPLRRAAAVLIGFLVHHASPGCVNQDLLDSLFQDLGRLQSDPKPAVAAAAHVSAQQVAMLARARGCPRGPRLLRIAPRPARPPPVFADSPFQRRSVAGRWGCSGPRRA

SEQ ID NO: 1834 - protein, 224 aa, Homo sapiens
MSWKKALRIPGDLRVATVTLMLAMLSSLLAEGRDSPEDFVFQFKGMCYFTNGTERVRLVTRYIYNREEYARFDSDVGVYRAVTPQGRPDAEYWNSQKEVLEGTRAELDTVCRHNYEVAFRGILQRRVEPTVTISPSRTEALNHHNLLVCSVTDFYPGQIKVRWFRNDQEETAGVVSTPLIRNGDWTFQILVMLEMTPQRGDVYTCHVEHPSLQSPITVEWRLLH

SEQ ID NO: 1835 - protein, 261 aa, Homo sapiens
MSWKKALRIPGDLRVATVTLMLAMLSSLLAEGRDSPEDFVFQFKGMCYFTNGTERVRLVTRYIYNREEYARFDSDVGVYRAVTPQGRPDAEYWNSQKEVLEGTRAELDTVCRHNYEVAFRGILQRRVEPTVTISPSRTEALNHHNLLVCSVTDFYPGQIKVRWFRNDQEETAGVVSTPLIRNGDWTFQILVMLEMTPQRGDVYTCHVEHPSLQSPITVEWRAQSESAQSKMLSGVGGFVLGLIFLGLGLIIRQRSQKGLLH

SEQ ID NO: 1836 - protein, 340 aa, Homo sapiens
MGLGRVLLFLAVAFPFAPPAAAAEPHSLRYNLMVLSQDGSVQSGFLAEGHLDGQPFLRYDRQKRRAKPQGQWAENVLGAKTWDTETEDLTENGQDLRRTLTHIKDQKGVPQSSRAQTLAMNVTNFWKEDAMKTKTHYRAMQADCLQKLQRYLKSGVAIRRTVPPMVNVTCSEVSEGNITVTCRASSFYPRNITLTWRQDGVSLSHNTQQWGDVLPDGNGTYQTWVATRIRQGEEQRFTCYMEHSGNHGTHPVPSGKALVLQSQRTDFPYVSAAMPCFVIIIILCVPCCKKKTSAAEGPELVSLQVLDQHPVGTGDHRDAAQLGFQPLMSATGSTGSTEGT

SEQ ID NO: 1837 - protein, 1274 aa, Homo sapiens
MPEPGKKPVSAFSKKPRSVEVAAGSPAVFEAETERAGVKVRWQRGGSDISASNKYGLATEGTRHTLTVREVGPADQGSYAVIAGSSKVKFDLKVIEAEKAEPMLAPAPAPAEATGAPGEAPAPAAELGESAPSPKGSSSAALNGPTPGAPDDPIGLFVMRPQDGEVTVGGSITFSARVAGASLLKPPVVKWFKGKWVDLSSKVGQHLQLHDSYDRASKVYLFELHITDAQPAFTGSYRCEVSTKDKFDCSNFNLTVHEAMGTGDLDLLSAFRRTSLAGGGRRISDSHEDTGILDFSSLLKKSSSFRTPRDSKLEAPAEEDVWEILRQAPPSEYERIAFQYGVTDLRGMLKRLKGMRRDEKKSTAFQKKLEPAYQVSKGHKIRLTVELADHDAEVKWLKNGQEIQMSGSKYIFESIGAKRTLTISQCSLADDAAYQCVVGGEKCSTELFVKEPPVLITRPLEDQLVMVGQRVEFECEVSEEGAQVKWLKDGVELTREETFKYRFKKDGQRHHLIINEAMLEDAGHYALCTSGGQALAELIVQEKKLEVYQSIADLMVGAKDQAVFKCEVSDENVRGVWLKNGKELVPDSRIKVSHIGRVHKLTIDDVTPADEADYSFVPEGFACNLSAKLHFMEVKIDFVPRQEPPKIHLDCPGRIPDTIVVVAGNKLRLDVPISGDPAPTVIWQKAITQGNKAPARPAPDAPEDTGDSDEWVFDKKLLCETEGRVRVETTKDRSIFTVEGAEKEDEGVYTVTVKNPVGEDQVNLTVKVIDVPDAPAAPKISNVGEDSCTVQWEPPAYDGGQPILGYILERKKKKSYRWMRLNFDLIQELSHEARRMIEGVVYEMRVYAVNAIGMSRPSPASQPFMPIGPPSEPTHLAVEDVSDTTVSLKWRPPERVGAGGLDGYSVEYCPEGCSEWVAALQGLTEHTSILVKDLPTGARLLFRVRAHNMAGPGAPVTTTEPVTVQEILQRPRLQLPRHLRQTIQKKVGEPVNLLIPFQGKPRPQVTWTKEGQPLAGEEVSIRNSPTDTILFIRAARRVHSGTYQVTVRIENMEDKATLVLQVVDKPSPPQDLRVTDAWGLNVALEWKPPQDVGNTELWGYTVQKADKKTMEWFTVLEHYRRTHCVVPELIIGNGYYFRVFSQNMVGFSDRAATTKEPVFIPRPGITYEPPNYKALDFSEAPSFTQPLVNRSVIAGYTAMLCCAVRGSPKPKISWFKNGLDLGEDARFRMFSKQGVLTLEIRKPCPFDGGIYVCRATNLQGEARCECRLEVRVPQ

SEQ ID NO: 1838 - protein, 828 aa, Homo sapiens
MDPPRPALLALLALPALLLLLLAGARAEEEMLENVSLVCPKDATRFKHLRKYTYNYEAESSSGVPGTADSRSATRINCKVELEVPQLCSFILKTSQCTLKEVYGFNPEGKALLKKTKNSEEFAAAMSRYELKLAIPEGKQVFLYPEKDEPTYILNIKRGIISALLVPPETEEAKQVLFLDTVYGNCSTHFTVKTRKGNVATEISTERDLGQCDRFKPIRTGISPLALIKGMTRPLSTLISSSQSCQYTLDAKRKHVAEAICKEQHLFLPFSYKNKYGMVAQVTQTLKLEDTPKINSRFFGEGTKKMGLAFESTKSTSPPKQAEAVLKTLQELKKLTISEQNIQRANLFNKLVTELRGLSDEAVTSLLPQLIEVSSPITLQALVQCGQPQCSTHILQWLKRVHANPLLIDVVTYLVALIPEPSAQQLREIFNMARDQRSRATLYALSHAVNNYHKTNPTGTQELLDIANYLMEQIQDDCTGDEDYTYLILRVIGNMGQTMEQLTPELKSSILKCVQSTKPSLMIQKAAIQALRKMEPKDKDQEVLLQTFLDDASPGDKRLAAYLMLMRSPSQADINKIVQILPWEQNEQVKNFVASHIANILNSEELDIQDLKKLVKEALKESQLPTVMDFRKFSRNYQLYKSVSLPSLDPASAKIEGNLIFDPNNYLPKESMLKTTLTAFGFASADLIEIGLEGKGFEPTLEALFGKQGFFPDSVNKALYWVNGQVPDGVSKVLVDHFGYTKDDKHEQDMVNGIMLSVEKLIKDLKSKEVPEARAYLRILGEELGFASLHDLQLLGKLLLMDRPDSLTIPAAQARKDACTFFRDGGLP

SEQ ID NO: 1839 - protein, 2540 aa, Homo sapiens
MAVETRAELVGKRFLCVAVGDEARSERWESGRGWRSWRAGVIRAVSHRDSRNPDLAVYVEFDDLEWDKREWVKVYEDFSTFLVEYHLIWAKRNDPSQTQGSKSKQIQWPALTFKPLVERNIPSSVTAVEFLVDKQLDFLTEDSAFQPYQDDIDSLNPVLRDNPQLHEEVKVWVKEQKVQEIFMQGPYSLNGYRVRVYRQDSATQWFTGIITHHDLFTRTMIVMNDQVLEPQNVDPSMVQMTFLDDVVHSLLKGENIGITSRRRSRANQNVNAVHSHYTRAQANSPRPAMNSQAAVPKQNTHQQQQQRSIRPNKRKGSDSSIPDEEKMKEEKYDYISRGENPKGKNKHLMNKRRKPEEDEKKLNMKRLRTDNVSDFSESSDSENSNKRIIDNSSEQKPENELKNKNTSKINGEEGKPHNNEKAGEETLKNSQPPWDQIQEDKKHEEAEKRKSVDTQLQEDMIIHSSEQSTVSDHNSNDLLPQECNMDKTHTMELLPKEKFVSRPPTPKCVIDITNDTNLEKVAQENSSTFGLQTLQKMDPNVSDSKHSIANAKFLETAKKDSDQSWVSDVVKVDLTQSSVTNASSGNDHLNMEKEKYVSYISPLSAVSVMEDKLHKRSPPPETIKSKLNTSVDTHKIKSSPSPEVVKPKITHSPDSVKSKATYVNSQATGERRLANKIEHELSRCSFHPIPTRSSTLETTKSPLIIDKNEHFTVYRDPALIGSETGANHISPFLSQHPFPLHSSSHRTCLNPGTHHPALTPAPHLLAGSSSQTPLPTINTHPLTSGPHHAVHHPHLLPTVLPGVPTASLLGGHPRLESAHASSLSHLALAHQQQQQLLQHQSPHLLGQAHPSASYNQLGLYPIIWQYPNGTHAYSGLGLPSSKWVHPENAVNAEASLRRNSPSPWLHQPTPVTSADGIGLLSHIPVRPSSAEPHRPLKITAHSSPPLTKTLVDHHKEELERKAFMEPLRSVASTSAKNDLDLNRSQTGKDCHLHRHFVDPVLNQLQRPPQETGERLNKYKEEHRRILQESIDVAPFTTKIKGLEGERENYSRVASSSSSPKSHIIKQDMDVERSVSDLYKMKHSVPQSLPQSNYFTTLSNSVVNEPPRSYPSKEVSNIYGDKQSNALAAAAANPQTLTSFITSLSKPPPLIKHQPESEGLVGKIPEHLPHQIASHSVTTFRNDCRSPTHLTVSSTNTLRSMPALHRAPVFHPPIHHSLERKEGSYSSLSPPTLTPVMPVNAGGKVQESQKPPTLIPEPKDSQANFKSSSEQSLTEMWRPNNNLSKEKTEWHVEKSSGKLQAAMASVIVRPSSSTKTDSMPAMQLASKDRVSERSSAGAHKTDCLKLAEAGETGRIILPNVNSDSVHTKSEKNFQAVSQGSVPSSVMSAVNTMCNTKTDVITSAADTTSVSSWGGSEVISSLSNTILASTSSECVSSKSVSQPVAQKQECKVSTTAPVTLASSKTGSVVQPSSGFSGTTDFIHLKKHKAALAAAQYKSSNASETEPNAIKNQTLSASLPLDSTVICSTINKANSVGNGQASQTSQPNYHTKLKKAWLTRHSEEDKNTNKMENSGNSVSEIIKPCSVNLIASTSSDIQNSVDSKIIVDKYVKDDKVNRRKAKRTYESGSESGDSDESESKSEQRTKRQPKPTYKKKQNDLQKRKGEIEEDLKPNGVLSRSAKERSKLKLQSNSNTGIPRSVLKDWRKVKKLKQTGESFLQDDSCCEIGPNLQKCRECRLIRSKKGEEPAHSPVFCRFYYFRRLSFSKNGVVRIDGFSSPDQYDDEAMSLWTHENFEDDELDIETSKYILDIIGDKFCQLVTSEKTALSWVKKDAKIAWKRAVRGVREMCDACEATLFNIHWVCQKCGFVVCLDCYKAKERKSSRDKELYAWMKCVKGQPHDHKHLMPTQIIPGSVLTDLLDAMHTLREKYGIKSHCHCTNKQNLQVGNFPTMNGVSQVLQNVLNHSNKISLCMPESQQQNTPPKSEKNGGSSPESDVGTDNKLTPPESQSPLHWLADLAEQKAREEKKENKELTLENQIKEEREQDNSESPNGRTSPLVSQNNEQGSTLRDLLTTTAGKLRVGSTDAGIAFAPVYSMGAPSSKSGRTMPNILDDIIASVVENKIPPSKTSKINVKPELKEEPEESIISAVDENNKLYSDIPHSWICEKHILWLKDYKNSSNWKLFKECWKQGQPAVVSGVHKKMNISLWKAESISLDFGDHQADLLNCKDSIISNANVKEFWDGFEEVSKRQKNKSGETVVLKLKDWPSGEDFKTMMPARYEDLLKSLPLPEYCNPEGKFNLASHLPGFFVRPDLGPRLCSAYGVVAAKDHDIGTTNLHIEVSDVVNILVYVGIAKGNGILSKAGILKKFEEEDLDDILRKRLKDSSEIPGALWHIYAGKDVDKIREFLQKISKEQGLEVLPEHDPIRDQSWYVNKKLRQRLLEEYGVRTCTLIQFLGDAIVLPAGALHQVQNFHSCIQVTEDFVSPEHLVESFHLTQELRLLKEEINYDDKLQVKNILYHAVKEMVRALKIHEDEVEDMEEN

SEQ ID NO: 1840 - protein, 1735 aa, Homo sapiens
MNFLSTAESRTAQAAASGTTLLPQFRAPSWQTGMHSSAATELFATGPLPSTGTLPPSLSAYQHPTTFSNRNFATTSPLVLQDSTFNTTSNGILSHHDPLLQIKTSQGTVPTALAFERLGSSVLSNSIPPQSSTYRSAQESAPHLLQPQFSLLPSALGGSQQTPQAYSSTLFTSSTASIERALLRECSVIKHHQRPSGTQSIQAQLTGSQHSLHSYLSNSSVVNFQETTRQSSLSCSPIGDSTQVSNGGLQQKTSQVSVELAQSYSSAIPSSGYPPSTTKIKSCSTEQPLTSTKTPKPQSIIPPVQTLSYSKPLHNQSSVISGQAQIYSTAQLPSLLSVSQSQNYGLVQPHNVPSIVHSQVYRSSKVEKLPPLYKTLTFSGSSQTVTPENQTLNYSSNQQEVLSSVTNENYPAQTRDLSSVSQSQSYSSGHSQGLSPVSQTQVSYSSQSQVLSVVSLSESYASGESLTLTAPSLSYSSASRAQNLPDSSPTQNYISMHSSQNVQTQESSSPQSQKFLPAVQSSSFASSTHCQTLQNNITSPDPKSYAERKLDSDVYPSSKQEDGFPMQELQVLQPQASLESSTQRLSDGEINAQESTYKVSKADDRYSQSVIRSNSRLEDQVIGVALQASKKEESVVGSVTQLNQQIGQVNNAATLDLKNSTNLIQTPQIRLNTKDLKQQHPLILKVHESKVQEQHDQIINASSQIQIPNHALGHGHQASLPNTQVLLDSACDLQILQQSILQAGLGQVKASLQAQRVQSPQQIVHPFLQMEGHVIQSNGDHSQQQLHPQNSEVMKMDLSESSKPLQQHLTTKGHFSETNQHDSKNQFVSLGSMCFPEAVLLSDERNILSNVDDILAATAAACGVTPTDFSKSTSNETMQAVEDGDSKSHFQQSLDVRHVTSDFNSMTATVGKPQNINDTSLNGNQVTVNLSPVPALQSKMTLDQQHIETPGQNIPTKVTSAVVGPSHEVQEQSSGPFKKQSATNLESEEDSEAPVDSTLNNNRNQEFVSSSRSISGENATSESEFTLGGDDSGVSMNPARSALALLAMAQSGDAVSVKIEEENQDLMHFNLQKKRAKGKGQVKEEDNSNQKQLKRPAQGKRQNPRGTDIYLPYTPPSSESCHDGYQHQEKMRQKIKEVEEKQPEVKTGFIASFLDFLKSGPKQQFSTLAVRMPNRTRRPGTQMVRTFCPPPLPKPSSTTPTPLVSETGGNSPSDKVDNELKNLEHLSSFSSDEDDPGYSQDAYKSVSTPLTTLDATSDKKKKTEALQVATTSPTANTTGTATTSSTTVGAVKQEPLHSTSYAVNILENISSSESSKPIELDGLPSDQFAKGQDTVAIEGFTDEEDTESGGEGQYRERDEFVVKIEDIETFKEALKTGKEPPAIWKVQKALLQKFVPEIRDGQREFAATNSYLGYFGDAKSKYKRIYVKFIENANKKEYVRVCSKKPRNKPSQTIRTVQAKPSSSSKTSDPLASKTTTTKAPSVKPKVKQPKVKAEPPPKKRKKWKEEFSSSQSDSSPEIHTSSSDDEEFEPPAPFVTRFLNTRAMKETFKSYMELLVSIALDPDTMQALEKSNDELLLPHMKKIDGMLNDNRKRLLLNLHLDQSFKNALESFPELTIITRDSKAKSGGTAISKIKMNGKAYNKKTLRTSKTTTKSAQEFAVDPEKIQLYSLYHSLHHYKYHVYLICKDEISSVQKKNEDLGQEEIVQLCMKNVKWVEDLFEKFGELLNHVQQKCS

SEQ ID NO: 1841 - protein, 995 aa, Homo sapiens
MKLDVNFQRKKGDDSDEEDLCISNKWTFQRTSRRWSRVDDLYTLLPRGDRNGSPGGTGMRNTTSSESVLTDLSEPEVCSIHSESSGGSDSRSQPGQCCTDNPVMLDAPLVSSSLPQPPRDVLNHPFHPKNEKPTRARAKSFLKRMETLRGKGAHGRHKGSGRTGGLVISGPMLQQEPESFKAMQCIQIPNGDLQNSPPPACRKGLPCSGKSSGESSPSEHSSSGVSTPCLKERKCHEANKRGGMYLEDLDVLAGTALPDAGDQSRMHEFHSQENLVVHIPKDHKPGTFPKALSIESLSPTDSSNGVNWRTGSISLGREQVPGAREPRLMASCHRASRVSIYDNVPGSHLYASTGDLLDLEKDDLFPHLDDILQHVNGLQEVVDDWSKDVLPELQTHDTLVGEPGLSTFPSPNQITLDFEGNSVSEGRTTPSDVERDVTSLNESEPPGVRDRRDSGVGASLTRPNRRLRWNSFQLSHQPRPAPASPHISSQTASQLSLLQRFSLLRLTAIMEKHSMSNKHGWTWSVPKFMKRMKVPDYKDKAVFGVPLIVHVQRTGQPLPQSIQQALRYLRSNCLDQVGLFRKSGVKSRIHALRQMNENFPENVNYEDQSAYDVADMVKQFFRDLPEPLFTNKLSETFLHIYQYVSKEQRLQAVQAAILLLADENREVLQTLLCFLNDVVNLVEENQMTPMNLAVCLAPSLFHLNLLKKESSPRVIQKKYATGKPDQKDLNENLAAAQGLAHMIMECDRLFEVPHELVAQSRNSYVEAEIHVPTLEELGTQLEESGATFHTYLNHLIQGLQKEAKEKFKGWVTCSSTDNTDLAFKKVGDGNPLKLWKASVEVEAPPSVVLNRVLRERHLWDEDFVQWKVVETLDRQTEIYQYVLNSMAPHPSRDFVVLRTWKTDLPKGMCTLVSLSVEHEEAQLLGGVRAVVMDSQYLIEPCGSGKSRLTHICRIDLKGHSPEWYSKGFGHLCAAEVARIRNSFQPLIAEGPETKI

SEQ ID NO: 1842 - protein, 910 aa, Homo sapiens
VEMCVDARTFGNDARFIRRSCTPNAEVRHMIADGMIHLCIYAVSAITKDAEVTIAFDYEYSNCNYKVDCACHKGNRNCPIQKRNPNATELPLLPPPPSLPTIGAETRRRKARRKELEMEQQNEASEENNDQQSQEVPEKVTVSSDHEEVDNPEEKPEEEKEEVIDDQENLAHSRRTREDRKVEAIMHAFENLEKRKKRRDQPLEQSNSDVEITTTTSETPVGEETKTEAPESEVSNSVSNVTIPSTPQSVGVNTRRSSQAGDIAAEKLVPKPPPAKPSRPRPKSRISRYRTSSAQRLKRQKQANAQQAELSQAALEEGGSNSLVTPTEAGSLDSSGENRPLTGSDPTVVSITGSHVNRAASKYPKTKKYLVTEWLNDKAEKQECPVECPLRITTDPTVLATTLNMLPGLIHSPLICTTPKHYIRFGSPFIPERRRRPLLPDGTFSSCKKRWIKQALEEGMTQTSSVPQETRTQHLYQSNENSSSSSICKDNADLLSPLKKWKSRYLMEQNVTKLLRPLSPVTPPPPNSGSKSPQLATPGSSHPGEEECRNGYSLMFSPVTSLTTASRCNTPLQFELCHRKDLDLAKVGYLDSNTNSCADRPSLLNSGHSDLAPHPSLGPTSETGFPSRSGDGHQTLVRNSDQAFRTEFNLMYAYSPLNAMPRADGLYRGSPLVGDRKPLHLDGGYCSPAEGFSSRYEHGLMKDLSRGSLSPGGERACEGVPSAPQNPPQRKKVSLLEYRKRKQEAKENSAGGGGDSAQSKSKSAGAGQGSSNSVSDTGAHGVQGSSARTPSSPHKKFSPSHSSMSHLEAVSPSDSRGTSSSHCRPQENISSRWMVPTSVERLREGGSIPKVLRSSVRVAQKGEPSPTWESNITEKDSDPADGEGPETLSSALSKGATVYSPSRYSYQICD

SEQ ID NO: 1843 - protein, 201 aa, Homo sapiens
MASSSTVPLGFHYETKYVVLSYLGLLSQEKLQEQHLSSPQGVQLDIASQSLDQEILLKVKTEIEEELKSLDKEISEAFTSTGFDRHTSPVFSPANPESSMEDCLAHLGEKVSQELKEPLHKALQMLLSQPVTYQAFRECTLETTVHASGWNKILVPLVLLRQMLLELTRRGQEPLSALLQFGVTYLEDYSAEYIIQQGGWV

SEQ ID NO: 1844 - protein, 132 aa, Homo sapiens
MNHIVQTFSPVNSGQPPNYEMLKEEQEVAMLGVPHNPAPPMSTVIHIRSETSVPDHVVWSLFNTLFMNTCCLGFIAFAYSVKSRDRKMVGDVTGAQAYASTAKCLNIWALILGIFMTILLIIIPVLVVQAQR

SEQ ID NO: 1845 - protein, 3388 aa, Homo sapiens
MTAWRRFQSLLLLLGLLVLCARLLTAAKGQNCGGLVQGPNGTIESPGFPHGYPNYANCTWIIITGERNRIQLSFHTFALEEDFDILSVYDGQPQQGNLKVRLSGFQLPSSIVSTGSILTLWFTTDFAVSAQGFKALYEVLPSHTCGNPGEILKGVLHGTRFNIGDKIRYSCLPGYILEGHAILTCIVSPGNGASWDFPAPFCRAEGACGGTLRGTSSSISSPHFPSEYENNADCTWTILAEPGDTIALVFTDFQLEEGYDFLEISGTEAPSIWLTGMNLPSPVISSKNWLRLHFTSDSNHRRKGFNAQFQVKKAIELKSRGVKMLPSKDGSHKNSVLSQGGVALVSDMCPDPGIPENGRRAGSDFSRVGANVQFSCEDNYVLQGSKSITCQRVTETLAAWSDHRPICRARTCGSNLRGPSGVITSPNYPVQYEDNAHCVWVITTTDPDKVIKLAFEEFELERGYDTLTVGDAGKVGDTRSVLYVLTGSSVPDLIVSMSNQMWLHLQSDDSIGSPGFKAVYQEIEKGGCGDPGIPAYGKRTGSSFLHGDTLTFECPAAFELVGERVITCQQNNQWSGNKPSCVFSCFFNFTASSGIILSPNYPEEYGNNMNCVWLIISEPGSRIHLIFNDFDVEPQFDFLAVKDDGISDITVLGTFSGNEVPSQLASSGHIVRLEFQSDHSTTGRGFNITYTTFGQNECHDPGIPINGRRFGDRFLLGSSVSFHCDDGFVKTQGSESITCILQDGNVVWSSTVPRCEAPCGGHLTASSGVILPPGWPGYYKDSLHCEWIIEAKPGHSIKITFDRFQTEVNYDTLEVRDGPASSSPLIGEYHGTQAPQFLISTGNFMYLLFTTDNSRSSIGFLIHYESVTLESDSCLDPGIPVNGHRHGGDFGIRSTVTFSCDPGYTLSDDEPLVCERNHQWNHALPSCDALCGGYIQGKSGTVLSPGFPDFYPNSLNCTWTIEVSHGKGVQMIFHTFHLESSHDYLLITEDGSFSEPVARLTGSVLPHTIKAGLFGNFTAQLRFISDFSISYEGFNITFSEYDLEPCDDPGVPAFSRRIGFHFGVGDSLTFSCFLGYRLEGATKLTCLGGGRRVWSAPLPRCVAECGASVKGNEGTLLSPNFPSNYDNNHECIYKIETEAGKGIHLRTRSFQLFEGDTLKVYDGKDSSSRPLGTFTKNELLGLILNSTSNHLWLEFNTNGSDTDQGFQLTYTSFDLVKCEDPGIPNYGYRIRDEGHFTDTVVLYSCNPGYAMHGSNTLTCLSGDRRVWDKPLPSCIAECGGQIHAATSGRILSPGYPAPYDNNLHCTWIIEADPGKTISLHFIVFDTEMAHDILKVWDGPVDSDILLKEWSGSALPEDIHSTFNSLTLQFDSDFFISKSGFSIQFSTSIAATCNDPGMPQNGTRYGDSREAGDTVTFQCDPGYQLQGQAKITCVQLNNRFFWQPDPPTCIAACGGNLTGPAGVILSPNYPQPYPPGKECDWRVKVNPDFVIALIFKSFNMEPSYDFLHIYEGEDSNSPLIGSYQGSQAPERIESSGNSLFLAFRSDASVGLSGFAIEFKEKPREACFDPGNIMNGTRVGTDFKLGSTITYQCDSGYKILDPSSITCVIGADGKPSWDQVLPSCNAPCGGQYTGSEGVVLSPNYPHNYTAGQICLYSITVPKEFVVFGQFAYFQTALNDLAELFDGTHAQARLLSSLSGSHSGETLPLATSNQILLRFSAKSGASARGFHFVYQAVPRTSDTQCSSVPEPRYGRRIGSEFSAGSIVRFECNPGYLLQGSTALHCQSVPNALAQWNDTIPSCVVPCSGNFTQRRGTILSPGYPEPYGNNLNCIWKIIVTEGSGIQIQVISFATEQNWDSLEIHDGGDVTAPRLGSFSGTTVPALLNSTSNQLYLHFQSDISVAAAGFHLEYKTVGLAACQEPALPSNSIKIGDRYMVNDVLSFQCEPGYTLQGRSHISCMPGTVRRWNYPSPLCIATCGGTLSTLGGVILSPGFPGSYPNNLDCTWRISLPIGYGAHIQFLNFSTEANHDFLEIQNGPYHTSPMIGQFSGTDLPAALLSTTHETLIHFYSDHSQNRQGFKLAYQAYELQNCPDPPPFQNGYMINSDYSVGQSVSFECYPGYILIGHPVLTCQHGINRNWNYPFPRCDAPCGYNVTSQNGTIYSPGFPDEYPILKDCIWLITVPPGHGVYINFTLLQTEAVNDYIAVWDGPDQNSPQLGVFSGNTALETAYSSTNQVLLKFHSDFSNGGFFVLNFHAFQLKKCQPPPAVPQAEMLTEDDDFEIGDFVKYQCHPGYTLVGTDILTCKLSSQLQFEGSLPTCEAQCPANEVRTGSSGVILSPGYPGNYFNSQTCSWSIKVEPNYNITIFVDTFQSEKQFDALEVFDGSSGQSPLLVVLSGNHTEQSNFTSRSNQLYLRWSTDHATSKKGFKIRYAAPYCSLTHPLKNGGILNRTAGAVGSKVHYFCKPGYRMVGHSNATCRRNPLGMYQWDSLTPLCQAVSCGIPESPGNGSFTGNEFTLDSKVVYECHEGFKLESSQQATAVCQEDGLWSNKGKPPTCKPVACPSIEAQLSEHVIWRLVSGSLNEYGAQVLLSCSPGYYLEGWRLLRCQANGTWNIGDERPSCRAGHCGSPDPIVNGHISGDGFSYRDTVVYQCNPGFRLVGTSVRICLQDHKWSGQTPVCVPITCGHPGNPAHGFTNGSEFNLNDVVNFTCNTGYLLQGVSRAQCRSNGQWSSPLPTCRVVNCSDPGFVENAIRHGQQNFPESFEYGMSILYHCKKGFYLLGSSALTCMANGLWDRSLPKCLAISCGHPGVPANAVLTGELFTYGAVVHYSCRGSESLIGNDTRVCQEDSHWSGALPHCTGNNPGFCGDPGTPAHGSRLGDDFKTKSLLRFSCEMGHQLRGSPERTCLLNGSWSGLQPVCEAVLCPQPPPVQNGTVEGSDFRWGSSISYSCMDGYQLSHSAILSCEGRGVWKGEIPQCLPVFCGDPGIPAEGRLSGKSFTYKSEVFFQCKSPFILVGSSRRVCQADGTWSGIQPTCIDPAHNTCPDPGTPHFGIQNSSRGYEVGSTVFFRCRKGYHIQGSTTRTCLANLTWSGIQTECIPHACRQPETPAHADVRAIDLPTFGYTLVYTCHPGFFLAGGSEHRTCKADMKWTGKSPVCKSKGVREVNETVTKTPVPSDVFFVNSLWKGYYEYLGKRQPATLTVDWFNATSSKVNATFSEASPVELKLTGIYKKEEAHLLLKAFQIKGQADIFVSKFENDNWGLDGYVSSGLERGGFTFQGDIHGKDFGKFKLERQDPLNPDQDSSSHYHGTSSGSVAAAILVPFFALILSGFAFYLYKHRTRPKVQYNGYAGHENSNGQASFENPMYDTNLKPTEAKAVRFDTTLNTVCTVV

SEQ ID NO: 1846 - protein, 1242 aa, Homo sapiens
MKNLLTEKCISSHNFHQKVIKQRMEKKVDSRYFKDGAVKKPYSAKTLSNKKSSASFGIRRELPSTSHLVQYRGTHTCTRQGRLRELRIRCVARKFLYLWIRMTFGRVFPSKARFYYEQRLLRKVFEEWKEEWWVFQHEWKLCVRADCHYRYYLYNLMFQTWKTYVRQQQEMRNKYIRAEVHDAKQKMRQAWKSWLIYVVVRRTKLQMQTTALEFRQRIILRVWWSTWRQRLGQVRVSRALHASALKHRALSLQVQAWSQWREQLLYVQKEKQKVVSAVKHHQHWQKRRFLKAWLEYLQVRRVKRQQNEMAERFHHVTVLQIYFCDWQQAWERRESLYAHHAQVEKLARKMALRRAFTHWKHYMLLCAEEAAQFEMAEEHHRHSQLYFCFRALKDNVTHAHLQQIRRNLAHQQHGVTLLHRFWNLWRSQIEQKKERELLPLLHAAWDHYRIALLCKCIELWLQYTQKRRYKQLLQARADGHFQQRALPAAFHTWNRLWRWRHQENVLSARATRFHRETLEKQVFSLWRQKMFQHRENRLAERMAILHAERQLLYRSWFMWHQQAAARHQEQEWQTVACAHHRHGRLKKAFCLWRESAQGLRTERTGRVRAAEFHMAQLLRWAWSQWRECLALRGAERQKLMRADLHHQHSVLHRALQAWVTYQGRVRSILREVAARESQHNRQLLRGALRRWKENTMARVDEAKKTFQASTHYRRTICSKVLVQWREAVSVQMYYRQQEDCAIWEAQKVLDRGCLRTWFQRWWDCSRRSAQQRLQLERAVQHHHRQLLLEGLARWKTHHLQCVRKRLLHRQSTQLLAQRLSRTCFRQWRQQLAARRQEQRATVRALWFWAFSLQAKVWATWLAFVLERRRKKARLQWALQAYQGQLLQEGATRLLRFAASMKASRQQLQAQQQVQAAHSLHRAVRRCATLWKQKVLGRGGKPQPLAAIAPSRKVTFEGPLLNRIAAGAGDGTLETKRPQASRPLGALGRLAAEEPHALELNTAHSARKQPRRPHFLLEPAQSQRPQKPQEHGLGMAQPAAPSLTRPFLAEAPTALVPHSPLPGALSSAPGPKQPPTASTGPELLLLPLSSFMPCGAAAPARVSAQRATPRDKPPVPSSLASVPDPHLLLPGDFSATRAGPGLSTAGSLDLEAELEEIQQQLLHYQTTKQNLWSCRRQASSLRRWLELNREEPGPEDQEVEQQVQKELEQVEMQIQLLAEELQAQRQPIGACVARIQALRQALC

SEQ ID NO: 1847 - protein, 1160 aa, Homo sapiens
MKNLLTEKCISSHNFHQKVIKQRMEKKVDSRFYYEQRLLRKVFEEWKEEWWVFQHEWKLCVRADCHYRYYLYNLMFQTWKTYVRQQQEMRNKYIRAEVHDAKQKMRQAWKSWLIYVVVRRTKLQMQTTALEFRQRIILRVWWSTWRQRLGQVRVSRALHASALKHRALSLQVQAWSQWREQLLYVQKEKQKVVSAVKHHQHWQKRRFLKAWLEYLQVRRVKRQQNEMAERFHHVTVLQIYFCDWQQAWERRESLYAHHAQVEKLARKMALRRAFTHWKHYMLLCAEEAAQFEMAEEHHRHSQLYFCFRALKDNVTHAHLQQIRRNLAHQQHGVTLLHRFWNLWRSQIEQKKERELLPLLHAAWDHYRIALLCKCIELWLQYTQKRRYKQLLQARADGHFQQRALPAAFHTWNRLWRWRHQENVLSARATRFHRETLEKQVFSLWRQKMFQHRENRLAERMAILHAERQLLYRSWFMWHQQAAARHQEQEWQTVACAHHRHGRLKKAFCLWRESAQGLRTERTGRVRAAEFHMAQLLRWAWSQWRECLALRGAERQKLMRADLHHQHSVLHRALQAWVTYQGRVRSILREVAARESQHNRQLLRGALRRWKENTMARVDEAKKTFQASTHYRRTICSKVLVQWREAVSVQMYYRQQEDCAIWEAQKVLDRGCLRTWFQRWWDCSRRSAQQRLQLERAVQHHHRQLLLEGLARWKTHHLQCVRKRLLHRQSTQLLAQRLSRTCFRQWRQQLAARRQEQRATVRALWFWAFSLQAKVWATWLAFVLERRRKKARLQWALQAYQGQLLQEGATRLLRFAASMKASRQQLQAQQQVQAAHSLHRAVRRCATLWKQKVLGRGGKPQPLAAIAPSRKVTFEGPLLNRIAAGAGDGTLETKRPQASRPLGALGRLAAEEPHALELNTAHSARKQPRRPHFLLEPAQSQRPQKPQEHGLGMAQPAAPSLTRPFLAEAPTALVPHSPLPGALSSAPGPKQPPTASTGPELLLLPLSSFMPCGAAAPARVSAQRATPRDKPPVPSSLASVPDPHLLLPGDFSATRAGPGLSTAGSLDLEAELEEIQQQLLHYQTTKQNLWSCRRQASSLRRWLELNREEPGPEDQEVEQQVQKELEQVEMQIQLLAEELQAQRQPIGACVARIQALRQALC

SEQ ID NO: 1848 - protein, 628 aa, Homo sapiens
QPRQVAGTPTSSQPSFGPSIRERPSQSLCPCPCPAGEGDPAWPALERRLVTSRGRQPSPQSHAQLLTRRRHSSEQVPPESEPRADFRSGKWLQEPATGDARDSRQALRARMSSKHRICSQEEVVIPCAYDSDSESVDLELSNLEIIKKGSSSIELTDLDIPDIPGLHCEPLSHSPRHLTQQDPLSEAIVEKLIQSIQKVFNGELKGELEKLKFLGDLSSLSQALPYDETAKSFIHSHIADIVHTLNVLVQEERPHSLSSSMRQEVFVTIADLSYQDVHLLLGSEDRAELFSLTIKSIITLPSVRTLTQIQEIMPNGTCNTECLYRQTFQAFSEMLQSLVVKDPHLENLDTIIKHLVPWLQSVKDHERERATASMAQVLKCLSKHLNLKLPLRFQRLGHLVALMALLCGDPQEKVAEEAAEGIHSLLHITLRLKYITHDKKDQQNLKRALTKCREFLELHSSAAKCFYNCPFRIAQVFEGFLDSNELCQFIMTTFDTLKTLKHPCIQRSAGELLLTLAKNTESQFEKVPEIMGVICAQLSIISQPRVRQQIINTVSLFISRPKYTDIVLSFLLCHPVPYNRHLAEVWRMLSVELPSTTWILWRLLRKLQKCHNEPAQEKMAYVAVAVSP

SEQ ID NO: 1849 - protein, 946 aa, Homo sapiens
MPLSRRGRGSRLAGSRAATSNLPRATALSPKHAQLLTRRRHSSEQVPPESEPRADFRSGKWLQEPATGDARDSRQALRARMSSKHRICSQEEVVIPCAYDSDSESVDLELSNLEIIKKGSSSIELTDLDIPDIPGLHCEPLSHSPRHLTQQDPLSEAIVEKLIQSIQKVFNGELKGELEKLKFLGDLSSLSQALPYDETAKSFIHSHIADIVHTLNVLVQEERPHSLSSSMRQEVFVTIADLSYQDVHLLLGSEDRAELFSLTIKSIITLPSVRTLTQIQEIMPNGTCNTECLYRQTFQAFSEMLQSLVVKDPHLENLDTIIKHLVPWLQSVKDHERERATASMAQVLKCLSKHLNLKLPLRFQRLGHLVALMALLCGDPQEKVAEEAAEGIHSLLHITLRLKYITHDKKDQQNLKRALTKCREFLELHSSAAKCFYNCPFRIAQVFEGFLDSNELCQFIMTTFDTLKTLKHPCIQRSAGELLLTLAKNTESQFEKVPEIMGVICAQLSIISQPRVRQQIINTVSLFISRPKYTDIVLSFLLCHPVPYNRHLAEVWRMLSVELPSTTWILWRLLRKLQKCHNEPAQEKMAYVAVAATDALYEVFLGNRLRAATFRLFPQLLMTLLIQIHHSIGLTMSDVDIPSGLYTEQEVPSEVTPLCFAMQATKTLLLRTCCLQEFNIMEKNKGWALLGGKDGHLQGLFLLANALLERNQLLAQKVMYLLVPLLNRGNDKHKLTSAGFFVELLRSPVAKRLPSIYSVARFKDWLQDGNHLFRILGLRGLYNLVGHQEMREDIKSLLPYIVDSLRETDEKIVLSAIQILLQLVRTMDFTTLAAMMRTLFSLFGDVRSDVHRFSVTLFGAAIKSVKNPDKKSIENQVLDSLVPLLLYSQDENDAVAEESRQVLTICAQFLKWKLPQEVYSKDPWHIKPTEAGTICRFFGKKVQGEN

SEQ ID NO: 1850 - protein, 1028 aa, Homo sapiens
MASEAVKVVVRCRPMNQRERELRCQPVVTVDCARAQCCIQNPGAADEPPKQFTFDGAYHVDHVTEQIYNEIAYPLVEGVTEGYNGTIFAYGQTGSGKSFTMQGLPDPPSQRGIIPRAFEHVFESVQCAENTKFLVRASYLEIYNEDVRDLLGADTKQKLELKEHPEKGVYVKGLSMHTVHSVAQCEHIMETGWKNRSVGYTLMNKDSSRSHSIFTISIEMSAVDERGKDHLRAGKLNLVDLAGSERQSKTGATGERLKEATKINLSLSALGNVISALVDGRCKHVPYRDSKLTRLLQDSLGGNTKTLMVACLSPADNNYDETLSTLRYANRAKNIRNKPRINEDPKDALLREYQEEIKKLKAILTQQMSPSSLSALLSRQVPPDPVQVEEKLLPQPVIQHDVEAEKQLIREEYEERLARLKADYKAEQESRARLEEDITAMRNSYDVRLSTLEENLRKETEAVLQVGVLYKAEVMSRAEFASSAEYPPAFQYETVVKPKVFSTTDTLPSDDVSKTQVSSRFAELPKVEPSKSEISLGSSESSSLEETSVSEAFPGPEEPSNVEVSMPTEESRSRYFLDECLGQEAAGHLLGEQNYLPQEEPQEVPLQGLLGLQDPFAEVEAKLARLSSTVARTDAPQADVPKVPVQVPAPTDLLEPSDARPEAEAADDFPPRPEVDLASEVALEVVRTAEPGVWLEAQAPVALVAQPEPLPATAGVKRESVGMEVAVLTDDPLPVVDQQQVLARLQLLEQQVVGGEQAKNKDLKEKHKRRKRYADERRKQLVAALQNSDEDSGDWVLLNVYDSIQEEVRAKSKLLEKMQRKLRAAEVEIKDLQSEFQLEKIDYLATIRRQERDSMLLQQLLEQVQPLIRRDCNYSNLEKILRESCWDEDNGFWKIPHPVITKTSLPVVSTGPQNKPARKTSAADNGEPNMEDDRYRLMLSRSNSENIASNYFRSKRASQILSTDARKSLTHHNSPPGLSCPLSNNSAIPPTQAPEMPQPRPFRLESLDIPFTKAKRKKSKSNFGSEPL

SEQ ID NO: 1851 - protein, 1288 aa, Homo sapiens
MSSEDLAEIPQLQKLSIPHGFQNKEAASSPTPSITLSQVPDLQPGSQLFTEIHLAKIEKMFEEDINSTGALGMDAFIKAMKKVLSSVSDEMLKELFLKVDSDCEGFVTWQKYVDYMMREFQGKEDMRKSQYRLHFYLPMTVVPLNHGCEVVKVVFLIHRFKKIGCFLTVTKDGILQFWSESFSLMSSFRLNQTQQLYNQPMWVIDMVCLHNMNLVAVASTRQKIDFFDISDHKCVRAFTFVDLDSCALVMDYWSDYHRGVFCYGDAKGNVIVFTSENMTSGLFNPRILPRASKWDHWIKVSLQKLLNEKSALHRSYRLKALHPNWCEQVKFIPQMNVVVSCSAIEKSSLVLTILPAKASKKPRLSVLRLRKGILCFDYCPDRNFLVTGGYDAFIRLWNPFVSKRPVWLMKGHQTSVTHILVDSRNNSILISVSKDKNIRVWDMLDYICLQSFCGKFFALGNCPITSAYFFEKDNTLICSTYSIGILKGYLEAQGLIKARKRTTHCSPLCAVLYSKIFKQVVSGCLRGTVSVWEVVTGRKTMEFAVSGGQHVEMTAMALDESERCLLTGLRDGTMKMWNYNIGKCLLTFPSPEQLEISGIIHMNKVFYVTGWSKRITHFLFHKTKPVLLCYHWQTYHTEDILSMAKYRNQFLGTSSYSGDILFWNTGTLKPIFNFNASRSPSPLQPKRVQDVNNCLAESHRPSRPYVEREKWTYKTSRKLSSLSPESVANTNLRRSLVSAPPVMRCPRDKEPDRPVPQQKPSSASGTSRQSSKIHSKQSIYKEDETRKGEWQKNMLVQSSASVEKIIFLQTRPRLPHTAALLSSCMDGYIYAWSLHENGGLLGKFPVDLDNGDVVVGAMATDKNDWILITGDCKGYIKIWDIKDYCALIDKQPFQSSGAKVVSEAHNKFRLLIPQQLGTNFPHYIPLEDKEVVAGHTISLVPPTLLMTWKGHLNSVADILYVDNFQLVISAGQDRDVKAWKLSGDAIGTFGLSVWKRLQDACDGPRENRASLEEDGDSTGTTQKVLHLELQEQRDLAEALIYQRREQAALMALLHGKADKEADTWAKLQKMALMSPWAGERPLEDIEDSWNKWESRDKQVSKVLGAAYKPKERLQNTRFLSTRVPYGWMKHQISPQVYQSLHFSDLMPTQQPDFLTSRGPDQQDQHIRLVAHHVQKDLVPSREQAVLDTTDSTPAAASSPSSLLSVTASASRLLDSSLPTFLTPQFSFLLRPQSASTAHSTPSVPSPVSKSTLQGSVTPKHIVSSFERPPRPLKATFMSSVKGSSHVRF

SEQ ID NO: 1852 - protein, 1300 aa, Homo sapiens
MYKEDPVQGKSNGELSLSRESEGQKNVSSIPGKTGKRRGRPPKRKKLQEEILLSEKQEENSLASEPQTRHGSQGPGQGTWWLLCQTEEEWRQVTESFRERTSLRERQLYKLLSEDFLPEICNMIAQKGKRPQRTKAELHPRWMSDHLSIKPVKQEETPVLTRIEKQKRKEEEEERQILLAVQKKEQEQMLKEERKRELEEKVKAVEDRAKRRKLREERAWLLAQGKELPPELSHLDPNSPMREEKKTKDLFELDDDFTAMYKVLDVVKAHKDSWPFLEPVDESYAPNYYQIIKAPMDISSMEKKLNGGLYCTKEEFVNDMKTMFRNCRKYNGESSEYTKMSDNLERCFHRAMMKHFPGEDGDTDEEFWIREDEKREKRRSRAGRSGGSHVWTRSRDPEGSSRKQQPMENGGKSLPPTRRAPSSGDDQSSSSTQPPREVGTSNGRGFSHPLHCGGTPSQAPFLNQMRPAVPGTFGPLRGSDPATLYGSSGVPEPHPGEPVQQRQPFTMQPPVGINSLRGPRLGTPEEKQMCGGLTHLSNMGPHPGSLQLGQISGPSQDGSMYAPAQFQPGFIPPRHGGAPARPPDFPESSEIPPSHMYRSYKYLNRVHSAVWNGNHGATNQGPLGPDEKPHLGPGPSHQPRTLGHVMDSRVMRPPVPPNQWTEQSGFLPHGVPSSGYMRPPCKSAGHRLQPPPVPAPSSLFGAPAQALRGVQGGDSMMDSPEMIAMQQLSSRVCPPGVPYHPHQPAHPRLPGPFPQVAHPMSVTVSAPKPALGNPGRAPENSEAQEPENDQEPLPGLEEKPPGVGTSEGVYLTQLPHPTPPLQTDCTRQSSPQERETVGPELKSSSSESADNCKAMKGKNPWPSDSSYPGPAAQGCVRDLSTVADRGALSENGVIGEASPCGSEGKGLGSSGSEKLLCPRGRTLQETMPCTGQNAATPPSTDPGLTGGTVSQFPPLYMPGLEYPNSAAHYHISPGLQGVGPVMGGKSPASHPQHFPPRGFQSNHPHSGGFPRYRPPQGMRYSYHPPPQPSYHHYQRTPYYACPQSFSDWQRPLHPQGSPSGPPASQPPPPRSLFSDKNAMASLQGCETLNAALTSPTRMDAVAAKVPNDGQNPGPEEEKLDESMERPESPKEFLDLDNHNAATKRQSSLSASEYLYGTPPPLSSGMGFGSSAFPPHSVMLQTGPPYTPQRPASHFQPRAYSSPVAALPPHHPGATQPNGLSQEGPIYRCQEEGLGHFQAVMMEQIGTRSGIRGPFQEMYRPSGMQMHPVQSQASFPKTPTAATSQEEVPPHKPPTLPLDQS

SEQ ID NO: 1853 - protein, 777 aa, Homo sapiens
MFPRGAEAQDWHLDMQLTGKVVLSAAALLLVTVAYRLYKSRPAPAQRWGGNGQAEAKEEAEGSGQPAVQEASPGVLLRGPRRRRSSKRAEAPQGCSCENPRGPYVLVTGATSTDRKPQRKGSGEERGGQGSDSEQVPPCCPSQETRTAVGSNPDPPHFPRLGSEPKSSPAGLIAAADGSCAGGEPSPWQDSKPREHPGLGQLEPPHCHYVAPLQGSSDMNQSWVFTRVIGVSREEAGALEAASDVDLTLHQQEGAPNSSYTFSSIARVRMEEHFIQKAEGVEPRLKGKVYDYYVESTSQAIFQGRLAPRTAALTEVPSPRPPPGSLGTGAASGGQAGDTKGAAERAASPQTGPWPSTRGFSRKESLLQIAENPELQLQPDGFRLPAPPCPDPGALPGLGRSSREPHVQPVAGTNFFHIPLTPASAPQVRLDLGNCYEVLTLAKRQNLEALKEAAYKVMSENYLQVLRSPDIYGCLSGAERELILQRRLRGRQYLVVADVCPKEDSGGLCCYDDEQDVWRPLARMPPEAVSRGCAICSLFNYLFVVSGCQGPGHQPSSRVFCYNPLTGIWSEVCPLNQARPHCRLVALDGHLYAIGGECLNSVERYDPRLDRWDFAPPLPSDTFALAHTATVRAKEIFVTGGSLRFLLFRFSAQEQRWWAGPTGGSKDRTAEMVAVNGFLYRFDLNRSLGIAVYRCSASTRLWYECATYRTPYPDAFQCAVVDNLIYCVGRRSTLCFLADSVSPRFVPKELRSFPAPQGTLLPTVLTLPTPDLPQTRV

SEQ ID NO: 1854 - protein, 686 aa, Homo sapiens
MRLLTLLGLLCGSVATPLGPKWPEPVFGRLASPGFPGEYANDQERRWTLTAPPGYRLRLYFTHFDLELSHLCEYDFVKLSSGAKVLATLCGQESTDTERAPGKDTFYSLGSSLDITFRSDYSNEKPFTGFEAFYAAEDIDECQVAPGEAPTCDHHCHNHLGGFYCSCRAGYVLHRNKRTCSALCSGQVFTQRSGELSSPEYPRPYPKLSSCTYSISLEEGFSVILDFVESFDVETHPETLCPYDFLKIQTDREEHGPFCGKTLPHRIETKSNTVTITFVTDESGDHTGWKIHYTSTAQPCPYPMAPPNGHVSPVQAKYILKDSFSIFCETGYELLQGHLPLKSFTAVCQKDGSWDRPMPACSIVDCGPPDDLPSGRVEYITGPGVTTYKAVIQYSCEETFYTMKVNDGKYVCEADGFWTSSKGEKSLPVCEPVCGLSARTTGGRIYGGQKAKPGDFPWQVLILGGTTAAGALLYDNWVLTAAHAVYEQKHDASALDIRMGTLKRLSPHYTQAWSEAVFIHEGYTHDAGFDNDIALIKLNNKVVINSNITPICLPRKEAESFMRTDDIGTASGWGLTQRGFLARNLMYVDIPIVDHQKCTAAYEKPPYPRGSVTANMLCAGLESGGKDSCRGDSGGALVFLDSETERWFVGGIVSWGSMNCGEAGQYGVYTKVINYIPWIENIISDF

SEQ ID NO: 1855 - protein, 2016 aa, Homo sapiens
MAESASPPSSSAAAPAAEPGVTTEQPGPRSPPSSPPGLEEPLDGADPHVPHPDLAPIAFFCLRQTTSPRNWCIKMVCNPWFECVSMLVILLNCVTLGMYQPCDDMDCLSDRCKILQVFDDFIFIFFAMEMVLKMVALGIFGKKCYLGDTWNRLDFFIVMAGMVEYSLDLQNINLSAIRTVRVLRPLKAINRVPSMRILVNLLLDTLPMLGNVLLLCFFVFFIFGIIGVQLWAGLLRNRCFLEENFTIQGDVALPPYYQPEEDDEMPFICSLSGDNGIMGCHEIPPLKEQGRECCLSKDDVYDFGAGRQDLNASGLCVNWNRYYNVCRTGSANPHKGAINFDNIGYAWIVIFQVITLEGWVEIMYYVMDAHSFYNFIYFILLIIVGSFFMINLCLVVIATQFSETKQREHRLMLEQRQRYLSSSTVASYAEPGDCYEEIFQYVCHILRKAKRRALGLYQALQSRRQALGPEAPAPAKPGPHAKEPRHYHGKTKGQGDEGRHLGSRHCQTLHGPASPGNDHSGRELCPQHSPLDATPHTLVQPIPATLASDPASCPCCQHEDGRRPSGLGSTDSGQEGSGSGSSAGGEDEADGDGARSSEDGASSELGKEEEEEEQADGAVWLCGDVWRETRAKLRGIVDSKYFNRGIMMAILVNTVSMGIEHHEQPEELTNILEICNVVFTSMFALEMILKLAAFGLFDYLRNPYNIFDSIIVIISIWEIVGQADGGLSVLRTFRLLRVLKLVRFMPALRRQLVVLMKTMDNVATFCMLLMLFIFIFSILGMHIFGCKFSLRTDTGDTVPDRKNFDSLLWAIVTVFQILTQEDWNVVLYNGMASTSPWASLYFVALMTFGNYVLFNLLVAILVEGFQAEGDANRSYSDEDQSSSNIEEFDKLQEGLDSSGDPKLCPIPMTPNGHLDPSLPLGGHLGPAGAAGPAPRLSLQPDPMLVALGSRKSSVMSLGRMSYDQRSLSSSRSSYYGPWGRSAAWASRRSSWNSLKHKPPSAEHESLLSAERGGGARVCEVAADEGPPRAAPLHTPHAHHIHHGPHLAHRHRHHRRTLSLDNRDSVDLAELVPAVGAHPRAAWRAAGPAPGHEDCNGRMPSIAKDVFTKMGDRGDRGEDEEEIDYTLCFRVRKMIDVYKPDWCEVREDWSVYLFSPENRFRVLCQTIIAHKLFDYVVLAFIFLNCITIALERPQIEAGSTERIFLTVSNYIFTAIFVGEMTLKVVSLGLYFGEQAYLRSSWNVLDGFLVFVSIIDIVVSLASAGGAKILGVLRVLRLLRTLRPLRVISRAPGLKLVVETLISSLKPIGNIVLICCAFFIIFGILGVQLFKGKFYHCLGVDTRNITNRSDCMAANYRWVHHKYNFDNLGQALMSLFVLASKDGWVNIMYNGLDAVAVDQQPVTNHNPWMLLYFISFLLIVSFFVLNMFVGVVVENFHKCRQHQEAEEARRREEKRLRRLEKKRRKAQRLPYYATYCHTRLLIHSMCTSHYLDIFITFIICLNVVTMSLEHYNQPTSLETALKYCNYMFTTVFVLEAVLKLVAFGLRRFFKDRWNQLDLAIVLLSVMGITLEEIEINAALPINPTIIRIMRVLRIARVLKLLKMATGMRALLDTVVQALPQVGNLGLLFMLLFFIYAALGVELFGKLVCNDENPCEGMSRHATFENFGMAFLTLFQVSTGDNWNGIMKDTLRDCTHDERSCLSSLQFVSPLYFVSFVLTAQFVLINVVVAVLMKHLDDSNKEAQEDAEMDAELELEMAHGLGPGPRLPTGSPGAPGRGPGGAGGGGDTEGGLCRRCYSPAQENLWLDSVSLIIKDSLEGELTIIDNLSGSIFHHYSSPAGCKKCHHDKQEVQLAETEAFSLNSDRSSSILLGDDLSLEDPTACPPGRKDSKGELDPPEPMRVGDLGECFFPLSSTAVSPDPENFLCEMEEIPFNPVRSWLKHDSSQAPPSPFSPDASSPLLPMPAEFFHPAVSASQKGPEKGTGTGTLPKIALQGSWASLRSPRVNCTLLRQVPTPPRP

SEQ ID NO: 1856 - protein, 399 aa, Homo sapiens
MWQLLAAACWMLLLGSMYGYDKKGNNANPEANMNISQIISYWGYPYEEYDVTTKDGYILGIYRIPHGRGCPGRTAPKPAVYLQHGLIASASNWICNLPNNSLAFLLADSGYDVWLGNSRGNTWSRKHLKLSPKSPEYWAFSLDEMAKYDLPATINFIIEKTGQKRLYYVGHSQGTTIAFIAFSTNPELAKKIKIFFALAPVVTVKYTQSPMKKLTTLSRRVVKVLFGDKMFHPHTLFDQFIATKVCNRKLFRRICSNFLFTLSGFDPQNLNMSRLDVYLSHNPAGTSVQNMLHWAQAVNSGQLQAFDWGNSDQNMMHFHQLTPPLYNITKMEVPTAIWNGGQDIVADPKDVENLLPQIANLIYYKLIPHYNHVDFYLGEDAPQEIYQDLIILMEEYLQN

SEQ ID NO: 1857 - protein, 392 aa, Homo sapiens
MARAMAAAWPLLLVALLVLSWPPPGTGDVVVQAPTQVPGFLGDSVTLPCYLQVPNMEVTHVSQLTWARHGESGSMAVFHQTQGPSYSESKRLEFVAARLGAELRNASLRMFGLRVEDEGNYTCLFVTFPQGSRSVDIWLRVLAKPQNTAEVQKVQLTGEPVPMARCVSTGGRPPAQITWHSDLGGMPNTSQVPGFLSGTVTVTSLWILVPSSQVDGKNVTCKVEHESFEKPQLLTVNLTVYYPPEVSISGYDNNWYLGQNEATLTCDARSNPEPTGYNWSTTMGPLPPFAVAQGAQLLIRPVDKPINTTLICNVTNALGARQAELTVQVKEGPPSEHSGMSRNAIIFLVLGILVFLILLGIGIYFYWSKCSREVLWHCHLCPSSEHHQSCRN

SEQ ID NO: 1858 - protein, 1442 aa, Homo sapiens
MSIAIPLGVTTSDTSYSDMAAGSDPESVEASPAVNEKSVYSTHNYGTTQRHGCRGLPYATIIPRSDLNGLPSPVEERCGDSPNSEGETVPTWCPCGLSQDGFLLNCDKCRGMSRGKVIRLHRRKQDNISGGDSSATESWDEELSPSTVLYTATQHTPTSITLTVRRTKPKKRKKSPEKGRAAPKTKKIKNSPSEAQNLDENTTEGWENRIRLWTDQYEEAFTNQYSADVQNALEQHLHSSKEFVGKPTILDTINKTELACNNTVIGSQMQLQLGRVTRVQKHRKILRAARDLALDTLIIEYRGKVMLRQQFEVNGHFFKKPYPFVLFYSKFNGVEMCVDARTFGNDARFIRRSCTPNAEVRHMIADGMIHLCIYAVSAITKDAEVTIAFDYEYSNCNYKVDCACHKGNRNCPIQKRNPNATELPLLPPPPSLPTIGAETRRRKARRKELEMEQQNEASEENNDQQSQEVPEKVTVSSDHEEVDNPEEKPEEEKEEVIDDQENLAHSRRTREDRKVEAIMHAFENLEKRKKRRDQPLEQSNSDVEITTTTSETPVGEETKTEAPESEVSNSVSNVTIPSTPQSVGVNTRRSSQAGDIAAEKLVPKPPPAKPSRPRPKSRISRYRTSSAQRLKRQKQANAQQAELSQAALEEGGSNSLVTPTEAGSLDSSGENRPLTGSDPTVVSITGSHVNRAASKYPKTKKYLVTEWLNDKAEKQECPVECPLRITTDPTVLATTLNMLPGLIHSPLICTTPKHYIRFGSPFIPERRRRPLLPDGTFSSCKKRWIKQALEEGMTQTSSVPQETRTQHLYQSNENSSSSSICKDNADLLSPLKKWKSRYLMEQNVTKLLRPLSPVTPPPPNSGSKSPQLATPGSSHPGEEECRNGYSLMFSPVTSLTTASRCNTPLQFELCHRKDLDLAKVGYLDSNTNSCADRPSLLNSGHSDLAPHPSLGPTSETGFPSRSGDGHQTLVRNSDQAFRTEFNLMYAYSPLNAMPRADGLYRGSPLVGDRKPLHLDGGYCSPAEGFSSRYEHGLMKDLSRGSLSPGGERACEGVPSAPQNPPQRKKVSLLEYRKRKQEAKENSAGGGGDSAQSKSKSAGAGQGSSNSVSDTGAHGVQGSSARTPSSPHKKFSPSHSSMSHLEAVSPSDSRGTSSSHCRPQENISSRWMVPTSVERLREGGSIPKVLRSSVRVAQKGEPSPTWESNITEKDSDPADGEGPETLSSALSKGATVYSPSRYSYQLLQCDSPRTESQSLLQQSSSPFRGHPTQSPGYSYRTTALRPGNPPSHGSSESSLSSTSYSSPAHPVSTDSLAPFTGTPGYFSSQPHSGNSTGSNLPRRSCPSSAASPTLQGPSDSPTSDSVSQSSTGTLSSTSFPQNSRSSLPSDLRTISLPSAGQSAVYQASRVSAVSNSQHYPHRGSGGVHQYRLQPLQGSGVKTQTGLS

SEQ ID NO: 1859 - protein, 380 aa, Homo sapiens
MDAATLTYDTLRFAEFEDFPETSEPVWILGRKYSIFTEKDEILSDVASRLWFTYRKNFPAIGGTGPTSDTGWGCMLRCGQMIFAQALVCRHLGRDWRWTQRKRQPDSYFSVLNAFIDRKDSYYSIHQIAQMGVGEGKSIGQWYGPNTVAQVLKKLAVFDTWSSLAVHIAMDNTVVMEEIRRLCRTSVPCAGATAFPADSDRHCNGFPAGAEVTNRPSPWRPLVLLIPLRLGLTDINEAYVETLKHCFMMPQSLGVIGGKPNSAHYFIGYVGEELIYLDPHTTQPAVEPTDGCFIPDESFHCQHPPCRMSIAELDPSIAVGFFCKTEDDFNDWCQQVKKLSLLGGALPMFELVELQPSHLACPDVLNLSLGESCQVQILLM

SEQ ID NO: 1860 - protein, 125 aa, Homo sapiens
MLRRRAQEEDSTVLIDVSPPEAEKRGSYGSTAHASEPGGQQAAACRAGSPAKPRIDFVLVWEEDLKLDRQQDSAARDRTDMHRTWRETFLDNLRAAGLCVDQVRGGCHGQGPRPCIHSVTHDLAA

SEQ ID NO: 1861 - protein, 717 aa, Homo sapiens
MSRRSQRLTRYSQGDDDGSSSSGGSSVAGSQSTLFKDSPLRTLKRKSSNMKRLSPAPQLGPSSDAHTSYYSESLVHESWFPPRSSLEELHGDANWGEDLRVRRRRGTGGSESSRASGLVGRKATEDFLGSSSGYSSEDDYVGYSDVDQQSSSSRLRSAVSRAGSLLWMVATSPGRLFRLLYWWAGTTWYRLTTAASLLDVFVLTRRFSSLKTFLWFLLPLLLLTCLTYGAWYFYPYGLQTFHPALVSWWAAKDSRRPDEGWEARDSSPHFQAEQRVMSRVHSLERRLEALAAEFSSNWQKEAMRLERLELRQGAPGQGGGGGLSHEDTLALLEGLVSRREAALKEDFRRETAARIQEELSALRAEHQQDSEDLFKKIVRASQESEARIQQLKSEWQSMTQESFQESSVKELRRLEDQLAGLQQELAALALKQSSVAEEVGLLPQQIQAVRDDVESQFPAWISQFLARGGGGRVGLLQREEMQAQLRELESKILTHVAEMQGKSAREAAASLSLTLQKEGVIGVTEEQVHHIVKQALQRYSEDRIGLADYALESGGASVISTRCSETYETKTALLSLFGIPLWYHSQSPRVILQPDVHPGNCWAFQGPQGFAVVRLSARIRPTAVTLEHVPKALSPNSTISSAPKDFAIFGFDEDLQQEGTLLGKFTYDQDGEPIQTFHFQAPTMATYQVVELRILTNWGHPEYTCIYRFRVHGEPAH

SEQ ID NO: 1862 - protein, 615 aa, Homo sapiens
MCSEARLARRLRDALREEEPWAVEELLRCGADPNLVLEDGAAAVHLAAGARHPRGLRCLGALLRQGGDPNARSVEALTPLHVAAAWGCRRGLELLLSQGADPALRDQDGLRPLDLALQQGHLECARVLQDLDTRTRTRTRIGAETQEPEPAPGTPGLSGPTDETLDSIALQKQPCRGDNRDIGLEADPGPPSLPVPLETVDKHGSSASPPGHWDYSSDASFVTAVEVSGAEDPASDTPPWAGSLPPTRQGLLHVVHANQRVPRSQGTEAELNARLQALTLTPPNAAGFQSSPSSMPLLDRSPAHSPPRTPTPGASDCHCLWEHQTSIDSDMATLWLTEDEASSTGGREPVGPCRHLPVSTVSDLELLKGLRALGENPHPITPFTRQLYHQQLEEAQIAPGPEFSGHSLELAAALRTGCIPDVQADEDALAQQFEQPDPARRWREGVVKSSFTYLLLDPRETQDLPARAFSLTPAERLQTFIRAIFYVGKGTRARPYVHLWEALGHHGRSRKQPHQACPKVRQILDIWASGCGVVSLHCFQHVVAVEAYTREACIVEALGIQTLTNQKQGHCYGVVAGWPPARRRRLGVHLLHRALLVFLAEGERQLHPQDIQARG

SEQ ID NO: 1863 - protein, 2514 aa, Homo sapiens
MSGSTQPVAQTWRATEPRYPPHSLSYPVQIARTHTDVGLLEYQHHSRDYASHLSPGSIIQPQRRRPSLLSEFQPGNERSQELHLRPESHSYLPELGKSEMEFIESKRPRLELLPDPLLRPSPLLATGQPAGSEDLTKDRSLTGKLEPVSPPSPPHTDPELELVPPRLSKEELIQNMDRVDREITMVEQQISKLKKKQQQLEEEAAKPPEPEKPVSPPPIESKHRSLVQIIYDENRKKAEAAHRILEGLGPQVELPLYNQPSDTRQYHENIKINQAMRKKLILYFKRRNHARKQWEQKFCQRYDQLMEAWEKKVERIENNPRRRAKESKVREYYEKQFPEIRKQRELQERMQSRVGQRGSGLSMSAARSEHEVSEIIDGLSEQENLEKQMRQLAVIPPMLYDADQQRIKFINMNGLMADPMKVYKDRQVMNMWSEQEKETFREKFMQHPKNFGLIASFLERKTVAECVLYYYLTKKNENYKSLVRRSYRRRGKSQQQQQQQQQQQQQQQQQPMPRSSQEEKDEKEKEKEAEKEEEKPEVENDKEDLLKEKTDDTSGEDNDEKEAVASKGRKTANSQGRRKGRITRSMANEANSEEAITPQQSAELASMELNESSRWTEEEMETAKKGLLEHGRNWSAIARMVGSKTVSQCKNFYFNYKKRQNLDEILQQHKLKMEKERNARRKKKKAPAAASEEAAFPPVVEDEEMEASGVSGNEEEMVEEAEALHASGNEVPRGECSGPATVNNSSDTESIPSPHTEAAKDTGQNGPKPPATLGADGPPPGPPTPPPEDIPAPTEPTPASEATGAPTPPPAPPSPSAPPPVVPKEEKEEETAAAPPVEEGEEQKPPAAEELAVDTGKAEEPVKSECTEEAEEGPAKGKDAEAAEATAEGALKAEKKEGGSGRATTAKSSGAPQDSDSSATCSADEVDEAEGGDKNRLLSPRPSLLTPTGDPRANASPQKPLDLKQLKQRAAAIPPIQVTKVHEPPREDAAPTKPAPPAPPPPQNLQPESDAPQQPGSSPRGKSRSPAPPADKEAFAAEAQKLPGDPPCWTSGLPFPVPPREVIKASPHAPDPSAFSYAPPGHPLPLGLHDTARPVLPRPPTISNPPPLISSAKHPSVLERQIGAISQGMSVQLHVPYSEHAKAPVGPVTMGLPLPMDPKKLAPFSGVKQEQLSPRGQAGPPESLGVPTAQEASVLRGTALGSVPGGSITKGIPSTRVPSDSAITYRGSITHGTPADVLYKGTITRIIGEDSPSRLDRGREDSLPKGHVIYEGKKGHVLSYEGGMSVTQCSKEDGRSSSGPPHETAAPKRTYDMMEGRVGRAISSASIEGLMGRAIPPERHSPHHLKEQHHIRGSITQGIPRSYVEAQEDYLRREAKLLKREGTPPPPPPSRDLTEAYKTQALGPLKLKPAHEGLVATVKEAGRSIHEIPREELRHTPELPLAPRPLKEGSITQGTPLKYDTGASTTGSKKHDVRSLIGSPGRTFPPVHPLDVMADARALERACYEESLKSRPGTASSSGGSIARGAPVIVPELGKPRQSPLTYEDHGAPFAGHLPRGSPVTTREPTPRLQEGSLSSSKASQDRKLTSTPREIAKSPHSTVPEHHPHPISPYEHLLRGVSGVDLYRSHIPLAFDPTSIPRGIPLDAAAAYYLPRHLAPNPTYPHLYPPYLIRGYPDTAALENRQTIINDYITSQQMHHNAATAMAQRADMLRGLSPRESSLALNYAAGPRGIIDLSQVPHLPVLVPPTPGTPATAMDRLAYLPTAPQPFSSRHSSSPLSPGGPTHLTKPTTTSSSERERDRDRERDRDREREKSILTSTTTVEHAPIWRPGTEQSSGSSGGGGGSSSRPASHSHAHQHSPISPRTQDALQQRPSVLHNTGMKGIITAVEPSTPTVLRSTSTSSPVRPAATFPPATHCPLGGTLDGVYPTLMEPVLLPKEAPRVARPERPRADTGHAFLAKPPARSGLEPASSPSKGSEPRPLVPPVSGHATIARTPAKNLAPHHASPDPPAPPASASDPHREKTQSKPFSIQELELRSLGYHGSSYSPEGVEPVSPVSSPSLTHDKGLPKHLEELDKSHLEGELRPKQPGPVKLGGEAAHLPHLRPLPESQPSSSPLLQTAPGVKGHQRVVTLAQHISEVITQDYTRHHPQQLSAPLPAPLYSFPGASCPVLDLRRPPSDLYLPPPDHGAPARGSPHSEGGKRSPEPNKTSVLGGGEDGIEPVSPPEGMTEPGHSRSAVYPLLYRDGEQTEPSRMGSKSPGNTSQPPAFFSKLTESNSAMVKSKKQEINKKLNTHNRNEPEYNISQPGTEIFNMPAITGTGLMTYRSQAVQEHASTNMGLEAIIRKALMGKYDQWEESPPLSANAFNPLNASASLPAAMPITAADGRSDHTLTSPGGGGKAKVSGRPSSRKAKSPAPGLASGDRPPSVSSVHSEGDCNRRTPLTNRVWEDRPSSAGSTPFPYNPLIMRLQAGVMASPPPPGLPAGSGPLAGPHHAWDEEPKPLLCSQYETLSDSE

SEQ ID NO: 1864 - protein, 2188 aa, Homo sapiens
MAESASPPSSSAAAPAAEPGVTTEQPGPRSPPSSPPGLEEPLDGADPHVPHPDLAPIAFFCLRQTTSPRNWCIKMVCNPWFECVSMLVILLNCVTLGMYQPCDDMDCLSDRCKILQVFDDFIFIFFAMEMVLKMVALGIFGKKCYLGDTWNRLDFFIVMAGMVEYSLDLQNINLSAIRTVRVLRPLKAINRVPSMRILVNLLLDTLPMLGNVLLLCFFVFFIFGIIGVQLWAGLLRNRCFLEENFTIQGDVALPPYYQPEEDDEMPFICSLSGDNGIMGCHEIPPLKEQGRECCLSKDDVYDFGAGRQDLNASGLCVNWNRYYNVCRTGSANPHKGAINFDNIGYAWIVIFQVITLEGWVEIMYYVMDAHSFYNFIYFILLIIVGSFFMINLCLVVIATQFSETKQREHRLMLEQRQRYLSSSTVASYAEPGDCYEEIFQYVCHILRKAKRRALGLYQALQSRRQALGPEAPAPAKPGPHAKEPRHYQLCPQHSPLDATPHTLVQPIPATLASDPASCPCCQHEDGRRPSGLGSTDSGQEGSGSGSSAGGEDEADGDGARSSEDGASSELGKEEEEEEQADGAVWLCGDVWRETRAKLRGIVDSKYFNRGIMMAILVNTVSMGIEHHEQPEELTNILEICNVVFTSMFALEMILKLAAFGLFDYLRNPYNIFDSIIVIISIWEIVGQADGGLSVLRTFRLLRVLKLVRFMPALRRQLVVLMKTMDNVATFCMLLMLFIFIFSILGMHIFGCKFSLRTDTGDTVPDRKNFDSLLWAIVTVFQILTQEDWNVVLYNGMASTSPWASLYFVALMTFGNYVLFNLLVAILVEGFQAEGDANRSYSDEDQSSSNIEEFDKLQEGLDSSGDPKLCPIPMTPNGHLDPSLPLGGHLGPAGAAGPAPRLSLQPDPMLVALGSRKSSVMSLGRMSYDQRSLSSSRSSYYGPWGRSAAWASRRSSWNSLKHKPPSAEHESLLSAERGGGARVCEVAADEGPPRAAPLHTPHAHHIHHGPHLAHRHRHHRRTLSLDNRDSVDLAELVPAVGAHPRAAWRAAGPAPGHEDCNGRMPSIAKDVFTKMGDRGDRGEDEEEIDYTLCFRVRKMIDVYKPDWCEVREDWSVYLFSPENRFRVLCQTIIAHKLFDYVVLAFIFLNCITIALERPQIEAGSTERIFLTVSNYIFTAIFVGEMTLKVVSLGLYFGEQAYLRSSWNVLDGFLVFVSIIDIVVSLASAGGAKILGVLRVLRLLRTLRPLRVISRAPGLKLVVETLISSLKPIGNIVLICCAFFIIFGILGVQLFKGKFYHCLGVDTRNITNRSDCMAANYRWVHHKYNFDNLGQALMSLFVLASKDGWVNIMYNGLDAVAVDQQPVTNHNPWMLLYFISFLLIVSFFVLNMFVGVVVENFHKCRQHQEAEEARRREEKRLRRLEKKRRKAQRLPYYATYCHTRLLIHSMCTSHYLDIFITFIICLNVVTMSLEHYNQPTSLETALKYCNYMFTTVFVLEAVLKLVAFGLRRFFKDRWNQLDLAIVLLSVMGITLEEIEINAALPINPTIIRIMRVLRIARVLKLLKMATGMRALLDTVVQALPQVGNLGLLFMLLFFIYAALGVELFGKLVCNDENPCEGMSRHATFENFGMAFLTLFQVSTGDNWNGIMKDTLRDCTHDERSCLSSLQFVSPLYFVSFVLTAQFVLINVVVAVLMKHLDDSNKEAQEDAEMDAELELEMAHGLGPGPRLPTGSPGAPGRGPGGAGGGGDTEGGLCRRCYSPAQENLWLDSVSLIIKDSLEGELTIIDNLSGSIFHHYSSPAGCKKCHHDKQEVQLAETEAFSLNSDRSSSILLGDDLSLEDPTACPPGRKDSKGELDPPEPMRVGDLGECFFPLSSTAVSPDPENFLCEMEEIPFNPVRSWLKHDSSQAPPSPFSPDASSPLLPMPAEFFHPAVSASQKGPEKGTGTGTLPKIALQGSWASLRSPRVNCTLLRQATGSDTSLDASPSSSAGSLQTTLEDSLTLSDSPRRALGPPAPAPGPRAGLSPAARRRLSLRGRGLFSLRGLRAHQRSHSSGGSTSPGCTHHDSMDPSDEEGRGGAGGGGAGSEHSETLSSLSLTSLFCPPPPPPAPGLTPARKFSSTSSLAAPGRPHAAALAHGLARSPSWAADRSKDPPGRAPLPMGLGPLAPPPQPLPGELEPGDAASKRKR

SEQ ID NO: 1865 - protein, 2444 aa, Homo sapiens
MKAQRERLQIPGLTLDLTPRSLSPTPSSPGSPCSPLLAFHFWSCRTSNRKSLIGNGQSPALPRPHSPLSAHAGNSPQDSPRNFSPSASAHFSFARRNDRTDGRRWSLASLPSSGYGTNTPSSTVSSSCSSQEKLHQLPYQPTPDELHFLSKHFCTTESIATENRCRNTPMRPRSRSLSPGRSPACCDHEIIMMNHVYKERFPKATAQMEERLKEIITSYSPDNVLPLADGVLSFTHHQIIELARDCLDKSHQGLITSRYFLELQHKLDKLLQEAHDRSESGELAFIKQLVRKILIVIARPARLLECLEFDPEEFYYLLEAAEGHAKEGQGIKTDIPRYIISQLGLNKDPLEEMAHLGNYDSGTAETPETDESVSSSNASLKLRRKPRESDFETIKLISNGAYGAVYFVRHKESRQRFAMKKINKQNLILRNQIQQAFVERDILTFAENPFVVSMYCSFETRRHLCMVMEYVEGGDCATLMKNMGPLPVDMARMYFAETVLALEYLHNYGIVHRDLKPDNLLVTSMGHIKLTDFGLSKVGLMSMTTNLYEGHIEKDAREFLDKQVCGTPEYIAPEVILRQGYGKPVDWWAMGIILYEFLVGCVPFFGDTPEELFGQVISDEINWPEKDEAPPPDAQDLITLLLRQNPLERLGTGGAYEVKQHRFFRSLDWNSLLRQKAEFIPQLESEDDTSYFDTRSEKYHHMETEEEDDTNDEDFNVEIRQFSSCSHRFSKVFSSIDRITQNSAEEKEDSVDKTKSTTLPSTETLSWSSEYSEMQQLSTSNSSDTESNRHKLSSGLLPKLAISTEGEQDEAASCPGDPHEEPGKPALPPEECAQEEPEVTTPASTISSSTLSVGSFSEHLDQINGRSECVDSTDNSSKPSSEPASHMARQRLESTEKKKISGKVTKSLSASALSLMIPGDMFAVSPLGSPMSPHSLSSDPSSSRDSSPSRDSSAASASPHQPIVIHSSGKNYGFTIRAIRVYVGDSDIYTVHHIVWNVEEGSPACQAGLKAGDLITHINGEPVHGLVHTEVIELLLKSGNKVSITTTPFENTSIKTGPARRNSYKSRMVRRSKKSKKKESLERRRSLFKKLAKQPSPLLHTSRSFSCLNRSLSSGESLPGSPTHSLSPRSPTPSYRSTPDFPSGTNSSQSSSPSSSAPNSPAGSGHIRPSTLHGLAPKLGGQRYRSGRRKSAGNIPLSPLARTPSPTPQPTSPQRSPSPLLGHSLGNSKIAQAFPSKMHSPPTIVRHIVRPKSAEPPRSPLLKRVQSEEKLSPSYGSDKKHLCSRKHSLEVTQEEVQREQSQREAPLQSLDENVCDVPPLSRARPVEQGCLKRPVSRKVGRQESVDDLDRDKLKAKVVVKKADGFPEKQESHQKSHGPGSDLENFALFKLEEREKKVYPKAVERSSTFENKASMQEAPPLGSLLKDALHKQASVRASEGAMSDGRVPAEHRQGGGDFRRAPAPGTLQDGLCHSLDRGISGKGEGTEKSSQAKELLRCEKLDSKLANIDYLRKKMSLEDKEDNLCPVLKPKMTAGSHECLPGNPVRPTGGQQEPPPASESRAFVSSTHAAQMSAVSFVPLKALTGRVDSGTEKPGLVAPESPVRKSPSEYKLEGRSVSCLKPIEGTLDIALLSGPQASKTELPSPESAQSPSPSGDVRASVPPVLPSSSGKKNDTTSARELSPSSLKMNKSYLLEPWFLPPSRGLQNSPAVSLPDPEFKRDRKGPHPTARSPGTVMESNPQQREGSSPKHQDHTTDPKLLTCLGQNLHSPDLARPRCPLPPEASPSREKPGLRESSERGPPTARSERSAARADTCREPSMELCFPETAKTSDNSKNLLSVGRTHPDFYTQTQAMEKAWAPGGKTNHKDGPGEARPPPRDNSSLHSAGIPCEKELGKVRRGVEPKPEALLARRSLQPPGIESEKSEKLSSFPSLQKDGAKEPERKEQPLQRHPSSIPPPPLTAKDLSSPAARQHCSSPSHASGREPGAKPSTAEPSSSPQDPPKPVAAHSESSSHKPRPGPDPGPPKTKHPDRSLSSQKPSVGATKGKEPATQSLGGSSREGKGHSKSGPDVFPATPGSQNKASDGIGQGEGGPSVPLHTDRAPLDAKPQPTSGGRPLEVLEKPVHLPRPGHPGPSEPADQKLSAVGEKQTLSPKHPKPSTVKDCPTLCKQTDNRQTDKSPSQPAANTDRRAEGKKCTEALYAPAEGDKLEAGLSFVHSENRLKGAERPAAGVGKGFPEARGKGPGPQKPPTEADKPNGMKRSPSATGQSSFRSTALPEKSLSCSSSFPETRAGVREASAASSDTSSAKAAGGMLELPAPSNRDHRKAQPAGEGRTHMTKSDSLPSFRVSTLPLESHHPDPNTMGGASHRDRALSVTATVGETKGKDPAPAQPPPARKQNVGRDVTKPSPAPNTDRPISLSNEKDFVVRQRRGKESLRSSPHKKAL

SEQ ID NO: 1866 - protein, 1461 aa, Homo sapiens
MSIAIPLGVTTSDTSYSDMAAGSDPESVEASPAVNEKSVYSTHNYGTTQRHGCRGLPYADHNYGAPPPPTPPASPPVQTIIPRSDLNGLPSPVEERCGDSPNSEGETVPTWCPCGLSQDGFLLNCDKCRGMSRGKVIRLHRRKQDNISGGDSSATESWDEELSPSTVLYTATQHTPTSITLTVRRTKPKKRKKSPEKGRAAPKTKKIKNSPSEAQNLDENTTEGWENRIRLWTDQYEEAFTNQYSADVQNALEQHLHSSKEFVGKPTILDTINKTELACNNTVIGSQMQLQLGRVTRVQKHRKILRAARDLALDTLIIEYRGKVMLRQQFEVNGHFFKKPYPFVLFYSKFNGVEMCVDARTFGNDARFIRRSCTPNAEVRHMIADGMIHLCIYAVSAITKDAEVTIAFDYEYSNCNYKVDCACHKGNRNCPIQKRNPNATELPLLPPPPSLPTIGAETRRRKARRKELEMEQQNEASEENNDQQSQEVPEKVTVSSDHEEVDNPEEKPEEEKEEVIDDQENLAHSRRTREDRKVEAIMHAFENLEKRKKRRDQPLEQSNSDVEITTTTSETPVGEETKTEAPESEVSNSVSNVTIPSTPQSVGVNTRRSSQAGDIAAEKLVPKPPPAKPSRPRPKSRISRYRTSSAQRLKRQKQANAQQAELSQAALEEGGSNSLVTPTEAGSLDSSGENRPLTGSDPTVVSITGSHVNRAASKYPKTKKYLVTEWLNDKAEKQECPVECPLRITTDPTVLATTLNMLPGLIHSPLICTTPKHYIRFGSPFIPERRRRPLLPDGTFSSCKKRWIKQALEEGMTQTSSVPQETRTQHLYQSNENSSSSSICKDNADLLSPLKKWKSRYLMEQNVTKLLRPLSPVTPPPPNSGSKSPQLATPGSSHPGEEECRNGYSLMFSPVTSLTTASRCNTPLQFELCHRKDLDLAKVGYLDSNTNSCADRPSLLNSGHSDLAPHPSLGPTSETGFPSRSGDGHQTLVRNSDQAFRTEFNLMYAYSPLNAMPRADGLYRGSPLVGDRKPLHLDGGYCSPAEGFSSRYEHGLMKDLSRGSLSPGGERACEGVPSAPQNPPQRKKVSLLEYRKRKQEAKENSAGGGGDSAQSKSKSAGAGQGSSNSVSDTGAHGVQGSSARTPSSPHKKFSPSHSSMSHLEAVSPSDSRGTSSSHCRPQENISSRWMVPTSVERLREGGSIPKVLRSSVRVAQKGEPSPTWESNITEKDSDPADGEGPETLSSALSKGATVYSPSRYSYQLLQCDSPRTESQSLLQQSSSPFRGHPTQSPGYSYRTTALRPGNPPSHGSSESSLSSTSYSSPAHPVSTDSLAPFTGTPGYFSSQPHSGNSTGSNLPRRSCPSSAASPTLQGPSDSPTSDSVSQSSTGTLSSTSFPQNSRSSLPSDLRTISLPSAGQSAVYQASRVSAVSNSQHYPHRGSGGVHQYRLQPLQGSGVKTQTGLS

SEQ ID NO: 1867 - protein, 1392 aa, Homo sapiens
MASVKVAVRVRPMNRREKDLEAKFIIQMEKSKTTITNLKIPEGGTGDSGRERTKTFTYDFSFYSADTKSPDYVSQEMVFKTLGTDVVKSAFEGYNACVFAYGQTGSGKSYTMMGNSGDSGLIPRICEGLFSRINETTRWDEASFRTEVSYLEIYNERVRDLLRRKSSKTFNLRVREHPKEGPYVEDLSKHLVQNYGDVEELMDAGNINRTTAATGMNDVSSRSHAIFTIKFTQAKFDSEMPCETVSKIHLVDLAGSERADATGATGVRLKEGGNINKSLVTLGNVISALADLSQDAANTLAKKKQVFVPYRDSVLTWLLKDSLGGNSKTIMIATISPADVNYGETLSTLRYANRAKNIINKPTINEDANVKLIRELRAEIARLKTLLAQGNQIALLDSPTALSMEEKLQQNEARVQELTKEWTNKWNETQNILKEQTLALRKEGIGVVLDSELPHLIGIDDDLLSTGIILYHLKEGQTYVGRDDASTEQDIVLHGLDLESEHCIFENIGGTVTLIPLSGSQCSVNGVQIVEATHLNQGAVILLGRTNMFRFNHPKEAAKLREKRKSGLLSSFSLSMTDLSKSRENLSAVMLYNPGLEFERQQREELEKLESKRKLIEEMEEKQKSDKAELERMQQEVETQRKETEIVQLQIRKQEESLKRRSFHIENKLKDLLAEKEKFEEERLREQQEIELQKKRQEEETFLRVQEELQRLKELNNNEKAEKFQIFQELDQLQKEKDEQYAKLELEKKRLEEQEKEQVMLVAHLEEQLREKQEMIQLLRRGEVQWVEEEKRDLEGIRESLLRVKEARAGGDEDGEELEKAQLRFFEFKRRQLVKLVNLEKDLVQQKDILKKEVQEEQEILECLKCEHDKESRLLEKHDESVTDVTEVPQDFEKIKPVEYRLQYKERQLQYLLQNHLPTLLEEKQRAFEILDRGPLSLDNTLYQVEKEMEEKEEQLAQYQANANQLQKLQATFEFTANIARQEEKVRKKEKEILESREKQQREALERALARLERRHSALQRHSTLGMEIEEQRQKLASLNSGSREQSGLQASLEAEQEALEKDQERLEYEIQQLKQKIYEVDGVQKDHHGTLEGKVASSSLPVSAEKSHLVPLMDARINAYIEEEVQRRLQDLHRVISEGCSTSADTMKDNEKLHNGTIQRKLKYELCRDLLCVLMPEPDAAACANHPLLQQDLVQLSLDWKTEIPDLVLPNGVQVSSKFQTTLVDMIYFLHGNMEVNVPSLAEVQLLLYTTVKVMGDSGHDQCQSLVLLNTHIALVKEDCVFYPRIRSRNIPPPGAQFDVIKCHALSEFRCVVVPEKKNVSTVELVFLQKLKPSVGSRNSPPEHLQEAPNVQLFTTPLYLQGSQNVAPEVWKLTFNSQDEALWLISHLTRL

SEQ ID NO: 1868 - protein, 2458 aa, Homo sapiens
MSGSTQPVAQTWRATEPRYPPHSLSYPVQIARTHTDVGLLEYQHHSRDYASHLSPGSIIQPQRRRPSLLSEFQPGNERSQELHLRPESHSYLPELGKSEMEFIESKRPRLELLPDPLLRPSPLLATGQPAGSEDLTKDRSLTGKLEPVSPPSPPHTDPELELVPPRLSKEELIQNMDRVDREITMVEQQISKLKKKQQQLEEEAAKPPEPEKPVSPPPIESKHRSLVQIIYDENRKKAEAAHRILEGLGPQVELPLYNQPSDTRQYHENIKINQAMRKKLILYFKRRNHARKQWEQKFCQRYDQLMEAWEKKVERIENNPRRRAKESKVREYYEKQFPEIRKQRELQERMQRVGQRGSGLSMSAARSEHEVSEIIDGLSEQENLEKQMRQLAVIPPMLYDADQQRIKFINMNGLMADPMKVYKDRQVMNMWSEQEKETFREKFMQHPKNFGLIASFLERKTVAECVLYYYLTKKNENYKSLVRRSYRRRGKSQQQQQQQQQQQQQQQQQPMPRSSQEEKDEKEKEKEAEKEEEKPEVENDKEDLLKEKTDDTSGEDNDEKEAVASKGRKTANSQGRRKGRITRSMANEANSEEAITPQQSAELASMELNESSRWTEEEMETAKKGLLEHGRNWSAIARMVGSKTVSQCKNFYFNYKKRQNLDEILQQHKLKMEKERNARRKKKKAPAAASEEAAFPPVVEDEEMEASGVSGNEEEMVEEAEATVNNSSDTESIPSPHTEAAKDTGQNGPKPPATLGADGPPPGPPTPPPEDIPAPTEPTPASEATGAPTPPPAPPSPSAPPPVVPKEEKEEETAAAPPVEEGEEQKPPAAEELAVDTGKAEEPVKSECTEEAEEGPAKGKDAEAAEATAEGALKAEKKEGGSGRATTAKSSGAPQDSDSSATCSADEVDEAEGGDKNRLLSPRPSLLTPTGDPRANASPQKPLDLKQLKQRAAAIPPIQVTKVHEPPREDAAPTKPAPPAPPPPQNLQPESDAPQQPGSSPRGKSRSPAPPADKEAEKPVFFPAFAAEAQKLPGDPPCWTSGLPFPVPPREVIKASPHAPDPSAFSYAPPGHPLPLGLHDTARPVLPRPPTISNPPPLISSAKHPSVLERQIGAISQGMSVQLHVPYSEHAKAPVGPVTMGLPLPMDPKKLAPFSGVKQEQLSPRGQAGPPESLGVPTAQEASVLRGTALGSVPGGSITKGIPSTRVPSDSAITYRGSITHGTPADVLYKGTITRIIGEDSPSRLDRGREDSLPKGHVIYEGKKGHVLSYEGGMSVTQCSKEDGRSSSGPPHETAAPKRTYDMMEGRVGRAISSASIEGLMGRAIPPERHSPHHLKEQHHIRGSITQGIPRSYVEAQEDYLRREAKLLKREGTPPPPPPSRDLTEAYKTQALGPLKLKPAHEGLVATVKEAGRSIHEIPREELRHTPELPLAPRPLKEGSITQGTPLKYDTGASTTGSKKHDVRSLIGSPGRTFPPVHPLDVMADARALERACYEESLKSRPGTASSSGGSIARGAPVIVPELGKPRQSPLTYEDHGAPFAGHLPRGSPVTTREPTPRLQEGSLSSSKASQDRKLTSTPREIAKSPHSTVPEHHPHPISPYEHLLRGVSGVDLYRSHIPLAFDPTSIPRGIPLDAAAAYYLPRHLAPNPTYPHLYPPYLIRGYPDTAALENRQTIINDYITSQQMHHNAATAMAQRADMLRGLSPRESSLALNYAAGPRGIIDLSQVPHLPVLVPPTPGTPATAMDRLAYLPTAPQPFSSRHSSSPLSPGGPTHLTKPTTTSSSERERDRDRERDRDREREKSILTSTTTVEHAPIWRPGTEQSSGSSGGGGGSSSRPASHSHAHQHSPISPRTQDALQQRPSVLHNTGMKGIITAVEPSTPTVLRSTSTSSPVRPAATFPPATHCPLGGTLDGVYPTLMEPVLLPKEAPRVARPERPRADTGHAFLAKPPARSGLEPASSPSKGSEPRPLVPPVSGHATIARTPAKNLAPHHASPDPPAPPASASDPHREKTQSKPFSIQELELRSLGYHGSSYSPEGVEPVSPVSSPSLTHDKGLPKHLEELDKSHLEGELRPKQPGPVKLGGEAAHLPHLRPLPESQPSSSPLLQTAPGVKGHQRVVTLAQHISEVITQDYTRHHPQQLSAPLPAPLYSFPGASCPVLDLRRPPSDLYLPPPDHGAPARGSPHSEGGKRSPEPNKTSVLGGGEDGIEPVSPPEGMTEPGHSRSAVYPLLYRDGEQTEPSRMGSKSPGNTSQPPAFFSKLTESNSAMVKSKKQEINKKLNTHNRNEPEYNISQPGTEIFNMPAITGTGLMTYRSQAVQEHASTNMGLEAIIRKALMGGGGKAKVSGRPSSRKAKSPAPGLASGDRPPSVSSVHSEGDCNRRTPLTNRVWEDRPSSAGSTPFPYNPLIMRLQAGVMASPPPPGLPAGSGPLAGPHHAWDEEPKPLLCSQYETLSDSE

SEQ ID NO: 1869 - protein, 1192 aa, Homo sapiens
MPRRAGSGQLPLPRGWEEARDYDGKVFYIDHNTRRTSWIDPRDRLTKPLSFADCVGDELPWGWEAGFDPQIGVYYIDHINKTTQIEDPRKQWRGEQEKMLKDYLSVAQDALRTQKELYHVKEQRLALALDEYVRLNDAYKEKSSSHTSLFSGSSSSTKYDPDILKAEISTTRLRVKKLKRELSQMKQELLYKEQGFETLQQIDKKMSGGQSGYELSEAKAILTELKSIRKAISSGEKEKQDLMQSLAKLQERFHLDQNIGRSEPDLRCSPVNSHLCLSRQTLDAGSQTSISGDIGVRSRSNLAEKVRLSLQYEEAKRSMANLKIELSKLDSEAWPGALDIEKEKLMLINEKEELLKELQFVTPQKRTQDELERLEAERQRLEEELLSVRGTPSRALAERLRLEERRKELLQKLEETTKLTTYLHSQLKSLSASTLSMSSGSSLGSLASSRGSLNTSSRGSLNSLSSTELYYSSQSDQIDVDYQYKLDFLLQEKSGYIPSGPITTIHENEVVKSPSQPGQSGLCGVAAAATGHTPPLAEAPKSVASLSSRSSLSSLSPPGSPLVLEGTFPMSSSHDASLHQFTADFEDCELSSHFADISLIENQILLDSDSGGASQSLSEDKDLNECAREPLYEGTADVEKSLPKRRVIHLLGEKTTCVSAAVSDESVAGDSGVYEAFVKQPSEMEDVTYSEEDVAIVETAQVQIGLRYNAKSSSFMVIIAQLRNLHAFLIPHTSKVYFRVAVLPSSTDVSCLFRTKVHPPTESILFNDVFRVAISQTALQQKTLRVDLCSVSKHRREECLAGTQISLADLPFSSEVFTLWYNLLPSKQMPCKKNEENEDSVFQPNQPLVDSIDLDAVSALLARTSAELLAVEQELAQEEEEESGQEEPRGPDGDWLTMLREASDEIVAEKEAEVKLPEDSSCTEDLSSCTSVPEMNEDGNRKESNCAKDLRSQPPTRIPTLVDKETNTDEAANDNMAVRPKERSSLSSRQHPFVRSSVIVRSQTFSPGERNQYICRLNRSDSDSSTLAKKSLFVRNSTERRSLRVKRTVCQSVLRRTTQECPVRTSLDLELDLQASLTRQSRLNDELQALRDLRQKLEELKAQGETDLPPGVLEDERFQRLLKQAEKQAEQSKEEQKQGLNAEKLMRQVSKDVCRLREQSQKVPRQVQSFREKIAYFTRAKISIPSLPADDV

SEQ ID NO: 1870 - protein, 465 aa, Homo sapiens [sequence omitted]

SEQ ID NO: 1871 - protein, 393 aa, Homo sapiens
MDAATLTYDTLRFAEFEDFPETSEPVWILGRKYSIFTEKDEILSDVASRLWFTYRKNFPAIGGTGPTSDTGWGCMLRCGQMIFAQALVCRHLGRDWRWTQRKRQPDSYFSVLNAFIDRKDSYYSIHQIAQMGVGEGKSIGQWYGPNTVAQVLKKLAVFDTWSSLAVHIAMDNTVVMEEIRRLCRTSVPCAGATAFPADSDRHCNGFPAGAEVTNRPSPWRPLVLLIPLRLGLTDINEAYVETLKHCFMMPQSLGVIGGKPNSAHYFIGYVGEELIYLDPHTTQPAVEPTDGCFIPDESFHCQHPPCRMSIAELDPSIAVGFFCKTEDDFNDWCQQVKKLSLLGGALPMFELVELQPSHLACPDVLNLSLDSSDVERLERFFDSEDEDFEILSL

SEQ ID NO: 1872 - protein, 240 aa, Homo sapiens
MKLVLIGHSIGSYFTLQMLKRVPELPVIRAFLLFPTIERMSESPNGRIATPLLCWFRYVLYVTGYLLLKPCPETIKSLLIRRGLQVMNLENEFSPLNILEPFCLANAAYLGGQEMMEVVKRDDETIKEHLCKLTFYYGTIDPWCPKEYYEDIKKDFPEGDIRLCEKNIPHAFITHFNQEMADMIADSLKDDLSKIGNPSWHYHSLRTMRCPSAQILKPPDERFGSDLLPTYWWKNQISRD

SEQ ID NO: 1873 - protein, 1587 aa, Homo sapiens
MVQKKKFCPRLLDYLVIVGARHPSSDSVAQTPELLRRYPLEDHTEFPLPPDVVFFCQPEGCLSVRQRRMSLRDDTSFVFTLTDKDTGVTRYGICVNFYRSFQKRISKEKGEGGAGSRGKEGTHATCASEEGGTESSESGSSLQPLSADSTPDVNQSPRGKRRAKAGSRSRNSTLTSLCVLSHYPFFSTFRECLYTLKRLVDCCSERLLGKKLGIPRGVQRDTMWRIFTGSLLVEEKSSALLHDLREIEAWIYRLLRSPVPVSGQKRVDIEVLPQELQPALTFALPDPSRFTLVDFPLHLPLELLGVDACLQVLTCILLEHKVVLQSRDYNALSMSVMAFVAMIYPLEYMFPVIPLLPTCMASAEQLLLAPTPYIIGVPASFFLYKLDFKMPDDVWLVDLDSNRVIAPTNAEVLPILPEPESLELKKHLKQALASMSLNTQPILNLEKFHEGQEIPLLLGRPSNDLQSTPSTEFNPLIYGNDVDSVDVATRVAMVRFFNSANVLQGFQMHTRTLRLFPRPVVAFQAGSFLASRPRQTPFAEKLARTQAVEYFGEWILNPTNYAFQRIHNNMFDPALIGDKPKWYAHQLQPIHYRVYDSNSQLAEALSVPPERDSDSEPTDDSGSDSMDYDDSSSSYSSLGDFVSEMMKCDINGDTPNVDPLTHAALGDASEVEIDELQNQKEAEEPGPDSENSQENPPLRSSSSTTASSSPSTVIHGANSEPADSTEMDDKAAVGVSKPLPSVPPSIGKSNVDRRQAEIGEGSVRRRIYDNPYFEPQYGFPPEEDEDEQGESYTPRFSQHVSGNRAQKLLRPNSLRLASDSDAESDSRASSPNSTVSNTSTEGFGGIMSFASSLYRNHSTSFSLSNLTLPTKGAREKATPFPSLKGNRRALVDQKSSVIKHSPTVKREPPSPQGRSSNSSENQQFLKEVVHSVLDGQGVGWLNMKKVRRLLESEQLRVFVLSKLNRMVQSEDDARQDIIPDVEISRKVYKGMLDLLKCTVLSLEQSYAHAGLGGMASIFGLLEIAQTHYYSKEPDKRKRSPTESVNTPVGKDPGLAGRGDPKAMAQLRVPQLGPRAPSATGKGPKELDTRSLKEENFIASIGPEVIKPVFDLGETEEKKSQISADSGVSLTSSSQRTDQDSVIGVSPAVMIRSSSQDSEVSTVSNSSGETLGADSDLSSNAGDGPGGEGSVHLASSRGTLSDSEIETNSATSTIFGKAHSLKPSIKEKLAGSPIRTSEDVSQRVYLYEGLLGKERSTLWDQMQFWEDAFLDAVMLEREGMGMDQGPQEMIDRYLSLGEHDRKRLEDDEDRLLATLLHNLISYMLLMKVNKNDIRKKVRRLMGKSHIGLVYSQQINEVLDQLANLNGRDLSIWSSGSRHMKKQTFVVHAGTDTNGDIFFMEVCDDCVVLRSNIGTVYERWWYEKLINMTYCPKTKVLCLWRRNGSETQLNKFYTKKCRELYYCVKDSMERAAARQQSIKPGPELGGEFPVQDLKTGEGGLLQVTLEGINLKFMHNQVFIELNHIKKCNTVRGVFVLEEFVPEIKEVVSHKYKTPMAHEICYSVLCLFSYVAAVHSSEEDLRTPPRPVSS

SEQ ID NO: 1874 - protein, 70 aa, Homo sapiens
MAEQATKSVLFVCLGNICRSPIAEAVFRKLVTDQNISENWRVDSAATSGGSLTAVLFLTGTWAGPQTQEL

SEQ ID NO: 1875 - protein, 2434 aa, Homo sapiens
MDESSILRRRGLQKELSLPRRGSLIDSQKWNCLVKRCRTSNRKSLIGNGQSPALPRPHSPLSAHAGNSPQDSPRNFSPSASAHFSFARRTDGRRWSLASLPSSGYGTNTPSSTVSSSCSSQEKLHQLPYQPTPDELHFLSKHFCTTESIATENRCRNTPMRPRSRSLSPGRSPACCDHEIIMMNHVYKERFPKATAQMEERLKEIITSYSPDNVLPLADGVLSFTHHQIIELARDCLDKSHQGLITSRYFLELQHKLDKLLQEAHDRSESGELAFIKQLVRKILIVIARPARLLECLEFDPEEFYYLLEAAEGHAKEGQGIKTDIPRYIISQLGLNKDPLEEMAHLGNYDSGTAETPETDESVSSSNASLKLRRKPRESDFETIKLISNGAYGAVYFVRHKESRQRFAMKKINKQNLILRNQIQQAFVERDILTFAENPFVVSMYCSFETRRHLCMVMEYVEGGDCATLMKNMGPLPVDMARMYFAETVLALEYLHNYGIVHRDLKPDNLLVTSMGHIKLTDFGLSKVGLMSMTTNLYEGHIEKDAREFLDKQVCGTPEYIAPEVILRQGYGKPVDWWAMGIILYEFLVGCVPFFGDTPEELFGQVISDEINWPEKDEAPPPDAQDLITLLLRQNPLERLGTGGAYEVKQHRFFRSLDWNSLLRQKAEFIPQLESEDDTSYFDTRSEKYHHMETEEEDDTNDEDFNVEIRQFSSCSHRFSKVFSSIDRITQNSAEEKEDSVDKTKSTTLPSTETLSWSSEYSEMQQLSTSNSSDTESNRHKLSSGLLPKLAISTEGEQDEAASCPGDPHEEPGKPALPPEECAQEEPEVTTPASTISSSTLSVGSFSEHLDQINGRSECVDSTDNSSKPSSEPASHMARQRLESTEKKKISGKVTKSLSASALSLMIPGDMFAVSPLGSPMSPHSLSSDPSSSRDSSPSRDSSAASASPHQPIVIHSSGKNYGFTIRAIRVYVGDSDIYTVHHIVWNVEEGSPACQAGLKAGDLITHINGEPVHGLVHTEVIELLLKSGNKVSITTTPFENTSIKTGPARRNSYKSRMVRRSKKSKKKESLERRRSLFKKLAKQPSPLLHTSRSFSCLNRSLSSGESLPGSPTHSLSPRSPTPSYRSTPDFPSGTNSSQSSSPSSSAPNSPAGSGHIRPSTLHGLAPKLGGQRYRSGRRKSAGNIPLSPLARTPSPTPQPTSPQRSPSPLLGHSLGNSKIAQAFPSKMHSPPTIVRHIVRPKSAEPPRSPLLKRVQSEEKLSPSYGSDKKHLCSRKHSLEVTQEEVQREQSQREAPLQSLDENVCDVPPLSRARPVEQGCLKRPVSRKVGRQESVDDLDRDKLKAKVVVKKADGFPEKQESHQKSHGPGSDLENFALFKLEEREKKVYPKAVERSSTFENKASMQEAPPLGSLLKDALHKQASVRASEGAMSDGRVPAEHRQGGGDFRRAPAPGTLQDGLCHSLDRGISGKGEGTEKSSQAKELLRCEKLDSKLANIDYLRKKMSLEDKEDNLCPVLKPKMTAGSHECLPGNPVRPTGGQQEPPPASESRAFVSSTHAAQMSAVSFVPLKALTGRVDSGTEKPGLVAPESPVRKSPSEYKLEGRSVSCLKPIEGTLDIALLSGPQASKTELPSPESAQSPSPSGDVRASVPPVLPSSSGKKNDTTSARELSPSSLKMNKSYLLEPWFLPPSRGLQNSPAVSLPDPEFKRDRKGPHPTARSPGTVMESNPQQREGSSPKHQDHTTDPKLLTCLGQNLHSPDLARPRCPLPPEASPSREKPGLRESSERGPPTARSERSAARADTCREPSMELCFPETAKTSDNSKNLLSVGRTHPDFYTQTQAMEKAWAPGGKTNHKDGPGEARPPPRDNSSLHSAGIPCEKELGKVRRGVEPKPEALLARRSLQPPGIESEKSEKLSSFPSLQKDGAKEPERKEQPLQRHPSSIPPPPLTAKDLSSPAARQHCSSPSHASGREPGAKPSTAEPSSSPQDPPKPVAAHSESSSHKPRPGPDPGPPKTKHPDRSLSSQKPSVGATKGKEPATQSLGGSSREGKGHSKSGPDVFPATPGSQNKASDGIGQGEGGPSVPLHTDRAPLDAKPQPTSGGRPLEVLEKPVHLPRPGHPGPSEPADQKLSAVGEKQTLSPKHPKPSTVKDCPTLCKQTDNRQTDKSPSQPAANTDRRAEGKKCTEALYAPAEGDKLEAGLSFVHSENRLKGAERPAAGVGKGFPEARGKGPGPQKPPTEADKPNGMKRSPSATGQSSFRSTALPEKSLSCSSSFPETRAGVREASAASSDTSSAKAAGGMLELPAPSNRDHRKAQPAGEGRTHMTKSDSLPSFRVSTLPLESHHPDPNTMGGASHRDRALSVTATVGETKGKDPAPAQPPPARKQNVGRDVTKPSPAPNTDRPISLSNEKDFVVRQRRGKESLRSSPHKKAL

SEQ ID NO: 1876 - protein, 1937 aa, Homo sapiens
MSASSDAEMAVFGEAAPYLRKSEKERIEAQNKPFDAKTSVFVAEPKESYVKSTIQSKEGGKVTVKTEGGATLTVREDQVFPMNPPKYDKIEDMAMMTHLHEPGVLYNLKERYAAWMIYTYSGLFCVTVNPYKWLPVYKPEVVAAYRGKKRQEAPPHIFSISDNAYQFMLTDRENQSILITGESGAGKTVNTKRVIQYFATIAVTGEKKKDESGKMQGTLEDQIISANPLLEAFGNAKTVRNDNSSRFGKFIRIHFGTTGKLASADIETYLLEKSRVTFQLKAERSYHIFYQITSNKKPDLIEMLLITTNPYDYAFVSQGEITVPSIDDQEELMATDSAIDILGFTPEEKVSIYKLTGAVMHYGNMKFKQKQREEQAEPDGTEVADKAAYLQSLNSADLLKALCYPRVKVGNEYVTKGQTVQQVYNAVGALAKAVYEKMFLWMVTRINQQLDTKQPRQYFIGVLDIAGFEIFDFNSLEQLCINFTNEKLQQFFNHHMFVLEQEEYKKEGIEWTFIDFGMDLAACIELIEKPLGIFSILEEECMFPKATDTSFKNKLYDQHLGKSANFQKPKVVKGKAEAHFSLIHYAGTVDYNITGWLDKNKDPLNDTVVGLYQKSAMKTLASLFSTYASAEADSSAKKGAKKKGSSFQTVSALFRENLNKLMTNLRSTHPHFVRCIIPNETKTPGAMEHELVLHQLRCNGVLEGIRICRKGFPSRILYGDFKQRYKVLNASAIPEGQFIDSKKASEKLLASIDIDHTQYKFGHTKVFFKAGLLGLLEEMRDEKLAQIITRTQAVCRGFLMRVEYQKMLQRREALFCIQYNVRAFMNVKHWPWMKLFFKIKPLLKSAETEKEMATMKEEFQKTKDELAKSEAKRKELEEKMVTLLKEKNDLQLQVQSEADSLADAEERCEQLIKNKIQLEAKIKEVTERAEEEEEINAELTAKKRKLEDECSELKKDIDDLELTLAKVEKEKHATENKVKNLTEEMAGLDETIAKLSKEKKALQETHQQTLDDLQAEEDKVNILTKAKTKLEQQVDDLEGSLEQEKKLRMDLERAKRKLEGDLKLAQESTMDMENDKQQLDEKLEKKEFEISNLISKIEDEQAVEIQLQKKIKELQARIEELGEEIEAERASRAKAEKQRSDLSRELEEISERLEEAGGATSAQVELNKKREAEFQKLRRDLEEATLQHEAMVAALRKKHADSMAELGEQIDNLQRVKQKLEKEKSELKMETDDLSSNAEAISKAKGNLEKMCRSLEDQVSELKTKEEEQQRLINDLTAQRARLQTEAGEYSRQLDEKDALVSQLSRSKQASTQQIEELKHQLEEETKAKNALAHALQSSRHDCDLLREQYEEEQEGKAELQRALSKANSEVAQWRTKYETDAIQRTEELEEAKKKLAQRLQEAEEHVEAVNAKCASLEKTKQRLQNEVEDLMLDVERSNAACAALDKKQRNFDKVLSEWKQKYEETQAELEASQKESRSLSTELFKVKNVYEESLDQLETLRRENKNLQQEISDLTEQIAEGGKQIHELEKIKKQVEQEKCEIQAALEEAEASLEHEEGKILRIQLELNQVKSEVDRKIAEKDEEIDQLKRNHTRVVETMQSTLDAEIRSRNDALRVKKKMEGDLNEMEIQLNHANRLAAESLRNYRNTQGILKETQLHLDDALRGQEDLKEQLAIVERRANLLQAEIEELWATLEQTERSRKIAEQELLDASERVQLLHTQNTSLINTKKKLENDVSQLQSEVEEVIQESRNAEEKAKKAITDAAMMAEELKKEQDTSAHLERMKKNLEQTVKDLQHRLDEAEQLALKGGKKQIQKLEARVRELEGEVENEQKRNAEAVKGLRKHERRVKELTYQTEEDRKNVLRLQDLVDKLQAKVKSYKRQAEEAEEQSNANLSKFRKLQHELEEAEERADIAESQVNKLRVKSREVHTKISAE

SEQ ID NO: 1877 - protein, 1934 aa, Homo sapiens
MDSTSFLPTFLDVDLTISHIKCLPKDILVKFQGIKSNECEFDYHVLQREIQHTPKVKNNVEIDEFCLVEERVSGEWQRGRVMEKKNELYTVLLIDRGEELRVAGPQIASACGNLFELPPRVVFGIFANILPVGEKWSPKALNYFKSLVGIQVKGYVQAILPLQMFLFEVPKIISQALELQLGRLVDGDSFRLIVEMLEEFPQQMPDLLQHKRPELSLGNKDTSLDIQHVLDKLQPSLSVGSTESVKVSSALSPSKFYCQLIKWTPELENLTAHMTLHYDTVCQETSPTCDNFGLLCVARRRNGQWHRGILQQLLPPNQVKIWFMDYGSSEAIPSIYVKKLKQDFILVPLFSFPCSLTCLHSPDRDARIFQLSIFKQALLGQVVYAHIDWFNKDECLYYVTLQTQESTVNSKCLLKTVGTQVLCPMSDSKISNILSETSVSDVNSFAVESFMGNIEWSIDSLNKKGILKVGFPIKTVQMEIEAAYIAFIAYVLNPSNFWVRTNDHRNEFQEIMKNINKFYDLCENDEMILRKPEPGLFCCARYSKDRRFYRAVITEINGYKINVYFLDYGNTDSIPFFDVKILLPEFCELPALAMCCSLAHIFPVEDLWTKAAIDYFKKLVLNKAILLQVIAKKDDKYTVNIQSVEASENIDVISLMLQAGYAEYFQVELEYFPKSVSEYSMLNSESKNKVNIKKVISALLEGPKSKKYHSNNLVENNLSLPKSLAVNISEFKNPFTLSVGPESSWPYKEYIFRPGTVLEVKCSCYYGPGDFSCQLQCKSEDLKLLMEQIQNYYSIHSDPYEIGQTACVAKYSGKWCRAAVLTQVSKEVDIVFVDYGYQKRVLIEDLCAINPRFLLLESQAFRCCLNHFIEPVSCKLFSWTRKAFRDLWNFISSSRGLLTCIIYALVIIHPNHLYNLVDLQSSFTSAKEFLMNRGSAQYITLSETFPSLFSLYSYCYSSFNIQIGSEEEVYISHIYSPQKFYCQLGRNNKDLEMIETKITESVNLQNFPKYDSNKMRVCISKYVEDGLSYRALAIPTDSSSEFQVYFVDFGNKQLVGENMLRAISAQFPELLFTPMQAIKCFLSDLRDVDIPAEISSWFKDNFLGRSLKAIILSQESDGQLGIELYDGSQYINEKIKVLLHAYGKRHCDQACCMEKSNKINENKRFTTSLKGKTGNNYRHNVINKPSPVTYSERKIDQLMHPKNIHARFLKPSVCYKMEPVSKNKMKTSLNDGLKGIKIVPGAAHILENRRVGQKSVKVVSQSFIRALNQTTSQNPYDLIRPQIKDLPQPQIYLNAKVKGYVSNISNPANFHIQLAENESVIIRLADALNATARRLRERKSVKPLVGDLVVAEYSGDNAIYRAVIKKILPGNSFEVEFIDYGNSAIVNTSKIYELQREFLTVPQLGIHAFLSGVKWNEPDEIWDDKTVDYFTSKVHNKTVYCEFLKKHDQKWEVNMICDEKCVINELLKWKACSKLQKSALQMPQVLSQKVRPGDNEMKKGKSNESEGSMNSNQQLFKIPLEEFKLGQLEKAEMLNVSKSGRFYVKLSKNKKILSDLIVLITKEEKKSPFLSMESIEKGLECLAKSKNTLKWHRSKVEEKYVDDKVLVFLVDCGIYEIVPVCNTKLLSNEIRNIPRQAVPCKWIWFENSKNISFECLFADLEINILFLKYLDAVWEVEILVDDLLLLEYLNLNTVPVEENKLRLAEIVYNIESKTPVSSCTIKSFTWVQFQNDRQYSGIATAVSDPSDFSIQLEDFFDIMKYLFMLLSDLPETLQTLPQEFIIPGSSCLFKYKSEDQWNRVEISEVSPQSLCLVLVDYGFSFYIRYSEIINLKVVPEELLNLPRLSYPCILYGILPAKGKHWSEEAKIFFRDFLSKPDLVFQFREYHSETKLKVDVIHEKNNLADILVASGLATYSKDSPHLDAITATESAKNPI

SEQ ID NO: 1878 - protein, 225 aa, Homo sapiens
MTSEFFAAQLRAQISDDTTHPISYYKPEFYTPDDGGTAHLSVVAEDGSAVSATSTINLYFGSKVRSPVSGILFNNEMDDFSSPSITNEFGVPPSPANFIQPGKQPLSSMCPTIMVGQDGQVRMVVGAAGGTQITTATALAIIYNLWFGYDVKRAVEEPRLHNQLLPNVTTVERNIDQAVTAALETRHHHTQIASTFIAVVQAIVRTAGGWAAASDSRKGGEPAGY

SEQ ID NO: 1879 - protein, 959 aa, Homo sapiens
MGGGSGEEQLYADFPELDLSQLDASDFDSATCFGELQWCPENSETEPNQYSPDDSELFQIDSENEALLAELTKTLDDIPEDDVGLAAFPALDGGDALSCTSASPAPSSAPPSPAPEKPSAPAPEVDELSLADSTQDKKAPMMQSQSRSCTELHKHLTSAQCCLQDRGLQPPCLQSPRLPAKEDKEPGEDCPSPQPAPASPRDSLALGRADPGAPVSQEDMQAMVQLIRYMHTYCLPQRKLPPQTPEPLPKACSNPSQQVRSRPWSRHHSKASWAEFSILRELLAQDVLCDVSKPYRLATPVYASLTPRSRPRPPKDSQASPGRPSSVEEVRIAASPKSTGPRPSLRPLRLEVKREVRRPARLQQQEEEDEEEEEEEEEEEKEEEEEWGRKRPGRGLPWTKLGRKLESSVCPVRRSRRLNPELGPWLTFADEPLVPSEPQGALPSLCLAPKAYDVERELGSPTDEDSGQDQQLLRGPQIPALESPCESGCGDMDEDPSCPQLPPRDSPRCLMLALSQSDPTFGKKSFEQTLTVELCGTAGLTPPTTPPYKPTEEDPFKPDIKHSLGKEIALSLPSPEGLSLKATPGAAHKLPKKHPERSELLSHLRHATAQPASQAGQKRPFSCSFGDHDYCQVLRPEGVLQRKVLRSWEPSGVHLEDWPQQGAPWAEAQAPGREEDRSCDAGAPPKDSTLLRDHEIRASLTKHFGLLETALEEEDLASCKSPEYDTVFEDSSSSSGESSFLPEEEEEEGEEEEEDDEEEDSGVSPTCSDHCPYQSPPSKANRQLCSRSRSSSGSSPCHSWSPATRRNFRCESRGPCSDRTPSIRHARKRREKAIGEGRVVYIQNLSSDMSSRELKRRFEVFGEIEECEVLTRNRRGEKYGFITYRCSEHAALSLTKGAALRKRNEPSFQLSYGGLRHFCWPRYTDYDSNSEEALPASGKSKYEAMDFDSLLKEAQQSLH

SEQ ID NO: 1880 - protein, 1044 aa, Homo sapiens
MMAQKSQGSDNLQEGQEKSKREILKCTKSAWAPLDEWLPPDPEEESQSLTIPMLEDSKQESIQQWLDSGFFVSANENFQQVIDRTVSLYEQGMVQMTVKDYMRSLHQFSETPILSRGTSFNSCYSTASVPQSIPEWLEFWEIDPVEILLDLGFGADEPDICMQIPARFLGCGSAARGINIRVFLEAQKQRMDIENPNLYGRFRQLEILDHVTNAFSSLLSDVSILPNRAEEKAGGESVQRTSVSAAKEHRRRMGKLLRRASKQNIRRDCNPEVSESFKVKDEVFVPFTKPWDCGAELAATSINHKQNHLSLSVEHQSLQACDDLLPYPPHGLLSKQWPCSSMPAKQAPPSCVSEGSVKGRTQKENLFQTNKLKSLSHLAGKGPDSFEMEEVQSFEEETGNPLDMTSGTVGARVDRANSCQSDSSGFLEEPLEPLPLQMPSLPNSQSPAENGGRKPRDQSHSLVSSQDCQLESDGPDSKSRASMSFSSQEANALEQRASVSVMEEEFLLEAMEGPPELYIPDMACAKTTTRGECPRKDSHLWQLLPMPHAEYEVTRPTATSKYDHPLGFMVTHVTEMQDSFVRPEGAGKVQSHHNESQRSPGNDHTQDKFLHVDSEAPREEESSGFCPHTNHSLLVPESSSQCIPKHSEITPYATDLAQTSEKLIPHLHKLPGDPAQVKSRSGTLGQILPGTEAEMENLPLNTGSSRSVMTQMSSSLVSAAQRAVALGTGPRGTSLECTVCDPVTATETRLGTKARQLNDASIQTSALSNKTLTHGPQPLTKSVSLDSGFSSICPMGTCHAIPAHCCICCHHHPHCHGERQSPGPEPSVCRHCLCSLTGHQEAQFMTTLKALQDTTVRELCSCTVHEMEAMKTICQSFREYLEEIEQHLMGQQALFSRDMSEEEREEAEQLQTLREALRQQVAELEFQLGDRAQQIREGILLQLEVLTAEPPEHYSNLHQYNWIEESNGQTSCSKIHPGMAPRTVFPPDDGQEAPCSGGTQLAAFTPPTLENSTRMSPSSSAWAKLGPTPLSNCPVGEKDADVFL

SEQ ID NO: 1881 - protein, 900 aa, Homo sapiens
MKPPRPVRTCSKVLVLLSLLAIHQTTTAEKNGIDIYSLTVDSRVSSRFAHTVVTSRVVNRANTVQEATFQMELPKKAFITNFSMIIDGMTYPGIIKEKAEAQAQYSAAVAKGKSAGLVKATGRNMEQFQVSVSVAPNAKITFELVYEELLKRRLGVYELLLKVRPQQLVKHLQMDIHIFEPQGISFLETESTFMTNQLVDALTTWQNKTKAHIRFKPTLSQQQKSPEQQETVLDGNLIIRYDVDRAISGGSIQIENGYFVHYFAPEGLTTMPKNVVFVIDKSGSMSGRKIQQTREALIKILDDLSPRDQFNLIVFSTEATQWRPSLVPASAENVNKARSFAAGIQALGGTNINDAMLMAVQLLDSSNQEERLPEGSVSLIILLTDGDPTVGETNPRSIQNNVREAVSGRYSLFCLGFGFDVSYAFLEKLALDNGGLARRIHEDSDSALQLQDFYQEVANPLLTAVTFEYPSNAVEEVTQNNFRLLFKGSEMVVAGKLQDRGPDVLTATVSGKLPTQNITFQTESSVAEQEAEFQSPKYIFHNFMERLWAYLTIQQLLEQTVSASDADQQALRNQALNLSLAYSFVTPLTSMVVTKPDDQEQSQVAEKPMEGESRNRNVHSAGAAGSRMNFRPGVLSSRQLGLPGPPDVPDHAAYHPFRRLAILPASAPPATSNPDPAVSRVMNMKIEETTMTTQTPAPIQAPSAILPLPGQSVERLCVDPRHRQGPVNLLSDPEQGVEVTGQYEREKAGFSWIEVTFKNPLVWVHASPEHVVVTRNRRSSAYKWKETLFSVMPGLKMTMDKTGLLLLSDPDKVTIGLLFWDGRGEGLRLLLRDTDRFSSHVGGTLGQFYQEVLWGSPAASDDGRRTLRVQGNDHSATRERRLDYQEGPPGVEISCWSVEL

SEQ ID NO: 1882 - protein, 1145 aa, Homo sapiens
MPRNQGFSEPEYSAEYSAEYSVSLPSDPDRGVGRTHEISVRNSGSCLCLPRFMRLTFVPESLENLYQTYFKRQRHETLLVLVVFAALFDCYVVVMCAVVFSSDKLASLAVAGIGLVLDIILFVLCKKGLLPDRVTRRVLPYVLWLLITAQIFSYLGLNFARAHAASDTVGWQVFFVFSFFITLPLSLSPIVIISVVSCVVHTLVLGVTVAQQQQEELKGMQLLREILANVFLYLCAIAVGIMSYYMADRKHRKAFLEARQSLEVKMNLEEQSQQQENLMLSILPKHVADEMLKDMKKDESQKDQQQFNTMYMYRHENVSILFADIVGFTQLSSACSAQELVKLLNELFARFDKLAAKYHQLRIKILGDCYYCICGLPDYREDHAVCSILMGLAMVEAISYVREKTKTGVDMRVGVHTGTVLGGVLGQKRWQYDVWSTDVTVANKMEAGGIPGRVHISQSTMDCLKGEFDVEPGDGGSRCDYLEEKGIETYLIIASKPEVKKTATQNGLNGSALPNGAPASSKSSSPALIETKEPNGSAHSSGSTSEKPEEQDAQADNPSFPNPRRRLRLQDLADRVVDASEDEHELNQLLNEALLERESAQVVKKRNTFLLSMRFMDPEMETRYSVEKEKQSGAAFSCSCVVLLCTALVEILIDPWLMTNYVTFMVGEILLLILTICSLAAIFPRAFPKKLVAFSTWIDRTRWARNTWAMLAIFILVMANVVDMLSCLQYYTGPSNATAGMETEGSCLENPKYYNYVAVLSLIATIMLVQVSHMVKLTLMLLVAGAVATINLYAWRPVFDEYDHKRFREHDLPMVALEQMQGFNPGLNGTDSRLPLVPSKYSMTVMVFLMMLSFYYFSRHVEKLARTLFLWKIEVHDQKERVYEMRRWNEALVTNMLPEHVARHFLGSKKRDEELYSQTYDEIGVMFASLPNFADFYTEESINNGGIECLRFLNEIISDFDSLLDNPKFRVITKIKTIGSTYMAASGVTPDVNTNGFASSNKEDKSERERWQHLADLADFALAMKDTLTNINNQSFNNFMLRIGMNKGGVLAGVIGARKPHYDIWGNTVNVASRMESTGVMGNIQVVEETQVILREYGFRFVRRGPIFVKGKGELLTFFLKGRDKLATFPNGPSVTLPHQVVDNS

SEQ ID NO: 1883 - protein, 651 aa, Homo sapiens
MGDLSSLTPGGSMGLQVNRGSQSSLEGAPATAPEPHSLGILHASYSVSHRVRPWWDITSCRQQWTRQILKDVSLYVESGQIMCILGSSGSGKTTLLDAMSGRLGRAGTFLGEVYVNGRALRREQFQDCFSYVLQSDTLLSSLTVRETLHYTALLAIRRGNPGSFQKKVEAVMAELSLSHVADRLIGNYSLGGISTGERRRVSIAAQLLQDPKVMLFDEPTTGLDCMTANQIVVLLVELARRNRIVVLTIHQPRSELFQLFDKIAILSFGELIFCGTPAEMLDFFNDCGYPCPEHSNPFDFYMDLTSVDTQSKEREIETSKRVQMIESAYKKSAICHKTLKNIERMKHLKTLPMVPFKTKDSPGVFSKLGVLLRRVTRNLVRNKLAVITRLLQNLIMGLFLLFFVLRVRSNVLKGAIQDRVGLLYQFVGATPYTGMLNAVNLFPVLRAVSDQESQDGLYQKWQMMLAYALHVLPFSVVATMIFSSVCYWTLGLHPEVARFGYFSAALLAPHLIGEFLTLVLLGIVQNPNIVNSVVALLSIAGVLVGSGFLRNIQEMPIPFKIISYFTFQKYCSEILVVNEFYGLNFTCGSSNVSVTTNPMCAFTQGIQFIEKTCPGATSRFTMNFLILYSFIPALVILGIVVFKIRDHLISR

SEQ ID NO: 1884 - protein, 881 aa, Homo sapiens
MVLRRMHRPRSCSYQLLLEHQRPSCIQGLRWTPLTNSEESLDFSESLEQASTERVLRAGRQLHRHLLATCPNLIRDRKYHLRLYRQCCSGRELVDGILALGLGVHSRSQVVGICQVLLDEGALCHVKHDWAFQDRDAQFYRFPGPEPEPVRTHEMEEELAEAVALLSQRGPDALLTVALRKPPGQRTDEELDLIFEELLHIKAVAHLSNSVKRELAAVLLFEPHSKAGTVLFSQGDKGTSWYIIWKGSVNVVTHGKGLVTTLHEGDDFGQLALVNDAPRAATIILREDNCHFLRVDKQDFNRIIKDVEAKTMRLEEHGKVVLVLERASQGAGPSRPPTPGRNRYTVMSGTPEKILELLLEAMGPDSSAHDPTETFLSDFLLTHRVFMPSAQLCAALLHHFHVEPAGGSEQERSTYVCNKRQQILRLVSQWVALYGSMLHTDPVATSFLQKLSDLVGRDTRLSNLLREQWPERRRCHRLENGCGNASPQMKARNLPVWLPNQDEPLPGSSCAIQVGDKVPYDICRPDHSVLTLQLPVTASVREVMAALAQEDGWTKGQVLVKVNSAGDAIGLQPDARGVATSLGLNERLFVVNPQEVHELIPHPDQLGPTVGSAEGLDLVSAKDLAGQLTDHDWSLFNSIHQVELIHYVLGPQHLRDVTTANLERFMRRFNELQYWVATELCLCPVPGPRAQLLRKFIKLAAHLKEQKNLNSFFAVMFGLSNSAISRLAHTWERLPHKVRKLYSALERLLDPSWNHRVYRLALAKLSPPVIPFMPLLLKDMTFIHEGNHTLVENLINFEKMRMMARAARMLHHCRSHNPVPLSPLRSRVSHLHEDSQVARISTCSEQSLSTRSPASTWAYVQQLKVIDNQRELSRLSRELEP

SEQ ID NO: 1885 - protein, 6306 aa, Homo sapiens
MSVFLGPGMPSASLLVNLLSALLILFVFGETEIRFTGQTEFVVNETSTTVIRLIIERIGEPANVTAIVSLYGEDAGDFFDTYAAAFIPAGETNRTVYIAVCDDDLPEPDETFIFHLTLQKPSANVKLGWPRTVTVTILSNDNAFGIISFNMLPSIAVSEPKGRNESMPLTLIREKGTYGMVMVTFEVEGGPNPPDEDLSPVKGNITFPPGRATVIYNLTVLDDEVPENDEIFLIQLKSVEGGAEINTSRNSIEIIIKKNDSPVRFLQSIYLVPEEDHILIIPVVRGKDNNGNLIGSDEYEVSISYAVTTGNSTAHAQQNLDFIDLQPNTTVVFPPFIHESHLKFQIVDDTIPEIAESFHIMLLKDTLQGDAVLISPSVVQVTIKPNDKPYGVLSFNSVLFERTVIIDEDRISRYEEITVVRNGGTHGNVSANWVLTRNSTDPSPVTADIRPSSGVLHFAQGQMLATIPLTVVDDDLPEEAEAYLLQILPHTIRGGAEVSEPAELLFYIQDSDDVYGLITFFPMENQKIESSPGERYLSLSFTRLGGTKGDVRLLYSVLYIPAGAVDPLQAKEGILNISRRNDLIFPEQKTQVTTKLPIRNDAFLQNGAHFLVQLETVELLNIIPLIPPISPRFGEICNISLLVTPAIANGEIGFLSNLPIILHEPEDFAAEVVYIPLHRDGTDGQATVYWSLKPSGFNSKAVTPDDIGPFNGSVLFLSGQSDTTINITIKGDDIPEMNETVTLSLDRVNVENQVLKSGYTSRDLIILENDDPGGVFEFSPASRGPYVIKEGESVELHIIRSRGSLVKQFLHYRVEPRDSNEFYGNTGVLEFKPGEREIVITLLARLDGIPELDEHYWVVLSSHGERESKLGSATIVNITILKNDDPHGIIEFVSDGLIVMINESKGDAIYSAVYDVVRNRGNFGDVSVSWVVSPDFTQDVFPVQGTVVFGDQEFSKNITIYSLPDEIPEEMEEFTVILLNGTGGAKVGNRTTATLRIRRNDDPIYFAEPRVVRVQEGETANFTVLRNGSVDVTCMVQYATKDGKATARERDFIPVEKGETLIFEVGSRQQSISIFVNEDGIPETDEPFYIILLNSTGDTVVYQYGVATVIIEANDDPNGIFSLEPIDKAVEEGKTNAFWILRHRGYFGSVSVSWQLFQNDSALQPGQEFYETSGTVNFMDGEEAKPIILHAFPDKIPEFNEFYFLKLVNISGGSPGPGGQLAETNLQVTVMVPFNDDPFGVFILDPECLEREVAEDVLSEDDMSYITNFTILRQQGVFGDVQLGWEILSSEFPAGLPPMIDFLLVGIFPTTVHLQQHMRRHHSGTDALYFTGLEGAFGTVNPKYHPSRNNTIANFTFSAWVMPNANTNGFIIAKDDGNGSIYYGVKIQTNESHVTLSLHYKTLGSNATYIAKTTVMKYLEESVWLHLLIILEDGIIEFYLDGNAMPRGIKSLKGEAITDGPGILRIGAGINGNDRFTGLMQDVRSYERKLTLEEIYELHAMPAKSDLHPISGYLEFRQGETNKSFIISARDDNDEEGEELFILKLVSVYGGARISEENTTARLTIQKSDNANGLFGFTGACIPEIAEEGSTISCVVERTRGALDYVHVFYTISQIETDGINYLVDDFANASGTITFLPWQRSEVLNIYVLDDDIPELNEYFRVTLVSAIPGDGKLGSTPTSGASIDPEKETTDITIKASDHPYGLLQFSTGLPPQPKDAMTLPASSVPHITVEEEDGEIRLLVIRAQGLLGRVTAEFRTVSLTAFSPEDYQNVAGTLEFQPGERYKYIFINITDNSIPELEKSFKVELLNLEGGVAELFRVDGSGSGDGDMEFFLPTIHKRASLGVASQILVTIAASDHAHGVFEFSPESLFVSGTEPEDGYSTVTLNVIRHHGTLSPVTLHWNIDSDPDGDLAFTSGNITFEIGQTSANITVEILPDEDPELDKAFSVSVLSVSSGSLGAHINATLTVLASDDPYGIFIFSEKNRPVKVEEATQNITLSIIRLKGLMGKVLVSYATLDDMEKPPYFPPNLARATQGRDYIPASGFALFGANQSEATIAISILDDDEPERSESVFIELLNSTLVAKVQSRSIPNSPRLGPKVETIAQLIIIANDDAFGTLQLSAPIVRVAENHVGPIINVTRTGGAFADVSVKFKAVPITAIAGEDYSIASSDVVLLEGETSKAVPIYVINDIYPELEESFLVQLMNETTGGARLGALTEAVIIIEASDDPYGLFGFQITKLIVEEPEFNSVKVNLPIIRNSGTLGNVTVQWVATINGQLATGDLRVVSGNVTFAPGETIQTLLLEVLADDVPEIEEVIQVQLTDASGGGTIGLDRIANIIIPANDDPYGTVAFAQMVYRVQEPLERSSCANITVRRSGGHFGRLLLFYSTSDIDVVALAMEEGQDLLSYYESPIQGVPDPLWRTWMNVSAVGEPLYTCATLCLKEQACSAFSFFSASEGPQCFWMTSWISPAVNNSDFWTYRKNMTRVASLFSGQAVAGSDYEPVTRQWAIMQEGDEFANLTVSILPDDFPEMDESFLISLLEVHLMNISASLKNQPTIGQPNISTVVIALNGDAFGVFVIYNISPNTSEDGLFVEVQEQPQTLVELMIHRTGGSLGQVAVEWRVVGGTATEGLDFIGAGEILTFAEGETKKTVILTILDDSEPEDDESIIVSLVYTEGGSRILPSSDTVRVNILANDNVAGIVSFQTASRSVIGHEGEILQFHVIRTFPGRGNVTVNWKIIGQNLELNFANFSGQLFFPEGSLNTTLFVHLLDDNIPEEKEVYQVILYDVRTQGVPPAGIALLDAQGYAAVLTVEASDEPHGVLNFALSSRFVLLQEANITIQLFINREFGSLGAINVTYTTVPGMLSLKNQTVGNLAEPEVDFVPIIGFLILEEGETAAAINITILEDDVPELEEYFLVNLTYVGLTMAASTSFPPRLDSEGLTAQVIIDANDGARGVIEWQQSRFEVNETHGSLTLVAQRSREPLGHVSLFVYAQNLEAQVGLDYIFTPMILHFADGERYKNVNIMILDDDIPEGDEKFQLILTNPSPGLELGKNTIALIIVLANDDGPGVLSFNNSEHFFLREPTALYVQESVAVLYIVREPAQGLFGTVTVQFIVTEVNSSNESKDLTPSKGYIVLEEGVRFKALQISAILDTEPEMDEYFVCTLFNPTGGARLGVHVQTLITVLQNQAPLGLFSISAVENRATSIDIEEANRTVYLNVSRTNGIDLAVSVQWETVSETAFGMRGMDVVFSVFQSFLDESASGWCFFTLENLIYGIMLRKSSVTVYRWQGIFIPVEDLNIENPKTCEAFNIGFSPYFVITHEERNEEKPSLNSVFTFTSGFKLFLVQTIIILESSQVRYFTSDSQDYLIIASQRDDSELTQVFRWNGGSFVLHQKLPVRGVLTVALFNKGGSVFLAISQANARLNSLLFRWSGSGFINFQEVPVSGTTEVEALSSANDIYLIFAENVFLGDQNSIDIFIWEMGQSSFRYFQSVDFAAVNRIHSFTPASGIAHILLIGQDMSALYCWNSERNQFSFVLEVPSAYDVASVTVKSLNSSKNLIALVGAHSHIYELAYISSHSDFIPSSGELIFEPGEREATIAVNILDDTVPEKEESFKVQLKNPKGGAEIGINDSVTITILSNDDAYGIVAFAQNSLYKQVEEMEQDSLVTLNVERLKGTYGRITIAWEADGSISDIFPTSGVILFTEGQVLSTITLTILADNIPELSEVVIVTLTRITTEGVEDSYKGATIDQDRSKSVITTLPNDSPFGLVGWRAASVFIRVAEPKENTTTLQLQIARDKGLLGDIAIHLRAQPNFLLHVDNQATENEDYVLQETIIIMKENIKEAHAEVSILPDDLPELEEGFIVTITEVNLVNSDFSTGQPSVRRPGMEIAEIMIEENDDPRGIFMFHVTRGAGEVITAYEVPPPLNVLQVPVVRLAGSFGAVNVYWKASPDSAGLEDFKPSHGILEFADKQVTAMIEITIIDDAEFELTETFNISLISVAGGGRLGDDVVVTVVIPQNDSPFGVFGFEEKTVMIDESLSSDDPDSYVTLTVVRSPGGKGTVRLEWTIDEKAKHNLSPLNGTLHFDETESQKTIVLHTLQDTVLEEDRRFTIQLISIDEVEISPVKGSASIIIRGDKRASGEVGIAPSSRHILIGEPSAKYNGTAIISLVRGPGILGEVTVFWRIFPPSVGEFAETSGKLTMRDEQSAVIVVIQALNDDIPEEKSFYEFQLTAVSEGGVLSESSSTANITVVASDSPYGRFAFSHEQLRVSEAQRVNITIIRSSGDFGHVRLWYKTMSGTAEAGLDFVPAAGELLFEAGEMRKSLHVEILDDDYPEGPEEFSLTITKVELQGRGYDFTIQENGLQIDQPPEIGNISIVRIIIMKNDNAEGIIEFDPKYTAFEVEEDVGLIMIPVVRLHGTYGYVTADFISQSSSASPGGVDYILHGSTVTFQHGQNLSFINISIIDDNESEFEEPIEILLTGATGGAVLGRHLVSRIIIAKSDSPFGVIRFLNQSKISIANPNSTMILSLVLERTGGLLGEIQVNWETVGPNSQEALLPQNRDIADPVSGLFYFGEGEGGVRTIILTIYPHEEIEVEETFIIKLHLVKGEAKLDSRAKDVTLTIQEFGDPNGVVQFAPETLSKKTYSEPLALEGPLLITFFVRRVKGTFGEIMVYWELSSEFDITEDFLSTSGFFTIADGESEASFDVHLLPDEVPEIEEDYVIQLVSVEGGAELDLEKSITWFSVYANDDPHGVFALYSDRQSILIGQNLIRSIQINITRLAGTFGDVAVGLRISSDHKEQPIVTENAERQLVVKDGATYKVDVVPIKNQVFLSLGSNFTLQLVTVMLVGGRFYGMPTILQEAKSAVLPVSEKAANSQVGFESTAFQLMNITAGTSHVMISRRGTYGALSVAWTTGYAPGLEIPEFIVVGNMTPTLGSLSFSHGEQRKGVFLWTFPSPGWPEAFVLHLSGVQSSAPGGAQLRSGFIVAEIEPMGVFQFSTSSRNIIVSEDTQMIRLHVQRLFGFHSDLIKVSYQTTAGSAKPLEDFEPVQNGELFFQKFQTEVDFEITIINDQLSEIEEFFYINLTSVEIRGLQKFDVNWSPRLNLDFSVAVITILDNDDLAGMDISFPETTVAVAVDTTLIPVETESTTYLSTSKTTTILQPTNVVAIVTEATGVSAIPEKLVTLHGTPAVSEKPDVATVTANVSIHGTFSLGPSIVYIEEEMKNGTFNTAEVLIRRTGGFTGNVSITVKTFGERCAQMEPNALPFRGIYGISNLTWAVEEEDFEEQTLTLIFLDGERERKVSVQILDDDEPEGQEFFYVFLTNPQGGAQIVEEKDDTGFAAFAMVIITGSDLHNGIIGFSEESQSGLELREGAVMRRLHLIVTRQPNRAFEDVKVFWRVTLNKTVVVLQKDGVNLVEELQSVSGTTTCTMGQTKCFISIELKPEKVPQVEVYFFVELYEATAGAAINNSARFAQIKILESDESQSLVYFSVGSRLAVAHKKATLISLQVARDSGTGLMMSVNFSTQELRSAETIGRTIISPAISGKDFVITEGTLVFEPGQRSTVLDVILTPETGSLNSFPKRFQIVLFDPKGGARIDKVYGTANITLVSDADSQAIWGLADQLHQPVNDDILNRVLHTISMKVATENTDEQLSAMMHLIEKITTEGKIQAFSVASRTLFYEILCSLINPKRKDTRGFSHFAEVTENFAFSLLTNVTCGSPGEKSKTILDSCPYLSILALHWYPQQINGHKFEGKEGDYIRIPERLLDVQDAEIMAGKSTCKLVQFTEYSSQQWFISGNNLPTLKNKVLSLSVKGQSSQLLTNDNEVLYRIYAAEPRIIPQTSLCLLWNQAAASWLSDSQFCKVVEETADYVECACSHMSVYAVYARTDNLSSYNEAFFTSGFICISGLCLAVLSHIFCARYSMFAAKLLTHMMAASLGTQILFLASAYASPQLAEESCSAMAAVTHYLYLCQFSWMLIQSVNFWYVLVMNDEHTERRYLLFFLLSWGLPAFVVILLIVILKGIYHQSMSQIYGLIHGDLCFIPNVYAALFTAALVPLTCLVVVFVVFIHAYQVKPQWKAYDDVFRGRTNAAEIPLILYLFALISVTWLWGGLHMAYRHFWMLVLFVIFNSLQGLYVFMVYFILHNQMCCPMKASYTVEMNGHPGPSTAFFTPGSGMPPAGGEISKSTQNLIGAMEEVPPDWERASFQQGSQASPDLKPSPQNGATFPSSGGYGQGSLIADEESQEFDDLIFALKTGAGLSVSDNESGQGSQEGGTLTDSQIVELRRIPIADTHL

SEQ ID NO: 1886 - protein, 495 aa, Homo sapiens
MAGVGRSGGPWGRTRGGRSGRLGVSLGALSSLPLEELPRPLCCRRCRRHFGFALRGETIPVSVAGSASSQFAPLALHLSLLLSRISASRLTRWPPPDKREGSAVDPGKRRSLAATPSSSLPCTLIALGLRHEKEANELMEDLFETFQDEMGFSNMEDDGPEEEERVAEPQANFNTPQALRFEELLANLLNEQHQIAKELFEQLKMKKPSAKQQKEVEKVKPQCKEVHQTLILDPAQRKRLQQQMQQHVQLLTQIHLLATCNPNLNPEASSTRICLKELGTFAQSSIALHHQYNPKFQTLFQPCNLMGAMQLIEDFSTHVSIDCSPHKTVKKTANEFPCLPKQVAWILATSKVFMYPELLPVCSLKAKNPQDKILFTKAEDNLLALGLKHFEGTEFLNPLISKYLLTCKTARQLTVRIKNLNMNRAPDNIIKFYKKTKQLPVLGKCCEEIQPHQWKPPIEREEHRLPFWLKVQPSSSKSVGGRRSLKVLREYQGLP

SEQ ID NO: 1887 - protein, 1535 aa, Homo sapiens
MSDRLGQITKGKDGKSKYSTLSLFDKYKGKSVDAIRSSVIPRHGLQSLGKVAAARRMPPPANLPSLKSENKGNDPNIVIVPKDGTGWANKQDQQDPKSSSATASQPPESLPQPGLQKSVSNLQKPTQSISQENTNSVPGGPKSWAQLNGKPVGHEGGLRGSSRLLSFSPEEFPTLKAAGGQDKAGKEKGVLDLSYGPGPSLRPQNVTSWREGGGRHIISATSLSTSPTELGSRNSSTGDGAPSSACTSDSKDPSLRPAQPVRKGASQFMGNVYHPPTYHDMLPAFMCSPKSSENQGTVERGSFPLPQLRLEPRVPFRQFQMNDQDGKENRLGLSRPLRPLRQLVERAPRPTIINAENLKGLDDLDADADDGWAGLHEEVDYSEKLKFSDDEEEEEVVKDGRPKWNSWDPRRQRQLSMSSADSADAKRTREEGKDWAEAVGASRVVRKAPDPQPPPRKLHGWAPGPDYQKSSMGSMFRQQSIEDKEDKPPPRQKFIQSEMSEAVERARKRREEEERRAREERLAACAAKLKQLDQKCKQARKAGEARKQAEKEVPWSPSAEKASPQENGPAVHKGSPEFPAQETPTTFPEEAPTVSPAVAQSNSSEEEAREAGSPAQEFKYQKSLPPRFQRQQQQQQQEQLYKMQHWQPVYPPPSHPQRTFYPHHPQMLGFDPRWMMMPSYMDPRITPTRTPVDFYPSALHPSGLMKPMMPQESLNGTGCRSEDQNCVPPLQERKVTPIDSPPVWSPEGYMALQSKGYPLPHPKSSDTLAMDMRVRSPDEALPGGLSGCSSGSGHSPYALERAAHASADLPEASSKKAEKEAKLAAPRAGEQGEAMKQFDLNYGSAIIENCGSSPGEESEVGSMVGEGFIEVLTKKQRRLLEEERRKKEQAVQVPVKGRGLSSRIPPRFAKKQNNLCLEQGDVTVPGSSLGTEIWESSSQALPVQAPANDSWRKAVTAFSSTETGSAEQGFKSSQGDSGVDLSAESRESSATSSQRSSPYGTLKPEEMSGPGLAEPKADSHKEQAPKPSEQKDSEQGSGQSKEHRPGPIGNERSLKNRKGSEGAERLQGAVVPPVNGVEIHVDSVLPVPPIEFGVSPKDSDFSLPPGSASGPTGSPVVKLQDALASNAGLTQSIPILRRDHHIQRAIGLSPMSFPTADLTLKMESARKAWENSPSLPEQSSPGGAGSGIQPPSSVGASSGVNYSSFGGVSMPPMPVASVAPSASMPGSHLPPLYLDGHVFASQPRLVPQTIPQQQSYQQAAAAQQIPISLHTSLQAQAQLGLRGGLPVSQSQEIFSSLQPFRSQVYMHPSLSPPSTMILSGGTALKPPYSAFPGMQPLEMVKPQSGSPYQPMSGNQALVYEGQLSQAAGLGASQMLDSQLPQLTMPLPRYGSGQQPLILPQSIQLPPGQSLSVGAPRRIPPPGSQPPVLNTSREPSQMEMKGFHFADSKQNVPSGGPVPSPQTYRPSSASPSGKPSGSAVNMGSVQGHYVQQAKQRVDEKPSLGAVKLQEAPSAASQMKRTGAIKPRAVKVEESKA

SEQ ID NO: 1888 - protein, 1198 aa, Homo sapiens
MDEETRHSLECIQANQIFPRKQLIREDENLQVPFLELHGESTEFVGRAEDAIIALSNYRLHIKFKESLVNVPLQLIESVECRDIFQLHLTCKDCKVIRCQFSTFEQCQEWLKRLNNAIRPPAKIEDLFSFAYHAWCMEVYASEKEQHGDLCRPGEHVTSRFKNEVERMGFDMNNAWRISNINEKYKLCGSYPQELIVPAWITDKELESVSSFRSWKRIPAVIYRHQSNGAVIARCGQPEVSWWGWRNADDEHLVQSVAKACASDSRSSGSKLSTRNTSRDFPNGGDLSDVEFDSSLSNASGAESLAIQPQKLLILDARSYAAAVANRAKGGGCECPEYYPNCEVVFMGMANIHSIRRSFQSLRLLCTQMPDPGNWLSALESTKWLHHLSVLLKSALLVVHAVDQDQRPVLVHCSDGWDRTPQIVALAKLLLDPYYRTIEGFQVLVEMEWLDFGHKFADRCGHGENSDDLNERCPVFLQWLDCVHQLQRQFPCSFEFNEAFLVKLVQHTYSCLFGTFLCNNAKERGEKHTQERTCSVWSLLRAGNKAFKNLLYSSQSEAVLYPVCHVRNLMLWSAVYLPCPSPTTPVDDSCAPYPAPGTSPDDPPLSRLPKTRSYDNLTTACDNTVPLASRRCSDPSLNEKWQEHRRSLELSSLAGPGEDPLSADSLGKPTRVPGGAELSVAAGVAEGQMENILQEATKEESGVEEPAHRAGIEIQEGKEDPLLEKESRRKTPEASAIGLHQDPELGDAALRSHLDMSWPLFSQGISEQQSGLSVLLSSLQVPPRGEDSLEVPVEQFRIEEIAEGREEAVLPIPVDAKVGYGTSQSCSLLPSQVPFETRGPNVDSSTDMLVEDKVKSVSGPQGHHRSCLVNSGKDRLPQTMEPSPSETSLVERPQVGSVVHRTSLGSTLSLTRSPCALPLAECKEGLVCNGAPETENRASEQPPGLSTLQMYPTPNGHCANGEAGRSKDSLSRQLSAMSCSSAHLHSRNLHHKWLHSHSGRPSATSSPDQPSRSHLDDDGMSVYTDTIQQRLRQIESGHQQEVETLKKQVQELKSRLESQYLTSSLHFNGDFGDEVTSIPDSESNLDQNCLSRCSTEIFSEASWEQVDKQDTEMTRWLPDHLAAHCYACDSAFWLASRKHHCRNCGNVFCSSCCNQKVPVPSQQLFEPSRVCKSCYSSLHPTSSSIDLELDKPIAATSN

SEQ ID NO: 1889 - protein, 331 aa, Homo sapiens
MLRCGQMIFAQALVCRHLGRDWRWTQRKRQPDSYFSVLNAFIDRKDSYYSIHQIAQMGVGEGKSIGQWYGPNTVAQVLKKLAVFDTWSSLAVHIAMDNTVVMEEIRRLCRTSVPCAGATAFPADSDRHCNGFPAGAEVTNRPSPWRPLVLLIPLRLGLTDINEAYVETLKHCFMMPQSLGVIGGKPNSAHYFIGYVGEELIYLDPHTTQPAVEPTDGCFIPDESFHCQHPPCRMSIAELDPSIAVGFFCKTEDDFNDWCQQVKKLSLLGGALPMFELVELQPSHLACPDVLNLSLGESCQVQVGSLGDSSDVERLERFFDSEDEDFEILSL

SEQ ID NO: 1890 - protein, 210 aa, Homo sapiens
MSAGKMMRTLITTHPLPLLLLPQQLLQLVQFQEVDTDFDFPEEDKKEEFEECLEKFFSTGPARPPTKEKVKRRVLIEPGMPLNHIEYCNHEIMGKNVYYKHRWVAEHYFLLMQYDELQKICYNRFVPCKNGIRKCNRSKGLVEGVYCNLTEAFEIPACKYESLYRKGYVLITCSWQNEMQKRIPHTINDLVEPPEHRSFLSEDGVFVISP

SEQ ID NO: 1891 - protein, 1556 aa, Homo sapiens
MASELGARDDGGCTELAKPLYLQYLERALRLDHFLRQTSAIFNRNISSDDSEDGLDDSNPLLPQSGDPLIQVKEEPPNSLLGETSGAGSSGMLNTYSLNGVLQSESKCDKGNLYNFSKLKKSRKWLKSILLSDESSEADSQSEDDDEEELNLSREELHNMLRLHKYKKLHQNKYSKDKELQQYQYYSAGLLSTYDPFYEQQRHLLGPKKKKFKEEKKLKAKLKKVKKKRRRDEELSSEESPRRHHHQTKVFAKFSHDAPPPGTKKKHLSIEQLNARRRKVWLSIVKKELPKANKQKASARNLFLTNSRKLAHQCMKEVRRAALQAQKNCKETLPRARRLTKEMLLYWKKYEKVEKEHRKRAEKEALEQRKLDEEMREAKRQQRKLNFLITQTELYAHFMSRKRDMGHDGIQEEILRKLEDSSTQRQIDIGGGVVVNITQEDYDSNHFKAQALKNAENAYHIHQARTRSFDEDAKESRAAALRAANKSGTGFGESYSLANPSIRAGEDIPQPTIFNGKLKGYQLKGMNWLANLYEQGINGILADEMGLGKTVQSIALLAHLAERENIWGPFLIISPASTLNNWHQEFTRFVPKFKVLPYWGNPHDRKVIRRFWSQKTLYTQDAPFHVVITSYQLVVQDVKYFQRVKWQYMVLDEAQALKSSSSVRWKILLQFQCRNRLLLTGTPIQNTMAELWALLHFIMPTLFDSHEEFNEWFSKDIESHAENKSAIDENQLSRLHMILKPFMLRRIKKDVENELSDKIEILMYCQLTSRQKLLYQALKNKISIEDLLQSSMGSTQQAQNTTSSLMNLVMQFRKVCNHPELFERQETWSPFHISLKPYHISKFIYRHGQIRVFNHSRDRWLRVLSPFAPDYIQRSLFHRKGINEESCFSFLRFIDISPAEMANLMLQGLLARWLALFLSLKASYRLHQLRSWGAPEGESHQRYLRNKDFLLGVNFPLSFPNLCSCPLLKSLVFSSHCKAVSGYSDQVVHQRRSATSSLRRCLLTELPSFLCVASPRVTAVPLDSYCNDRSAEYERRVLKEGGSLAAKQCLLNGAPELAADWLNRRSQFFPEPAGGLWSIRPQNGWSFIRIPGKESLITDSGKLYALDVLLTRLKSQGHRVLIYSQMTRMIDLLEEYMVYRKHTYMRLDGSSKISERRDMVADFQNRNDIFVFLLSTRAGGLGINLTAADTVIFYDSDWNPTVDQQAMDRAHRLGQTKQVTVYRLICKGTIEERILQRAKEKSEIQRMVISGGNFKPDTLKPKEVVSLLLDDEELEKKLRLRQEEKRQQEETNRVKERKRKREKYAEKKKKEDELDGKRRKEGVNLVIPFVPSADNSNLSADGDDSFISVDSAMPSPFSEISISSELHTGSIPLDESSSDMLVIVDDPASSAPQSRATNSPASITGSVSDTVNGISIQEMPAAGRGHSARSRGRPKGSGSTAKGAGKGRSRKSTAGSAAAMAGAKAGAAAASAAAYAAYGYNVSKGISASSPLQTSLVRPAGLADFGPSSASSPLSSPLSKGNNVPGNPKNLHMTSSLAPDSLVRKQGKGTNPSGGR

SEQ ID NO: 1892 - protein, 2141 aa, Homo sapiens
MIRIAALNASSTIEDDHEGSFKSHKTQTKEAQEAEAFALYHKALDLQKHDRFEESAKAYHELLEASLLREAVSSGDEKEGLKHPGLILKYSTYKNLAQLAAQREDLETAMEFYLEAVMLDSTDVNLWYKIGHVALRLIRIPLARHAFEEGLRCNPDHWPCLDNLITVLYTLSDYTTCLYFICKALEKDCRYSKGLVLKEKIFEEQPCLRKDSLRMFLKCWKCLGESLLAMYNHLTTCEPPRPSLGKRIDLSDYQDPSQPLESSMVVTPVNVIQPSTVSTNPAVAVAEPVVSYTSVATTSFPLHSPGLLETGAPVGDISGGDKSKKGVKRKKISEESGETAKRRSARVRNTKCKKEEKVDFQELLMKFLPSRLRKLDPEEEDDSFNNYEVQSEAKLESFPSIGPQRLSFDSATFMESEKQDVHEFLLENLTNGGILELMMRYLKAMGHKFLVRWPPGLAEVVLSVYHSWRRHSTSLPNPLLRDCSNKHIKDMMLMSLSCMELQLDQWLLTKGRSSAVSPRNCPAGMVNGRFGPDFPGTHCLGDLLQLSFASSQRDLFEDGWLEFVVRVYWLKARFLALQGDMEQALENYDICTEMLQSSTAIQVEAGAERRDIVIRLPNLHNDSVVSLEEIDKNLKSLERCQSLEEIQRLYEAGDYKAVVHLLRPTLCTSGFDRAKHLEFMTSIPERPAQLLLLQDSLLRLKDYRQCFECSDVALNEAVQQMVNSGEAAAKEEWVATVTQLLMGIEQALSADSSGSILKVSSSTTGLVRLTNNLIQVIDCSMAVQEEAKEPHVSSVLPWIILHRIIWQEEDTFHSLCHQQQLQNPAEEGMSETPMLPSSLMLLNTAHEYLGRRSWCCNSDGALLRFYVRVLQKELAASTSEDTHPYKEELETALEQCFYCLYSFPSKKSKARYLEEHSAQQVDLIWEDALFMFEYFKPKTLPEFDSYKTSTVSADLANLLKRIATIVPRTERPALSLDKVSAYIEGTSTEVPCLPEGADPSPPVVNELYYLLADYHFKNKEQSKAIKFYMHDICICPNRFDSWAGMALARASRIQDKLNSNELKSDGPIWKHATPVLNCFRRALEIDSSNLSLWIEYGTMSYALHSFASRQLKQWRGELPPELVQQMEGRRDSMLETAKHCFTSAARCEGDGDEEEWLIHYMLGKVAEKQQQPPTVYLLHYRQAGHYLHEEAARYPKKIHYHNPPELAMEALEVYFRLHASILKLLGKPDSGVGAEVLVNFMKEAAEGPFARGEEKNTPKASEKEKACLVDEDSHSSAGTLPGPGASLPSSSGPDRSQDSTAVALSDSSSTQDFFNEPTSLLEGSRKSYTEKRLPILSSQAGATGKDLQGATEERGKNEESLESTEGFRAAEQGVQKPAAETPASACIPGKPSASTPTLWDGKKRGDLPGEPVAFPQGLPAGAEEQRQFLTEQCIASFRLCLSRFPQHYKSLYRLAFLYTYSKTHRNLQWARDVLLGSSIPWQQLQHMPAQGLFCERNKTNFFNGIWRIPVDEIDRPGSFAWHMNRSIVLLLKVLAQLRDHSTLLKVSSMLQRTPDQGKKYLRDADRQVLAQRAFILTVKVLEDTLSELAEGSERPGPKVCGLPGARMTTDVSHKASPEDGQEGLPQPKKPPLADGSGPGPEPGGKVGLLNHRPVAMDAGDSADQSGERKDKESPRAGPTEPMDTSEATVCHSDLERTPPLLPGRPARDRGPESRPTELSLEELSISARQQPTPLTPAQPAPAPAPATTTGTRAGGHPEEPLSRLSRKRKLLEDTESGKTLLLDAYRVWQQGQKGVAYDLGRVERIMSETYMLIKQVDEEAALEQAVKFCQVHLGAAAQRQASGDTPTTPKHPKDSRENFFPVTVVPTAPDPVPADSVQRPSDAHTKPRPALAAATTIITCPPSASASTLDQSKDPGPPRPHRPEATPSMASLGPEGEELARVAEGTSFPPQEPRHSPQVKMAPTSSPAEPHCWPAEAALGTGAEPTCSQEGKLRPEPRRDGEAQEAASETQPLSSPPTAASSKAPSSGSAQPPEGHPGKPEPSRAKSRPLPNMPKLVIPSAATKFPPEITVTPPTPTLLSPKGSISEETKQKLKSAILSAQSAANVRKESLCQPALEVLETSSQESSLESETDEDDDYMDI

SEQ ID NO: 1893 - protein, 387 aa, Homo sapiens
MVGGSVPVFDEIILSTARMNRVLSFHSVSGILVCQAGCVLEELSRYVEERDFIMPLDLGAKGSCHIGGNVATNAGGLRFLRYGSLHGTVLGLEVVLADGTVLDCLTSLRKDNTGYDLKQLFIGSEGTLGIITTVSILCPPKPRAVNVAFLGCPGFAEVLQTFSTCKGMLGEILSAFEFMDAVCMQLVGRHLHLASPVQESPFYVLIETSGSNAGHDAEKLGHFLEHALGSGLVTDGTMATDQRKVKMLWALRERITEALSRDGYVYKYDLSLPVERLYDIVTDLRARLGPHAKHVVGYGHLGDGNLHLNVTAEAFSPSLLAALEPHVYEWTAGQQGSVSAEHGVGFRKRDVLGYSKPPGALQLMQQLKALLDPKGILNPYKTLPSQA

SEQ ID NO: 1894 - protein, 385 aa, Homo sapiens
MCSEARLARRLRDALREEEPWAVEELLRCGADPNLVLEDGAAAVHLAAGARHPRGLRCLGALLRQGGDPNARSVEALTPLHVAAAWGCRRGLELLLSQGADPALRDQDGLRPLDLALQQGHLECARVLQDLDTRTRTRTRIGAETQEPEPAPGTPGLSGPTDETLDSIALQKQPCRGDNRDIGLEADPGPPSLPVPLETVDKHGSSASPPGHWDYSSDASFVTAVEVSGAEDPASDTPPWAGSLPPTRQGLLHVVHANQRVPRSQGTEAELNARLQALTLTPPNAAGFQSSPSSMPLLDRSPAHSPPRTPTPGASDCHCLWEHQTSIDSDMATLWLTEDEASSTGGREPVGPCRHLPVSTVSDLELLKGLRALGRLRTCQPEPSH

SEQ ID NO: 1895 - protein, 1245 aa, Homo sapiens
MARNCSECKEKRAAHILCTYCNRWLCSSCTEEHRHSPVPGGPFFPRAQKGSPGVNGGPGDFTLYCPLHTQEVLKLFCETCDMLTCHSCLVVEHKEHRHVEEVLQNQRMLLEGVTTQVAHKKSSLQTSAKQIEDRIFEVKHQHRKVENQIKMAKMVLMNELNKQANGLIEELEGITNERKRKLEQQLQSIMVLNRQFEHVQNFINWAVCSKTSVPFLFSKELIVFQMQRLLETSCNTDPGSPWSIRFTWEPNFWTKQLASLGCITTEGGQMSRADAPAYGGLQGSSPFYQSHQSPVAQQEALSHPSHKFQSPAVCSSSVCCSHCSPVSPSLKGQVPPPSIHPAHSFRQPPEMVPQQLGSLQCSALLPREKELACSPHPPKLLQPWLETQPPVEQESTSQRLGQQLTSQPVCIVPPQDVQQGAHAQPTLQTPSIQVQFGHHQKLKLSHFQQQPQQQLPPPPPPLPHPPPPLPPPPQQPHPPLPPSQHLASSQHESPPGPACSQNMDIMHHKFELEEMQKDLELLLQAQQPSLQLSQTKSPQHLQQTIVGQINYIVRQPAPVQSQSQEETLQATDEPPASQGSKPALPLDKNTAAALPQASGEETPLSVPPVDSTIQHSSPNVVRKHSTSLSIMGFSNTLEMELSSTRLERPLEPQIQSVSNLTAGAPQAVPSLLSAPPKMVSSLTSVQNQAMPSLTTSHLQTVPSLVHSTFQSMPNLISDSPQAMASLASDHPQAGPSLMSGHTQAVPSLATCPLQSIPPVSDMQPETGSSSSSGRTSGSLCPRDGADPSLENALCKMESEDSTRFTDLLGQGPIVPGLDAPKDLAIPSELEEPINLSVKKPPLAPVVSTSTALQQYQNPKECENFEQGALELDAKENQSIRAFNSEHKIPYVRLERLKICAASSGEMPVFKLKPQKNDQDGSFLLIIECGTESSSMSIKVSQDRLSEATQAPGLEGRKVTVTSLAGQRPPEVEGTSPEEHRLIPRTPGAKKGPPAPIENEDFCAVCLNGGELLCCDRCPKVFHLSCHVPALLSFPGGEWVCTLCRSLTQPEMEYDCENACYNQPGMRASPGLSMYDQKKCEKLVLSLCCNNLSLPFHEPVSPLARHYYQIIKRPMDLSIIRRKLQKKDPAHYTTPEEVVSDVRLMFWNCAKFNYPDSEVAEAGRCLEVFFEGWLKEIYPEKRFAQPRQEDSDSEEVSSESGCSTPQGFPWPPYMQEGIQPKRRRRHMENERAKRMSFRLANSISQV

SEQ ID NO: 1896 - protein, 250 aa, Homo sapiens
MTLSPLLLFLPPLLLLLDVPTAAVQASPLQALDFFGNGPPVNYKTGNLYLRGPLKKSNAPLVNVTLYYEALCGGCRAFLIRELFPTWLLVMEILNVTLVPYGNAQEQNVSGRWEFKCQHGEEECKFNKVEACVLDELDMELAFLTIVCMEEFEDMERSLPLCLQLYAPGLSPDTIMECAMGDRGMQLMHANAQRTDALQPPHEYVPWVTVNGKPLEDQTQLLTLVCQLYQGKKPDVCPSSTSSLRSVCFK

SEQ ID NO: 1897 - protein, 348 aa, Homo sapiens
MNMTQARVLVAAVVGLVAVLLYASIHKIEEGHLAVYYRGGALLTSPSGPGYHIMLPFITTFRSVQTTLQTDEVKNVPCGTSGGVMIYIDRIEVVNMLAPYAVFDIVRNYTADYDKTLIFNKIHHELNQFCSAHTLQEVYIELFDQIDENLKQALQKDLNLMAPGLTIQAVRVTKPKIPEAIRRNFELMEAEKTKLLIAAQKQKVVEKEAETERKKAVIEAEKIAQVAKIRFQQKVMEKETEKRISEIEDAAFLAREKAKADAEYYAAHKYATSNKHKLTPEYLELKKYQAIASNSKIYFGSNIPNMFVDSSCALKYSDIRTGRESSLPSKEALEPSGENVIQNKESTG

SEQ ID NO: 1898 - protein, 400 aa, Homo sapiens
MRHLGAFLFLLGVLGALTEMCEIPEMDSHLVEKLGQHLLPWMDRLSLEHLNPSIYVGLRLSSLQAGTKEDLYLHSLKLGYQQCLLGSAFSEDDGDCQGKPSMGQLALYLLALRANWHDHKGHPHTSYYQYGLGILALCLHQKRVHDSVVDKLLYAVEPFHQGHHSVDTAAMAGLAFTCLKRSNFNPGRRQRITMAIRTVREEILKAQTPEGHFGNVYSTPLALQFLMTSPMRGAELGTACLKARVALLASLQDGAFQNALMISQLLPVLNHKTYIDLIFPDCLAPRVMLEPAAETIPQTQEIISVTLQVLSLLPPYRQSISVLAGSTVEDVLKKAHELGGFTYETQASLSGPYLTSVMGKAAGEREFWQLLRDPNTPLLQGIADYRPKDGETIELRLVSW

SEQ ID NO: 1899 - protein, 3574 aa, Homo sapiens
MWPRLAFCCWGLALVSGWATFQQMSPSRNFSFRLFPETAPGAPGSIPAPPAPGDEAAGSRVERLGQAFRRRVRLLRELSERLELVFLVDDSSSVGEVNFRSELMFVRKLLSDFPVVPTATRVAIVTFSSKNYVVPRVDYISTRRARQHKCALLLQEIPAISYRGGGTYTKGAFQQAAQILLHARENSTKVVFLITDGYSNGGDPRPIAASLRDSGVEIFTFGIWQGNIRELNDMASTPKEEHCYLLHSFEEFEALARRALHEDLPSGSFIQDDMVHCSYLCDEGKDCCDRMGSCKCGTHTGHFECICEKGYYGKGLQYECTACPSGTYKPEGSPGGISSCIPCPDENHTSPPGSTSPEDCVCREGYRASGQTCELVHCPALKPPENGYFIQNTCNNHFNAACGVRCHPGFDLVGSSIILCLPNGLWSGSESYCRVRTCPHLRQPKHGHISCSTREMLYKTTCLVACDEGYRLEGSDKLTCQGNSQWDGPEPRCVERHCSTFQMPKDVIISPHNCGKQPAKFGTICYVSCRQGFILSGVKEMLRCTTSGKWNVGVQAAVCKDVEAPQINCPKDIEAKTLEQQDSANVTWQIPTAKDNSGEKVSVHVHPAFTPPYLFPIGDVAIVYTATDLSGNQASCIFHIKVIDAEPPVIDWCRSPPPVQVSEKVHAASWDEPQFSDNSGAELVITRSHTQGDLFPQGETIVQYTATDPSGNNRTCDIHIVIKGSPCEIPFTPVNGDFICTPDNTGVNCTLTCLEGYDFTEGSTDKYYCAYEDGVWKPTYTTEWPDCAKKRFANHGFKSFEMFYKAARCDDTDLMKKFSEAFETTLGKMVPSFCSDAEDIDCRLEENLTKKYCLEYNYDYENGFAIGPGGWGAANRLDYSYDDFLDTVQETATSIGNAKSSRIKRSAPLSDYKIKLIFNITASVPLPDERNDTLEWENQQRLLQTLETITNKLKRTLNKDPMYSFQLASEILIADSNSLETKKASPFCRPGSVLRGRMCVNCPLGTYYNLEHFTCESCRIGSYQDEEGQLECKLCPSGMYTEYIHSRNISDCKAQCKQGTYSYSGLETCESCPLGTYQPKFGSRSCLSCPENTSTVKRGAVNISACGVPCPEGKFSRSGLMPCHPCPRDYYQPNAGKAFCLACPFYGTTPFAGSRSITECSSFSSTFSAAEESVVPPASLGHIKKRHEISSQVFHECFFNPCHNSGTCQQLGRGYVCLCPLGYTGLKCETDIDECSPLPCLNNGVCKDLVGEFICECPSGYTGQRCEENINECSSSPCLNKGICVDGVAGYRCTCVKGFVGLHCETEVNECQSNPCLNNAVCEDQVGGFLCKCPPGFLGTRCGKNVDECLSQPCKNGATCKDGANSFRCLCAAGFTGSHCELNINECQSNPCRNQATCVDELNSYSCKCQPGFSGKRCETEQSTGFNLDFEVSGIYGYVMLDGMLPSLHALTCTFWMKSSDDMNYGTPISYAVDNGSDNTLLLTDYNGWVLYVNGREKITNCPSVNDGRWHHIAITWTSANGIWKVYIDGKLSDGGAGLSVGLPIPGMLGGGALVLGQEQDKKGEGFSPAESFVGSISQLNLWDYVLSPQQVKSLATSCPEELSKGNVLAWPDFLSGIVGKVKIDSKSIFCSDCPRLGGSVPHLRTASEDLKPGSKVNLFCDPGFQLVGNPVQYCLNQGQWTQPLPHCERISCGVPPPLENGFHSADDFYAGSTVTYQCNNGYYLLGDSRMFCTDNGSWNGVSPSCLDVDECAVGSDCSEHASCLNVDGSYICSCVPPYTGDGKNCAEPIKCKAPGNPENGHSSGEIYTVGAEVTFSCQEGYQLMGVTKITCLESGEWNHLIPYCKAVSCGKPAIPENGCIEELAFTFGSKVTYRCNKGYTLAGDKESSCLANSSWSHSPPVCEPVKCSSPENINNGKYILSGLTYLSTASYSCDTGYSLQGPSIIECTASGIWDRAPPACHLVFCGEPPAIKDAVITGNNFTFRNTVTYTCKEGYTLAGLDTIECLADGKWSRSDQQCLAVSCDEPPIVDHASPETAHRLFGDIAFYYCSDGYSLADNSQLLCNAQGKWVPPEGQDMPRCIAHFCEKPPSVSYSILESVSKAKFAAGSVVSFKCMEGFVLNTSAKIECMRGGQWNPSPMSIQCIPVRCGEPPSIMNGYASGSNYSFGAMVAYSCNKGFYIKGEKKSTCEATGQWSSPIPTCHPVSCGEPPKVENGFLEHTTGRIFESEVRYQCNPGYKSVGSPVFVCQANRHWHSESPLMCVPLDCGKPPPIQNGFMKGENFEVGSKVQFFCNEGYELVGDSSWTCQKSGKWNKKSNPKCMPAKCPEPPLLENQLVLKELTTEVGVVTFSCKEGHVLQGPSVLKCLPSQQWNDSFPVCKIVLCTPPPLISFGVPIPSSALHFGSTVKYSCVGGFFLRGNSTTLCQPDGTWSSPLPECVPVECPQPEEIPNGIIDVQGLAYLSTALYTCKPGFELVGNTTTLCGENGHWLGGKPTCKAIECLKPKEILNGKFSYTDLHYGQTVTYSCNRGFRLEGPSALTCLETGDWDVDAPSCNAIHCDSPQPIENGFVEGADYSYGAIIIYSCFPGFQVAGHAMQTCEESGWSSSIPTCMPIDCGLPPHIDFGDCTKLKDDQGYFEQEDDMMEVPYVTPHPPYHLGAVAKTWENTKESPATHSSNFLYGTMVSYTCNPGYELLGNPVLICQEDGTWNGSAPSCISIECDLPTAPENGFLRFTETSMGSAVQYSCKPGHILAGSDLRLCLENRKWSGASPRCEAISCKKPNPVMNGSIKGSNYTYLSTLYYECDPGYVLNGTERRTCQDDKNWDEDEPICIPVDCSSPPVSANGQVRGDEYTFQKEIEYTCNEGFLLEGARSRVCLANGSWSGATPDCVPVRCATPPQLANGVTEGLDYGFMKEVTFHCHEGYILHGAPKLTCQSDGNWDAEIPLCKPVNCGPPEDLAHGFPNGFSFIHGGHIQYQCFPGYKLHGNSSRRCLSNGSWSGSSPSCLPCRCSTPVIEYGTVNGTDFDCGKAARIQCFKGFKLLGLSEITCEADGQWSSGFPHCEHTSCGSLPMIPNAFISETSSWKENVITYSCRSGYVIQGSSDLICTEKGVWSQPYPVCEPLSCGSPPSVANAVATGEAHTYESEVKLRCLEGYTMDTDTDTFTCQKDGRWFPERISCSPKKCPLPENITHILVHGDDFSVNRQVSVSCAEGYTFEGVNISVCQLDGTWEPPFSDESCSPVSCGKPESPEHGFVVGSKYTFESTIIYQCEPGYELEGNRERVCQENRQWSGGVAICKETRCETPLEFLNGKADIENRTTGPNVVYSCNRGYSLEGPSEAHCTENGTWSHPVPLCKPNPCPVPFVIPENALLSEKEFYVDQNVSIKCREGFLLQGHGIITCNPDETWTQTSAKCEKISCGPPAHVENAIARGVHYQYGDMITYSCYSGYMLEGFLRSVCLENGTWTSPPICRAVCRFPCQNGGICQRPNACSCPEGWMGRLCEEPICILPCLNGGRCVAPYQCDCPPGWTGSRCHTAVCQSPCLNGGKCVRPNRCHCLSSWTGHNCSRKRRTGF

SEQ ID NO: 1900 - protein, 452 aa, Homo sapiens
MSRESDVEAQQSHGSSACSQPHGSVTQSQGSSSQSQGISSSSTSTMPNSSQSSHSSSGTLSSLETVSTQELYSIPEDQEPEDQEPEEPTPAPWARLWALQDGFANLVFVFFDLTVDDQSVYPKALRDEYIMSKTLGSGACGEVKLAFERKTCKKVAIKIISKRKFAIGSAREADPALNVETEIEILKKLNHPCIIKIKNFFDAEDYYIVLELMEGGELFDKVVGNKRLKEATCKLYFYQMLLAVQYLHENGIIHRDLKPENVLLSSQEEDCLIKITDFGHSKILGETSLMRTLCGTPTYLAPEVLVSVGTAGYNRAVDCWSLGVILFICLSGYPPFSEHRTQVSLKDQITSGKYNFIPEVWAEVSEKALDLVKKLLVVDPKARFTTEEALRHPWLQDEDMKRKFQDLLSEENESTALPQVLAQPSTSRKRPREGEAEGAETTKRPAVCAAVL

SEQ ID NO: 1901 - protein, 992 aa, Homo sapiens
MDGFAGSLDDSISAASTSDVQDRLSALESRVQQQEDEITVLKAALADVLRRLAISEDHVASVKKSVSSKGQPSPRAVIPMSCITNGSGANRKPSHTSAVSIAGKETLSSAAKSGTEKKKEKPQGQREKKEESHSNDQSPQIRASPSPQPSSQPLQIHRQTPESKNATPTKSIKRPSPAEKSHNSWENSDDSRNKLSKIPSTPKLIPKVTKTADKHKDVIINQAKMSTREKNSQEGEYIKMFMRGRPITMFIPSDVDNYDDIRTELPPEKLKLEWAYGYRGKDCRANVYLLPTGKIVYFIASVVVLFNYEERTQRHYLGHTDCVKCLAIHPDKIRIATGQIAGVDKDGRPLQPHVRVWDSVTLSTLQIIGLGTFERGVGCLDFSKADSGVHLCIIDDSNEHMLTVWDWQKKAKGAEIKTTNEVVLAVEFHPTDANTIITCGKSHIFFWTWSGNSLTRKQGIFGKYEKPKFVQCLAFLGNGDVLTGDSGGVMLIWSKTTVEPTPGKGPKGVYQISKQIKAHDGSVFTLCQMRNGMLLTGGGKDRKIILWDHDLNPEREIEVPDQYGTIRAVAEGKADQFLVGTSRNFILRGTFNDGFQIEVQGHTDELWGLATHPFKDLLLTCAQDRQVCLWNSMEHRLEWTRLVDEPGHCADFHPSGTVVAIGTHSGRWFVLDAETRDLVSIHTDGNEQLSVMRYSIDGTFLAVGSHDNFIYLYVVSENGRKYSRYGRCTGHSSYITHLDWSPDNKYIMSNSGDYEILYWDIPNGCKLIRNRSDCKDIDWTTYTCVLGFQVFGVWPEGSDGTDINALVRSHNRKVIAVADDFCKVHLFQYPCSKAKAPSHKYSAHSSHVTNVSFTHNDSHLISTGGKDMSIIQWKLVEKLSLPQNETVADTTLTKAPVSSTESVIQSNTPTPPPSQPLNETAEEESRISSSPTLLENSLEQTVEPSEDHSEEESEEGSGDLGEPLYEEPCNEISKEQAKATLLEDQQDPSPSS

SEQ ID NO: 1902 - protein, 331 aa, Homo sapiens
MCSHFDADEIKRLGKRFKKLDLDNSGSLSVEEFMSLPELQQNPLVQRVIDIFDTDGNGEVDFKEFIEGVSQFSVKGDKEQKLRFAFRIYDMDKDGYISNGELFQVLKMMVGNNLKDTQLQQIVDKTIINADKDGDGRISFEEFCARGGKTGLFAGLASSVSMRPASPPSPAADSCSACRFFARRPPLRVTWVKPSSALALCVSISDSIPGNLKALPAETRAQLHHAEASLSQPPLQLRPFPKTSQAGDLQDLGPYVCVRKAVGKGDKQIRAVVKEHSVRSQERIWHYPGITTANMPGHLGQNTESGRDKLPMFGVWFPGCRFWGLWVWRLP

SEQ ID NO: 1903 - protein, 218 aa, Homo sapiens
MTSEFFAAQLRAQISDDTTHPISYYKPEFYTPDDGGTAHLSVVAEDGSAVSATSTINLYFGSKVRSPVSGILFNNEMDDFSSPSITNEFGVPPSPANFIQPGKQPLSSMCPTIMVGQDGQPPSHADHTPMPQAIIYNLWFGYDVKRAVEEPRLHNQLLPNVTTVERNIDQAVTAALETRHHHTQIASTFIAVVQAIVRTAGGWAAASDSRKGGEPAGY

SEQ ID NO: 1904 - protein, 252 aa, Homo sapiens
MTSEFFAAQLRAQISDDTTHPISYYKPEFYTPDDGGTAHLSVVAEDGSAVSATSTINLYFGSKVRSPVSGILFNNEMDDFSSPSITNEFGVPPSPANFIQPGKQPLSSMCPTIMVGQDGQVRMVVGAAGGTQITTATALVCVTPFLPGRAHPAQPPSHADHTPMPQAIIYNLWFGYDVKRAVEEPRLHNQLLPNVTTVERNIDQAVTAALETRHHHTQIASTFIAVVQAIVRTAGGWAAASDSRKGGEPAGY

SEQ ID NO: 1905 - protein, 2223 aa, Homo sapiens
MAESASPPSSSAAAPAAEPGVTTEQPGPRSPPSSPPGLEEPLDGADPHVPHPDLAPIAFFCLRQTTSPRNWCIKMVCNPWFECVSMLVILLNCVTLGMYQPCDDMDCLSDRCKILQVFDDFIFIFFAMEMVLKMVALGIFGKKCYLGDTWNRLDFFIVMAGMVEYSLDLQNINLSAIRTVRVLRPLKAINRVPSMRILVNLLLDTLPMLGNVLLLCFFVFFIFGIIGVQLWAGLLRNRCFLEENFTIQGDVALPPYYQPEEDDEMPFICSLSGDNGIMGCHEIPPLKEQGRECCLSKDDVYDFGAGRQDLNASGLCVNWNRYYNVCRTGSANPHKGAINFDNIGYAWIVIFQVITLEGWVEIMYYVMDAHSFYNFIYFILLIIVGSFFMINLCLVVIATQFSETKQREHRLMLEQRQRYLSSSTVASYAEPGDCYEEIFQYVCHILRKAKRRALGLYQALQSRRQALGPEAPAPAKPGPHAKEPRHYHGKTKGQGDEGRHLGSRHCQTLHGPASPGNDHSGRELCPQHSPLDATPHTLVQPIPATLASDPASCPCCQHEDGRRPSGLGSTDSGQEGSGSGSSAGGEDEADGDGARSSEDGASSELGKEEEEEEQADGAVWLCGDVWRETRAKLRGIVDSKYFNRGIMMAILVNTVSMGIEHHEQPEELTNILEICNVVFTSMFALEMILKLAAFGLFDYLRNPYNIFDSIIVIISIWEIVGQADGGLSVLRTFRLLRVLKLVRFMPALRRQLVVLMKTMDNVATFCMLLMLFIFIFSILGMHIFGCKFSLRTDTGDTVPDRKNFDSLLWAIVTVFQILTQEDWNVVLYNGMASTSPWASLYFVALMTFGNYVLFNLLVAILVEGFQAEGDANRSYSDEDQSSSNIEEFDKLQEGLDSSGDPKLCPIPMTPNGHLDPSLPLGGHLGPAGAAGPAPRLSLQPDPMLVALGSRKSSVMSLGRMSYDQRSLSSSRSSYYGPWGRSAAWASRRSSWNSLKHKPPSAEHESLLSAERGGGARVCEVAADEGPPRAAPLHTPHAHHIHHGPHLAHRHRHHRRTLSLDNRDSVDLAELVPAVGAHPRAAWRAAGPAPGHEDCNGRMPSIAKDVFTKMGDRGDRGEDEEEIDYTLCFRVRKMIDVYKPDWCEVREDWSVYLFSPENRFRVLCQTIIAHKLFDYVVLAFIFLNCITIALERPQIEAGSTERIFLTVSNYIFTAIFVGEMTLKVVSLGLYFGEQAYLRSSWNVLDGFLVFVSIIDIVVSLASAGGAKILGVLRVLRLLRTLRPLRVISRAPGLKLVVETLISSLKPIGNIVLICCAFFIIFGILGVQLFKGKFYHCLGVDTRNITNRSDCMAANYRWVHHKYNFDNLGQALMSLFVLASKDGWVNIMYNGLDAVAVDQQPVTNHNPWMLLYFISFLLIVSFFVLNMFVGVVVENFHKCRQHQEAEEARRREEKRLRRLEKKRRKAQRLPYYATYCHTRLLIHSMCTSHYLDIFITFIICLNVVTMSLEHYNQPTSLETALKYCNYMFTTVFVLEAVLKLVAFGLRRFFKDRWNQLDLAIVLLSVMGITLEEIEINAALPINPTIIRIMRVLRIARVLKLLKMATGMRALLDTVVQALPQVGNLGLLFMLLFFIYAALGVELFGKLVCNDENPCEGMSRHATFENFGMAFLTLFQVSTGDNWNGIMKDTLRDCTHDERSCLSSLQFVSPLYFVSFVLTAQFVLINVVVAVLMKHLDDSNKEAQEDAEMDAELELEMAHGLGPGPRLPTGSPGAPGRGPGGAGGGGDTEGGLCRRCYSPAQENLWLDSVSLIIKDSLEGELTIIDNLSGSIFHHYSSPAGCKKCHHDKQEVQLAETEAFSLNSDRSSSILLGDDLSLEDPTACPPGRKDSKGELDPPEPMRVGDLGECFFPLSSTAVSPDPENFLCEMEEIPFNPVRSWLKHDSSQAPPSPFSPDASSPLLPMPAEFFHPAVSASQKGPEKGTGTGTLPKIALQGSWASLRSPRVNCTLLRQATGSDTSLDASPSSSAGSLQTTLEDSLTLSDSPRRALGPPAPAPGPRAGLSPAARRRLSLRGRGLFSLRGLRAHQRSHSSGGSTSPGCTHHDSMDPSDEEGRGGAGGGGAGSEHSETLSSLSLTSLFCPPPPPPAPGLTPARKFSSTSSLAAPGRPHAAALAHGLARSPSWAADRSKDPPGRAPLPMGLGPLAPPPQPLPGELEPGDAASKRKR

SEQ ID NO: 1906 - protein, 923 aa, Homo sapiens
MDGFAGSLDDSISAASTSDVQDRLSALESRVQQQEDEITVLKAALADVLRRLAISEDHVASVKKSVSSKGQPSPRAVIPMSCITNGSGANRKPSHTSAVSIAGKETLSSAAKSIKRPSPAEKSHNSWENSDDSRNKLSKIPSTPKLIPKVTKTADKHKDVIINQEGEYIKMFMRGRPITMFIPSDVDNYDDIRTELPPEKLKLEWAYGYRGKDCRANVYLLPTGKIVYFIASVVVLFNYEERTQRHYLGHTDCVKCLAIHPDKIRIATGQIAGVDKDGRPLQPHVRVWDSVTLSTLQIIGLGTFERGVGCLDFSKADSGVHLCIIDDSNEHMLTVWDWQKKAKGAEIKTTNEVVLAVEFHPTDANTIITCGKSHIFFWTWSGNSLTRKQGIFGKYEKPKFVQCLAFLGNGDVLTGDSGGVMLIWSKTTVEPTPGKGPKGVYQISKQIKAHDGSVFTLCQMRNGMLLTGGGKDRKIILWDHDLNPEREIEVPDQYGTIRAVAEGKADQFLVGTSRNFILRGTFNDGFQIEVQGHTDELWGLATHPFKDLLLTCAQDRQVCLWNSMEHRLEWTRLVDEPGHCADFHPSGTVVAIGTHSGRWFVLDAETRDLVSIHTDGNEQLSVMRYSIDGTFLAVGSHDNFIYLYVVSENGRKYSRYGRCTGHSSYITHLDWSPDNKYIMSNSGDYEILYWDIPNGCKLIRNRSDCKDIDWTTYTCVLGFQVFGVWPEGSDGTDINALVRSHNRKVIAVADDFCKVHLFQYPCSKAKAPSHKYSAHSSHVTNVSFTHNDSHLISTGGKDMSIIQWKLVEKLSLPQNETVADTTLTKAPVSSTESVIQSNTPTPPPSQPLNETAEEESRISSSPTLLENSLEQTVEPSEDHSEEESEEGSGDLGEPLYEEPCNEISKEQAKATLLEDQQDPSPSS

SEQ ID NO: 1907 - protein, 393 aa, Homo sapiens [sequence omitted]

SEQ ID NO: 1908 - protein, 704 aa, Homo sapiens
MEDERKNGAYGTPQKYDPTFKGPIYNRGCTDIICCVFLLLAIVGYVAVGIIAWTHGDPRKVIYPTDSRGEFCGQKGTKNENKPYLFYFNIVKCASPLVLLEFQCPTPQICVEKCPDRYLTYLNARSSRDFEYYKQFCVPGFKNNKGVAEVLQDGDCPAVLIPSKPLARRCFPAIHAYKGVLMVGNETTYEDGHGSRKNITDLVEGAKKANGVLEARQLAMRIFEDYTVSWYWIIIGLVIAMAMSLLFIILLRFLAGIMVWVMIIMVILVLGYGIFHCYMEYSRLRGEAGSDVSLVDLGFQTDFRVYLHLRQTWLAFMIILSILEVIIILLLIFLRKRILIAIALIKEASRAVGYVMCSLLYPLVTFFLLCLCIAYWASTAVFLSTSNEAVYKIFDDSPCPFTAKTCNPETFPSSNESRQCPNARCQFAFYGGESGYHRALLGLQIFNAFMFFWLANFVLALGQVTLAGAFASYYWALRKPDDLPAFPLFSAFGRALRYHTGSLAFGALILAIVQIIRVILEYLDQRLKAAENKFAKCLMTCLKCCFWCLEKFIKFLNRNAYIMIAIYGTNFCTSARNAFFLLMRNIIRVAVLDKVTDFLFLLGKLLIVGSVGILAFFFFTHRIRIVQDTAPPLNYYWVPILTVIVGSYLIAHGFFSVYGMCVDTLFLCFLEDLERNDGSAERPYFMSSTLKKLLNKTNKKAAES

SEQ ID NO: 1909 - protein, 17 aa, Homo sapiens
EQISKGRNTPLCDRWIL

SEQ ID NO: 1910 - protein, 195 aa, Homo sapiens
MDPQSRSLKNAGSRSSSRENRATSGEGAQPCQGTDDGPSLGAQDQRSTPTNQKGSIIPNNIRHKFGSNVVDQLVSEEQAQKAIDEVFEGQKRASSWPSRTQNPVEISSVFSDYYDLGYNMRSNLFRGAAEETKSLMKASYTPEVIEKSVRDLEHWHGRKTDDLGRWHQKNAMNLNLQKALEEKYGENSKSKSSKY

SEQ ID NO: 1911 - protein, 591 aa, Homo sapiens
MCNGRKTVLADPEPELYLDPFCPPGFSSQKFPMQHVLCNHPPWIFTCLCAEGNIQPGDPGPGDQEKQQQASEGRPWSDQAEGPEGEGAMPLFGRTKKRTLGAFSRPPQRQPVSSRNGLRGVELEASPAQSGNPEETDKLLKRIEVLGFGTVNCGECGLSFSKMTNLLSHQRIHSGEKPYVCGVCEKGFSLKKSLARHQKAHSGEKPIVCRECGRGFNRKSTLIIHERTHSGEKPYMCSECGRGFSQKSNLIIHQRTHSGEKPYVCRECGKGFSQKSAVVRHQRTHLEEKTIVCSDCGLGFSDRSNLISHQRTHSGEKPYACKECGRCFRQRTTLVNHQRTHSKEKPYVCGVCGHSFSQNSTLISHRRTHTGEKPYVCGVCGRGFSLKSHLNRHQNIHSGEKPIVCKDCGRGFSQQSNLIRHQRTHSGEKPMVCGECGRGFSQKSNLVAHQRTHSGERPYVCRECGRGFSHQAGLIRHKRKHSREKPYMCRQCGLGFGNKSALITHKRAHSEEKPCVCRECGQGFLQKSHLTLHQMTHTGEKPYVCKTCGRGFSLKSHLSRHRKTTSVHHRLPVQPDPEPCAGQPSDSLYSL

SEQ ID NO: 1912 - protein, 262 aa, Homo sapiens
FWLVINQEGNMVTARQEPRLVLISLTCDGDTLTLSAAYTKDLLLPIKTPTTNAVHKCRVHGLEIEGRDCGEATAQWITSFLKSQPYRLVHFEPHMRPRRPHQIADLFRPKDQIAYSDTSPFLILSEASLADLNSRLEKKVKATNFRPNIVISGCDVYAEVTLCPFGSFLGFDFFFKDSWDELLIGDVELKRVMACSRCILTTVDPDTGVMSRKEPLETLKSYRQCDPSERKLYGKSPLFGQYFVLENPGTIKVGDPVYLLGQ

SEQ ID NO: 1913 - protein, 783 aa, Homo sapiens
MSGGHQLQLAALWPWLLMATLQAGFGRTGLVLAAAVESERSAEQKAIIRVIPLKMDPTGKLNLTLEGVFAGVAEITPAEGKLMQSHPLYLCNASDDDNLEPGFISIVKLESPRRAPRPCLSLASKARMAGERGASAVLFDITEDRAAAEQLQQPLGLTWPVVLIWGNDAEKLMEFVYKNQKAHVRIELKEPPAWPDYDVWILMTVVGTIFVIILASVLRIRCRPRHSRPDPLQQRTAWAISQLATRRYQASCRQARGEWPDSGSSCSSAPVCAICLEEFSEGQELRVISCLHEFHRNCVDPWLHQHRTCPLCMFNITEGDSFSQSLGPSRSYQEPGRRLHLIRQHPGHAHYHLPAAYLLGPSRSAVARPPRPGPFLPSQEPGMGPRHHRFPRAAHPRAPGEQQRLAGAQHPYAQGWGLSHLQSTSQHPAACPVPLRRARPPDSSGSGESYCTERSGYLADGPASDSSSGPCHGSSSDSVVNCTDISLQGVHGSSSTFCSSLSSDFDPLVYCSPKGDPQRVDMQPSVTSRPRSLDSVVPTGETQVSSHVHYHRHRHHHYKKRFQWHGRKPGPETGVPQSRPPIPRTQPQPEPPSPDQQVTRSNSAAPSGRLSNPQCPRALPEPAPGPVDASSICPSTSSLFNLQKSSLSARHPQRKRRGGPSEPTPGSRPQDATVHPACQIFPHYTPSVAYPWSPEAHPLICGPPGLDKRLLPETPGPCYSNSQPVWLCLTPRQPLEPHPPGEGPSEWSSDTAEGRPCPYPHCQVLSAQPGSEEELEELCEQAV

SEQ ID NO: 1914 - protein, 279 aa, Homo sapiens
MDTGSLNAASLREEQLHLSLLVSSGWRTISFHVVPVVRRKLGAPALEGVQQMPGFPEGSLRRILSQGVDLVPASAQLWRTSTDYLLTRLLGELGSLQGHRLDSLSILDRVNHESWRDSGQTDGLTFGHLKMVLLWASVLFLAPEDWAELQGAVYRLLVVLLCCLATRKLPHFLHPQRNLLQGSGLDLGAIYQRVEGFASQPEAALRIHATHLGRSPPPRIGSGLKALLQLPASDPTYWATAYFDVLLDKFQVFNIQDKDRISAMQSIFQKTRTLGGEES

SEQ ID NO: 1915 - protein, 730 aa, Homo sapiens
MEDLFETFQDEMGFSNMEDDGPEEEERVAEPQANFNTPQALRFEELLANLLNEQHQIAKELFEQLKMKKPSAKQQKEVEKVKPQCKEVHQTLILDPAQRKRLQQQMQQHVQLLTQIHLLATCNPNLNPEASSTRICLKELGTFAQSSIALHHQYNPKFQTLFQPCNLMGAMQLIEDFSTHVSIDCSPHKTVKKTANEFPCLPKQVAWILATSKVFMYPELLPVCSLKAKNPQDKILFTKAEDNKYLLTCKTARQLTVRIKNLNMNRAPDNIIKFYKKTKQLPVLGKCCEEIQPHQWKPPIEREEHRLPFWLKASLPSIQEELRHMADGAREVGNMTGTTEINSDQGLEKDNSELGSETRYPLLLPKGVVLKLKPVADRFPKKAWRQKRSSVLKPLLIQPSPSLQPSFNPGKTPAQSTHSEAPPSKMVLRIPHPIQPATVLQTVPGVPPLGVSGGESFESPAALPAMPPEARTSFPLSESQTLLSSAPVPKVMMPSPASSMFRKPYVRRRPSKRRGARAFRCIKPAPVIHPASVIFTVPATTVKIVSLGGGCNMIQPVNAAVAQSPQTIPIATLLVNPTSFPCPLNQPLVASSVSPLIVSGNSVNLPIPSTPEDKAHMNVDIACAVADGENAFQGLEPKLEPQELSPLSATVFPKVEHSPGPPPVDKQCQEGLSENSAYRWTVVKTEEGRQALEPLPQGIQESLNNSSPGDLEEVVKMEPEDATEEISGFL

SEQ ID NO: 1916 - protein, 112 aa, Homo sapiens
MAEQATKSVLFVCLGNICRSPIAEAVFRKLVTDQNISENWRVDSAATSGYEIGNPPDYRGQSCMKRHGIPMSHVARQVPSLDLKLCVLCFSGSLTAVLFLTGTWAGPQTQEL

SEQ ID NO: 1917 - protein, 829 aa, Homo sapiens
MLRRRAQEEDSTVLIDVSPPEAEKRGSYGSTAHASEPGGQQAAACRAGSPAKPRIDFVLVWEEDLKLDRQQDSAARDRTDMHRTWRETFLDNLRAAGLCVDQQDVQDGNTTVHYALLSASWAVLCYYAEDLRLKLPLQELPNQASNWSAGLLAWLGIPNVLLEVVPDVPPEYYSCRFRVNKLPRFLGSDNQDTFFTSTKRHQILFEILAKTPYGHEKKNLLGIHQLLAEGVLSAAFPLHDGPFKTPPEGPQAPRLNQRQVLFQHWARWGKWNKYQPLDHVRRYFGEKVALYFAWLGFYTGWLLPAAVVGTLVFLVGCFLVFSDIPTQELCGSKDSFEMCPLCLDCPFWLLSSACALAQAGRLFDHGGTVFFSLFMALWAVLLLEYWKRKSATLAYRWDCSDYEDTEERPRPQFAASAPMTAPNPITGEDEPYFPERSRARRMLAGSVVIVVMVAVVVMCLVSIILYRAIMAIVVSRSGNTLLAAWASRIASLTGSVVNLVFILILSKIYVSLAHVLTRWEMHRTQTKFEDAFTLKVFIFQFVNFYSSPVYIAFFKGRFVGYPGNYHTLFGVRNEECAAGGCLIELAQELLVIMVGKQVINNMQEVLIPKLKGWWQKFRLRSKKRKAGASAGASQGPWEDDYELVPCEGLFDEYLEMVLQFGFVTIFVAACPLAPLFALLNNWVEIRLDARKFVCEYRRPVAERAQDIGIWFHILAGLTHLAVISNAFLLAFSSDFLPRAYYRWTRAHDLRGFLNFTLARAPSSFAAAHNRTCRYRAFRDDDGHYSQTYWNLLAIRLAFVIVFEVAEAPAGSPIHGMRPRPCALPNSSTW

SEQ ID NO: 1918 - protein, 802 aa, Homo sapiens
MPVAEAPQVAGGQGDGGDGEEAEPEGMFKACEDSKRKARGYLRLVPLFVLLALLVLASAGVLLWYFLGYKAEVMVSQVYSGSLRVLNRHFSQDLTRRESSAFRSETAKAQKMLKELITSTRLGTYYNSSSVYSFGEGPLTCFFWFILQIPEHRRLMLSPEVVQALLVEELLSTVNSSAAVPYRAEYEVDPEGLVILEASVKDIAALNSTLGCYRYSYVGQGQVLRLKGPDHLASSCLWHLQGPKDLMLKLRLEWTLAECRDRLAMYDVAGPLEKRLITSVYGCSRQEPVVEVLASGAIMAVVWKKGLHSYYDPFVLSVQPVVFQACEVNLTLDNRLDSQGVLSTPYFPSYYSPQTHCSWHLTVPSLDYGLALWFDAYALRRQKYDLPCTQGQWTIQNRRLCGLRILQPYAERIPVVATAGITINFTSQISLTGPGVRVHYGLYNQSDPCPGEFLCSVNGLCVPACDGVKDCPNGLDERNCVCRATFQCKEDSTCISLPKVCDGQPDCLNGSDEEQCQEGVPCGTFTFQCEDRSCVKKPNPQCDGRPDCRDGSDEEHCDCGLQGPSSRIVGGAVSSEGEWPWQASLQVRGRHICGGALIADRWVITAAHCFQEDSMASTVLWTVFLGKVWQNSRWPGEVSFKVSRLLLHPYHEEDSHDYDVALLQLDHPVVRSAAVRPVCLPARSHFFEPGLHCWITGWGALREGGPISNALQKVDVQLIPQDLCSEVYRYQVTPRMLCAGYRKGKKDACQGDSGGPLVCKALSGRWFLAGLVSWGLGCGRPNYFGVYTRITGVISWIQQVVT

SEQ ID NO: 1919 - protein, 801 aa, Homo sapiens
MKEKAMIKTAKMQGNVMELVGSNPPQRNWKGIAIALLVILVICSLIVTSVILLTPAEDNSLSQKKKVTVEDLFSEDFKIHDPEAKWISDTEFIYREQKGTVRLWNVETNTSTVLIEGKKIESLRAIRYEISPDREYALFSYNVEPIYQHSYTGYYVLSKIPHGDPQSLDPPEVSNAKLQYAGWGPKGQQLIFIFENNIYYCAHVGKQAIRVVSTGKEGVIYNGLSDWLYEEEILKTHIAHWWSPDGTRLAYAAINDSRVPIMELPTYTGSIYPTVKPYHYPKAGSENPSISLHVIGLNGPTHDLEMMPPDDPRMREYYITMVKWATSTKVAVTWLNRAQNVSILTLCDATTGVCTKKHEDESEAWLHRQNEEPVFSKDGRKFFFIRAIPQGGRGKFYHITVSSSQPNSSNDNIQSITSGDWDVTKILAYDEKGNKIYFLSTEDLPRRRQLYSANTVGNFNRQCLSCDLVENCTYFSASFSHSMDFFLLKCEGPGVPMVTVHNTTDKKKMFDLETNEHVKKAINDRQMPKVEYRDIEIDDYNLPMQILKPATFTDTTHYPLLLVVDGTPGSQSVAEKFEVSWETVMVSSHGAVVVKCDGRGSGFQGTKLLHEVRRRLGLLEEKDQMEAVRTMLKEQYIDRTRVAVFGKDYGGYLSTYILPAKGENQGQTFTCGSALSPITDFKLYASAFSERYLGLHGLDNRAYEMTKVAHRVSALEEQQFLIIHPTADEKIHFQHTAELITQLIRGKANYSLQIYPDESHYFTSSSLKQHLYRSIINFFVECFRIQDKLLTVTAKEDEEED

SEQ ID NO: 1920 - protein, 738 aa, Homo sapiens
MSRRSQRLTRYSQGDDDGSSSSGGSSVAGSQSTLFKDSPLRTLKRKSSNMKRLSPAPQLGPSSDAHTSYYSESLVHESWFPPRSSLEELHGDANWGEDLRVRRRRGTGGSESSRASGLVGRKATEDFLGSSSGYSSEDDYVEDSEGRGSKVTETEPVSSFPAGYSDVDQQSSSSRLRSAVSRAGSLLWMVATSPGRLFRLLYWWAGTTWYRLTTAASLLDVFVLTRRFSSLKTFLWFLLPLLLLTCLTYGAWYFYPYGLQTFHPALVSWWAAKDSRRPDEGWEARDSSPHFQAEQRVMSRVHSLERRLEALAAEFSSNWQKEAMRLERLELRQGAPGQGGGGGLSHEDTLALLEGLVSRREAALKEDFRRETAARIQEELSALRAEHQQDSEDLFKKIVRASQESEARIQQLKSEWQSMTQESFQESSVKELRRLEDQLAGLQQELAALALKQSSVAEEVGLLPQQIQAVRDDVESQFPAWISQFLARGGGGRVGLLQREEMQAQLRELESKILTHVAEMQGKSAREAAASLSLTLQKEGVIGVTEEQVHHIVKQALQRYSEDRIGLADYALESGGASVISTRCSETYETKTALLSLFGIPLWYHSQSPRVILQPDVHPGNCWAFQGPQGFAVVRLSARIRPTAVTLEHVPKALSPNSTISSAPKDFAIFGFDEDLQQEGTLLGKFTYDQDGEPIQTFHFQAPTMATYQVVELRILTNWGHPEYTCIYRFRVHGEPAH

SEQ ID NO: 1921 - protein, 2062 aa, Homo sapiens
FMQHPKNFGLIASFLERKTVAECVLYYYLTKKNENYKSLVRRSYRRRGKSQQQQQQQQQQQQQQQQQPMPRSSQEEKDEKEKEKEAEKEEEKPEVENDKEDLLKEKTDDTSGEDNDEKEAVASKGRKTANSQGRRKGRITRSMANEANSEEAITPQQSAELASMELNESSRWTEEEMETAKKGLLEHGRNWSAIARMVGSKTVSQCKNFYFNYKKRQNLDEILQQHKLKMEKERNARRKKKKAPAAASEEAAFPPVVEDEEMEASGVSGNEEEMVEEAEATVNNSSDTESIPSPHTEAAKDTGQNGPKPPATLGADGPPPGPPTPPPEDIPAPTEPTPASEATGAPTPPPAPPSPSAPPPVVPKEEKEEETAAAPPVEEGEEQKPPAAEELAVDTGKAEEPVKSECTEEAEEGPAKGKDAEAAEATAEGALKAEKKEGGSGRATTAKSSGAPQDSDSSATCSADEVDEAEGGDKNRLLSPRPSLLTPTGDPRANASPQKPLDLKQLKQRAAAIPPIQVTKVHEPPREDAAPTKPAPPAPPPPQNLQPESDAPQQPGSSPRGKSRSPAPPADKEAEKPVFFPAFAAEAQKLPGDPPCWTSGLPFPVPPREVIKASPHAPDPSAFSYAPPGHPLPLGLHDTARPVLPRPPTISNPPPLISSAKHPSVLERQIGAISQGMSVQLHVPYSEHAKAPVGPVTMGLPLPMDPKKLAPFSGVKQEQLSPRGQAGPPESLGVPTAQEASVLRGTALGSVPGGSITKGIPSTRVPSDSAITYRGSITHGTPADVLYKGTITRIIGEDSPSRLDRGREDSLPKGHVIYEGKKGHVLSYEGGMSVTQCSKEDGRSSSGPPHETAAPKRTYDMMEGRVGRAISSASIEGLMGRAIPPERHSPHHLKEQHHIRGSITQGIPRSYVEAQEDYLRREAKLLKREGTPPPPPPSRDLTEAYKTQALGPLKLKPAHEGLVATVKEAGRSIHEIPREELRHTPELPLAPRPLKEGSITQGTPLKYDTGASTTGSKKHDVRSLIGSPGRTFPPVHPLDVMADARALERACYEESLKSRPGTASSSGGSIARGAPVIVPELGKPRQSPLTYEDHGAPFAGHLPRGSPVTTREPTPRLQEGSLSSSKASQDRKLTSTPREIAKSPHSTVPEHHPHPISPYEHLLRGVSGVDLYRSHIPLAFDPTSIPRGIPLDAAAAYYLPRHLAPNPTYPHLYPPYLIRGYPDTAALENRQTIINDYITSQQMHHNAATAMAQRADMLRGLSPRESSLALNYAAGPRGIIDLSQVPHLPVLVPPTPGTPATAMDRLAYLPTAPQPFSSRHSSSPLSPGGPTHLTKPTTTSSSERERDRDRERDRDREREKSILTSTTTVEHAPIWRPGTEQSSGSSGGGGGSSSRPASHSHAHQHSPISPRTQDALQQRPSVLHNTGMKGIITAVEPSTPTVLRSTSTSSPVRPAATFPPATHCPLGGTLDGVYPTLMEPVLLPKEAPRVARPERPRADTGHAFLAKPPARSGLEPASSPSKGSEPRPLVPPVSGHATIARTPAKNLAPHHASPDPPAPPASASDPHREKTQSKPFSIQELELRSLGYHGSSYSPEGVEPVSPVSSPSLTHDKGLPKHLEELDKSHLEGELRPKQPGPVKLGGEAAHLPHLRPLPESQPSSSPLLQTAPGVKGHQRVVTLAQHISEVITQDYTRHHPQQLSAPLPAPLYSFPGASCPVLDLRRPPSDLYLPPPDHGAPARGSPHSEGGKRSPEPNKTSVLGGGEDGIEPVSPPEGMTEPGHSRSAVYPLLYRDGEQTEPSRMGSKSPGNTSQPPAFFSKLTESNSAMVKSKKQEINKKLNTHNRNEPEYNISQPGTEIFNMPAITGTGLMTYRSQAVQEHASTNMGLEAIIRKALMGKYDQWEESPPLSANAFNPLNASASLPAAMPITAADGRSDHTLTSPGGGGKAKVSGRPSSRKAKSPAPGLASGDRPPSVSSVHSEGDCNRRTPLTNRVWEDRPSSAGSTPFPYNPLIMRLQAGVMASPPPPGLPAGSGPLAGPHHAWDEEPKPLLCSQYETLSDSE

SEQ ID NO: 1922 - protein, 1981 aa, Homo sapiens
MAESASPPSSSAAAPAAEPGVTTEQPGPRSPPSSPPGLEEPLDGADPHVPHPDLAPIAFFCLRQTTSPRNWCIKMVCNPWFECVSMLVILLNCVTLGMYQPCDDMDCLSDRCKILQVFDDFIFIFFAMEMVLKMVALGIFGKKCYLGDTWNRLDFFIVMAGMVEYSLDLQNINLSAIRTVRVLRPLKAINRVPSMRILVNLLLDTLPMLGNVLLLCFFVFFIFGIIGVQLWAGLLRNRCFLEENFTIQGDVALPPYYQPEEDDEMPFICSLSGDNGIMGCHEIPPLKEQGRECCLSKDDVYDFGAGRQDLNASGLCVNWNRYYNVCRTGSANPHKGAINFDNIGYAWIVIFQVITLEGWVEIMYYVMDAHSFYNFIYFILLIIVGSFFMINLCLVVIATQFSETKQREHRLMLEQRQRYLSSSTVASYAEPGDCYEEIFQYVCHILRKAKRRALGLYQALQSRRQALGPEAPAPAKPGPHAKEPRHYQLCPQHSPLDATPHTLVQPIPATLASDPASCPCCQHEDGRRPSGLGSTDSGQEGSGSGSSAGGEDEADGDGARSSEDGASSELGKEEEEEEQADGAVWLCGDVWRETRAKLRGIVDSKYFNRGIMMAILVNTVSMGIEHHEQPEELTNILEICNVVFTSMFALEMILKLAAFGLFDYLRNPYNIFDSIIVIISIWEIVGQADGGLSVLRTFRLLRVLKLVRFMPALRRQLVVLMKTMDNVATFCMLLMLFIFIFSILGMHIFGCKFSLRTDTGDTVPDRKNFDSLLWAIVTVFQILTQEDWNVVLYNGMASTSPWASLYFVALMTFGNYVLFNLLVAILVEGFQAEGDANRSYSDEDQSSSNIEEFDKLQEGLDSSGDPKLCPIPMTPNGHLDPSLPLGGHLGPAGAAGPAPRLSLQPDPMLVALGSRKSSVMSLGRMSYDQRSLSSSRSSYYGPWGRSAAWASRRSSWNSLKHKPPSAEHESLLSAERGGGARVCEVAADEGPPRAAPLHTPHAHHIHHGPHLAHRHRHHRRTLSLDNRDSVDLAELVPAVGAHPRAAWRAAGPAPGHEDCNGRMPSIAKDVFTKMGDRGDRGEDEEEIDYTLCFRVRKMIDVYKPDWCEVREDWSVYLFSPENRFRVLCQTIIAHKLFDYVVLAFIFLNCITIALERPQIEAGSTERIFLTVSNYIFTAIFVGEMTLKVVSLGLYFGEQAYLRSSWNVLDGFLVFVSIIDIVVSLASAGGAKILGVLRVLRLLRTLRPLRVISRAPGLKLVVETLISSLKPIGNIVLICCAFFIIFGILGVQLFKGKFYHCLGVDTRNITNRSDCMAANYRWVHHKYNFDNLGQALMSLFVLASKDGWVNIMYNGLDAVAVDQQPVTNHNPWMLLYFISFLLIVSFFVLNMFVGVVVENFHKCRQHQEAEEARRREEKRLRRLEKKRRKAQRLPYYATYCHTRLLIHSMCTSHYLDIFITFIICLNVVTMSLEHYNQPTSLETALKYCNYMFTTVFVLEAVLKLVAFGLRRFFKDRWNQLDLAIVLLSVMGITLEEIEINAALPINPTIIRIMRVLRIARVLKLLKMATGMRALLDTVVQALPQVGNLGLLFMLLFFIYAALGVELFGKLVCNDENPCEGMSRHATFENFGMAFLTLFQVSTGDNWNGIMKDTLRDCTHDERSCLSSLQFVSPLYFVSFVLTAQFVLINVVVAVLMKHLDDSNKEAQEDAEMDAELELEMAHGLGPGPRLPTGSPGAPGRGPGGAGGGGDTEGGLCRRCYSPAQENLWLDSVSLIIKDSLEGELTIIDNLSGSIFHHYSSPAGCKKCHHDKQEVQLAETEAFSLNSDRSSSILLGDDLSLEDPTACPPGRKDSKGELDPPEPMRVGDLGECFFPLSSTAVSPDPENFLCEMEEIPFNPVRSWLKHDSSQAPPSPFSPDASSPLLPMPAEFFHPAVSASQKGPEKGTGTGTLPKIALQGSWASLRSPRVNCTLLRQVPTPPRP

SEQ ID NO: 1923 - protein, 2623 aa, Homo sapiens
MGEKVSEAPEPVPRGCSGHGSRTPASALVAASSPGASSAESSSGSETLSEEGEPGGFSREHQPPPPPPLGGTLGARAPAAWAPASVLLERGVLALPPPLPGGAVPPAPRGSSASQEEQDEELDHILSPPPMPFRKCSNPDVASGPGKSLKYKRQLSEDGRQLRRGSLGGALTGRYLLPNPVAGQAWPASAETSNLVRMRSQALGQSAPSLTASLKELSLPRRGSFCRTSNRKSLIGNGQSPALPRPHSPLSAHAGNSPQDSPRNFSPSASAHFSFARRTDGRRWSLASLPSSGYGTNTPSSTVSSSCSSQEKLHQLPYQPTPDELHFLSKHFCTTESIATENRCRNTPMRPRSRSLSPGRSPACCDHEIIMMNHVYKERFPKATAQMEERLKEIITSYSPDNVLPLADGVLSFTHHQIIELARDCLDKSHQGLITSRYFLELQHKLDKLLQEAHDRSESGELAFIKQLVRKILIVIARPARLLECLEFDPEEFYYLLEAAEGHAKEGQGIKTDIPRYIISQLGLNKDPLEEMAHLGNYDSGTAETPETDESVSSSNASLKLRRKPRESDFETIKLISNGAYGAVYFVRHKESRQRFAMKKINKQNLILRNQIQQAFVERDILTFAENPFVVSMYCSFETRRHLCMVMEYVEGGDCATLMKNMGPLPVDMARMYFAETVLALEYLHNYGIVHRDLKPDNLLVTSMGHIKLTDFGLSKVGLMSMTTNLYEGHIEKDAREFLDKQVCGTPEYIAPEVILRQGYGKPVDWWAMGIILYEFLVGCVPFFGDTPEELFGQVISDEINWPEKDEAPPPDAQDLITLLLRQNPLERLGTGGAYEVKQHRFFRSLDWNSLLRQKAEFIPQLESEDDTSYFDTRSEKYHHMETEEEDDTNDEDFNVEIRQFSSCSHRFSKVFSSIDRITQNSAEEKEDSVDKTKSTTLPSTETLSWSSEYSEMQQLSTSNSSDTESNRHKLSSGLLPKLAISTEGEQDEAASCPGDPHEEPGKPALPPEECAQEEPEVTTPASTISSSTLSVGSFSEHLDQINGRSECVDSTDNSSKPSSEPASHMARQRLESTEKKKISGKVTKSLSASALSLMIPGDMFAVSPLGSPMSPHSLSSDPSSSRDSSPSRDSSAASASPHQPIVIHSSGKNYGFTIRAIRVYVGDSDIYTVHHIVWNVEEGSPACQAGLKAGDLITHINGEPVHGLVHTEVIELLLKSGNKVSITTTPFENTSIKTGPARRNSYKSRMVRRSKKSKKKESLERRRSLFKKLAKQPSPLLHTSRSFSCLNRSLSSGESLPGSPTHSLSPRSPTPSYRSTPDFPSGTNSSQSSSPSSSAPNSPAGSGHIRPSTLHGLAPKLGGQRYRSGRRKSAGNIPLSPLARTPSPTPQPTSPQRSPSPLLGHSLGNSKIAQAFPSKMHSPPTIVRHIVRPKSAEPPRSPLLKRVQSEEKLSPSYGSDKKHLCSRKHSLEVTQEEVQREQSQREAPLQSLDENVCDVPPLSRARPVEQGCLKRPVSRKVGRQESVDDLDRDKLKAKVVVKKADGFPEKQESHQKSHGPGSDLENFALFKLEEREKKVYPKAVERSSTFENKASMQEAPPLGSLLKDALHKQASVRASEGAMSDGRVPAEHRQGGGDFRRAPAPGTLQDGLCHSLDRGISGKGEGTEKSSQAKELLRCEKLDSKLANIDYLRKKMSLEDKEDNLCPVLKPKMTAGSHECLPGNPVRPTGGQQEPPPASESRAFVSSTHAAQMSAVSFVPLKALTGRVDSGTEKPGLVAPESPVRKSPSEYKLEGRSVSCLKPIEGTLDIALLSGPQASKTELPSPESAQSPSPSGDVRASVPPVLPSSSGKKNDTTSARELSPSSLKMNKSYLLEPWFLPPSRGLQNSPAVSLPDPEFKRDRKGPHPTARSPGTVMESNPQQREGSSPKHQDHTTDPKLLTCLGQNLHSPDLARPRCPLPPEASPSREKPGLRESSERGPPTARSERSAARADTCREPSMELCFPETAKTSDNSKNLLSVGRTHPDFYTQTQAMEKAWAPGGKTNHKDGPGEARPPPRDNSSLHSAGIPCEKELGKVRRGVEPKPEALLARRSLQPPGIESEKSEKLSSFPSLQKDGAKEPERKEQPLQRHPSSIPPPPLTAKDLSSPAARQHCSSPSHASGREPGAKPSTAEPSSSPQDPPKPVAAHSESSSHKPRPGPDPGPPKTKHPDRSLSSQKPSVGATKGKEPATQSLGGSSREGKGHSKSGPDVFPATPGSQNKASDGIGQGEGGPSVPLHTDRAPLDAKPQPTSGGRPLEVLEKPVHLPRPGHPGPSEPADQKLSAVGEKQTLSPKHPKPSTVKDCPTLCKQTDNRQTDKSPSQPAANTDRRAEGKKCTEALYAPAEGDKLEAGLSFVHSENRLKGAERPAAGVGKGFPEARGKGPGPQKPPTEADKPNGMKRSPSATGQSSFRSTALPEKSLSCSSSFPETRAGVREASAASSDTSSAKAAGGMLELPAPSNRDHRKAQPAGEGRTHMTKSDSLPSFRVSTLPLESHHPDPNTMGGASHRDRALSVTATVGETKGKDPAPAQPPPARKQNVGRDVTKPSPAPNTDRPISLSNEKDFVVRQRRGKESLRSSPHKKAL

SEQ ID NO: 1924 - protein, 543 aa, Homo sapiens
MSRESDVEAQQSHGSSACSQPHGSVTQSQGSSSQSQGISSSSTSTMPNSSQSSHSSSGTLSSLETVSTQELYSIPEDQEPEDQEPEEPTPAPWARLWALQDGFANLECVNDNYWFGRDKSCEYCFDEPLLKRTDKYRTYSKKHFRIFREVGPKNSYIAYIEDHSGNGTFVNTELVGKGKRRPLNNNSEIALSLSRNKVFVFFDLTVDDQSVYPKALRDEYIMSKTLGSGACGEVKLAFERKTCKKVAIKIISKRKFAIGSAREADPALNVETEIEILKKLNHPCIIKIKNFFDAEDYYIVLELMEGGELFDKVVGNKRLKEATCKLYFYQMLLAVQYLHENGIIHRDLKPENVLLSSQEEDCLIKITDFGHSKILGETSLMRTLCGTPTYLAPEVLVSVGTAGYNRAVDCWSLGVILFICLSGYPPFSEHRTQVSLKDQITSGKYNFIPEVWAEVSEKALDLVKKLLVVDPKARFTTEEALRHPWLQDEDMKRKFQDLLSEENESTALPQVLAQPSTSRKRPREGEAEGAETTKRPAVCAAVL

SEQ ID NO: 1925 - protein, 231 aa, Homo sapiens
MAESLRSPRRSLYKLVGSPPWKEAFRQRCLERMRNSRDRLLNRYRQAGSSGPGNSQNSFLVQEVMEEEWNALQSVENCPEDLAQLEELIDMAVLEEIQQELINQEQSIISEYEKSLQFDEKCLSIMLAEWEANPLICPVCTKYNLRITSGVVVCQCGLSIPSHSSELTEQKLRACLEGSINEHSAHCPHTPEFSVTGGTEEKSSLLMSCLVSVSWDPLCGKRDLWLVLFPP

SEQ ID NO: 1926 - protein, 698 aa, Homo sapiens
MRLAVGALLVCAVLGLCLAVPDKTVRWCAVSEHEATKCQSFRDHMKSVIPSDGPSVACVKKASYLDCIRAIAANEADAVTLDAGLVYDAYLAPNNLKPVVAEFYGSKEDPQTFYYAVAVVKKDSGFQMNQLRGKKSCHTGLGRSAGWNIPIGLLYCDLPEPRKPLEKAVANFFSGSCAPCADGTDFPQLCQLCPGCGCSTLNQYFGYSGAFKCLKDGAGDVAFVKHSTIFENLANKADRDQYELLCLDNTRKPVDEYKDCHLAQVPSHTVVARSMGGKEDLIWELLNQAQEHFGKDKSKEFQLFSSPHGKDLLFKDSAHGFLKVPPRMDAKMYLGYEYVTAIRNLREGTCPEAPTDECKPVKWCALSHHERLKCDEWSVNSVGKIECVSAETTEDCIAKIMNGEADAMSLDGGFVYIAGKCGLVPVLAENYNKSDNCEDTPEAGYFAIAVVKKSASDLTWDNLKGKKSCHTAVGRTAGWNIPMGLLYNKINHCRFDEFFSEGCAPGSKKDSSLCKLCMGSGLNLCEPNNKEGYYGYTGAFRCLVEKGDVAFVKHQTVPQNTGGKNPDPWAKNLNEKDYELLCLDGTRKPVEEYANCHLARAPNHAVVTRKDKEACVHKILRQQQHLFGSNVTDCSGNFCLFRSETKDLLFRDDTVCLAKLHDRNTYEKYLGEEYVKAVGNLRKCSTSSLLEACTFRRP

SEQ ID NO: 1927 - protein, 1205 aa, Homo sapiens
MKVTVCFGRTGIVVPCKEGQLRVGELTQQALQRYLKTREKGPGYWVKIHHLEYTDGGILDPDDVLADVVEDKDKLIAVFEEQEPLHKIESPSGNPADRQSPDAFETEVAAQLAAFKPIGGEIEVTPSALKLGTPLLVRRSSDPVPGPPADTQPSASHPGGQSLKLVVPDSTQNLEDREVLNGVQTELLTSPRTKDTLSDMTRTVEISGEGGPLGIHVVPFFSSLSGRILGLFIRGIEDNSRSKREGLFHENECIVKINNVDLVDKTFAQAQDVFRQAMKSPSVLLHVLPPQNREQYEKSVIGSLNIFGNNDGVLKTKVPPPVHGKSGLKTANLTGTDSPETDASASLQQNKSPRVPRLGGKPSSPSLSPLMGFGSNKNAKKIKIDLKKGPEGLGFTVVTRDSSIHGPGPIFVKNILPKGAAIKDGRLQSGDRILEVNGRDVTGRTQEELVAMLRSTKQGETASLVIARQEGHFLPRELKGEPDCCALSLETSEQLTFEIPLNDSGSAGLGVSLKGNKSRETGTDLGIFIKSIIHGGAAFKDGRLRMNDQLIAVNGESLLGKSNHEAMETLRRSMSMEGNIRGMIQLVILRRPERPMEDPAECGAFSKPCFENCQNAVTTSRRNDNSILHPLGTCSPQDKQKGLLLPNDGWAESEVPPSPTPHSALGLGLEDYSHSSGVDSAVYFPDQHINFRSVTPARQPESINLKASKSMDLVPDESKVHSLAGQKSESPSKDFGPTLGLKKSSSLESLQTAVAEVRKNDLPFHRPRPHMVRGRGCNESFRAAIDKSYDGPEEIEADGLSDKSSHSGQGALNCESAPQGNSELEDMENKARKVKKTKEKEKKKEKGKLKVKEKKRKEENEDPERKIKKKGFGAMLRFGKKKEDKGGKAEQKGTLKHGGLREEELEKMKEERERIGAKHQELREKQARGLLDYATGAIGSVYDMDDDEMDPNYARVNHFREPCTSANVFRSPSPPRAGPFGYPRDGHPLSPERDHLEGLYAKVNKPYHPLVPADSGRPTGGSTDRIQKLRKEYYQARREGFPLYEDDEGRARPSEYDLLWVPGRGPDGNAHNLRFEGMERQYASLPRGGPADPVDYLPAAPRGLYKERELPYYPGAHPMHPPKGSYPRPTELRVADLRYPQHYPPPPAPQHKGPFRQDVPPSPPQHQRMPAYQETGRPGPRGGSPDQYPYRTQDSRQKNPMTAAV

SEQ ID NO: 1928 - protein, 95 aa, Homo sapiens
MTSKLAVALLAAFLISAALCEGAVLPRSAKELRCQCIKTYSKPFHPKFIKELRVIESGPHCANTEIIVKLSDGRELCLDPKENWVQRVVEKFLKR

SEQ ID NO: 1929 - protein, 423 aa, Homo sapiens
MRHLGAFLFLLGVLGALTEMCEIPEMDSHLVEKLGQHLLPWMDRLSLEHLNPSIYVGLRLSSLQAGTKEDLYLHSLKLGYQQCLLGEDDGDCQGKPSMGQLALYLLALRANCEFVRGHKGDRLVSQLKWFLEDEKRAIGHDHKGHPHTSYYQYGLGILALCLHQKRVHDSVVDKLLYAVEPFHQGHHSVDTAAMAGLAFTCLKRSNFNPGRRQRITMAIRTVREEILKAQTPEGHFGNVYSTPLALQFLMTSPMRGAELGTACLKARVALLASLQDGAFQNALMISQLLPVLNHKTYIDLIFPDCLAPRVMLEPAAETIPQTQEIISVTLQVLSLLPPYRQSISVLAGSTVEDVLKKAHELGGFTYETQASLSGPYLTSVMGKAAGEREFWQLLRDPNTPLLQGIADYRPKDGETIELRLVSW

SEQ ID NO: 1930 - protein, 350 aa, Homo sapiens
MSKEPLILWLMIEFWWLYLTPVTSETVVTEVLGHRVTLPCLYSSWSHNSNSMCWGKDQCPYSGCKEALIRTDGMRVTSRKSAKYRLQGTIPRGDVSLTILNPSESDSGVYCCRIEVPGWFNDVKINVRLNLQRASTTTHRTATTTTRRTTTTSPTTTRQMTTTPAALPTTVVTTPDLTTGTPLQMTTIAVFTTANTCLSLTPSTLPEEATGLLTPEPSKEGPILTAESETVLPSDSWSSVESTSADTVLLTSKASDTAVPEQNKTTKTGQMDGIPMSMKNEMPISQLLMIIAPSLGFVLFALFVAFLLRGKLMETYCSQKHTRLDYIGDSKNVLNDVQHGREDEDGLFTL

SEQ ID NO: 1931 - protein, 644 aa, Homo sapiens
MFSMRIVCLVLSVVGTAWTADSGEGDFLAEGGGVRGPRVVERHQSACKDSDWPFCSDEDWNYKCPSGCRMKGLIDEVNQDFTNRINKLKNSLFEYQKNNKDSHSLTTNIMEILRGDFSSANNRDNTYNRVSEDLRSRIEVLKRKVIEKVQHIQLLQKNVRAQLVDMKRLEVDIDIKIRSCRGSCSRALAREVDLKDYEDQQKQLEQVIAKDLLPSRDRQHLPLIKMKPVPDLVPGNFKSQLQKVPPEWKALTDMPQMRMELERPGGNEITRGGSTSYGTGSETESPRNPSSAGSWNSGSSGPGSTGNRNPGSSGTGGTATWKPGSSGPGSTGSWNSGSSGTGSTGNQNPGSPRPGSTGTWNPGSSERGSAGHWTSESSVSGSTGQWHSESGSFRPDSPGSGNARPNNPDWGTFEEVSGNVSPGTRREYHTEKLVTSKGDKELRTGKEKVTSGSTTTTRRSCSKTVTKTVIGPDGHKEVTKEVVTSEDGSDCPEAMDLGTLSGIGTLDGFRHRHPDEAAFFDTASTGKTFPGFFSPMLGEFVSETESRGSESGIFTNTKESSSHHPGIAEFPSRGKSSSYSKQFTSSTSYNRGDSTFESKSYKMADEAGSEADHEGTHSTKRGHAKSRPVRGIHTSPLGKPSLSP

SEQ ID NO: 1932 - protein, 1953 aa, Homo sapiens
MGVKKKKEMQVAALTICHQDLETLKSFADVEGKNLASLLLHCVQLTDGVSQIHYIKQIVPLLEKADKNGMCDPTIQSCLDILAGIYLSLSLKNPLKKVLASSLNSLPDFFLPEAMHRFTSRLQEELNTTDLYSYRKVTDNISSCMENFNLGRASVNNLLKNVLHFLQKSLIEILEENRKCAGNHIIQTQLMNDLLVGIRVSMMLVQKVQDFQGNLWKTSDSPIWQNMCGLLSIFTKVLSDDDLLQTVQSTSGLAIILFIKTMFHPSEKIPHLISSVLLRSVDCTSVPEWFMSSCRSLCCGDISQSAVLFLCQGTLAMLDWQNGSMGRSGEALLLDTAHVLFTLSSQIKEPTLEMFLSRILASWTNSAIQVLESSSPSLTDSLNGNSSIVGRLLEYVYTHWEHPLDALRHQTKIMFKNLLQMHRLTVEGADFVPDPFFVELTESLLRLEWHIKGKYTCLGCLVECIGVEHILAIDKTIPSQILEVMGDQSLVPYASDLLETMFRNHKSHLKSQTAESSWIDQWHETWVSPLLFILCEGNLDQKSYVIDYYLPKLLSYSPESLQYMVKILQTSIDAKTGQEQSFPSLGSCNSRGALGALMACLRIARAHGHLQSATDTWENLVSDARIKQGLIHQHCQVRIDTLGLLCESNRSTEIVSMEEMQWIQFFITYNLNSQSPGVRQQICSLLKKLFCRIQESSQVLYKLEQSKSKREPENELTKQHPSVSLQQYKNFMSSICNSLFEALFPGSSYSTRFSALTILGSIAEVFHVPEGRIYTVYQLSHDIDVGRFQTLMECFTSTFEDVKILAFDLLMKLSKTAVHFQDSGKLQGLFQAALELSTSTKPYDCVTASYLLNFLIWQDALPSSLSAYLTQQVACDNGDRPAAVVERNTLMVIKCLMENLEEEVSQAENSLLQAAAAFPMYGRVHCITGALQKLSLNSLQLVSEWRPVVEKLLLMSYRLSTVVSPVIQSSSPEGLIPMDTDSESASRLQMILNEIQPRDTNDYFNQAKILKEHDSFDMKDLNASVVNIDTSTEIKGKEVKTCDVTAQMVLVCCWRSMKEVALLLGMLCQLLPMQPVPESSDGLLTVEQVKEIGDYFKQHLLQSRHRGAFELAYTGFVKLTEVLNRCPNVSLQKLPEQWLWSVLEEIKCSDPSSKLCATRRSAGIPFYIQALLASEPKKGRMDLLKITMKELISLAGPTDDIQSTVPQVHALNILRALFRDTRLGENIIPYVADGAKAAILGFTSPVWAVRNSSTLLFSALITRIFGVKRAKDEHSKTNRMTGREFFSRFPELYPFLLKQLETVANTVDSDMGEPNRHPSMFLLLLVLERLYASPMDGTSSALSMGPFVPFIMRCGHSPVYHSREMAARALVPFVMIDHIPNTIRTLLSTLPSCTDQCFRQNHIHGTLLQVFHLLQAYSDSKHGTNSDFQHELTDITVCTKAKLWLAKRQNPCLVTRAVYIDILFLLTCCLNRSAKDNQPVLESLGFWEEVRGIISGSELITGFPWAFKVPGLPQYLQSLTRLAIAAVWAAAAKSGERETNVPISFSQLLESAFPEVRSLTLEALLEKFLAAASGLGEKGVPPLLCNMGEKFLLLAMKENHPECFCKILKILHCMDPGEWLPQTEHCVHLTPKEFLIWTMDIASNERSEIQSVALRLASKVISHHMQTCVENRELIAAELKQWVQLVILSCEDHLPTESRLAVVEVLTSTTPLFLTNPHPILELQDTLALWKCVLTLLQSEEQAVRDAATETVTTAMSQENTCQSTEFAFCQVDASIALALALAVLCDLLQQWDQLAPGLPILLGWLLGESDDLVACVESMHQVEEDYLFEKAEVNFWAETLIFVKYLCKHLFCLLSKSGWRPPSPEMLCHLQRMVSEQCHLLSQFFRELPPAAEFVKTVEFTRLRIQEERTLACLRLLAFLEGKEGEDTLVLSVWDSYAESRQLTLPRTEAAC

SEQ ID NO: 1933 - protein, 1939 aa, Homo sapiens
MTDAQMADFGAAAQYLRKSEKERLEAQTRPFDIRTECFVPDDKEEFVKAKILSREGGKVIAETENGKTVTVKEDQVLQQNPPKFDKIEDMAMLTFLHEPAVLFNLKERYAAWMIYTYSGLFCVTVNPYKWLPVYNAEVVAAYRGKKRSEAPPHIFSISDNAYQYMLTDRENQSILITGESGAGKTVNTKRVIQYFASIAAIGDRGKKDNANANKGTLEDQIIQANPALEAFGNAKTVRNDNSSRFGKFIRIHFGATGKLASADIETYLLEKSRVIFQLKAERNYHIFYQILSNKKPELLDMLLVTNNPYDYAFVSQGEVSVASIDDSEELMATDSAFDVLGFTSEEKAGVYKLTGAIMHYGNMKFKQKQREEQAEPDGTEDADKSAYLMGLNSADLLKGLCHPRVKVGNEYVTKGQSVQQVYYSIGALAKAVYEKMFNWMVTRINATLETKQPRQYFIGVLDIAGFEIFDFNSFEQLCINFTNEKLQQFFNHHMFVLEQEEYKKEGIEWTFIDFGMDLQACIDLIEKPMGIMSILEEECMFPKATDMTFKAKLYDNHLGKSNNFQKPRNIKGKQEAHFSLIHYAGTVDYNILGWLEKNKDPLNETVVALYQKSSLKLMATLFSSYATADTGDSGKSKGGKKKGSSFQTVSALHRENLNKLMTNLRTTHPHFVRCIIPNERKAPGVMDNPLVMHQLRCNGVLEGIRICRKGFPNRILYGDFRQRYRILNPVAIPEGQFIDSRKGTEKLLSSLDIDHNQYKFGHTKVFFKAGLLGLLEEMRDERLSRIITRMQAQARGQLMRIEFKKIVERRDALLVIQWNIRAFMGVKNWPWMKLYFKIKPLLKSAETEKEMATMKEEFGRIKETLEKSEARRKELEEKMVSLLQEKNDLQLQVQAEQDNLNDAEERCDQLIKNKIQLEAKVKEMNERLEDEEEMNAELTAKKRKLEDECSELKKDIDDLELTLAKVEKEKHATENKVKNLTEEMAGLDEIIAKLTKEKKALQEAHQQALDDLQVEEDKVNSLSKSKVKLEQQVDDLEGSLEQEKKVRMDLERAKRKLEGDLKLTQESIMDLENDKLQLEEKLKKKEFDINQQNSKIEDEQVLALQLQKKLKENQARIEELEEELEAERTARAKVEKLRSDLSRELEEISERLEEAGGATSVQIEMNKKREAEFQKMRRDLEEATLQHEATAAALRKKHADSVAELGEQIDNLQRVKQKLEKEKSEFKLELDDVTSNMEQIIKAKANLEKVSRTLEDQANEYRVKLEEAQRSLNDFTTQRAKLQTENGELARQLEEKEALISQLTRGKLSYTQQMEDLKRQLEEEGKAKNALAHALQSARHDCDLLREQYEEETEAKAELQRVLSKANSEVAQWRTKYETDAIQRTEELEEAKKKLAQRLQDAEEAVEAVNAKCSSLEKTKHRLQNEIEDLMVDVERSNAAAAALDKKQRNFDKILAEWKQKYEESQSELESSQKEARSLSTELFKLKNAYEESLEHLETFKRENKNLQEEISDLTEQLGEGGKNVHELEKVRKQLEVEKLELQSALEEAEASLEHEEGKILRAQLEFNQIKAEIERKLAEKDEEMEQAKRNHQRVVDSLQTSLDAETRSRNEVLRVKKKMEGDLNEMEIQLSHANRMAAEAQKQVKSLQSLLKDTQIQLDDAVRANDDLKENIAIVERRNNLLQAELEELRAVVEQTERSRKLAEQELIETSERVQLLHSQNTSLINQKKKMESDLTQLQSEVEEAVQECRNAEEKAKKAITDAAMMAEELKKEQDTSAHLERMKKNMEQTIKDLQHRLDEAEQIALKGGKKQLQKLEARVRELEGELEAEQKRNAESVKGMRKSERRIKELTYQTEEDKKNLLRLQDLVDKLQLKVKAYKRQAEEAEEQANTNLSKFRKVQHELDEAEERADIAESQVNKLRAKSRDIGAKQKMHDEE

SEQ ID NO: 1934 - protein, 359 aa, Homo sapiens
MPSSVSWGILLLAGLCCLVPVSLAEDPQGDAAQKTDTSHHDQDHPTFNKITPNLAEFAFSLYRQLAHQSNSTNIFFSPVSIATAFAMLSLGTKADTHDEILEGLNFNLTEIPEAQIHEGFQELLRTLNQPDSQLQLTTGNGLFLSEGLKLVDKFLEDVKKLYHSEAFTVNFGDTEEAKKQINDYVEKGTQGKIVDLVKELDRDTVFALVNYIFFKGKWERPFEVKDTEEEDFHVDQVTTVKVPMMKRLGMFNIQHCKKLSSWVLLMKYLGNATAIFFLPDEGKLQHLENELTHDIITKFLENEDRRSASLHLPKLSITGTYDLKSVLGQLGITKVFSNGADLSGVTEEAPLKLSKVRSP

SEQ ID NO: 1935 - protein, 2568 aa, Homo sapiens
MAISSRLALWEQKIREEDKSPPPSSPPPLFSVIPGGFIKQLVRGTEKEAKEARQRKQLAVASPEREIPEISISQPNSKSSSGTRSGSQQISQDDQSSSPGSSDILGKESEGSRSPDPEQMTSINGEKAQELGSSATPTKKTVPFKRGVRRGDVLLMVAKLDPDSAKPEKTHPHDAPPCKTSPPATDTGKEKKGETSRTPCGSQASTEILAPKAEKTRTGGLGDPGQGTVALKKGEEGQSIVGKGLGTPKTTELKEAEPQGKDRQGTRPQAQGPGEGVRPGKAEKEGAEPTNTVEKGNVSKDVGSEGKHVRPQIPGRKWGGFLGRRSKWDGPQNKKDKEGVLLSKAEKTGEPQTQMEKTSQVQGELGDDLRMGEKAGELRSTTGKAGESWDKKEKMGQPQGKSGNAGEARSQTEKGCEAPKEVSTMVESPAAPGKGGWPGSRGQEAEEPCSRAGDGAGALETELEGPSQPALEKDAERPRIRKENQDGPAPQEEGKGGQSRDSDQAPEDRWYEAEKVWLAQKDGFTLATVLKPDEGTADLPAGRVRLWIDADKTITEVDEEHVHRANPPELDQVEDLASLISVNESSVLNTLLQRYKAQLLHTCTGPDLIVLQPRGPSVPSAGKVPKGRRDGLPAHIGSMAQRAYWALLNQRRDQSIVALGWSGAGKTTCCEQVLEHLVGMAGSVDGRVSVEKIRATFTVLRAFGSVSMAHSRSATRFSMVMSLDFNATGRITAAQLQTMLLEKSRVARQPEGESNFLVFSQMLAGLDLDLRTELNLHQMADSSSFGMGVWSKPEDKQKAAAAFAQLQGAMEMLGISESEQRAVWRVLAAIYHLGAAGACKVGRKQFMRFEWANYAAEALGCEYEELNTATFKHHLRQIIQQMTFGPSRWGLEDEETSSGLKMTGVDCVEGMASGLYQELFAAVVSLINRSFSSHHLSMASIMVVDSPGFQNPRHQGKDRAATFEELCHNYAHERLQLLFYQRTFVSTLQRYQEEGVPVQFDLPDPSPGTTVAVVDQNPSQQVRLPAGGGAQDARGLFWVLDEEVHVEGSSDSVVLERLCAAFEKKGAGTEGSSALRTCEQPLQCEIFHQLGWDPVRYDLTGWLHRAKPNLSALDAPQVLHQSKREELRSLFQARAKLPPVCRAVAGLEGTSQQALQRSRMVRRTFASSLAAVRRKAPCSQIKLQMDALTSMIKRSRLHFIHCLVPNPVVESRSGQESPPPPQPGRDKPGAGGPLALDIPALRVQLAGFHILEALRLHRTGYADHMGLTRFRRQFQVLDAPLLKKLMSTSEGIDERKAVEELLETLDLEKKAVAVGHSQVFLKAGVISRLEKQREKLVSQSIVLFQAACKGFLSRQEFKKLKIRRLAAQCIQKNVAVFLAVKDWPWWQLLGSLQPLLSATIGTEQLRAKEEELTTLRRKLEKSEKLRNELRQNTDLLESKIADLTSDLADERFKGDVACQVLESERAERLQAFREVQELKSKHEQVQKKLGDVNKQLEEAQQKIQLNDLERNPTGGADEWQMRFDCAQMENEFLRKRLQQCEERLDSELTARKELEQKLGELQSAYDGAKKMAHQLKRKCHHLTCDLEDTCVLLENQQSRNHELEKKQKKFDLQLAQALGESVFEKGLREKVTQENTSVRWELGQLQQQLKQKEQEASQLKQQVEMLQDHKRELLGSPSLGENCVAGLKERLWKLESSALEQQKIQSQQENTIKQLEQLRQRFELEIERMKQMHQKDREDQEEELEDVRQSCQKRLHQLEMQLEQEYEEKQMVLHEKQDLEGLIGTLCDQIGHRDFDVEKRLRRDLRRTHALLSDVQLLLGTMEDGKTSVSKEELEKVHSQLEQSEAKCEEALKTQKVLTADLESMHSELENMTRNKSLVDEQLYRLQFEKADLLKRIDEDQDDLNELMQKHKDLIAQSAADIGQIQELQLQLEEAKKEKHKLQEQLQVAQMRIEYLEQSTVDRAIVSRQEAVICDLENKTEFQKVQIKRFEVLVIRLRDSLIKMGEELSQAATSESQQRESSQYYQRRLEELKADMEELVQREAEASRRCMELEKYVEELAAVRQTLQTDLETSIRRIADLQAALEEVASSDSDTESVQTAVDCGSSGRKEMDNVSILSSQPEGSLQSWLSCTLSLATDTMRTPSRQSATSSRILSPRINEEAGDTERTQSALALSRARSTNVHSKTSGDKPVSPHFVRRQKYCHFGDGEVLAVQRKSTERLEPASSPLASRSTNTSPLSREKLPSPSAALSEFVEGLRRKRAQRGQGSTLGLEDWPTLPIYQTTGASTLRRGRAGSDEGNLSLRVGAKSPLEIEGAAGGLLRSTSLKCISSDGVGGTTLLPEKSKTQFSSCESLLESRPSMGRKLSSPTTPRDMLLSPTLRPRRRCLESSVDDAGCPDLGKEPLVFQNRQFAHLMEEPLGSDPFSWKLPSLDYERKTKVDFDDFLPAIRKPQTPTSLAGSAKGGQDGSQRSSIHFETEEANRSFLSGIKTILKKSPEPKEDPAHLSDSSSSSGSIVSFKSADSIKSRPGIPRLAGDGGERTSPERREPGTGRKDDDVASIMKKYLQK

SEQ ID NO: 1936 - protein, 1192 aa, Homo sapiens
KLFCRIQESSQVLYKLEQSKSKREPENELTKQHPSVSLQQYKNFMSSICNSLFEALFPGSSYSTRFSALTILGSIAEVFHVPEGRIYTVYQLSHDIDVGRFQTLMECFTSTFEDVKILAFDLLMKLSKTAVHFQDSGKLQGLFQAALELSTSTKPYDCVTASYLLNFLIWQDALPSSLSAYLTQQVACDNGDRPAAVVERNTLMVIKCLMENLEEEVSQAENSLLQAAAAFPMYGRVHCITGALQKLSLNSLQLVSEWRPVVEKLLLMSYRLSTVVSPVIQSSSPEGLIPMDTDSESASRLQMILNEIQPRDTNDYFNQAKILKEHDSFDMKDLNASVVNIDTSTEIKGKEVKTCDVTAQMVLVCCWRSMKEVALLLGMLCQLLPMQPVPESSDGLLTVEQVKEIGDYFKQHLLQSRHRGAFELAYTGFVKLTEVLNRCPNVSLQKLPEQWLWSVLEEIKCSDPSSKLCATRRSAGIPFYIQALLASEPKKGRMDLLKITMKELISLAGPTDDIQSTVPQVHALNILRALFRDTRLGENIIPYVADGAKAAILGFTSPVWAVRNSSTLLFSALITRIFGVKRAKDEHSKTNRCGHSPVYHSREMAARALVPFVMIDHIPNTIRTLLSTLPSCTDQCFRQNHIHGTLLQVFHLLQAYSDSKHGTNSDFQHELTDITVCTKAKLWLAKRQNPCLVTRAVYIDILFLLTCCLNRSAKDNQPVLESLGFWEEVRGIISGSELITGFPWAFKVPGLPQYLQSLTRLAIAAVWAAAAKSGERETNVPISFSQLLESAFPEVRSLTLEALLEKFLAAASGLGEKGVPPLLCNMGEKFLLLAMKENHPECFCKILKILHCMDPGEWLPQTEHCVHLTPKEFLIWTMDIASNERSEIQSVALRLASKVISHHMQTCVENRELIAAELKQWVQLVILSCEDHLPTESRLAVVEVLTSTTPLFLTNPHPILELQDTLALWKCVLTLLQSEEQAVRDAATETVTTAMSQENTCQSTEFAFCQVDASIALALALAVLCDLLQQWDQLAPGLPILLGWLLGESDDLVACVESMHQVEEDYLFEKAEVNFWAETLIFVKYLCKHLFCLLSKSGWRPPSPEMLCHLQRMVSEQCHLLSQFFRELPPAAEFVKTVEFTRLRIQEERTLACLRLLAFLEGKEGEDTLVLSVWDSYAESRQLTLPRTEAAC

SEQ ID NO: 1937 - protein, 1984 aa, Homo sapiens
MELTPGAQQQGINYQELTSGWQDVKSMMLVPEPTRKFPSGPLLTSVRFSNLSPESQQQDVKSLEFTVEPKLQSVKHVKLSSVSLQQTIKSVELAPGSLPQRVKYGEQTPRTNYQIMESSELIPRPGHQFAKYAEMIPQPKYQIPKSANLISIPIYHATESSEMAQGLAYKGIDTVEKSVGLTPKLTGRAKESLGMLLQPDLQVPKFVDLTPMVRDQGSKFLGLTPEKSYQILETMELLSQSRPRVKDVGELYMKPLQQTVEYEGITPELKHYFTEAMGLTAEARIQANEFFGMTPKPTSQATGFAERSPRLCPQNLECVEVISEKRLQGEESVVLIPKSLHHVPDSASGMTPGLGHRVPESVELTSKSGVQVEKTLQLTPKPQHHVGSPGIISGLGHQVPESVNLTCKQWLQMEESLEVPLKQTSQVIGHEESVELTSEARQHREVSMGLTKSKNQSMKSPGTTPGPLGRIVEFMRISPEPLDQVTESARTQLQVAQSEEVILIDVPKVVQSVKVTPGPPFQIVKSVTIPRPTPQMVEYIELTPKLQYVRPSEHHTGPCLQDVKSTKLITKPKHQILETVELTGFQIVKTMLIPGPSLQIVKSEELAPGPIPQVVEPIGVALESGIEAINCVDLLPRPHLQELIVPAELTPSPCTQVKSAELTSPQTSPFEEHTILTHKQGLQAVKSTVIKTEPPKVMETEDLNLGHVCQNRDCQKLTSEELQVGTDFSRFLQSSSTTLISSSVRTASELGGLWDSGIQEVSRALDIKNPGTDILQPEETYIDPTMIQSLTFPLALHNQSSDKTANIVENPCPEILGVDVISKETTKRKQMEELENSLQRHLPQSWRSRSRTFQAESGVQKGLIKSFPGRQHNVWESHAWRQRLPRKYLSTMLMLGNILGTTMERKLCSQTSLAERATADTCQSIQNLFGIPAELMEPSQSLPEKGPVTISQPSVVKNYIQRHTFYHGHKKRMALRIWTRGSTSSIIQQYSGTRVRIKKTNSTFNGISQEVIQHMPVSCAGGQLPVLVKSESSLSIFYDREDLVPMEESEDSQSDSQTRISESQHSLKPNYLSQAKTDFSEQFQLLEDLQLKIAAKLLRSQIPPDVPPPLASGLVLKYPICLQCGRCSGLNCHHKLQTTSGPYLLIYPQLHLVRTPEGHGEVRLHLGFRLRIGKRSQISKYRERDRPVIRRSPISPSQRKAKIYTQASKSPTSTIDLQSGPSQSPAPVQVYIRRGQRSRPDLVEKTKTRAPGHYEFTQVHNLPESDSESTQNEKRAKVRTKKTSDSKYPMKRITKRLRKHRKFYTNSRTTIESPSRELAAHLRRKRIGATQTSTASLKRQPKKPSQPKFMQLLFQSLKRAFQTAHRVIASVGRKPVDGTRPDNLWASKNYYPKQNARDYCLPSSIKRDKRSADKLTPAGSTIKQEDILWGGTVQCRSAQQPRRAYSFQPRPLRLPKPTDSQSGIAFQTASVGQPLRTVQKDSSSRSKKNFYRNETSSQESKNLSTPGTRVQARGRILPGSPVKRTWHRHLKDKLTHKEHNHPSFYRERTPRGPSERTRHNPSWRNHRSPSERSQRSSLERRHHSPSQRSHCSPSRKNHSSPSERSWRSPSQRNHCSPPERSCHSLSERGLHSPSQRSHRGPSQRRHHSPSERSHRSPSERSHRSSSERRHRSPSQRSHRGPSERSHCSPSERRHRSPSQRSHRGPSERRHHSPSKRSHRSPARRSHRSPSERSHHSPSERSHHSPSERRHHSPSERSHCSPSERSHCSPSERRHRSPSERRHHSPSEKSHHSPSERSHHSPSERRRHSPLERSRHSLLERSHRSPSERRSHRSFERSHRRISERSHSPSEKSHLSPLERSRCSPSERRGHSSSGKTCHSPSERSHRSPSGMRQGRTSERSHRSSCERTRHSPSEMRPGRPSGRNHCSPSERSRRSPLKEGLKYSFPGERPSHSLSRDFKNQTTLLGTTHKNPKAGQVWRPEATR

SEQ ID NO: 1938 - protein, 1341 aa, Homo sapiens
MKHLYGLFHYNPMMLGLESLPDPTDTWEIIETIGKGTYGKVYKVTNKRDGSLAAVKILDPVSDMDEEIEAEYNILQFLPNHPNVVKFYGMFYKADHCVGGQLWLVLELCNGGSVTELVKGLLRCGQRLDEAMISYILYGALLGLQHLHNNRIIHRDVKGNNILLTTEGGVKLVDFGVSAQLTSTRLRRNTSVGTPFWMAPEVIACEQQYDSSYDARCDVWSLGITAIELGDGDPPLFDMHPVKTLFKIPRNPPPTLLHPEKWCEEFNHFISQCLIKDFERRPSVTHLLDHPFIKGVHGKVLFLQKQLAKVLQDQKHQNPVAKTRHERMHTRRPYHVEDAEKYCLEDDLVNLEVLDEDTIIHQLQKRYADLLIYTYVGDILIALNPFQNLSIYSPQFSRLYHGVKRASNPPHIFASADAAYQCMVTLSKDQCIVISGESGSGKTESAHLIVQHLTFLGKANNQTLREKILQVNSLVEAFGNSCTAINDNSSRFGKYLEMMFTPTGVVMGARISEYLLEKSRVIKQAAREKNFHIFYYIYAGLHHQKKLSDFRLPEEKPPRYIADETGRVMHDITSKESYRRQFEAIQHCFRIIGFTDKEVHSVYRILAGILNIGNIEFAAISSQHQTDKSEVPNAEALQNAASVLCISPEELQEALTSHCVVTRGETIIRANTVDRAADVRDAMSKALYGRLFSWIVNRINTLLQPDENICSAGGGMNVGILDIFGFENFQRNSFEQLCINIANEQIQYYFNQHVFALEQMEYQNEGIDAVPVEYEDNRPLLDMFLQKPLGLLALLDEESRFPQATDQTLVDKFEDNLRCKYFWRPKGVELCFGIQHYAGKVLYDASGVLEKNRDTLPADVVVVLRTSENKLLQQLFSIPLTKTGNLAQTRARITVASSSLPPHFSAGKAKVDTLEVIRHPEETTNMKRQTVASYFRYSLMDLLSKMVVGQPHFVRCIKPNDDREALQFSRERVLAQLRSTGILETVSIRRQGYSHRILFEEFVKRYYYLAFTAHQTPLASKESCVAILEKSRLDHWVLGKTKVFLKYYHVEQLNLLLREVIGRVVVLQAYTKGWLGARRYKRVREKREKGAIAIQSAWRGYDARRKFKKISNRRNESAAHNQAGDTSNQSSGPHSPVAAGTRGSAEVQDCSEPGDHKVLRGSVHRRSHSQAESNNGRTQTSSNSPAVTEKNGHSQAQSSPKGCDIFAGHANKHSVSGTDLLSSRICHPAPDQQGLSLWGAPQKPGSENGLAQKHRTPRRRCQQPKMLSSPEDTMYYNQLNGTLEYQGSKRKPRKLGQIKVLDGEDEYYKSLSPVDCIPEENNSAHPSFFSSSSKGDSFAQH

SEQ ID NO: 1939 - protein, 6669 aa, Homo sapiens
MADDEDYEEVVEYYTEEVVYEEVPGETITKIYETTTTRTSDYEQSETSKPALAQPALAQPASAKPVERRKVIRKKVDPSKFMTPYIAHSQKMQDLFSPNKYKEKFEKTKGQPYASTTDTPELRRIKKVQDQLSEVKYRMDGDVAKTICHVDEKAKDIEHAKKVSQQVSKVLYKQNWEDTKDKYLLPPDAPELVQAVKNTAMFSKKLYTEDWEADKSLFYPYNDSPELRRVAQAQKALSDVAYKKGLAEQQAQFTPLADPPDIEFAKKVTNQVSKQKYKEDYENKIKGKWSETPCFEVANARMNADNISTRKYQEDFENMKDQIYFMQTETPEYKMNKKAGVAASKVKYKEDYEKNKGKADYNVLPASENPQLRQLKAAGDALSDKLYKENYEKTKAKSINYCETPKFKLDTVLQNFSSDKKYKDSYLKDILGHYVGSFEDPYHSHCMKVTAQNSDKNYKAEYEEDRGKGFFPQTITQEYEAIKKLDQCKDHTYKVHPDKTKFTQVTDSPVLLQAQVNSKQLSDLNYKAKHESEKFKCHIPPDTPAFIQHKVNAYNLSDNLYKQDWEKSKAKKFDIKVDAIPLLAAKANTKNTSDVMYKKDYEKNKGKMIGVLSINDDPKMLHSLKVAKNQSDRLYKENYEKTKAKSMNYCETPKYQLDTQLKNFSEARYKDLYVKDVLGHYVGSMEDPYHTHCMKVAAQNSDKSYKAEYEEDKGKCYFPQTITQEYEAIKKLDQCKDHTYKVHPDKTKFTAVTDSPVLLQAQLNTKQLSDLNYKAKHEGEKFKCHIPADAPQFIQHRVNAYNLSDNVYKQDWEKSKAKKFDIKVDAIPLLAAKANTKNTSDVMYKKDYEKSKGKMIGALSINDDPKMLHSLKTAKNQSDREYRKDYEKSKTIYTAPLDMLQVTQAKKSQAIASDVDYKHILHSYSYPPDSINVDLAKKAYALQSDVEYKADYNSWMKGCGWVPFGSLEMEKAKRASDILNEKKYRQHPDTLKFTSIEDAPITVQSKINQAQRSDIAYKAKGEEIIHKYNLPPDLPQFIQAKVNAYNISENMYKADLKDLSKKGYDLRTDAIPIRAAKAARQAASDVQYKKDYEKAKGKMVGFQSLQDDPKLVHYMNVAKIQSDREYKKDYEKTKSKYNTPHDMFNVVAAKKAQDVVSNVNYKHSLHHYTYLPDAMDLELSKNMMQIQSDNVYKEDYNNWMKGIGWIPIGSLDVEKVKKAGDALNEKKYRQHPDTLKFTSIVDSPVMVQAKQNTKQVSDILYKAKGEDVKHKYTMSPDLPQFLQAKCNAYNISDVCYKRDWYDLIAKGNNVLGDAIPITAAKASRNIASDYKYKEAYEKSKGKHVGFRSLQDDPKLVHYMNVAKLQSDREYKKNYENTKTSYHTPGDMVSITAAKMAQDVATNVNYKQPLHHYTYLPDAMSLEHTRNVNQIQSDNVYKDEYNSFLKGIGWIPIGSLEVEKVKKAGDALNERKYRQHPDTVKFTSVPDSMGMVLAQHNTKQLSDLNYKVEGEKLKHKYTIDPELPQFIQAKVNALNMSDAHYKADWKKTIAKGYDLRPDAIPIVAAKSSRNIASDCKYKEAYEKAKGKQVGFLSLQDDPKLVHYMNVAKIQSDREYKKGYEASKTKYHTPLDMVSVTAAKKSQEVATNANYRQSYHHYTLLPDALNVEHSRNAMQIQSDNLYKSDFTNWMKGIGWVPIESLEVEKAKKAGEILSEKKYRQHPEKLKFTYAMDTMEQALNKSNKLNMDKRLYTEKWNKDKTTIHVMPDTPDILLSRVNQITMSDKLYKAGWEEEKKKGYDLRPDAIAIKAARASRDIASDYKYKKAYEQAKGKHIGFRSLEDDPKLVHFMQVAKMQSDREYKKGYEKSKTSFHTPVDMLSVVAAKKSQEVATNANYRNVIHTYNMLPDAMSFELAKNMMQIQSDNQYKADYADFMKGIGWLPLGSLEAEKNKKAMEIISEKKYRQHPDTLKYSTLMDSMNMVLAQNNAKIMNEHLYKQAWEADKTKVHIMPDIPQIILAKANAINMSDKLYKLSLEESKKKGYDLRPDAIPIKAAKASRDIASDYKYKYNYEKGKGKMVGFRSLEDDPKLVHSMQVAKMQSDREYKKNYENTKTSYHTPADMLSVTAAKDAQANITNTNYKHLIHKYILLPDAMNIELTRNMNRIQSDNEYKQDYNEWYKGLGWSPAGSLEVEKAKKATEYASDQKYRQHPSNFQFKKLTDSMDMVLAKQNAHTMNKHLYTIDWNKDKTKIHVMPDTPDILQAKQNQTLYSQKLYKLGWEEALKKGYDLPVDAISVQLAKASRDIASDYKYKQGYRKQLGHHVGFRSLQDDPKLVLSMNVAKMQSEREYKKDFEKWKTKFSSPVDMLGVVLAKKCQELVSDVDYKNYLHQWTCLPDQNDVVQAKKVYELQSENLYKSDLEWLRGIGWSPLGSLEAEKNKRASEIISEKKYRQPPDRNKFTSIPDAMDIVLAKTNAKNRSDRLYREAWDKDKTQIHIMPDTPDIVLAKANLINTSDKLYRMGYEELKRKGYDLPVDAIPIKAAKASREIASEYKYKEGFRKQLGHHIGARNIEDDPKMMWSMHVAKIQSDREYKKDFEKWKTKFSSPVDMLGVVLAKKCQTLVSDVDYKNYLHQWTCLPDQSDVIHARQAYDLQSDNLYKSDLQWLKGIGWMTSGSLEDEKNKRATQILSDHVYRQHPDQFKFSSLMDSIPMVLAKNNAITMNHRLYTEAWDKDKTTVHIMPDTPEVLLAKQNKVNYSEKLYKLGLEEAKRKGYDMRVDAIPIKAAKASRDIASEFKYKEGYRKQLGHHIGARAIRDDPKMMWSMHVAKIQSDREYKKDFEKWKTKFSSPVDMLGVVLAKKCQTLVSDVDYKNYLHQWTCLPDQSDVIHARQAYDLQSDNMYKSDLQWMRGIGWVSIGSLDVEKCKRATEILSDKIYRQPPDRFKFTSVTDSLEQVLAKNNALNMNKRLYTEAWDKDKTQIHIMPDTPEIMLARQNKINYSETLYKLANEEAKKKGYDLRSDAIPIVAAKASRDVISDYKYKDGYRKQLGHHIGARNIEDDPKMMWSMHVAKIQSDREYKKDFEKWKTKFSSPVDMLGVVLAKKCQTLVSDVDYKNYLHEWTCLPDQNDVIHARQAYDLQSDNIYKSDLQWLRGIGWVPIGSMDVVKCKRAAEILSDNIYRQPPDKLKFTSVTDSLEQVLAKNNALNMNKRLYTEAWDKDKTQVHIMPDTPEIMLARQNKINYSESLYRQAMEEAKKEGYDLRSDAIPIVAAKASRDIASDYKYKEAYRKQLGHHIGARAVHDDPKIMWSLHIAKVQSDREYKKDFEKYKTRYSSPVDMLGIVLAKKCQTLVSDVDYKHPLHEWICLPDQNDIIHARKAYDLQSDNLYKSDLEWMKGIGWVPIDSLEVVRAKRAGELLSDTIYRQRPETLKFTSITDTPEQVLAKNNALNMNKRLYTEAWDNDKKTIHVMPDTPEIMLAKLNRINYSDKLYKLALEESKKEGYDLRLDAIPIQAAKASRDIASDYKYKEGYRKQLGHHIGARNIKDDPKMMWSIHVAKIQSDREYKKEFEKWKTKFSSPVDMLGVVLAKKCQILVSDIDYKHPLHEWTCLPDQNDVIQARKAYDLQSDAIYKSDLEWLRGIGWVPIGSVEVEKVKRAGEILSDRKYRQPADQLKFTCITDTPEIVLAKNNALTMSKHLYTEAWDADKTSIHVMPDTPDILLAKSNSANISQKLYTKGWDESKMKDYDLRADAISIKSAKASRDIASDYKYKEAYEKQKGHHIGAQSIEDDPKIMCAIHAGKIQSEREYKKEFQKWKTKFSSPVDMLSILLAKKCQTLVTDIDYRNYLHEWTCMPDQNDIIQAKKAYDLQSDALYKADLEWLRGIGWMPQGSPEVLRVKNAQNIFCDSVYRTPVVNLKYTSIVDTPEVVLAKSNAENISIPKYREVWDKDKTSIHIMPDTPEINLARANALNVSNKLYREGWDEMKAGCDVRLDAIPIQAAKASREIASDYKYKLDHEKQKGHYVGTLTARDDNKIRWALIADKLQNEREYRLDWAKWKAKIQSPVDMLSILHSKNSQALVSDMDYRNYLHQWTCMPDQNDVIQAKKAYELQSDNVYKADLEWLRGIGWMPNDSVSVNHAKHAADIFSEKKYRTKIETLNFTPVDDRVDYVTAKQSGEILDDIKYRKDWNATKSKYTLTETPLLHTAQEAARILDQYLYKEGWERQKATGYILPPDAVPFVHAHHCNDVQSELKYKAEHVKQKGHYVGVPTMRDDPKLVWFEHAGQIQNERLYKEDYHKTKAKINIPADMVSVLAAKQGQTLVSDIDYRNYLHQWMCHPDQNDVIQARKAYDLQSDNVYRADLEWLRGIGWIPLDSVDHVRVTKNQEMMSQIKYKKNALENYPNFRSVVDPPEIVLAKINSVNQSDVKYKETFNKAKGKYTFSPDTPHISHSKDMGKLYSTILYKGAWEGTKAYGYTLDERYIPIVGAKHADLVNSELKYKETYEKQKGHYLAGKVIGEFPGVVHCLDFQKMRSALNYRKHYEDTKANVHIPNDMMNHVLAKRCQYILSDLEYRHYFHQWTSLLEEPNVIRVRNAQEILSDNVYKDDLNWLKGIGCYVWDTPQILHAKKSYDLQSQLQYTAAGKENLQNYNLVTDTPLYVTAVQSGINASEVKYKENYHQIKDKYTTVLETVDYDRTRNLKNLYSSNLYKEAWDRVKATSYILPSSTLSLTHAKNQKHLASHIKYREEYEKFKALYTLPRSVDDDPNTARCLRVGKLNIDRLYRSVYEKNKMKIHIVPDMVEMVTAKDSQKKVSEIDYRLRLHEWICHPDLQVNDHVRKVTDQISDIVYKDDLNWLKGIGCYVWDTPEILHAKHAYDLRDDIKYKAHMLKTRNDYKLVTDTPVYVQAVKSGKQLSDAVYHYDYVHSVRGKVAPTTKTVDLDRALHAYKLQSSNLYKTSLRTLPTGYRLPGDTPHFKHIKDTRYMSSYFKYKEAYEHTKAYGYTLGPKDVPFVHVRRVNNVTSERLYRELYHKLKDKIHTTPDTPEIRQVKKTQEAVSELIYKSDFFKMQGHMISLPYTPQVIHCRYVGDITSDIKYKEDLQVLKGFGCFLYDTPDMVRSRHLRKLWSNYLYTDKARKMRDKYKVVLDTPEYRKVQELKTHLSELVYRAAGKKQKSIFTSVPDTPDLLRAKRGQKLQSQYLYVELATKERPHHHAGNQTTALKHAKDVKDMVSEKKYKIQYEKMKDKYTPVPDTPILIRAKRAYWNASDLRYKETFQKTKGKYHTVKDALDIVYHRKVTDDISKIKYKENYMSQLGIWRSIPDRPEHFHHRAVTDTVSDVKYKEDLTWLKGIGCYAYDTPDFTLAEKNKTLYSKYKYKEVFERTKSDFKYVADSPINRHFKYATQLMNEKKYRADYEQRKDKYHLVVDEPRHLLAKTAGDQISQIKYRKNYEKSKDKFTSIVDTPEHLRTTKVNKQISDILYKLEYNKAKPRGYTTIHDTPMLLHVRKVKDEVSDLKYKEVYQRNKSNCTIEPDAVHIKAAKDAYKVNTNLDYKKQYEANKAHWKWTPDRPDFLQAAKSSLQQSDFEYKLDREFLKGCKLSVTDDKNTVLALRNTLIESDLKYKEKHVKERGTCHAVPDTPQILLAKTVSNLVSENKYKDHVKKHLAQGSYTTLPETRDTVHVKEVTKHVSDTNYKKKFVKEKGKSNYSIMLEPPEVKHAMEVAKKQSDVAYRKDAKENLHYTTVADRPDIKKATQAAKQASEVEYRAKHRKEGSHGLSMLGRPDIEMAKKAAKLSSQVKYRENFDKEKGKTPKYNPKDSQLYKVMKDANNLASEVKYKADLKKLHKPVTDMKESLIMNHVLNTSQLASSYQYKKKYEKSKGHYHTIPDNLEQLHLKEATELQSIVKYKEKYEKERGKPMLDFETPTYITAKESQQMQSGKEYRKDYEESIKGRNLTGLEVTPALLHVKYATKIASEKEYRKDLEESIRGKGLTEMEDTPDMLRAKNATQILNEKEYKRDLELEVKGRGLNAMANETPDFMRARNATDIASQIKYKQSAEMEKANFTSVVDTPEIIHAQQVKNLSSQKKYKEDAEKSMSYYETVLDTPEIQRVRENQKNFSLLQYQCDLKNSKGKITVVQDTPEILRVKENQKNFSSVLYKEDVSPGTAIGKTPEMMRVKQTQDHISSVKYKEAIGQGTPIPDLPEVKRVKETQKHISSVMYKENLGTGIPTTVTPEIERVKRNQENFSSVLYKENLGKGIPTPITPEMERVKRNQENFSSVLYKENMGKGTPLAVTPEMERVKHNQENISSVLYKENVGKATATPVTPEMQRVKRNQENISSVLYKENLGKATPTPFTPEMERVKRNQENFSSVLYKENMRKATPTPVTPEMERAKRNQENISSVLYSDSFRKQIQGKAAYVLDTPEMRRVRETQRHISTVKYHEDFEKHKGCFTPVVTDPITERVKKNMQDFSDINYRGIQRKVVEMEQKRNDQDQETITGLRVWRTNPGSVFDYDPAEDNIQSRSLHMINVQAQRRSREQSRSASALSISGGEEKSEHSEAPDHHLSTYSDGGVFAVSTAYKHAKTTELPQQRSSSVATQQTTVSSIPSHPSTAGKIFRAMYDYMAADADEVSFKDGDAIINVQAIDEGWMYGTVQRTGRTGMLPANYVEAI

SEQ ID NO: 1940 - protein, 1705 aa, Homo sapiens
MASGSRWRPTPPPLLLLLLLALAARADGLEFGGGPGQWARYARWAGAASSGELSFSLRTNATRALLLYLDDGGDCDFLELLLVDGRLRLRFTLSCAEPATLQLDTPVADDRWHMVLLTRDARRTALAVDGEARAAEVRSKRREMQVASDLFVGGIPPDVRLSALTLSTVKYEPPFRGLLANLKLGERPPALLGSQGLRGATADPLCAPARNPCANGGLCTVLAPGEVGCDCSHTGFGGKFCSEEEHPMEGPAHLTLNSEVGSLLFSEGGAGRGGAGDVHQPTKGKEEFVATFKGNEFFCYDLSHNPIQSSTDEITLAFRTLQRNGLMLHTGKSADYVNLSLKSGAVWLVINLGSGAFEALVEPVNGKFNDNAWHDVRVTRNLRQHAGIGHAMVTISVDGILTTTGYTQEDYTMLGSDDFFYIGGSPNTADLPGSPVSNNFMGCLKDVVYKNNDFKLELSRLAKEGDPKMKLQGDLSFRCEDVAALDPVTFESPEAFVALPRWSAKRTGSISLDFRTTEPNGLLLFSQGRRAGGGAGSHSSAQRADYFAMELLDGHLYLLLDMGSGGIKLRASSRKVNDGEWCHVDFQRDGRKGSISVNSRSTPFLATGDSEILDLESELYLGGLPEGGRVDLPLPPEVWTAALRAGYVGCVRDLFIDGRSRDLRGLAEAQGAVGVAPFCSRETLKQCASAPCRNGGVCREGWNRFICDCIGTGFLGRVCEREATVLSYDGSMYMKIMLPNAMHTEAEDVSLRFMSQRAYGLMMATTSRESADTLRLELDGGQMKLTVNLDCLRVGCAPSKGPETLFAGHKLNDNEWHTVRVVRRGKSLQLSVDNVTVEGQMAGAHMRLEFHNIETGIMTERRFISVVPSNFIGHLSGLVFNGQPYMDQCKDGDITYCELNARFGLRAIVADPVTFKSRSSYLALATLQAYASMHLFFQFKTTAPDGLLLFNSGNGNDFIVIELVKGYIHYVFDLGNGPSLMKGNSDKPVNDNQWHNVVVSRDPGNVHTLKIDSRTVTQHSNGARNLDLKGELYIGGLSKNMFSNLPKLVASRDGFQGCLASVDLNGRLPDLIADALHRIGQVERGCDGPSTTCTEESCANQGVCLQQWDGFTCDCTMTSYGGPVCNDPGTTYIFGKGGALITYTWPPNDRPSTRMDRLAVGFSTHQRSAVLVRVDSASGLGDYLQLHIDQGTVGVIFNVGTDDITIDEPNAIVSDGKYHVVRFTRSGGNATLQVDSWPVNERYPAGNFDNERLAIARQRIPYRLGRVVDEWLLDKGRQLTIFNSQAAIKIGGRDQGRPFQGQVSGLYYNGLKVLALAAESDPNVRTEGHLRLVGEGPSVLLSAETTATTLLADMATTIMETTTTMATTTTRRGRSPTLRDSTTQNTDDLLVASAECPSDDEDLEECEPSTGGELILPIITEDSLDPPPVATRSPFVPPPPTFYPFLTGVGATQDTLPPPAARRPPSGGPCQAERDDSDCEEPIEASGFASGEVFDSSLPPTDDEDFYTTFPLVTDRTTLLSPRKPAPRPNLRTDGATGAPGVLFAPSAPAPNLPAGKMNHRDPLQPLLENPPLGPGAPTSFEPRRPPPLRPGVTSAPGFPHLPTANPTGPGERGPPGAVEVIRESSSTTGMVVGIVAAAALCILILLYAMYKYRNRDEGSYQVDQSRNYISNSAQSNGAVVKEKAPAAPKTPSKAKKNKDKEYYV

SEQ ID NO: 1941 - protein, 405 aa, Homo sapiens
MAASGKTSKSEPNHVIFKKISRDKSVTIYLGNRDYIDHVSQVQPVDGVVLVDPDLVKGKKVYVTLTCAFRYGQEDIDVIGLTFRRDLYFSRVQVYPPVGAASTPTKLQESLLKKLGSNTYPFLLTFPDYLPCSVMLQPAPQDSGKSCGVDFEVKAFATDSTDAEEDKIPKKSSVRLLIRKVQHAPLEMGPQPRAEAAWQFFMSDKPLHLAVSLNKEIYFHGEPIPVTVTVTNNTEKTVKKIKAFVEQVANVVLYSSDYYVKPVAMEEAQEKVPPNSTLTKTLTLLPLLANNRERRGIALDGKIKHEDTNLASSTIIKEGIDRTVLGILVSYQIKVKLTVSGFLGELTSSEVATEVPFRLMHPQPEDPAKESYQDANLVFEEFARHNLKDAGEAEEGKRDKNDVDE

SEQ ID NO: 1942 - protein, 1314 aa, Homo sapiens
MKHLYGLFHYNPMMLGLESLPDPTDTWEIIETIGKGTYGKVYKVTNKRDGSLAAVKILDPVSDMDEEIEAEYNILQFLPNHPNVVKFYGMFYKADHCVGGQLWLVLELCNGGSVTELVKGLLRCGQRLDEAMISYILYGALLGLQHLHNNRIIHRDVKGNNILLTTEGGVKLVDFGVSAQLTSTRLRRNTSVGTPFWMAPEVIACEQQYDSSYDARCDVWSLGITAIELGDGDPPLFDMHPVKTLFKIPRNPPPTLLHPEKWCEEFNHFISQCLIKDFERRPSVTHLLDHPFIKGVHGKVLFLQKQLAKVLQDQKHQNPVAKTRHERMHTRRPYHVEDAEKYCLEDDLVNLEVLDEDTIIHQLQKRYADLLIYTYVGDILIALNPFQNLSIYSPQFSRLYHGVKRASNPPHIFASADAAYQCMVTLSKDQCIVISGESGSGKTESAHLIVQHLTFLGKANNQTLREKILQVNSLVEAFGNSCTAINDNSSRFGKYLEMMFTPTGVVMGARISEYLLEKSRVIKQAAREKNFHIFYYIYAGLHHQKKLSDFRLPEEKPPRYIADETGRVMHDITSKESYRRQFEAIQHCFRIIGFTDKEVHSVYRILAGILNIGNIEFAAISSQHQTDKSEVPNAEALQNAASVLCISPEELQEALTSHCVVTRGETIIRANTVDRAADVRDAMSKALYGRLFSWIVNRINTLLQPDENICSAGGGMNVGILDIFGFENFQRNSFEQLCINIANEQIQYYFNQHVFALEQMEYQNEGIDAVPVEYEDNRPLLDMFLQKPLGLLALLDEESRFPQATDQTLVDKFEDNLRCKYFWRPKGVELCFGIQHYAGKVLYDASGVLEKNRDTLPADVVVVLRTSENKLLQQLFSIPLTKTGNLAQTRARITVASSSLPPHFSAGKAKVDTLEVIRHPEETTNMKRQTVASYFRYSLMDLLSKMVVGQPHFVRCIKPNDDREALQFSRERVLAQLRSTGILETVSIRRQGYSHRILFEEFVKRYYYLAFTAHQTPLASKESCVAILEKSRLDHWVLGKTKVFLKYYHVEQLNLLLREVIGRVVVLQAYTKGWLGARRYKRVREKREKGAIAIQSGDTSNQSSGPHSPVAAGTRGSAEVQDCSEPGDHKVLRGSVHRRSHSQAESNNGRTQTSSNSPAVTEKNGHSQAQSSPKGCDIFAGHANKHSVSGTDLLSSRICHPAPDQQGLSLWGAPQKPGSENGLAQKHRTPRRRCQQPKMLSSPEDTMYYNQLNGTLEYQGSKRKPRKLGQIKVLDGEDEYYKSLSPVDCIPEENNSAHPSFFSSSSKGDSFAQH

SEQ ID NO: 1943 - protein, 652 aa, Homo sapiens
MSSQGSPSVALSTTTVSSVAVQAGDSKIVIAVIKCGKWVQLQLAESQPNLLEIGSSQDETKKLLHDHELLLAKLKALEDRVWELLQEADKTAEENKDQSQVYDAMAETLGEAWAALVSMLERRTELLRLTSEFFENALEFAIKIDQAEDFLQNTHEFESAESLKSLLQLHEHHTKELLERSLALLNKSQQLTDFIEKFKCEGPNVNPELTQGAHSSCLKVDRLLELLQDRRRQLDKYLKQQWQELSQVLQICQWDQQENQVTCWFQKTIRNLQEQSLGSSLSDNEDRIHKQEELIIKAKEWNSAVEKLKSEALRILLSKDYVEKEHLQLSHQKLSQLQEEFGQLMVERNTWLKKANEFFNSANKAFDVLGRVEAYLKLLKSEGLSLAVLAVRHEELHRKIKDCTTDALQKGQTLISQVDSCSSQVSGIHEMMGCIKRRVDHLTEQCSAHKEYALKKQQLTASVEGYLRKVEMSIQKISPVLSNAMDVGSTRSESEKILNKYLELDIQAKETSHELEAAAKTMMEKNEFVSDEMVSLSSKARWLAEELNLFGQSIDYRSQVLQTYVAFLKSSEEVEMQFQSLKEFYETEIPQKEQDDAKAKHCSDSAEKQWQLFLKKSFITQDLGLEFLNLINMVRMALNGSHLLQGYSSKSK

SEQ ID NO: 1944 - protein, 575 aa, Homo sapiens
MQMYLPFCGIAISNAQLFAASRKEYERSRALLEVVNDLFEEQTDLEKIVKKIMHRAQTLLKCERCSVLLLEDIESPVVKFTKSFELMSPKCSADAENSFKESMEKSSYSDWLINNSIAELVASTGLPVNISDAYQDPRFDAEADQISGFHIRSVLCVPIWNSNHQIIGVAQVLNRLDGKPFDDADQRLFEAFVIFCGLGINNTIMYDQVKKSWAKQSVALDVLSYHATCSKAEVDKFKAANIPLVSELAIDDIHFDDFSLDVDAMITAALRMFMELGMVQKFKIDYETLCRWLLTVRKNYRMVLYHNWRHAFNVCQLMFAMLTTAGFQDILTEVEILAVIVGCLCHDLDHRGTNNAFQAKSGSALAQLYGTSATLEHHHFNHAVMILQSEGHNIFANLSSKEYSDLMQLLKQSILATDLTLYFERRTEFFELVSKGEYDWNIKNHRDIFRSMLMTACDLGAVTKPWEISRQVAELVTSEFFEQGDRERLELKLTPSAIFDRNRKDELPRLQLEWIDSICMPLYQALVKVNVKLKPMLDSVATNRSKWEELHQKRLLASTASSSPASVMVAKEDRN

SEQ ID NO: 1945 - protein, 554 aa, Homo sapiens
MESSDVNKRLEKLSALDYKIFYYEIPGPINKTTERHLAINCVHDRVVCWWPLVNDDAWPWAPISSEKDRANLLLLGYAQGRLEVLSSVRTEWDPLDVRFGTKQPYQVFTVEHSVSVDKEPMADSCIYECIRNKIQCVSVTRIPLKSKAISCCRNVTEDKLILGCEDSSLILYETHRRVTLLAQTELLPSLISCHPSGAILLVGSNQGELQIFDMALSPINIQLLAEDRLPRETLQFSKLFDASSSLVQMQWIAPQVVSQKGEGSDIYDLLFLRFERGPLGVLLFKLGVFTRGQLGLIDIIFQYIHCDEIYEAINILSSMNWDTLGHQCFISMSAIVNHLLRQKLTPEREAQLETSLGTFYAPTRPLLDSTILEYRDQISKYARRFFHHLLRYQRFEKAFLLAVDVGARDLFMDIHYLALDKGELALAEVARKRASDIDAESITSGVELLGPLDRGDMLNEAFIGLSLAPQGEDSFPDNLPPSCPTHRHILQQRILNGSSNRQIIDRRNELEKDICSGFLMTNTCNAEDGELREDGREQEIRDGGSLKMIHFGLV

SEQ ID NO: 1946 - protein, 4532 aa, Homo sapiens
MDDLRVLWMRDRVYAAFGITDPQLFEDLLNRDDGQGEDLILHFLNQASEEEGPSALFIYRTMVPEEVEVEIDEIPVLSEEGEEEEETYSQKVESVDKVRAKRVSLRTESLGQPLNREDEEMDKEISEKLPSKRTAKHIMEKMHLHMLCTPLPEEFLDQNVVFFLRNTKEAISEATDMKEAMEIMPETLEYGIINANVLHFLKNIICQVFLPALSFNQHRTSTTVGVTSGEVSNSSEHESDLPPMPGEAVEYHSIQLIRDEFLMNVQKFASNIQRTMQQLEGEIKLEMPIISVEGEVSDLAADPETVDILEQCVINWLNQISTAVEAQLKKTPQGKGPLAEIEFWRERNATLSALHEQTKLPIVRKVLDVIKESDSMLVANLQPVFTELFKFHTEASDNVRFLSTVERYFKNITHGSGFHVVLDTIPAMMSALRMVWIISRHYNKDERMIPLMERIAWEIAERVCRVVNLRTLFKENRASAQSKTLEARNTLRLWKKAYFDTRAKIEASGREDRWEFDRKRLFERTDYMATICQDLSDVLQILEEFYNIFGPELKAVTGDPKRIDDVLCRVDGLVTPMENLTFDPFSIKSSQFWKYVMDEFKIEVLIDIINKIFVQNLENPPLYKNHPPVAGAIYWERSLFFRIKHTILRFQEVQEILDSDRGQEVKQKYLEVGRTMKEYEDRKYEQWMEVTEQVLPALMKKSLLTKSSIATEEPSTLERGAVFAINFSPALREIINETKYLEQLGFTVPELARNVALQEDKFLRYTAGIQRMLDHYHMLIGTLNDAESVLLKDHSQELLRVFRSGYKRLNWNSLGIGDYITGCKQAIGKFESLVHQIHKNADDISSRLTLIEAINLFKYPAAKSEEELPGVKEFFEHIERERASDVDHMVRWYLAIGPLLTKVEGLVVHTNTGKAPKLASYYKYWEKKIYEVLTKLILKNLQSFNSLILGNVPLFHTETILTAPEIILHPNTNEIDKMCFHCVRNCVEITKHFVRWMNGSCIECPPQKGEEEEVVIINFYNDISLNPQIIEQAVMIPQNVHRILINLMKYLQKWKRYRPLWKLDKAIVMEKFAAKKPPCVAYDEKLQFYSKIAYEVMRHPLIKDEHCIRLQLRHLANTVQENAKSWVISLGKLLNESAKEELYNLHEEMEHLAKNLRKIPNTLEDLKFVLATIAEIRSKSLVMELRYRDVQERYRTMAMYNLFPPDAEKELVDKIESIWSNLFNDSVNVEHALGDIKRTFTELTRGEIMNYRVQIEEFAKRFYSEGPGSVGDDLDKGVELLGVYERELARHEKSRQELANAEKLFDLPITMYPELLKVQKEMSGLRMIYELYEGLKVAKEEWSQTLWINLNVQILQEGIEGFLRALRKLPRPVRGLSVTYYLEAKMKAFKDSIPLLLDLKNEALRDRHWKELMEKTSVFFEMTETFTLENMFAMELHKHTDVLNEIVTAAIKEVAIEKAVKEILDTWENMKFTVVKYCKGTQERGYILGSVDEIIQSLDDNTFNLQSISGSRFVGPFLQTVHKWEKTLSLIGEVIEIWMLVQRKWMYLESIFIGGDIRSQLPEEAKKFDNIDKVFKRIMGETLKDPVIKRCCEAPNRLSDLQNVSEGLEKCQKSLNDYLDSKRNAFPRFFFISDDELLSILGSSDPLCVQEHMIKMYDNIASLRFNDGDSGEKLVSAMISAEGEVMEFRKILRAEGRVEDWMTAVLNEMRRTNRLITKEAIFRYCEDRSRVDWMLLYQGMVVLAASQVWWTWEVEDVFHKAQKGEKQAMKNYGRKMHRQIDELVTRITMPLSKNDRKKYNTVLIIDVHARDIVDSFIRGSILEAREFDWESQLRFYWDREPDELNIRQCTGTFGYGYEYMGLNGRLVITPLTDRIYLTLTQALSMYLGGAPAGPAGTGKTETTKDLAKALGLLCVVTNCGEGMDYRAVGKIFSGLAQCGAWGCFDEFNRIDASVLSVISSQIQTIRNALIHQLTTFQFEGQEISLDSRMGIFITMNPGYAGRTELPESVKALFRPVVVIVPDLQQICEIMLFSEGFLEAKTLAKKMTVLYKLAREQLSKQYHYDFGLRALKSVLVMAGELKRGSSDLREDVVLMRALRDMNLPKFVFEDVPLFLGLISDLFPGLDCPRVRYPDFNDAVEQVLEENGYAVLPIQVDKVVQMFETMLTRHTTMVVGPTRGGKSVVINTLCQAQTKLGLTTKLYILNPKAVSVIELYGILDPTTRDWTDGVLSNIFREINKPTDKKERKYILFDGDVDALWVENMNSVMDDNRLLTLANGERIRLQAHCALLFEVGDLQYASPATVSRCGMVYVDPKNLKYRPYWKKWVNQIPNKVEQYNLNSLFEKYVPYLMDVIVEGIVDGRQAEKLKTIVPQTDLNMVTQLAKMLDALLEGEIEDLDLLECYFLEALYCSLGASLLEDGRMKFDEYIKRLASLSTVDTEGVWANPGELPGQLPTLYDFHFDNKRNQWVPWSKLVPEYIHAPERKFINILVHTVDTTRTTWILEQMVKIKQPVIFVGESGTSKTATTQNFLKNLSEETNIVLMVNFSSRTTSMDIQRNLEANVEKRTKDTYGPPMGKRLLVFMDDMNMPRVDEYGTQQPIALLKLLLEKGYLYDRGKELNCKSIRDLGFIAAMGKAGGGRNEVDPRFISLFSVFNVPFPSEESLHLIYSSILKGHTSTFHESIVAVSGKLTFCTLALYKNIVQDLPPTPSKFHYIFNLRDLSRVFNGLVLTNPERFQTVAQMVRVWRNECLRVFHDRLISETDKQLVQQHIGSLVVEHFKDDVEVVMRDPILFGDFQMALHEGEPRIYEDIQDYEAAKALFQEILEEYNESNTKMNLVLFDDALEHLTRVHRIIRMDRGHALLVGVGGSGKQSLSRLAAFTASCEVFEILLSRGYSENSFREDLKSLYLKLGIENKAMIFLFTDAHVAEEGFLELINNMLTSGIVPALFSEEEKESILSQIGQEALKQGMGPAKESVWQYFVNKSANNLHIVLGMSPVGDTLRTWCRNFPGMVNNTGIDWFMPWPPQALHAVAKSFLGYNPMIPAENIENVVKHVVLVHQSVDHYSQQFLQKLRRSNYVTPKNYLDFINTYSKLLDEKTQCNIAQCKRLDGGLDKLKEATIQLDELNQKLAEQKIVLAEKSAACEALLEEIAVNTAVAEEKKKLAEEKAMEIEEQNKVIAMEKAEAETTLAEVMPILEAAKLELQKLDKSDVTEIRSFAKPPKQVQTVCECILIMKGYKELNWKTAKGVMSDPNFLRSLMEIDFDSITQSQVKNIKGLLKTLNTTTEEMEAVSKAGLGMLKFVEAVMGYCDVFREIKPKREKVARLERNFYLTKRELERIQNELAAIQKELETLGAKYEAAILEKQKLQEEAEIMERRLIAADKLISGLGSENIRWLNDLDELMHRRVKLLGDCLLCAAFLSYEGAFTWEFRDEMVNRIWQNDILEREIPLSQPFRLESLLTDDVEISRWGSQGLPPDELSVQNGILTTRASRFPLCIDPQQQALNWIKRKEEKNNLRVASFNDPDFLKQLEMSIKYGTPFLFRDVDEYIDPVIDNVLEKNIKVSQGRQFIILGDKEVDYDSNFRLYLNTKLANPRYSPSVFGKAMVINYTVTLKGLEDQLLSVLVAYERRELEEQREHLIQETSENKNLLKDLEDSLLRELATSTGNMLDNVDLVHTLEETKSKATEVSEKLKLAEKTALDIDRLRDGYRPAARRGAILFFVLSEMALVNSMYQYSLIAFLEVFRLSLKKSLPDSILMKRLRNIMDTLTFSIYNHGCTGLFERHKLLFSFNMTIKIEQAEGRVPQEELDFFLKGNISLEKSKRKKPCAWLSDQGWEDIILLSEMFSDNFGQLPDDVENNQTVWQEWYDLDSLEQFPVPLGYDNNITPFQKLLILRCFRVDRVYRAVTDYVTVTMGEKYVQPPMISFEAIFEQSTPHSPIVFILSPGSDPATDLMKLAERSGFGGNRLKFLAMGQGQEKVALQLLETAVARGQWLMLQNCHLLVKWLKDLEKSLERITKPHPDFRLWLTTDPTKGFPIGILQKSLKVVTEPPNGLKLNMRATYFKISHEMLDQCPHPAFKPLVYVLAFFHAVVQERRKFGKIGWNVYYDFNESDFQVCMEILNTYLTKAFQQRDPRIPWGSLKYLIGEVMYGGRAIDSFDRRILTIYMDEYLGDFIFDTFQPFHFFRNKEVDYKIPVGDEKEKFVEAIEALPLANTPEVFGLHPNAEIGYYTQAARDMWAHLLELQPQTGESSSGISRDDYIGQVAKEIENKMPKVFDLDQVRKRLGTGLSPTSVVLLQELERFNKLVVRMTKSLAELQRALAGEVGMSNELDDVARSLFIGHIPNIWRRLAPDTLKSLGNWMVYFLRRFSQYMLWVTESEPSVMWLSGLHIPESYLTALVQATCRKNGWPLDRSTLFTQVTKFQDADEVNERAGQGCFVSGLYLEGADWDIEKGCLIKSKPKVLVVDLPILKIIPIEAHRLKLQNTFRTPVYTTSMRRNAMGVGLVFEADLFTTRHISHWVLQGVCLTLNSD

SEQ ID NO: 1947 - protein, 511 aa, Homo sapiens
MKNYEQALQDASAACQNEPLLIKGHQVKAQALSGLGRSKEVLKEFLYCLALNPECNSVKKEAQKVMCEVLFSATANVHENLTSSIQSRLKAQGHSHMNAQALLEEGDAGSSENSSEKSDMLGNTNSSVLYFILGLHFEEDKKALESILPTAPSAGLKRQFPDDVEDAPDLNAPGKIPKKDLSLQRSPNSETEESQGLSLDVTDFECALCMRLLFEPVTTPCGHTFCLKCLERCLDHAPHCPLCKDKLSELLASRNFNITVLAEELIFRYLPDELSDRKRIYDEEMSELSNLTRDVPIFVCAMAFPTVPCPLHVFEPRYRLMIRRCMETGTKRFGMCLSAEHAGLSEYGCMLEIKDVRTFPDGSSVVDAIGISRFRVLSHRHRDGYNTADIEYLEDEKVEGPEYEELAALHDSVHQQSVSWFASLQDRMKEQILSHFGVMPDREPEPQSNPSGPAWSWWILAVLPLERKAQLAILGMTSLKERLLAIRRILVIITRKMNSRQELANARERNN

SEQ ID NO: 1948 - protein, 140 aa, Homo sapiens
MKGSKSFVLQKMFSCSKNPERAALYFVSGVCIGLVLTLAALVIRISCHTDCRRRPGKKFLQDRESSSDSSDSEDGSEDTVSDLSVRRHRRFERTLNKNVFTSAEELERAQRLEERERIIREIWMNGQPEVPGTRSLNRYY

SEQ ID NO: 1949 - protein, 1044 aa, Homo sapiens
MVLSLTGLIAFSFLQATLALNPEDPNVCSHWESYAVTVQESYAHPFDQIYYTRCTDILNWFKCTRHRISYKTAYRRGLRTMYRRRSQCCPGYYESGDFCIPLCTEECVHGRCVSPDTCHCEPGWGGPDCSSGCDSDHWGPHCSNRCQCQNGALCNPITGACVCAAGFRGWRCEELCAPGTHGKGCQLPCQCRHGASCDPRAGECLCAPGYTGVYCEELCPPGSHGAHCELRCPCQNGGTCHHITGECACPPGWTGAVCAQPCPPGTFGQNCSQDCPCHHGGQCDHVTGQCHCTAGYMGDRCQEECPFGSFGFQCSQHCDCHNGGQCSPTTGACECEPGYKGPRCQERLCPEGLHGPGCTLPCPCDADNTISCHPVTGACTCQPGWSGHHCNESCPVGYYGDGCQLPCTCQNGADCHSITGGCTCAPGFMGEVCAVSCAAGTYGPNCSSICSCNNGGTCSPVDGSCTCKEGWQGLDCTLPCPSGTWGLNCNESCTCANGAACSPIDGSCSCTPGWLGDTCELPCPDGTFGLNCSEHCDCSHADGCDPVTGHCCCLAGWTGIRCDSTCPPGRWGPNCSVSCSCENGGSCSPEDGSCECAPGFRGPLCQRICPPGFYGHGCAQPCPLCVHSSRPCHHISGICECLPGFSGALCNQVCAGGYFGQDCAQLCSCANNGTCSPIDGSCQCFPGWIGKDCSQACPPGFWGPACFHACSCHNGASCSAEDGACHCTPGWTGLFCTQRCPAAFFGKDCGRVCQCQNGASCDHISGKCTCRTGFTGQHCEQRCAPGTFGYGCQQLCECMNNSTCDHVTGTCYCSPGFKGIRCDQAALMMEELNPYTKISPALGAERHSVGAVTGIMLLLFLIVVLLGLFAWHRRRQKEKGRDLAPRVSYTPAMRMTSTDYSLSGACGMDRRQNTYIMDKGFKDYMKESVCSSSTCSLNSSENPYATIKDPPILTCKLPESSYVEMKSPVHMGSPYTDVPSLSTSNKNIYEVEPTVSVVQEGCGHNSSYIQNAYDLPRNSHIPGHYDLLPVRQSPANGPSQDKQS

SEQ ID NO: 1950 - protein, 220 aa, Homo sapiens
MNVFRILGDLSHLLAMILLLGKIWRSKCCKGISGKSQILFALVFTTRYLDLFTNFISIYNTVMKVVFLLCAYVTVYMIYGKFRKTFDSENDTFRLEFLLVPVIGLSFLENYSFTLLEILWTFSIYLESVAILPQLFMISKTGEAETITTHYLFFLGLYRALYLANWIRRYQTENFYDQIAVVSGVVQTIFYCDFFYLYVTKGRSWDDSNADTGLRSYSSI

SEQ ID NO: 1951 - protein, 159 aa, Homo sapiens
MTQPTRPSVTCDQGSSTIGGTAAQATTSSSATSGSNYQRDRLGRRPEIGVGGQPQICFPRPRSAQQPVLFSLMNSSEAAMKKTLPKSHLSRVIIHDNRITQRIYEMEVSALEKTKKKISHYYEHLKKKFMTEQLRKLGRWREESVNSNRYLTFGIPPPV

SEQ ID NO: 1952 - protein, 891 aa, Homo sapiens
MALVENVTTLQKSQDLLEAEGEKKTMIKKIMRQIQEEPLDSLSSSVRKQAMEILTQLSHTQPTLGMRERSELVNVCVHSVFSLPSVQAMQEKDEAKAETIQALYHQTLEALQTLLKALFIEDPTPAGLKSILEALGPWMNSGKAHERARAVNTNVSVLNHMLLTLPFFMPLGFPALGLLLGRLILHIGDPDEEIGCEALDGIIILYTILELQKRARDKEETNKKELYESNKHFLGPYNPVSPCQNILRVIEEFGDFLGPQQIKDLLLAALEGLKGSSEAPGKDSREMMQLASEVMLSSVLEWYRHRALEVIPEIMQGIYMQLSHIQEPRARQVALLPVSLLASSFMTEVVVALLMCPLPLNSNGAEMWRQLILCKPSCDVRDLLDLLLGSLKEKPVTKEGRASIVPLAAASGLCELLSVNSCMGRVRRIYPQLLLALLIQVHYHIGLNLPGCVAPPKDTKKGAQPSPFVPVRWVVKVVKTLLLRMGCSYETTFLEDQGGWELMEQVESHHRGVALLARAMVQYSCQELCRILYLLIPLLERGDEKHRITATAFFVELLQMEQVRRIPEEYSLGRMAEGLSHHDPIMKVLSIRGLVILARRSEKTAKVKALLPSMVKGLKNMDGMLVVEAVHNLKAVFKGRDQKLMDSAVYVEMLQILLPHFSDAREVVRSSCINLYGKVVQKLRAPRTQAMEEQLVSTLVPLLLTMQEGNSKVSQKCVKTLLRCSYFMAWELPKRAYSRKPWDNQQQTVAKICKCLVNTHRDSAFIFLSQSLEYAKNSRASLRKCSVMFIGSLVPCMESIMTEDRLNEVKAALDNLRHDPEASVCIYAAQVQDHILASCWQNSWLPHGNSWVCYSATTHRWSPSCENLPTSHQRRSWIMQALGSWKMSLKK

SEQ ID NO: 1953 - protein, 46 aa, Homo sapiens
MGLSTQEAGKMTRVEGEGEYTDIQGLEWSGNFHFTAAPDLKLKLHM

SEQ ID NO: 1954 - protein, 57 aa, Homo sapiens
MFHGLGTYTFPNGAKYTGNFNENRVEGEGEYTDIQGLEWSGNFHFTAAPDLKLKLHM

SEQ ID NO: 1955 - protein, 952 aa, Homo sapiens
MVQMTVKDYMRSLHQFSETPILSRGTSFNSCYSTASVPQSIPEWLEFWEIDPVEILLDLGFGADEPDICMQIPARFLGCGSAARGINIRVFLEAQKQRMDIENPNLYGRFRQLEILDHVTNAFSSLLSDVSILPNRAEEKAGGESVQRTSVSAAKEHRRRMGKLLRRASKQNIRRDCNPEVSESFKVKDEVFVPFTKPWDCGAELAATSINHKQNHLSLSVEHQSLQACDDLLPYPPHGLLSKQWPCSSMPAKQAPPSCVSEGSVKGRTQKENLFQTNKLKSLSHLAGKGPDSFEMEEVQSFEEETGNPLDMTSGTVGARVDRANSCQSDSSGFLEEPLEPLPLQMPSLPNSQSPAENGGRKPRDQSHSLVSSQDCQLESDGPDSKSRASMSFSSQEANALEQRASVSVMEEEFLLEAMEGPPELYIPDMACAKTTTRGECPRKDSHLWQLLPMPHAEYEVTRPTATSKYDHPLGFMVTHVTEMQDSFVRPEGAGKVQSHHNESQRSPGNDHTQDKFLHVDSEAPREEESSGFCPHTNHSLLVPESSSQCIPKHSEITPYATDLAQTSEKLIPHLHKLPGDPAQVKSRSGTLGQILPGTEAEMENLPLNTGSSRSVMTQMSSSLVSAAQRAVALGTGPRGTSLECTVCDPVTATETRLGTKARQLNDASIQTSALSNKTLTHGPQPLTKSVSLDSGFSSICPMGTCHAIPAHCCICCHHHPHCHGERQSPGPEPSVCRHCLCSLTGHQEAQFMTTLKALQDTTVRELCSCTVHEMEAMKTICQSFREYLEEIEQHLMGQQALFSRDMSEEEREEAEQLQTLREALRQQVAELEFQLGDRAQQIREGILLQLEVLTAEPPEHYSNLHQYNWIEESNGQTSCSKIHPGMAPRTVFPPDDGQEAPCSGGTQLAAFTPPTLENSTRMSPSSSAWAKLGPTPLSNCPVGEKDADVFL

SEQ ID NO: 1956 - protein, 254 aa, Homo sapiens
MAATARRGWGAAAVAAGLRRRFCHMLKNPYTIKKQPLHQFVQRPLFPLPAAFYHPVRYMFIQTQDTPNPNSLKFIPGKPVLETRTMDFPTPAAAFRSPLARQLFRIEGVKSVFFGPDFITVTKENEELDWNLLKPDIYATIMDFFASGLPLVTEETPSGEAGSEEDDEVVAMIKELLDTRIRPTVQEDGGDVIYKGFEDGIVQLKLQGSCTSCPSSIITLKNGIQNMLQFYIPEVEGVEQVMDDESDEKEANSP

SEQ ID NO: 1957 - protein, 637 aa, Homo sapiens
MIQSDKGADPPDKKDMKLSTATNPQNGLSQILRLVLQELSLFYGRDVNGVCLLYDLLHSPWLQALLKIYDCLQEFKEKKLVPATPHAQVLSYEVVELLRETPTSPEIQELRQMLQAPHFKALLSAHDTIAQKDFEPLLPPLPDNIPESEEAMRIVCLVKNQQPLGATIKRHEMTGDILVARIIHGGLAERSGLLYAGDKLVEVNGVSVEGLDPEQVIHILAMSRGTIMFKVVPVSDPPVNSQQMVYVRAMTEYWPQEDPDIPCMDAGLPFQKGDILQIVDQNDALWWQARKISDPATCAGLVPSNHLLKRKQREFWWSQPYQPHTCLKSTLSISMEEEDDMKIDEKCVEADEETFESEELSEDKEEFVGYGQKFFIAGFRRSMRLCRRKSHLSPLHASVCCTGSCYSAVGAPYEEVVRYQRRPSDKYRLIVLMGPSGVGVNELRRQLIEFNPSHFQSAVPHTTRTKKSYEMNGREYHYVSKETFENLIYSHRMLEYGEYKGHLYGTSVDAVQTVLVEGKICVMDLEPQDIQGVRTHELKPYVIFIKPSNMRCMKQSRKNAKVITDYYVDMKFKDEDLQEMENLAQRMETQFGQFFDHVIVNDSLHDACAQLLSAIQKAQEEPQWVPATWISSDTESQ

SEQ ID NO: 1958 - protein, 579 aa, Homo sapiens
MIQSDKGADPPDKKDMKLSTATNPQNGLSQILRLVLQELSLFYGRDVNGVCLLYDLLHSPWLQALLKIYDCLQEFKEKKLVPATPHAQVLSYEALLSAHDTIAQKDFEPLLPPLPDNIPESEEAMRIVCLVKNQQPLGATIKRHEMTGDILVARIIHGGLAERSGLLYAGDKLVEVNGVSVEGLDPEQVIHILAMSRGTIMFKVVPVSDPPVNSQQMVYVRAMTEYWPQEDPDIPCMDAGLPFQKGDILQIVDQNDALWWQARKISDPATCAGLVPSNHLLKRKQREFWWSQPYQPHTCLKSTLYKEEFVGYGQKFFIAGFRRSMRLCRRKSHLSPLHASVCCTGSCYSAVGAPYEEVVRYQRRPSDKYRLIVLMGPSGVGVNELRRQLIEFNPSHFQSAVPHTTRTKKSYEMNGREYHYVSKETFENLIYSHRMLEYGEYKGHLYGTSVDAVQTVLVEGKICVMDLEPQDIQGVRTHELKPYVIFIKPSNMRCMKQSRKNAKVITDYYVDMKFKDEDLQEMENLAQRMETQFGQFFDHVIVNDSLHDACAQLLSAIQKAQEEPQWVPATWISSDTESQ

SEQ ID NO: 1959 - protein, 1167 aa, Homo sapiens
LMCGRAAEAAASSRTPGREMGQAVTRRLGAGARAAPRRAMDGRTPRPQDAPARRKPKAKAPLPPAETKYTDVSSAADSVESTAFIMEQKENMIDKDVELSVVLPGDIIKSTTVHGSKPMMDLLIFLCAQYHLNPSSYTIDLLSAEQNHIKFKPNTPIGMLEVEKVILKPKMLDKKKPTPIIPEKTVRVVINFKKTQKTIVRVSPHASLQELAPIICSKCEFDPLHTLLLKDYQSQEPLDLTKSLNDLGLRELYAMDVNRESCQISQNLDIMKEKENKGFFSFFQRSKKKRDQTASAPATPLVNKHRPTFTRSNTISKPYISNTLPSDAPKKRRAPLPPMPASQSVPQDLAHIQERPASCIVKSMSVDETDKSPCEAGRVRAGSLQLSSMSAGNSSLRRTKRKAPSPPSKIPPHQSDENSRVTALQPVDGVPPDSASEANSPEELSSPAGISSDYSLEEIDEKEELSEVPKVEAENISPKSQDIPFVSTDIINTLKNDPDSALGNGSGEFSQNSMEEKQETKSTDGQEPHSVVYDTSNGKKVVDSIRNLKSLGPNQENVVQNEIIVYPENTEDNMKNGVKKTEINVEGVAKNNNIDMEVERPSNSEAHETDTAISYKENHLAASSVPDQKLNQPSAEKTKDAAIQTTPSCNSFDGKHQDHNLSDSKVEECVQTSNNNISTQHSCLSSQDSVNTSREFRSQGTLIIHSEDPLTVKDPICAHGNDDLLPPVDRIDKNSTASYLKNYPLYRQDYNPKPKPSNEITREYIPKIGMTTYKIVPPKSLEISKDWQSETIEYKDDQDMHALGKKHTHENVKETAIQTEDSAISESPEEPLPNLKPKPNLRTEHQVPSSVSSPDDAMVSPLKPAPKMTRDTGTAPFAPNLEEINNILESKFKSRASNAQAKPSSFFLQMQKRVSGHYVTSAAAKSVHAAPNPAPKELTNKEAERDMLPSPEQTLSPLSKMPHSVPQPLVEKTDDDVIGQAPAEASPPPIAPKPVTIPASQVSTQNLKTLKTFGAPRPYSSSGPSPFALAVVKRSQSFSKERTESPSASALVQPPANTEEGKTHSVNKFVDIPQLGVSDKENNSAHNEQNSQIPTPTDGPSFTVMRQSSLTFQSSDPEQMRQSLLTAIRSGEAAAKLKRVTIPSNTISVNGRSRLSHSMSPDAQDGH

SEQ ID NO: 1960 - protein, 1393 aa, Homo sapiens
MVEPGQDLLLAALSESGISPNDLFDIDGGDAGLATPMPTPSVQQSVPLSALELGLETEAAVPVKQEPETVPTPALLNVRQQPPSTTTFVLNQINHLPPLGSTIVMTKTPPVTTNRQTITLTKFIQTTASTRPSVSAPTVRNAMTSAPSKDQVQLKDLLKNNSLNELMKLKPPANIAQPVATAATDVSNGTVKKESSNKEGARMWINDMKMRSFSPTMKVPVVKEDDEPEEEDEEEMGHAETYAEYMPIKLKIGLRHPDAVVETSSLSSVTPPDVWYKTSISEETIDNGWLSALQLEAITYAAQQHETFLPNGDRAGFLIGDGAGVGKGRTIAGIIYENYLLSRKRALWFSVSNDLKYDAERDLRDIGAKNILVHSLNKFKYGKISSKHNGSVKKGVIFATYSSLIGESQSGGKYKTRLKQLLHWCGDDFDGVIVFDECHKAKNLCPVGSSKPTKTGLAVLELQNKLPKARVVYASATGASEPRNMAYMNRLGIWGEGTPFREFSDFIQAVERRGVGAMEIVAMDMKLRGMYIARQLSFTGVTFKIEEVLLSQSYVKMYNKAVKLWVIARERFQQAADLIDAEQRMKKSMWGQFWSAHQRFFKYLCIASKVKRVVQLAREEIKNGKCVVIGLQSTGEARTLEALEEGGGELNDFVSTAKGVLQSLIEKHFPAPDRKKLYSLLGIDLTAPSNNSSPRDSPCKENKIKKRKGEEITREAKKARKVGGLTGSSSDDSGSESDASDNEESDYESSKNMSSGDDDDFNPFLDESNEDDENDPWLIRKDHKKNKEKKKKKSIDPDSIQSALLASGLGSKRPSFSSTPVISPAPNSTPANSNTNSNSSLITSQDAVERAQQMKKDLLDKLEKLAEDLPPNTLDELIDELGGPENVAEMTGRKGRVVSNDDGSISYESRSELDVPVEILNITEKQRFMDGDKNIAIISEAASSGISLQADRRAKNQRRRVHMTLELPWSADRAIQQFGRTHRSNQVTAPEYVFLISELAGEQRFASIVAKRLESLGALTHGDRRATESRDLSRFNFDNKYGRNALEIVMKSIVNLDSPMVSPPPDYPGEFFKDVRQGLIGVGLINVEDRSGILTLDKDYNNIGKFLNRILGMEVHQQNALFQYFADTLTAVVQNAKKNGRYDMGILDLGSGDEKVRKSDVKKFLTPGYSTSGHVELYTISVERGMSWEEATKIWAELTGPDDGFYLSLQIRNNKKTAILVKEVNPKKKLFLVYRPNTGKQLKLEIYADLKKKYKKVVSDDALMHWLDQYNSSADTCTHAYWRGNCKKASLGLVCEIGLRCRTYYVLCGSVLSVWTKVEGVLASVSGTNVKMQIVRLRTEDGQRIVGLIIPANCVSPLVNLLSTSDQSQQLAVQQKQLWQQHHPQSITNLSNA

SEQ ID NO: 1961 - protein, 235 aa, Homo sapiens
MQTFPSGEIIGGHEAKPHSRPYMAYLMIWDQKSLKRCGGFLIRDDFVLTAAHCWGSSINVTLGAHNIKEQEPTQQFIPVKRPIPHPAYNPKNFSNDIMLLQLERKAKRTRAVQPLRLPSNKAQVKPGQTCSVAGWGQTAPLGKHSHTLQEVKMTVQEDRKCESDLRHYYDSTIELCVGDPEIKKTSFKGDSGGPLVCNKVAQGIVSYGRNNGMPPRACTKVSSFVHWIKKTMKRY

SEQ ID NO: 1962 - protein, 871 aa, Homo sapiens
MSFSEMNRRTLAFRGGGLVTASGGGSTNNNAGGEASAWPPQPQPRQPPPPAPPALQPPNGRGADEEVELEGLEPQDLEASAGPAAGAAEEAKELLLPQDAGGPTSLGGGAGGPLLAERNRRTLAFRGGGGGGLGNNGSSRGRPETSVWPLRHFNGRGPATVDLELDALEGKELMQDGASLSDSTEDEEEGASLGDGSGAEGGSCSSSRRSGGDGGDEVEGSGVGAGEGETVQHFPLARPKSLMQKLQCSFQTSWLKDFPWLRYSKDTGLMSCGWCQKTPADGGSVDLPPVGHDELSRGTRNYKKTLLLRHHVSTEHKLHEANAQESEIPSEEGYCDFNSRPNENSYCYQLLRQLNEQRKKGILCDVSIVVSGKIFKAHKNILVAGSRFFKTLYCFSNKESPNQNNTTHLDIAAVQGFSVILDFLYSGNLVLTSQNAIEVMTVASYLQMSEVVQTCRNFIKDALNISIKSEAPESVVVDYNNRKPVNRDGLSSSRDQKIASFWATRNLTNLASNVKIENDGCNVDEGQIENYQMNDSSWVQDGSPEMAENESEGQTKVFIWNNMGSQGIQETGKTRRKNQTTKRFIYNIPPNNETNLEDCSVMQPPVAYPEENTLLIKEEPDLDGALLSGPDGDRNVNANLLAEAGTSQDGGDAGTSHDFKYGLMPGPSNDFKYGLIPGTSNDFKYGLIPGASNDFKYGLLPESWPKQETWENGESSLIMNKLKCPHCSYVAKYRRTLKRHLLIHTGVRSFSCDICGKLFTRREHVKRHSLVHKKDKKYKCMVCKKIFMLAASVGIRHGSRRYGVCVDCADKSQPGGQEGVDQGQDTEFPRDEEYEENEVGEADEELVDDGEDQNDPSRWDESGEVCMSLDD

SEQ ID NO: 1963 - protein, 746 aa, Homo sapiens
MDQLEDLLVLFINYVPTDGNAGLLAEPQIAMFCGRLNMHMNVQNGKWDSDPSGTKTCIDTKEGILQYCQEVYPELQITNVVEANQPVTIQNWCKRGRKQCKTHPHFVIPYRCLVGEFVSDALLVPDKCKFLHQERMDVCETHLHWHTVAKETCSEKSTNLHDYGMLLPCGIDKFRGVEFVCCPLAEESDNVDSADAEEDDSDVWWGGADTDYADGSEDKVVEVAEEEEVAEVEEEEADDDEDDEDGDEVEEEAEEPYEEATERTTSIATTTTTTTESVEEVVREVCSEQAETGPCRAMISRWYFDVTEGKCAPFFYGGCGGNRNNFDTEEYCMAVCGSAIPTTAASTPDAVDKYLETPGDENEHAHFQKAKERLEAKHRERMSQVMREWEEAERQAKNLPKADKKAVIQHFQEKVESLEQEAANERQQLVETHMARVEAMLNDRRRLALENYITALQAVPPRPRHVFNMLKKYVRAEQKDRQHTLKHFEHVRMVDPKKAAQIRSQVMTHLRVIYERMNQSLSLLYNVPAVAEEIQDEVDELLQKEQNYSDDVLANMISEPRISYGNDALMPSLTETKTTVELLPVNGEFSLDDLQPWHSFGADSVPANTENEVEPVDARPAADRGLTTRPGSGLTNIKTEEISEVKMDAEFRHDSGYEVHHQKLVFFAEDVGSNKGAIIGLMVGGVVIATVIVITLVMLKKKQYTSIHHGVVEVDAAVTPEERHLSKMQQNGYENPTYKFFEQMQN

SEQ ID NO: 1964 - protein, 366 aa, Homo sapiens
MKKKLVVLGLLAVVLVLVIVGLCLWLPSASKEPDNHVYTRAAVAADAKQCSKIGRDALRDGGSAVDAAIAALLCVGLMNAHSMGIGGGLFLTIYNSTTRKAEVINAREVAPRLAFATMFNSSEQSQKGGLSVAVPGEIRGYELAHQRHGRLPWARLFQPSIQLARQGFPVGKGLAAALENKRTVIEQQPVLCEVFCRDRKVLREGERLTLPQLADTYETLAIEGAQAFYNGSLTAQIVKDIQAAGGIVTAEDLNNYRAELIEHPLNISLGDVVLYMPSAPLSGPVLALILNILKGYNFSRESVESPEQKGLTYHRIVEAFRFAYAKRTLLGDPKFVDVTEASSGVSAGGPQHDLRVLRCPAPGPDL

SEQ ID NO: 1965 - protein, 2154 aa, Homo sapiens
MPGLDRPLSRQNPHDGVVTPAASPSLPQPGLQMPGQWGPVQGGPQPSGQHRSPCPEGPVPSGVPCATSVPHFPTPSILHQGPGHEQHSPLVAPPAALPSDGRDEVSHLQSGSHLANNSDPESTFRQNPRIVNHWASPELRQNPGVKNEHRPASALVNPLARGDSPENRTHHPLGAGAGSGCAPLEADSGASGALAMFFQGGETENEENLSSEKAGLSGQADFDDFCSSPGLGRPPAPTHVGAGSLCQALLPGPSNEAAGDVWGDTASTGVPDASGSQYENVENLEFVQNQEVLPSEPLNLDPSSPSDQFRYGPLPGPAVPRHGAVCHTGAPDATLHTVHPDSVSSSYSSRSHGRLSGSARPQELVGTFIQQEVGKPEDEASGSFFKQIDSSPVGGETDETTVSQNYRGSVSQPSTPSPPKPTGIFQTSANSSFEPVKSHLVGVKPFEADRANVVGEVRETCVRQKQCRPAAALPDASPGNLEQPPDNMETLCAPQVCPLPLNSTTEAVHMLPHAGAPPLDTVYPAPEKRPSARTQGPVKCESPATTLWAQSELPDFGGNVLLAPAAPALYVCAKPQPPVVQPPEEAMSGQQSRNPSSAAPVQSRGGIGASENLENPPKMGEEEALQSQASSGYASLLSSPPTESLQNPPVLIAQPDHSYNLAQPINFSVSLSNSHEKNQSWREALVGDRPAVSSWALGGDSGENTSLSGIPTSSVLSLSLPSSVAQSNFPQGSGASEMVSNQPANLLVQPPSQPVPENLVPESQKDRKAGSALPGFANSPAGSTSVVLVPPAHGTLVPDGNKANHSSHQEDTYGALDFTLSRTLENPVNVYNPSHSDSLASQQSVASHPRQSGPGAPNLDRFYQQVTKDAQGQPGLERAQQELVPPQQQASPPQLPKAMFSELSNPESLPAQGQAQNSAQSPASLVLVDAGQQLPPRPPQSSSVSLVSSGSGQAAVPSEQPWPQPVPALAPGPPPQDLAAYYYYRPLYDAYQPQYSLPYPPEPGAASLYYQDVYSLYEPRYRPYDGAASAYAQNYRYPEPERPSSRASHSSERPPPRQGYPEGYYSSKSGWSSQSDYYASYYSSQYDYGDPGHWDRYHYSARVRDPRTYDRRYWCDAEYDAYRREHSAFGDRPEKRDNNWRYDPRFTGSFDDDPDPHRDPYGEEVDRRSVHSEHSARSLHSAHSLASRRSSLSSHSHQSQIYRSHNVAAGSYEAPLPPGSFHGDFAYGTYRSNFSSGPGFPEYGYPADTVWPAMEQVSSRPTSPEKFSVPHVCARFGPGGQLIKVIPNLPSEGQPALVEVHSMEALLQHTSEQEEMRAFPGPLAKDDTHKVDVINFAQNKAMKCLQNENLIDKESASLLWNFIVLLCRQNGTVVGTDIAELLLRDHRTVWLPGKSPNEANLIDFTNEAVEQVEEEESGEAQLSFLTGGPAAAASSLERETERFRELLLYGRKKDALESAMKNGLWGHALLLASKMDSRTHARVMTRFANSLPINDPLQTVYQLMSGRMPAASTCCGDEKWGDWRPHLAMVLSNLNNNMDVESRTMATMGDTLASRGLLDAAHFCYLMAQAGFGVYTKKTTKLVLIGSNHSLPFLKFATNEAIQRTEAYEYAQSLGAETCPLPSFQVFKFIYSCRLAEMGLATQAFHYCEAIAKSILTQPHLYSPVLISQLVQMASQLRLFDPQLKEKPEEESLAAPTWLVHLQQVERQIKEGAGVWHQDGALPQQCPGTPSSEMEQLDRPGLSQPGALGIANPLLAVPAPSPEHSSPSVRLLPSAPQTLPDGPLASPARVPMFPVPLPPGPLEPGPGCVTPGPALGFLEPSGPGLPPGVPPLQERRHLLQEARSPDPGIVPQEAPVGNSLSELSEENFDGKFANLTPSRTVPDSEAPPGWDRADSGPTQPPLSLSPAPETKRPGQAAKKETKEPKKGESWFFRWLPGKKKTEAYLPDDKNKSIVWDEKKNQWVNLNEPEEEKKAPPPPPTSMPKTVQAAPPALPGPPGAPVNMYSRRAAGTRARYVDVLNPSGTQRSEPALAPADFVAPLAPLPIPSNLFVPTPDAEEPQLPDGTGREGPAAARGLANPEPAPEPKLSRCSSMSSLSREVSQHFNQAPGDLPAAGGPPSGAMPFYNPAQLAQACATSGSSRLGRIGQRKHLVLN

SEQ ID NO: 1966 - protein, 2067 aa, Homo sapiens
MMPQKKRRRKKDIDFLALYEAELLNYASEDDEGELEHEYYKARVYEVVTATGDVRGAGTDANVFITLFGENGLSPKLQLTSKSKSAFEKGNVDVFRVRTNNVGLIYKVRIEHDNTGLNASWYLDHVIVTDMKRPHLRYYFNCNNWLSKVEGDRQWCRDLLASFNPMDMPRGNKYEVKVYTGDVIGAGTDADVFINIFGEYGDTGERRLENEKDNFEKGAEDRFILDAPDLGQLMKINVGHNNKGGSAGWFLSQIVIEDIGNKRKYDFPLNRWLALDEDDGKIQRDILVGGAETTAITYIVTVFTGDVRGAGTKSKIYLVMYGARGNKNSGKIFLEGGVFDRGRTDIFHIELAVLLSPLSRVSVGHGNVGVNRGWFCEKVVILCPFTGIQQTFPCSNWLDEKKADGLIERQLYEMVSLRKKRLKKFPWSLWVWTTDLKKAGTNSPIFIQIYGQKGRTDEILLNPNNKWFKPGIIEKFRIELPDLGRFYKIRVWHDKRSSGSGWHLERMTLMNTLNKDKYNFNCNRWLDANEDDNEIVREMTAEGPTVRRIMGMARYHVTVCTGELEGAGTDANVYLCLFGDVGDTGERLLYNCRNNTDLFEKGNADEFTIESVTMRNVRRVRIRHDGKGSGSGWYLDRVLVREEGQPESDNVEFPCLRWLDKDKDDGQLVRELLPSDSSATLKNFRYHISLKTGDVSGASTDSRVYIKLYGDKSDTIKQVLLVSDNNLKDYFERGRVDEFTLETLNIGNINRLVIGHDSTGMHASWFLGSVQIRVPRQGKQYTFPANRWLDKNQADGRLEVELYPSEVVEIQKLVHYEVEIWTGDVGGAGTSARVYMQIYGEKGKTEVLFLSSRSKVFERASKDTFQTDTFTIYAIDLGALTKIRIRHDNTGNRAGWFLDRIDITDMNNEITYYFPCQRWLAVEEDDGQLSRELLPVDESYVLPQSEEGRGGGDNNPLDNLALEQKDKSTTFSVTIKTGVKKNAGTDANVFITLFGTQDDTGMTLLKSSKTNSDKFERDSIEIFTVETLDLGDLWKVRLGHDNTGKAPGWFVDWVEVDAPSLGKCMTFPCGRWLAKNEDDGSIIRDLFHAELQTRLYTPFVPYEITLYTSDVFAAGTDANIFIIIYGCDAVCTQQKYLCTNKREQKQFFERKSASRFIVELEDVGEIIEKIRIGHNNTGMNPGWHCSHVDIRRLLPDKDGAETLTFPCDRWLATSEDDKKTIRELVPYDIFTEKYMKDGSLRQVYKEVEEPLDIVLYSVQIFTGNIPGAGTDAKVYITIYGDLGDTGERYLGKSENRTNKFERGTADTFIIEAADLGVIYKIKLRHDNSKWCADWYVEKVEIWNDTNEDEFLFLCGRWLSLKKEDGRLERLFYEKEYTGDRSSNCSSPADFWEIALSSKMADVDISTVTGPMADYVQEGPIIPYYVSVTTGKHKDAATDSRAFIFLIGEDDERSKRIWLDYPRGKRGFSRGSVEEFYVAGLDVGIIKKIELGHDGASPESCWLVEELCLAVPTQGTKYMLNCNCWLAKDRGDGITSRVFDLLDAMVVNIGVKVLYEMTVWTGDVVGGGTDSNIFMTLYGINGSTEEMQLDKKKARFEREQNDTFIMEILDIAPFTKMRIRIDGLGSRPEWFLERILLKNMNTGDLTMFYYGDWLSQRKGKKTLVCEMCAVIDEEEMMEWTSYTVAVKTSDILGAGTDANVFIIIFGENGDSGTLALKQSANWNKFERNNTDTFNFPDMLSLGHLCKLRVWHDNKGIFPGWHLSYVDVKDNSRDETFHFQCDCWLSKSEGDGQTVRDFACANNKICDELEETTYEIVIETGNGGETRENVWLILEGRKNRSKEFLMENSSRQRAFRKGTTDTFEFDSIYLGDIASLCVGHLAREDRFIPKRELAWHVKTITITEMEYGNVYFFNCDCLIPLKRKRKYFKVFEVTKTTESFASKVQSLVPVKYEVIVTTGYEPGAGTDANVFVTIFGANGDTGKRELKQKMRNLFERGSTDRFFLETLELGELRKVRLEHDSSGYCSGWLVEKVEVTNTSTGVATIFNCGRWLDKKRGDGLTWRDLFPSV

SEQ ID NO: 1967 - protein, 374 aa, Homo sapiens
MILRPYQPCGTVKEFDTNFTYVQQSEFYLEPNIKYVFQVRCQETGKRYWQPWSSLFFHKTPETVPQVTSKAFQHDTWNSGLTVASISTGHLTSDNRGDIGLLLGMIVFAVMLSILSLIGIFNRSFRTGIKRRILLLIPKWLYEDIPNMKNSNVVKMLQENSELMNNNSSEQVLYVDPMITEIKEIFIPEHKPTDYKKENTGPLETRDYPQNSLFDNTTVVYIPDLNTGYKPQISNFLPEGSHLSNNNEITSLTLKPPVDSLDSGNNPRLQKHPNFAFSVSSVNSLSNTIFLGELSLILNQGECSSPDIQNSVEEETTMLLENDSPSETIPEQTLLPDEFVSCLGIVNEELPSINTYFPQNILESHFNRISLLEK

SEQ ID NO: 1968 - protein, 756 aa, Homo sapiens
MFEEKASSPSGKMGGEEKPIGAGEEKQKEGGKKKNKEGSGDGGRAELNPWPEYIYTRLEMYNILKAEHDSILAEKAEKDSKPIKVTLPDGKQVDAESWKTTPYQIACGISHTASCKNLSSLASLLASVAIPSSGMPWPPLFFLQGLADNTVIAKVNNVVWDLDRPLEEDCTLELLKFEDEEAQAVYWHSSAHIMGEAMERVYGGCLCYGPPIENGFYYDMYLEEGGVSSNDFSSLEALCKKIIKEKQAFERLEVKKETLLAMFKYNKFKCRILNEKVNTPTTTVYRCGPLIDLCRGPHVRHTGKIKALKIHKNSSTYWEGKADMETLQRIYGISFPDPKMLKEWEKFQEEAKNRDHRKIGRDQELYFFHELSPGSCFFLPKGAYIYNALIEFIRSEYRKRGFQEVVTPNIFNSRLWMTSGHWQHYSENMFSFEVEKELFALKPMNCPGHCLMFDHRPRSWRELPLRLADFGVLHRNELSGALTGLTRVRRFQQDDAHIFCAMEQIEDEIKGCLDFLRTVYSVFGFSFKLNLSTRPEKFLGDIEVWDQAEKQLENSLNEFGEKWELNSGDGAFYGPKIDIQIKDAIGRYHQCATIQLDFQLPIRFNLTYVSHDGDDKKRPVIVHRAILGSVERMIAILTENYGGKWPFWLSPRQVMVVPVGPTCDEYAQKVRQQFHDAKFMADIDLDPGCTLNKKIRNAQLAQYNFILVVGEKEKISGTVNIRTRDNKVHGERTISETIERLQQLKEFRSKQAEEEF

SEQ ID NO: 1969 - protein, 116 aa, Homo sapiens
MKKKLVVLGLLAVVLVLVIVGLCLWLPSASKEPDNHVYTRAAVAADAKQCSKIGRDALRDGGSAVDAAIAALLCVGLMNAHSMGIGGGLFLTIYNSTTRKAEVINAREVAPRLAFA

SEQ ID NO: 1970 - protein, 355 aa, Homo sapiens
RDENGSLYPGVTAIDMMYKEGLHGVDNGILIFDKVRIPRENLLDKFGSVAPDGQYHSPIRNKSARFNAMLAALTPSRLAVAFQAMGAMKLGLTIAIRYSHSRRQFGPKTKEEVKIIEHQTQTLRLMPHLATALALTFVSRYAGALLDEDVFQGKELVNSRSLQALVAGLKAYSTWENIRCLQDCRECTGGMVVGRELLAQYTKQYEEKPLFGLLQNWAESVGDKLRTSFLAFNMDTVDDLAFLLKAVKFRERVLQRGLVARIYYKVKTKKEDFFHAWNSCLHHVASLSLAHTHRVTLEQFSLAVKSCPDQEDQTLLMKFCLLYGTKLVFQERAWYLEHKYLTPMASTRIRNQERC

SEQ ID NO: 1971 - protein, 363 aa, Homo sapiens
MAAGTAVGAWVLVLSLWGAVVGAQNITARIGEPLVLKCKGAPKKPPQRLEWKLNTGRTEAWKVLSPQGGGPWDSVARVLPNGSLFLPAVGIQDEGIFRCQAMNRNGKETKSNYRVRVYQIPGKPEIVDSASELTAGVPNKVVEESRRSRKRPCEQEVGTCVSEGSYPAGTLSWHLDGKPLVPNEKGVSVKEQTRRHPETGLFTLQSELMVTPARGGDPRPTFSCSFSPGLPRHRALRTAPIQPRVWEPVPLEEVQLVVEPEGGAVAPGGTVTLTCEVPAQPSPQIHWMKDGVPLPLPPSPVLILPEIGPQDQGTYSCVATHSSHGPQESRAVSISIIEPGEEGPTAGEGFDKVREAEDSPQHM

SEQ ID NO: 1972 - protein, 426 aa, Homo sapiens
MSNSVPLLCFWSLCYCFAAGSPVPFGPEGRLEDKLHKPKATQTEVKPSVRFNLRTSKDPEHEGCYLSVGHSQPLEDCSFNMTAKTFFIIHGWTMSGIFENWLHKLVSALHTREKDANVVVVDWLPLAHQLYTDAVNNTRVVGHSIARMLDWLQEKDDFSLGNVHLIGYSLGAHVAGYAGNFVKGTVGRITAITEVVKCEHERAVHLFVDSLVNQDKPSFAFQCTDSNRFKKGICLSCRKNRCNSIGYNAKKMRNKRNSKMYLKTRAGMPFRVYHYQMKIHVFSYKNMGEIEPTFYVTLYGTNADSQTLPLEIVERIEQNATNTFLVYTEEDLGDLLKIQLTWEGASQSWYNLWKEFRSYLSQPRNPGRELNIRRIRVKSGETQRKLTFCTEDPENTSISPGRELWFRKCRDGWRMKNETSPTVELP

SEQ ID NO: 1973 - protein, 209 aa, Homo sapiens
MASGILVNVKEEVTCPICLELLTQPLSLDCGHSFCQACLTANHKKSMLDKGESSCPVCRISYQPENIRPNRHVANIVEKLREVKLSPEGQKVDHCARHGEKLLLFCQEDGKVICWLCERSQEHRGHHTFLTEEVAREYQVKLQAALEMLRQKQQEAEELEADIREEKASWKTQIQYDKTNVLADFEQLRDILDWEESNELQNLEKEEED

SEQ ID NO: 1974 - protein, 1142 aa, Homo sapiens
MATLLSHPQQRPPFLRQAIKIRRRRVRDLQDPPPQMAPEIQPPSHHFSPEQRALLYEDALYTVLHRLGHPEPNHVTEASELLRYLQEAFHVEPEEHQQTLQRVRELEKPIFCLKATVKQAKGILGKDVSGFSDPYCLLGIEQGVGVPGGSPGSRHRQKAVVRHTIPEEETHRTQVITQTLNPVWDETFILEFEDITNASFHLDMWDLDTVESVRQKLGELTDLHGLRRIFKEARKDKGQDDFLGNVVLRLQDLRCREDQWYPLEPRTETYPDRGQCHLQFQLIHKRRATSASRSQPSYTVHLHLLQQLVSHEVTQHEAGSTSWDGSLSPQAATVLFLHATQKDLSDFHQSMAQWLAYSRLYQSLEFPSSCLLHPITSIEYQWIQGRLKAEQQEELAASFSSLLTYGLSLIRRFRSVFPLSVSDSPARLQSLLRVLVQMCKMKAFGELCPNTAPLPQLVTEALQTGTTEWFHLKQQHHQPMVQGIPEAGKALLGLVQDVIGDLHQCQRTWDKIFHNTLKIHLFSMAFRELQWLVAKRVQDHTTVVGDVVSPEMGESLFQLYISLKELCQLRMSSSERDGVLALDNFHRWFQPAIPSWLQKTYNEALARVQRAVQMDELVPLGELTKHSTSAVDLSTCFAQISHTARQLDWPDPEEAFMITVKFVEDTCRLALVYCSLIKARARELSSGQKDQGQAANMLCVVVNDMEQLRLVIGKLPAQLAWEALEQRVGAVLEQGQLQNTLHAQLQSALAGLGHEIRTGVRTLAEQLEVGIAKHIQKLVGVRESVLPEDAILPLMKFLEVELCYMNTNLVQENFSSLLTLLWTHTLTVLVEAAASQRSSSLASNRLKIALQNLEICFHAEGCGLPPKALHTATFQALQRDLELQAASSRELIRKYFCSRIQQQAETTSEELGAVTVKASYRASEQKLRVELLSASSLLPLDSNGSSDPFVQLTLEPRHEFPELAARETQKHKKDLHPLFDETFEFLVPAEPCRKAGACLLLTVLDYDTLGADDLEGEAFLPLREVPGLSGSEEPGEVPQTRLPLTYPAPNGDPILQLLEGRKGDREAQVFVRLRRHRAKQGIGPSVSWPWPICLLAFLFQPLGWGPGSLGPGLQAQSLLEKGEGTLPKMRLQLPWGEGGGHY

SEQ ID NO: 1975 - protein, 4574 aa, Homo sapiens
MSGEDAEVRAVSEDVSNGSSGSPSPGDTLPWNLGKTQRSRRSGGGAGSNGSVLDPAERAVIRIADERDRVQKKTFTKWVNKHLIKAQRHISDLYEDLRDGHNLISLLEVLSGDSLPREKGRMRFHKLQNVQIALDYLRHRQVKLVNIRNDDIADGNPKLTLGLIWTIILHFQISDIQVSGQSEDMTAKEKLLLWSQRMVEGYQGLRCDNFTSSWRDGRLFNAIIHRHKPLLIDMNKVYRQTNLENLDQAFSVAERDLGVTRLLDPEDVDVPQPDEKSIITYVSSLYDAMPRVPDVQDGVRANELQLRWQEYRELVLLLLQWMRHHTAAFEERRFPSSFEEIEILWSQFLKFKEMELPAKEADKNRSKGIYQSLEGAVQAGQLKVPPGYHPLDVEKEWGKLHVAILEREKQLRSEFERLECLQRIVTKLQMEAGLCEEQLNQADALLQSDVRLLAAGKVPQRAGEVERDLDKADSMIRLLFNDVQTLKDGRHPQGEQMYRRVYRLHERLVAIRTEYNLRLKAGVAAPATQVAQVTLQSVQRRPELEDSTLRYLQDLLAWVEENQHRVDGAEWGVDLPSVEAQLGSHRGLHQSIEEFRAKIERARSDEGQLSPATRGAYRDCLGRLDLQYAKLLNSSKARLRSLESLHSFVAAATKELMWLNEKEEEEVGFDWSDRNTNMTAKKESYSALMRELELKEKKIKELQNAGDRLLREDHPARPTVESFQAALQTQWSWMLQLCCCIEAHLKENAAYFQFFSDVREAEGQLQKLQEALRRKYSCDRSATVTRLEDLLQDAQDEKEQLNEYKGHLSGLAKRAKAVVQLKPRHPAHPMRGRLPLLAVCDYKQVEVTVHKGDECQLVGPAQPSHWKVLSSSGSEAAVPSVCFLVPPPNQEAQEAVTRLEAQHQALVTLWHQLHVDMKSLLAWQSLRRDVQLIRSWSLATFRTLKPEEQRQALHSLELHYQAFLRDSQDAGGFGPEDRLMAEREYGSCSHHYQQLLQSLEQGAQEESRCQRCISELKDIRLQLEACETRTVHRLRLPLDKEPARECAQRIAEQQKAQAEVEGLGKGVARLSAEAEKVLALPEPSPAAPTLRSELELTLGKLEQVRSLSAIYLEKLKTISLVIRGTQGAEEVLRAHEEQLKEAQAVPATLPELEATKASLKKLRAQAEAQQPTFDALRDELRGAQEVGERLQQRHGERDVEVERWRERVAQLLERWQAVLAQTDVRQRELEQLGRQLRYYRESADPLGAWLQDARRRQEQIQAMPLADSQAVREQLRQEQALLEEIERHGEKVEECQRFAKQYINAIKDYELQLVTYKAQLEPVASPAKKPKVQSGSESVIQEYVDLRTHYSELTTLTSQYIKFISETLRRMEEEERLAEQQRAEERERLAEVEAALEKQRQLAEAHAQAKAQAEREAKELQQRMQEEVVRREEAAVDAQQQKRSIQEELQQLRQSSEAEIQAKARQAEAAERSRLRIEEEIRVVRLQLEATERQRGGAEGELQALRARAEEAEAQKRQAQEEAERLRRQVQDESQRKRQAEVELASRVKAEAEAAREKQRALQALEELRLQAEEAERRLRQAEVERARQVQVALETAQRSAEAELQSKRASFAEKTAQLERSLQEEHVAVAQLREEAERRAQQQAEAERAREEAERELERWQLKANEALRLRLQAEEVAQQKSLAQAEAEKQKEEAEREARRRGKAEEQAVRQRELAEQELEKQRQLAEGTAQQRLAAEQELIRLRAETEQGEQQRQLLEEELARLQREAAAATQKRQELEAELAKVRAEMEVLLASKARAEEESRSTSEKSKQRLEAEAGRFRELAEEAARLRALAEEAKRQRQLAEEDAARQRAEAERVLAEKLAAIGEATRLKTEAEIALKEKEAENERLRRLAEDEAFQRRRLEEQAAQHKADIEERLAQLRKASDSELERQKGLVEDTLRQRRQVEEEILALKASFEKAAAGKAELELELGRIRSNAEDTLRSKEQAELEAARQRQLAAEEERRRREAEERVQKSLAAEEEAARQRKAALEEVERLKAKVEEARRLRERAEQESARQLQLAQEAAQKRLQAEEKAHAFAVQQKEQELQQTLQQEQSVLDQLRGEAEAARRAAEEAEEARVQAEREAAQSRRQVEEAERLKQSAEEQAQARAQAQAAAEKLRKEAEQEAARRAQAEQAALRQKQAADAEMEKHKKFAEQTLRQKAQVEQELTTLRLQLEETDHQKNLLDEELQRLKAEATEAARQRSQVEEELFSVRVQMEELSKLKARIEAENRALILRDKDNTQRFLQEEAEKMKQVAEEAARLSVAAQEAARLRQLAEEDLAQQRALAEKMLKEKMQAVQEATRLKAEAELLQQQKELAQEQARRLQEDKEQMAQQLAEETQGFQRTLEAERQRQLEMSAEAERLKLRVAEMSRAQARAEEDAQRFRKQAEEIGEKLHRTELATQEKVTLVQTLEIQRQQSDHDAERLREAIAELEREKEKLQQEAKLLQLKSEEMQTVQQEQLLQETQALQQSFLSEKDSLLQRERFIEQEKAKLEQLFQDEVAKAQQLREEQQRQQQQMEQERQRLVASMEEARRRQHEAEEGVRRKQEELQQLEQQRRQQEELLAEENQRLREQLQLLEEQHRAALAHSEEVTASQVAATKTLPNGRDALDGPAAEAEPEHSFDGLRRKVSAQRLQEAGILSAEELQRLAQGHTTVDELARREDVRHYLQGRSSIAGLLLKATNEKLSVYAALQRQLLSPGTALILLEAQAASGFLLDPVRNRRLTVNEAVKEGVVGPELHHKLLSAERAVTGYKDPYTGQQISLFQAMQKGLIVREHGIRLLEAQIATGGVIDPVHSHRVPVDVAYRRGYFDEEMNRVLADPSDDTKGFFDPNTHENLTYLQLLERCVEDPETGLCLLPLTDKAAKGGELVYTDSEARDVFEKATVSAPFGKFQGKTVTIWEIINSEYFTAEQRRDLLRQFRTGRITVEKIIKIIITVVEEQEQKGRLCFEGLRSLVPAAELLESRVIDRELYQQLQRGERSVRDVAEVDTVRRALRGANVIAGVWLEEAGQKLSIYNALKKDLLPSDMAVALLEAQAGTGHIIDPATSARLTVDEAVRAGLVGPEFHEKLLSAEKAVTGYRDPYTGQSVSLFQALKKGLIPREQGLRLLDAQLSTGGIVDPSKSHRVPLDVACARGCLDEETSRALSAPRADAKAYSDPSTGEPATYGELQQRCRPDQLTGLSLLPLSEKAARARQEELYSELQARETFEKTPVEVPVGGFKGRTVTVWELISSEYFTAEQRQELLRQFRTGKVTVEKVIKILITIVEEVETLRQERLSFSGLRAPVPASELLASGVLSRAQFEQLKDGKTTVKDLSELGSVRTLLQGSGCLAGIYLEDTKEKVSIYEAMRRGLLRATTAALLLEAQAATGFLVDPVRNQRLYVHEAVKAGVVGPELHEQLLSAEKAVTGYRDPYSGSTISLFQAMQKGLVLRQHGIRLLEAQIATGGIIDPVHSHRVPVDVAYQRGYFSEEMNRVLADPSDDTKGFFDPNTHENLTYRQLLERCVEDPETGLRLLPLKGAEKAEVVETTQVYTEEETRRAFEETQIDIPGGGSHGGSTMSLWEVMQSDLIPEEQRAQLMADFQAGRVTKERMIIIIIEIIEKTEIIRQQGLASYDYVRRRLTAEDLFEARIISLETYNLLREGTRSLREALEAESAWCYLYGTGSVAGVYLPGSRQTLSIYQALKKGLLSAEVARLLLEAQAATGFLLDPVKGERLTVDEAVRKGLVGPELHDRLLSAERAVTGYRDPYTEQTISLFQAMKKELIPTEEALRLLDAQLATGGIVDPRLGFHLPLEVAYQRGYLNKDTHDQLSEPSEVRSYVDPSTDERLSYTQLLRRCRRDDGTGQLLLPLSDARKLTFRGLRKQITMEELVRSQVMDEATALQLREGLTSIEEVTKNLQKFLEGTSCIAGVFVDATKERLSVYQAMKKGIIRPGTAFELLEAQAATGYVIDPIKGLKLTVEEAVRMGIVGPEFKDKLLSAERAVTGYKDPYSGKLISLFQAMKKGLILKDHGIRLLEAQIATGGIIDPEESHRLPVEVAYKRGLFDEEMNEILTDPSDDTKGFFDPNTEENLTYLQLMERCITDPQTGLCLLPLKEKKRERKTSSKSSVRKRRVVIVDPETGKEMSVYEAYRKGLIDHQTYLELSEQECEWEEITISSSDGVVKSMIIDRRSGRQYDIDDAIAKNLIDRSALDQYRAGTLSITEFADMLSGNAGGFRSRSSSVGSSSSYPISPAVSRTQLASWSDPTEETGPVAGILDTETLEKVSITEAMHRNLVDNITGQRLLEAQACTGGIIDPSTGERFPVTDAVNKGLVDKIMVDRINLAQKAFCGFEDPRTKTKMSAAQALKKGWLYYEAGQRFLEVQYLTGGLIEPDTPGRVPLDEALQRGTVDARTAQKLRDVGAYSKYLTCPKTKLKISYKDALDRSMVEEGTGLRLLEAAAQSTKGYYSPYSVSGSGSTAGSRTGSRTGSRAGSRRGSFDATGSGFSMTFSSSSYSSSGYGRRYASGSSASLGGPESAVA

SEQ ID NO: 1976 - protein, 795 aa, Homo sapiens
MDQREILQKFLDEAQSKKITKEEFANEFLKLKRQSTKYKADKTYPTTVAEKPKNIKKNRYKDILPYDYSRVELSLITSDEDSSYINANFIKGVYGPKAYIATQGPLSTTLLDFWRMIWEYSVLIIVMACMEYEMGKKKCERYWAEPGEMQLEFGPFSVSCEAEKRKSDYIIRTLKVKFNSETRTIYQFHYKNWPDHDVPSSIDPILELIWDVRCYQEDDSVPICIHCSAGCGRTGVICAIDYTWMLLKDGIIPENFSVFSLIREMRTQRPSLVQTQEQYELVYNAVLELFKRQMDVIRDKHSGTESQAKHCIPEKNHTLQADSYSPNLPKSTTKAAKMMNQQRTKMEIKESSSFDFRTSEISAKEELVLHPAKSSTSFDFLELNYSFDKNADTTMKWQTKAFPIVGEPLQKHQSLDLGSLLFEGCSNSKPVNAAGRYFNSKVPITRTKSTPFELIQQRETKEVDSKENFSYLESQPHDSCFVEMQAQKVMHVSSAELNYSLPYDSKHQIRNASNVKHHDSSALGVYSYIPLVENPYFSSWPPSGTSSKMSLDLPEKQDGTVFPSSLLPTSSTSLFSYYNSHDSLSLNSPTNISSLLNQESAVLATAPRIDDEIPPPLPVWTPESFIVVEEAGEFSPNVPKSLSSAVKVKIGTSLEWGGTSEPKKFDDSVILRPSKSVKLRSPKSELHQDRSSPPPPLPERTLESFFLADEDCMQAQSIETYSTSYPDTMENSTSSKQTLKTPGKSFTRSKSLKILRNMKKSICNSCPPNKPAESVQSNNSSSFLNFGMCVILLKS

SEQ ID NO: 1977 - protein, 395 aa, Homo sapiens
LTDRQTDTAPSPSYHLLPGRRRTVDAAASRGQGPEPAPGGGVEGVGARGVALKLFVQLLGCSRFGGAVVRAGEAEPSGAARSASSGREEPQPEEGEEEEEKEEERGPQWRLGARKPGSWTGEAAVCADSAPAARAPQALARASGRGGRVARRGAEESGPPHSPSRRGSASRAGPGRASETMNFLLSWVHWSLALLLYLHHAKWSQAAPMAEGGGQNHHEVVKFMDVYQRSYCHPIETLVDIFQEYPDEIEYIFKPSCVPLMRCGGCCNDEGLECVPTEESNITMQIMRIKPHQGQHIGEMSFLQHNKCECRPKKDRARQEKKSVRGKGKGQKRKRKKSRYKSWSVPCGPCSERRKHLFVQDPQTCKCSCKNTDSRCKARQLELNERTCRCDKPRR

SEQ ID NO: 1978 - protein, 414 aa, Homo sapiens
MVFHLRTRYEQANCDCLNGGTCVSNKYFSNIHWCNCPKKFGGQHCEIDKSKTCYEGNGHFYRGKASTDTMGRPCLPWNSATVLQQTYHAHRSDALQLGLGKHNYCRNPDNRRRPWCYVQVGLKLLVQECMVHDCADGKKPSSPPEELKFQCGQKTLRPRFKIIGGEFTTIENQPWFAAIYRRHRGGSVTYVCGGSLISPCWVISATHCFIDYPKKEDYIVYLGRSRLNSNTQGEMKFEVENLILHKDYSADTLAHHNDIALLKIRSKEGRCAQPSRTIQTICLPSMYNDPQFGTSCEITGFGKENSTDYLYPEQLKMTVVKLISHRECQQPHYYGSEVTTKMLCAADPQWKTDSCQGDSGGPLVCSLQGRMTLTGIVSWGRGCALKDKPGVYTRVSHFLPWIRSHTKEENGLAL

SEQ ID NO: 1979 - protein, 380 aa, Homo sapiens
MEGAALLRVSVLCIWVQQNVPSGTDTGDPQSKPLGDWAAGTMDPESSIFIEDAIKYFKEKVSTQNLLLLLTDNEAWNGFVAAAELPRNEADELRKALDNLARQMIMKDKNWHDKGQQYRNWFLKEFPRLKSELEDNIRRLRALADGVQKVHKGTTIANVVSGSLSISSGILTLVGMGLAPFTEGGSLVLLEPGMELGITAALTGITSSTMDYGKKWWTQAQAHDLVIKSLDKLKEVREFLGENISNFLSLAGNTYQLTRGIGKDIRALRRARANLQSVPHASASRPRVTEPISAESGEQVERVNEPSILEMSRGVKLTDVAPVSFFLVLDVVYLVYESKHLHEGAKSETAEELKKVAQELEEKLNILNNNYKILQADQEL

SEQ ID NO: 1980 - protein, 454 aa, Homo sapiens
MATNKERLFAAGALGPGSGYPGAGFPFAFPGALRGSPPFEMLSPSFRGLGQPDLPKEMASLSVETQSTSSEEMVPSSPSPPPPPRVYKPCFVCNDKSSGYHYGVSSCEGCKGFFRRSIQKNMVYTCHRDKNCIINKVTRNRCQYCRLQKCFEVGMSKEAVRNDRNKKKKEVKEEGSPDSYELSPQLEELITKVSKAHQETFPSLCQLGKYTTNSSADHRVQLDLGLWDKFSELATKCIIKIVEFAKRLPGFTGLSIADQITLLKAACLDILMLRICTRYTPEQDTMTFSDGLTLNRTQMHNAGFGPLTDLVFAFAGQLLPLEMDDTETGLLSAICLICGDRMDLEEPEKVDKLQEPLLEALRLYARRRRPSQPYMFPRMLMKITDLRGISTKGAERAITLKMEIPGPMPPLIREMLENPEMFEDDSSQPGPHPNASSEDEVPGGQGKGGLKSPA

SEQ ID NO: 1981 - protein, 997 aa, Homo sapiens
MVCSAAPLLLLATTLPLLGSPVAQASQPGQSQAGGESGSGQLLDQENGAGESALVSVYVHLDFPDKTWPPELSRTLTLPAASASSSPRPLLTGLRLTTECNVNHKGNFYCACLSGYQWNTSICLHYPPCQSLHNHQPCGCLVFSHPEPGYCQLLPPGSPVTCLPAVPGILNLNSQLQMPGDTLSLTLHLSQEATNLSWFLRHPGSPSPILLQPGTQVSVTSSHGQAALSVSNMSHHWAGEYMSCFEAQGFKWNLYEVVRVPLKATDVARLPYQLSISCATSPGFQLSCCIPSTNLAYTAAWSPGEGSKASSFNESGSQCFVLAVQRCPMADTTYACDLQSLGLAPLRVPISITIIQDGDITCPEDASVLTWNVTKAGHVAQAPCPESKRGIVRRLCGADGVWGPVHSSCTDARLLALFTRTKLLQAGQGSPAEEVPQILAQLPGQAAEASSPSDLLTLLSTMKYVAKVVAEARIQLDRRALKNLLIATDKVLDMDTRSLWTLAQARKPWAGSTLLLAVETLACSLCPQDHPFAFSLPNVLLQSQLFGPTFPADYSISFPTRPPLQAQIPRHSLAPLVRNGTEISITSLVLRKLDHLLPSNYGQGLGDSLYATPGLVLVISIMAGDRAFSQGEVIMDFGNTDGSPHCVFWDHSLFQGRGGWSKEGCQAQVASASPTAQCLCQHLTAFSVLMSPHTVPEEPALALLTQVGLGASILALLVCLGVYWLVWRVVVRNKISYFRHAALLNMVFCLLAADTCFLGAPFLSPGPRSPLCLAAAFLCHFLYLATFFWMLAQALVLAHQLLFVFHQLAKHRVLPLMVLLGYLCPLGLAGVTLGLYLPQGQYLREGECWLDGKGGALYTFVGPVLAIIGVNGLVLAMAMLKLLRPSLSEGPPAEKRQALLGVIKALLILTPIFGLTWGLGLATLLEEVSTVPHYIFTILNTLQGVFILLFGCLMDRKIQEALRKRFCRAQAPSSTISLATNEGCILEHSKGGSDTAR

SEQ ID NO: 1982 - protein, 570 aa, Homo sapiens
MEDSQDLNEQSVKKTCTESDVSQSQNSRSMEMQDLASPHTLVGGGDTPGSSKLEKSNLSSTSVTTNGTGVITSSGYSPRSAHQYSPQLYPSKPYPHILSTPAAQTMSAYAGQTQYSGMQQPAVYTAYSQTGQPYSLPTYDLGVMLPAIKTESGLSQTQSPLQSGCLSYSPGFSTPQPGQTPYSYQMPGSSFAPSSTIYANNSVSNSTNFSGSQQDYPSYTAFGQNQYAQYYSASTYGAYMTSNNTADGTPSSTSTYQLQESLPGLTNQPGTDLHPGEFDTMQSPSTPIKDLDERTCRSSGSKSRGRGRKNNPSPPPDSDLERVFVWDLDETIIVFHSLLTGSYAQKYGKDPPMAVTLGLRMEEMIFNLADTHLFFNDLEECDQVHIDDVSSDDNGQDLSTYSFATDGFHAAASSANLCLPTGVRGGVDWMRKLAFRYRRVKELYNTYKNNVGGLLGPAKRDAWLQLRAEIEGLTDSWLTNALKSLSIISTRSNCINVLVTTTQLIPALAKVLLYSLGGAFPIENIYSATKIGKESCFERIVSRFGTNITYVVIGDGRDEEHAANQKRLPA

SEQ ID NO: 1983 - protein, 492 aa, Homo sapiens
MPTNGLHQVLKIQFGLVNDTDRYLTAESFGFKVNASAPSLKRKQTWVLEPDPGQGTAVLLRSSHLGRYLSAEEDGRVACEAEQPGRDCRFLVLPQPDGRWVLRSEPHGRFFGGTEDQLSCFATAVSPAELWTVHLAIHPQAHLLSVSRRRYVHLCPREDEMAADGDKPWGVDALLTLIFRSRRYCLKSCDSRYLRSDGRLVWEPEPRACYTLEFKAGKLAFKDCDGHYLAPVGPAGTLKAGRNTRPGKDELFDLEESHPQVVLVAANHRYVSVRQGVNVSANQDDELDHETFLMQIDQETKKCTFYSSTGGYWTLVTHGGIHATATQVSANTMFEMEWRGRRVALKASNGRYVCMKKNGQLAAISDFVGKDEEFTLKLINRPILVLRGLDGFVCHHRGSNQLDTNRSVYDVFHLSFSDGAYRIRGRDGGFWYTGSHGSVCSDGERAEDFVFEFRERGRLAIRARSGKYLRGGASGLLRADADAPAGTALWEY

SEQ ID NO: 1984 - protein, 628 aa, Homo sapiens
MSSQGSPSVALSTTTVSSVAVQAGDSKIVIAVIKCGKWVQLQLAESQPNLLEIGSSQDETKKLLHDHELLLAKLKALEDRVWELLQEADKTAEENKDQSQVYDAMAETLGEAWAALVSMLERRTELLRLTSEFFENALEFAIKIDQAEDFLQNTHEFESAESLKSLLQLHEHHTKELLERSLALLNKSQQLTDFIEKFKCEGPNVNPELTQGAHSSCLKVDRLLELLQDRRRQLDKYLKQQWQELSQVLQICQWDQQENQVTCWFQKTIRNLQEQSLGSSLSDNEDRIHKQEELIIKAKAFDVLGRVEAYLKLLKSEGLSLAVLAVRHEELHRKIKDCTTDALQKGQTLISQVDSCSSQVSGIHEMMGCIKRRVDHLTEQCSAHKEYALKKQQLTASVEGYLRKVEMSIQKISPVLSNAMDVGSTRSESEKILNKYLELDIQAKETSHELEAAAKTMMEKNEFVSDEMVSLSSKARWLAEELNLFGQSIDYRSQVLQTYVAFLKSSEEVEMQFQSLKEFYETEIPQKEQDDAKAKHCSDSAEKQWQLFLKKSFITQDLGLEFLNLINMAKENEILDVKNEVYLMKNTMENQKAEREELSLLRLAWQLKATESKPGKQQWAAFKEQLKK

SEQ ID NO: 1985 - protein, 755 aa, Homo sapiens
MIYEEDAEEWALYLTEVFLHVVKREAILLYRLENFSFRHLELLNLTSYKCKLLILSNSLLRDLTPKKCQFLEKILHSPKSVVTLLCGVKSSDQLYELLNISQSRWEISTEQEPEDYISVIQSIIFKDSEDYFEVNIPTDLRAKHSGEISERKEIEELSEASRNTIPLAVVLPTEIPCENPGEIFIILRDEVIGDTVEVEFTSSNKRIRTRPALWNKKVWCMKALEFPAGSVHVNVYCDGIVKATTKIKYYPTAKAKECLFRMADSGESLCQNSIEELDGVLTSIFKHEIPYYEFQSLQTEICSQNKYTHFKELPTLLHCAAKFGLKNLAIHLLQCSGATWASKMKNMEGSDPAHIAERHGHKELKKIFEDFSIQEIDINNEQENDYEEDIASFSTYIPSTQNPAFHHESRKTYGQSADGAEANEMEGEGKQNGSGMETKHSPLEVGSESSEDQYDDLYVFIPGADPENNSQEPLMSSRPPLPPPRPVANAFQLERPHFTLPGTMVEGQMERSQNWGHPGVRQETGDEPKGEKEKKEEEKEQEEEEDPYTFAEIDDSEYDMILANLSIKKKTGSRSFIINRPPAPTPRPTSIPPKEETTPYIAQVFQQKTARRQSDDDKFCGLPKKQDRARIESPAFSTLRGCLTDGQEELILLQEKVKNGKMSMDEALEKFKHWQMGKSGLEMIQQEKLRQLRDCIIGKRPEEENVYNKLTIVHHPGGKETAHNENKFYNVHFSNKLPARPQVEKEFGFCCKKDH

SEQ ID NO: 1986 - protein, 102 aa, Homo sapiens
MASPEHPGSPGCMGPITQCTARTQQEAPATGPDLPHPGPDGHLDTHSGLSSNSSMTTRELQQYWQNQKCRWKHVKLLFEIASARIEERKVSKFVAPAPDATP

SEQ ID NO: 1987 - protein, 1211 aa, Homo sapiens
MGRHVATSCHVAWLLVLISGCWGQVNRLPFFTNHFFDTYLLISEDTPVGSSVTQLLAQDMDNDPLVFGVSGEEASRFFAVEPDTGVVWLRQPLDRETKSEFTVEFSVSDHQGVITRKVNIQVGDVNDNAPTFHNQPYSVRIPENTPVGTPIFIVNATDPDLGAGGSVLYSFQPPSQFFAIDSARGIVTVIRELDYETTQAYQLTVNATDQDKTRPLSTLANLAIIITDVQDMDPIFINLPYSTNIYEHSPPGTTVRIITAIDQDKGRPRGIGYTIVSGNTNSIFALDYISGVLTLNGLLDRENPLYSHGFILTVKGTELNDDRTPSDATVTTTFNILVIDINDNAPEFNSSEYSVAITELAQVGFALPLFIQVVDKDENLGLNSMFEVYLVGNNSHHFIISPTSVQGKADIRIRVAIPLDYETVDRYDFDLFANESVPDHVGYAKVKITLINENDNRPIFSQPLYNISLYENVTVGTSVLTVLATDNDAGTFGEVSYFFSDDPDRFSLDKDTGLIMLIARLDYELIQRFTLTIIARDGGGEETTGRVRINVLDVNDNVPTFQKDAYVGALRENEPSVTQLVRLRATDEDSPPNNQITYSIVSASAFGSYFDISLYEGYGVISVSRPLDYEQISNGLIYLTVMAMDAGNPPLNSTVPVTIEVFDENDNPPTFSKPAYFVSVVENIMAGATVLFLNATDLDRSREYGQESIIYSLEGSTQFRINARSGEITTTSLLDRETKSEYILIVRAVDGGVGHNQKTGIATVNITLLDINDNHPTWKDAPYYINLVEMTPPDSDVTTVVAVDPDLGENGTLVYSIQPPNKFYSLNSTTGKIRTTHAMLDRENPDPHEAELMRKIVVSVTDCGRPPLKATSSATVFVNLLDLNDNDPTFQNLPFVAEVLEGIPAGVSIYQVVAIDLDEGLNGLVSYRMPVGMPRMDFLINSSSGVVVTTTELDRERIAEYQLRVVASDAGTPTKSSTSTLTIHVLDVNDETPTFFPAVYNVSVSEDVPREFRVVWLNCTDNDVGLNAELSYFITGGNVDGKFSVGYRDAVVRTVVGLDRETTAAYMLILEAIDNGPVGKRHTGTATVFVTVLDVNDNRPIFLQSSYEASVPEDIPEGHSILQEDLASPCISPAPPRRAFQSSGEKETSQFPGKELRREPGPSKAQNRAAFTEPLAEAPLLGSKQAQEERAPLPREQAQQLQGSEGEKGGP

SEQ ID NO: 1988 - protein, 213 aa, Homo sapiens
MVEALRVWASTHMSPSWTLLKLCDVQPMQYFDLTCQLLGKAEVDGASFLLKVWDGTRTPFPSWRVLIQDLVLEGDLSHIHRLQNLTIDILVYDNHVHVARSLKVGSFLRIYSLHTKLQSMNSENQTMLSLEFHLHGGTSYGRGIRVLPESNSDVDQLKKDLESANLTANQHSDVICQSEPDDSFPSSGSVSLYEVERCQQLSATILTDHQYLE

SEQ ID NO: 1989 - protein, 686 aa, Homo sapiens
MYVGSKDYVLSLDLHDINREPLIIHWAASPQRIEECVLSGKDVNGECGNFVRLIQPWNRTHLYVCGTGAYNPMCTYVNRGRRAQDYIFYLEPERLESGKGKCPYDPKLDTASALINEELYAGVYIDFMGTDAAIFRTLGKQTAMRTDQYNSRWLNDPSFIHAELIPDSAERNDDKLYFFFRERSAEAPQSPAVYARIGRICLNDDGGHCCLVNKWSTFLKARLVCSVPGEDGIETHFDELQDVFVQQTQDVRNPVIYAVFTSSGSVFRGSAVCVYSMADIRMVFNGPFAHKEGPNYQWMPFSGKMPYPRPGTCPGGTFTPSMKSTKDYPDEVINFMRSHPLMYQAVYPLQRRPLVVRTGAPYRLTTIAVDQVDAADGRYEVLFLGTDRGTVQKVIVLPKDDQELEELMLEEVEVFKDPAPVKTMTISSKRQQLYVASAVGVTHLSLHRCQAYGAACADCCLARDPYCAWDGQACSRYTASSKRRSRRQDVRHGNPIRQCRGFNSNANKNAVESVQYGVAGSAAFLECQPRSPQATVKWLFQRDPGDRRREIRAEDRFLRTEQGLLLRALQLSDRGLYSCTATENNFKHVVTRVQLHVLGRDAVHAALFPPLSMSAPPPPGAGPPTPPYQELAQLLAQPEVGLIHQYCQGYWRHVPPSPREAPGAPRSPEPQDQKKPRNRRHHPPDT

SEQ ID NO: 1990 - protein, 434 aa, Homo sapiens
MVQDGTFKTRDSTWTCESTRMAAAPPSYCFVAFPPRAKDGLVVFGKNSARPRDEVQEVVYFSAADHEPESKVECTYISIDQVPRTYAIMISRPAWLWGAEMGANEHGVCIANEAINTREPAAEIEALLGMDLVRLGLERGETAKEALDVIVSLLEEHGQGGNYFEDANSCHSFQSAYLIVDRDEAWVLETIGKYWAAEKVTEGVRCICSQLSLTTKMDAEHPELRSYAQSQGWWTGEGEFNFSEVFSPVEDHLDCGAGKDSLEKQEESITVQTMMNTLRDKASGVCIDSEFFLTTASGVSVLPQNRSSPCIHYFTGTPDPSRSIFKPFIFVDDVKLVPKTQSPCFGDDDPAKKEPRFQEKPDRRHELYKAHEWARAIIESDQEQGRKLRSTMLELEKQGLEAMEEILTSSEPLDPAEVGDLFYDCVDTEIKFFK

SEQ ID NO: 1991 - protein, 3197 aa, Homo sapiens
MEIRLEILTSTGIKQKKPWPRVSWLGKEKEAVFLLDDKFINEINLLSGKIKKKIPSLQPFLKDVIVLTTSSNDAWLAGVLTTGELFLWNKDQDCLKTIPITEKPKEMIKATVASSLRLYLYVSGNGKRIVLITPSGCIFLWEYLELKNILSSKSLSLAGRWSQVIPEEAVLLPSTEDKEAVVNAVFIKNELFGDCCLCSFTFYSGECLKLTFLAIRWHENVFTSVRSLPYHVHWAQQDCHLCSLIPKCESVKSRGALISAFSRDGLTLAVTLNQKDPKATQVLFINTLNFVTLCGSLKGCSNKSPVVPATLIRSYWVGDISWTHDSLFLACMLKRGSLVLLTCQGELLTLITFGCSIEFGPAEFIPLHPLITYRPQQFTFQDSNNSVDSSASDSDPMRQRFSIKAHSRLPYLVISDGYMVTTLRFLDSLSPSVHMRSLLLDSTQRLEKIYQSVILSKPKGKGLNLRSLNSLRSSLLEHQGNESSADFTVPKFLQAEETINENAADFQDFEAEETNEGRHFPDNLCPFWNKRDDVLCSSMKEGRLEFASMFDTIHAKDDSEETDRTITELHSIQKSLLAAWTIGISKTVTEKNLMLNYIVVCITHFFYILQFIKCPFPKLDLVLSKSSRHNAWILCIFQLFHQCLSIHYWDIRYKQDVGHLIKLTSNTVKLLLTQQQKGQLFSEKLLACFYLLKMVADNLNGVYILQPEVISASADGSKITAQDSLVVPIFQMFQDSGFQKNWSWNSFFKIHPQVVNPVQQPGHRLLILWRILYKKTLWYQAQLNRRVPEADSQLTEKMTHEASTVKSLLCHLQANLQSTGDCLNQTLELKSINGEECFLLGSYEKSVQLWKKALQEIEEKGGRRTYFLQIRYYLSLLYCHLYSYNLNDAQGLCDQLAREILRWSQLPVKENKDFSGAAKSHFECGMVGGVHPEAAVRVVQSMARFMAAYFTNQQLCILPPHHVNVLPPLHIKTEQSFRLIPLQHSKVASVVRDQNLSNVWTVEYALELLFIGGLVPEAVWLAYKLGDWKTSVSIGVAFQLFCKRDSNFMRSKKKSLNLPLRMTPAQIFQEKLQCVLGQPASLEAKNEMGSKYKQFTDPIEEEDANLLFGSVQEVLKASVMADADILSETFQLLIDSAKDFSKRLWGLVPFGLYLPAPPLYCPQPAILSEEDGDDLLLKAEKNNRQKVSGILQRVLLLFRAAQCSFPVAQWYILQLRWARKVMQKIRMKGSLPSLSPFPQSLLNYCKGGIAFFRPGAAGDHKLDEVSIRAIGCFRELCALCWMLHVRDKLSYSCRQYQKARENVKGEKDLEVEFDSCMIEHCLSAVEWAYRMLPFSRFFNMEELIQDIILSLIGELPPIRKVAEIFVKAFPYPEDVRVPLRDKYHSLHQRLRHCVVKGPQTEEMMSVVMHSIQKVRVKALKRVQRNIGSFEVNIWEPIEEEKPDEAPGVDRYSLGTSLSRSTLTELGDSVVHSDADTFSEALSVEEKSRINIYQRNAPNHMELTSIHKPTDKRKMCNQKENPTKKEDHEKLSQNTLPVIGVWEFERDDDEYIKFLDLFLSYILERDLPYSRDADIPFLTSFSGKLREHELNSLLFDVHTTLKRHQSKTKSQNVFRAGSCFVVAPESYESEKSSSLNDEYGMHLENQKLSSSVLVNQGIKPFLQYPSNEVNKNEGMSGLFGLKQRSIYKIQDDTREKCLIQRSSNHIFWTPKSIKTRRCIFKAIQCNDINPQEDLPLALNTFGSIGRLLEWMIRWSNRRLLCDSGITESSSEYSPVIRVKTSTAAILTSLWLLEQPYFATYKAKNAIIKMVENRDTGCQIGPNIERESKSDAGGSVAVATPGGTEERNGQNKSCQNILNRMPTEAKNPDIKEINDDIISITHNTKKEFIDIDENLLEVEAFTEEEMDMHISDYEEDIEESVGGFRSPSLAICMMTLPQQLEEEFTEEVQCQREEPLETIMEEKSTEQKGMIEAFSHPGHTTPQSMQVDTSSEISSAQISTYKEKSSSVPLLISNGVNVASQPPAPTPQKTQRNEFTAQLPDCSESVRQMLQDEMFKLVQLQQINFMSLMQIVGSSFANLPDTQQLVQQSQSVHLGESQESNLRGCGDVEDSNKNLKERFFIKPQSMGENAREPRKNSPHCHEGTIPSGQNSTGNVQNVPHGSIPLCQLNGQPRKKGPIPSSQNLPSTSFYPAPAGNTHLYLLSTPSVVQKAPRLIPHAKTFSPGDGFPLLQFKSKQEFQPLFLHTGSIPQVPFRPLPQPREAWGLSDSFQPALPQRAAQTTPASHLNVSQYNTEARKKEVEQKTWAETVITEIPNHVNLDQYVGQENLTPQQDSSVFIKPEKLFDVKPGTLEISPHHSFGLPLLYLPLKPPNMFPSTSRASITVPSTPIQPIAEERKYPRLSLLHSHLSPENRCKKTQLIPLENLIAFKQSQQKLTHNLFEQGDAGHLQLLKVKIEPPEVRQGKDSKKRQRRRAEKELQEKRCEKLRRKPNVTFRPENSIINNDDSEIIKKPKEQQEHCGSHPLDDFDVPFEMLQDDNTSAGLHFMASVKKKAIGSQDASTNTDPEHEPLTAPQLLVPDVYLNLKLSSEMSEKPWSPSIPHTVTNLELPVREEPSNDNVIKQQSDHLAVPSSAELHYMAASVTNAVPPHNFKSQGLPKPEFRFKGQSTKSDSAEDYLLWKRLQGVSAACPAPSSAAHQLEHLSAKLQKIDEQLLAIQNIAENIEQDFPKPEMLDLHCDKIGPVDHIEFSSGPEFKKTLASKTISISEEVRFLTHMDEEDQSDKKETSEPEFSITENYSGQKTCVFPTADSAVSLSSSSDQNTTSPGMNSSDELCESVSVHPLQMTGLTDIADIIDDLIIKDGVSSEELGLTEQAMGTSRIQHYSGRHSQRTDKERREIQAWMKRKRKERMAKYLNELAEKRGQEHDPFCPRSNPLYMTSREIRLRQKMKHEKDRLLLSEHYSRRISQAYGLMNELLSESVQLPTLPQKPLPNKPSPTQSSSCQHCPSPRGENQHGHSFLINRPGKVKYMSKPSYIHKRKSFGQPQGSPWPHGTATFTIQKKAGGAKAAVRKATQSPVTFQKGSNAPCHSLQHTKKHGSAGLAPQTKQVCVEYEREETVVSPWTIPSEIHKILHESHNSLLQDLSPTEEEEPEHPFGVGGVDSVSESTGSILSKLDWNAIEDMVASVEDQGLSVHWALDL

SEQ ID NO: 1992 - protein, 473 aa, Homo sapiens
MDHAEENEILAATQRYYVERPIFSHPVLQERLHTKDKVPDSIADKLKQAFTCTPKKIRNIIYMFLPITKWLPAYKFKEYVLGDLVSGISTGVLQLPQGLAFAMLAAVPPIFGLYSSFYPVIMYCFLGTSRHISIGPFAVISLMIGGVAVRLVPDDIVIPGGVNATNGTEARDALRVKVAMSVTLLSGIIQFCLGVCRFGFVAIYLTEPLVRGFTTAAAVHVFTSMLKYLFGVKTKRYSGIFSVVYSTVAVLQNVKNLNVCSLGVGLMVFGLLLGGKEFNERFKEKLPAPIPLEFFAVVMGTGISAGFNLKESYNVDVVGTLPLGLLPPANPDTSLFHLVYVDAIAIAIVGFSVTISMAKTLANKHGYQVDGNQELIALGLCNSIGSLFQTFSISCSLSRSLVQEGTGGKTQLAGCLASLMILLVILATGFLFESLPQTIWLTTFVSSLFLGLDYGLITAVIIALLTVIYRTQR

SEQ ID NO: 1993 - protein, 334 aa, Homo sapiens
MMKPRPKRFIAKPCALCIGIEDSGPYQAQPNAILEKVFISITKYPDKKRLEGLSKQLDWNVRKIQCWFRHRRNQDKPPTLTKFCESMWRFTFYLCIFCYGIRFLWSSPWFWDIRQCWHNYPFQPLSSGLYHYYIMELAFYWSLMFSQFTDIKRKDFLIMFVHHLVTIGLISFSYINNMVRVGTLIMCLHDVSDFLLEAAKLANYAKYQRLCDTLFVIFSAVFMVTRLGIYPFWILNTTLFESWEIIGPYASWWLLNGLLLTLQLLHVIWSYLIARIALKALIRGKVSKDDRSDVESSSEEEDVTTCTKSPCDSSSSNGANRVNGHMGGSYWAEE

SEQ ID NO: 1994 - protein, 943 aa, Homo sapiens
MPSTSFPVPSKFPLGPAAAVFGRGETLGPAPRAGGTMKSAEEEHYGYASSNVSPALPLPTAHSTLPAPCHNLQTSTPGIIPPADHPSGYGAALDGGPAGYFLSSGHTRPDGAPALESPRIEITSCLGLYHNNNQFFHDVEVEDVLPSSKRSPSTATLSLPSLEAYRDPSCLSPASSLSSRSCNSEASSYESNYSYPYASPQTSPWQSPCVSPKTTDPEEGFPRGLGACTLLGSPRHSPSTSPRASVTEESWLGARSSRPASPCNKRKYSLNGRQPPYSPHHSPTPSPHGSPRVSVTDDSWLGNTTQYTSSAIVAAINALTTDSSLDLGDGVPVKSRKTTLEQPPSVALKVEPVGEDLGSPPPPADFAPEDYSSFQHIRKGGFCDQYLAVPQHPYQWAKPKPLSPTSYMSPTLPALDWQLPSHSGPYELRIEVQPKSHHRAHYETEGSRGAVKASAGGHPIVQLHGYLENEPLMLQLFIGTADDRLLRPHAFYQVHRITGKTVSTTSHEAILSNTKVLEIPLLPENSMRAVIDCAGILKLRNSDIELRKGETDIGRKNTRVRLVFRVHVPQPSGRTLSLQVASNPIECSQRSAQELPLVEKQSTDSYPVVGGKKMVLSGHNFLQDSKVIFVEKAPDGHHVWEMEAKTDRDLCKPNSLVVEIPPFRNQRITSPVHVSFYVCNGKRKRSQYQRFTYLPANVPIIKTEPTDDYEPAPTCGPVSQGLSPLPRPYYSQQLAMPPDPSSCLVAGFPPCPQRSTLMPAAPGVSPKLHDLSPAAYTKGVASPGHCHLGLPQPAGEAPAVQDVPRPVATHPGSPGQPPPALLPQQVSAPPSSSCPPGLEHSLCPSSPSPPLPPATQEPTCLQPCSPACPPATGRPQHLPSTVRRDESPTAGPRLLPEVHEDGSPNLAPIPVTVKREPEELDQLYLDDVNEIIRNDLSSTSTHS

SEQ ID NO: 1995 - protein, 613 aa, Homo sapiens
MDSHSGEPALLPCGTCDMVFRSSALLATHTQRFCIGHPTQEMTFGAQASVATEPQRAAVVPQEHQGVPQEPQGLPDQQASRSALKRLTEEEMRPWITEVPRVFAGPWTRSEARPQSPMSEAVGSPSERLRALFRTRARRVAEMEAQSRALQLRGEELSRRLQVVACTRGGMSRLFGLEQEIRELQAEAGRTRGALEVLGARIQELQAEPGNPLSSRREAELYSPVQKANPGTLAAEIRALREAYIRDGGRDPGVLGQIWQLQVEASALELQRSQTRRGRAGATSGELPVVEAENRRLEAEILALQMQRGRAPLGPQDLRLLGDASLQPKGRRDPPLLPPPVAPPLPPLPGFSEPQLPGTMTRNLGLDSHFLLPTSDMLGPAPYDPGAGLVIFYDFLRGLEASWIWVQLRTGLARDGRDTGRTTALPPALCLPPPPAPGPMGNCAILASRQPVPRLPPSSSVSLVCELQVWQGLAWARAPQPKAWVSLGLFDQDQRVLSGRWRLPLRALPLDPSLSLGQLNGIPQAGQAELFLRLVNARDAAVQTLAEINPASVHEYQYPPPVSSTSSLEASFLTPAVGFADPPPRTEEPLSGVKDRDEGLGPHHSSDLPPVSF

SEQ ID NO: 1996 - protein, 189 aa, Homo sapiens
MACLLRSFQRISAGVFFLALWGMVVGDKLLVVPQDGSHWLSMKDIVEVLSDRGHEIVVVVPEVNLLLKESKYYTRKIYPVPYDQEELKNRYQSFGNNHFAERSFLTAPQTEYRNNMIVIGLYFINCQSLLQDRDTLNFFKESKFDALFTDPALPCGVILAEYLGLPSVYLFRGFPCSLEHTFSRSPDPV

SEQ ID NO: 1997 - protein, 921 aa, Homo sapiens
MIDLSISNLEGLRTKCATSNDLTQKEIRTLESKLVKYFSRQLSCKKKVALQERNAELDGFPQLRHWFRIVDVRKEVLEEISPGQLSLEDLLEMTDEQVCETVEKYGANREECARLNASLSCLRNVHMSGGNLSKQDWTIQWPTTETGKENNPVCPPEPTPWIRTHLSQSPRVPSKCVQHYCHTSPTPGAPVYTHVDRLTVDAYPGLCPPPPLESGHRSLPPSPRQRHAVRTPPRTPNIVTTVTPPGTPPMRKKNKLKPPGTPPPSSRKLIHLIPGFTALHRSKSHEFQLGHRVDEAHTPKAKKKSKPLNLKIHSSVGSCENIPSQQRSPLLSERSLRSFFVGHAPFLPSTPPVHTEANFSANTLSVPRWSPQIPRRDLGNSIKHRFSTKYWMSQTCTVCGKGMLFGLKCKNCKLKCHNKCTKEAPPCHLLIIHRGDPARLVRTESVPCDINNPLRKPPRYSDLHISQTLPKTNKINKDHIPVPYQPDSSSNPSSTTSSTPSSPAPPLPPSATPPSPLHPSPQCTRQQKNFNLPASHYYKYKQQFIFPDVVPVPETPTRAPQVILHPVTSNPILEGNPLLQIEVEPTSENEEVHDEAEESEDDFEEMNLSLLSARSFPRKASQTSIFLQEWDIPFEQLEIGELIGKGRFGQVYHGRWHGEVAIRLIDIERDNEDQLKAFKREVMAYRQTRHENVVLFMGACMSPPHLAIITSLCKGRTLYSVVRDAKIVLDVNKTRQIAQEIVKGMGYLHAKGILHKDLKSKNVFYDNGKVVITDFGLFSISGVLQAGRREDKLRIQNGWLCHLAPEIIRQLSPDTEEDKLPFSKHSDVFALGTIWYELHAREWPFKTQPAEAIIWQMGTGMKPNLSQIGMGKEISDILLFCWAFEQEERPTFTKLMDMLEKLPKRNRRLSHPGHFWKSAEL

SEQ ID NO: 1998 - protein, 482 aa, Homo sapiens
MPRNQGFSEPEYSAEYSAEYSVSLPSDPDRGVGRTHEISVRNSGSCLCLPRFMRLTFVPESLENLYQTYFKRQRHETLLVLVVFAALFDCYVVVMCAVVFSSDKLASLAVAGIGLVLDIILFVLCKKGLLPDRVTRRVLPYVLWLLITAQIFSYLGLNFARAHAASDTVGWQVFFVFSFFITLPLSLSPIVIISVVSCVVHTLVLGVTVAQQQQEELKGMQLLREENLMLSILPKHVADEMLKDMKKDESQKDQQQFNTMYMYRHENVSILFADIVGFTQLSSACSAQELVKLLNELFARFDKLAAKYHQLRIKILGDCYYCICGLPDYREDHAVCSILMGLAMVEAISYVREKTKTGVDMRVGVHTGTVLGGVLGQKRWQYDVWSTDVTVANKMEAGGIPGRVHISQSTMDCLKGEFDVEPGDGGSRCDYLEEKGIETYLIIASKPEVKKTATQNGLNGSALPNGAPASSKSSSPALIETK

SEQ ID NO: 1999 - protein, 127 aa, Homo sapiens
MGRPLLLPLLLLLQPPAFLQPGGSTGSGPSYLYGVTQPKHLSASMGGSVEIPFSFYYPWELAIVPNVRISWRRGHFHGQSFYSTRPPSIHKDYVNRLFLNWTEGQESGFLRISNLRKEDQSVYFCRV

SEQ ID NO: 2000 - protein, 706 aa, Homo sapiens
MAGLTAAAPRPGVLLLLLSILHPSRPGGVPGAIPGGVPGGVFYPGAGLGALGGGALGPGGKPLKPVPGGLAGAGLGAGLGAFPAVTFPGALVPGGVADAAAAYKAAKAGAGLGGVPGVGGLGVSAGAVVPQPGAGVKPGKVPGVGLPGVYPGGVLPGARFPGVGVLPGVPTGAGVKPKAPGVGGAFAGIPGVGPFGGPQPGVPLGYPIKAPKLPGGYGLPYTTGKLPYGYGPGGVAGAAGKAGYPTGTGVGPQAAAAAAAKAAAKFGAGAAGVLPGVGGAGVPGVPGAIPGIGGIAGVGTPAAAAAAAAAAKAAKYGAAAGLVPGGPGFGPGVVGVPGAGVPGVGVPGAGIPVVPGAGIPGAAVPGVVSPEAAAKAAAKAAKYGARPGVGVGGIPTYGVGAGGFPGFGVGVGGIPGVAGVPGVGGVPGVGGVPGVGISPEAQAAAAAKAAKYGVGTPAAAAAKAAAKAAQFGLVPGVGVAPGVGVAPGVGVAPGVGLAPGVGVAPGVGVAPGVGVAPGIGPGGVAAAAKSAAKVAAKAQLRAAAGLGAGIPGLGVGVGVPGLGVGAGVPGLGVGAGVPGFGAVPGALAAAKAAKYGAAVPGVLGGLGALGGVGIPGGVVGAGPAAAAAAAKAAAKAAQFGLVGAAGLGGLGVGGLGVPGVGGLGGIPPAAAAKAAKYGVAARPGFGLSPIFPGGACLGKACGRKRK

SEQ ID NO: 2001 - protein, 389 aa, Homo sapiens
LTDRQTDTAPSPSYHLLPGRRRTVDAAASRGQGPEPAPGGGVEGVGARGVALKLFVQLLGCSRFGGAVVRAGEAEPSGAARSASSGREEPQPEEGEEEEEKEEERGPQWRLGARKPGSWTGEAAVCADSAPAARAPQALARASGRGGRVARRGAEESGPPHSPSRRGSASRAGPGRASETMNFLLSWVHWSLALLLYLHHAKWSQAAPMAEGGGQNHHEVVKFMDVYQRSYCHPIETLVDIFQEYPDEIEYIFKPSCVPLMRCGGCCNDEGLECVPTEESNITMQIMRIKPHQGQHIGEMSFLQHNKCECRPKKDRARQEKKSVRGKGKGQKRKRKKSRPCGPCSERRKHLFVQDPQTCKCSCKNTDSRCKARQLELNERTCRCDKPRR

SEQ ID NO: 2002 - protein, 102 aa, Homo sapiens
MLPPQKKPWESMAKGLVLGALFTSFLLLVYSYAVPPLHAGLASTTPEAAASCSPPALEPEAVIRANGSAGECQPRRNIVFLKTHKTASSTLLNILFRFGQKH

SEQ ID NO: 2003 - protein, 297 aa, Homo sapiens
MEVMNLMEQPIKVTEWQQTYTYDSGIHSGANTCVPSVSSKGIMEEDEACGRQYTLKKTTTYTQGVPPSQGDLEYQMSTTARAKRVREAMCPGVSGEDSSLLLATQVEGQATNLQRLAEPSQLLKSAIVHLINYQDDAELATRALPELTKLLNDEDPVVVTKAAMIVNQLSKKEASRRALMGSPQLVAAVVRTMQNTSDLDTARCTTSILHNLSHHREGLLAIFKSGGIPALVRMLSSPVESVLFYAITTLHNLLLYQEGAKMAVRLADGLQKMVPLLNKNNPKFLAITTDCLQLLAY

SEQ ID NO: 2004 - protein, 120 aa, Homo sapiens
MKKKLVVLGLLAVVLVLVIVGLCLWLPSASKEPDNHVYTRAAVAADAKQCSKIGRDALRDGGSAVDAAIAALLCVGLMNAHSMGIGGGLFLTIYNSTTRKAEVINAREVAPRLAFATMFN

SEQ ID NO: 2005 - protein, 440 aa, Homo sapiens
MQTKGGQTWARRALLLGILWATAHLPLSGTSLPQRLPRATALGLSQDVAGTTFMAAGSSAPELVTAFLGVFITKGDIGISTILGSAIYNLLGICAACGLLSNTVSTLSCWPLFRDCAAYTISAAAVLGIIYDNQVYWYEGALLLLIYGLYVLVLCFDIKINQYIIKKCSPCCACLAKAMERSEQQPLMGWEDEGQPFIRRQSRTDSGIFYEDSGYSQLSISLHGLSQVSEDPPSVFNMPEADLKRIFWVLSLPIITLLFLTTPDCRKKFWKNYFVITFFMSAIWISAFTYILVWMVTITGETLEIPDTVMGLTLLAAGTSIPDTIASVLVARKGKGDMAMSNIVGSNVFDMLCLGIPWFIKTAFINGSAPAEVNSRGLTYITISLNISIIFLFLAVHFNGWKLDRKLGIVCLLSYLGLATLSVLYELGIIGNNKIRGCGG

SEQ ID NO: 2006 - protein, 403 aa, Homo sapiens
MRPPQCLLHTPSLASPLLLLLLWLLGGGVGAEGREDAELLVTVRGGRLRGIRLKTPGGPVSAFLGIPFAEPPMGPRRFLPPEPKQPWSGVVDATTFQSVCYQYVDTLYPGFEGTEMWNPNRELSEDCLYLNVWTPYPRPTSPTPVLVWIYGGGFYSGASSLDVYDGRFLVQAERTVLVSMNYRVGAFGFLALPGSREAPGNVGLLDQRLALQWVQENVAAFGGDPTSVTLFGESAGAASVGMHLLSPPSRGLFHRAVLQSGAPNGPWATVGMGEARRRATQLAHLVGCPPGGTGGNDTELVACLRTRPAQVLVNHEWHVLPQESVFRFSFVPVVDGDFLSDTPEALINAGDFHGLQVLVGVVKDEGSYFLVYGAPGFSKDNESLISRAEFLAGVRVGVPQGSQ

SEQ ID NO: 2007 - protein, 348 aa, Homo sapiens
MPAPPCASCHAARAALRRPLSGQALCGACFCAAFEAEVLHTVLAGRLLPPGAVVAVGASGGKDSTVLAHVLRALAPRLGISLQLVAVDEGIGGYRDAALAAVRRQAARWELPLTVVAYEDLFGGWTMDAVARSTAGSGRSRSCCTFCGVLRRRALEEGARRVGATHIVTGHNADDMAETVLMNFLRGDAGRLARGGGLGSPGEGGALPRCRPLQFASQKEVVLYAHFRRLDYFSEECVYAPEAFRGHARDLLKRLEAARPSAVLDLVHSAERLALAPAARPPRPGACSRCGALASRALCQACALLDGLNRGRPRLAIGKGRRGLDEEATPGTPGDPARPPASKAVPTF

SEQ ID NO: 2008 - protein, 226 aa, Homo sapiens
MGRPLLLPLLPLLLPPAFLQPSGSTGSGPSYLYGVTQPKHLSASMGGSVEIPFSFYYPWELATAPDVRISWRRGHFHRQSFYSTRPPSIHKDYVNRLFLNWTEGQKSGFLRISNLQKQDQSVYFCRVELDTRSSGRQQWQSIEGTKLSITQGQQRTKATTPAREPFQNTEEPYENIRNEGQNTDPKLNPKLHLTQSTSQPPSPQEPPERDPVLCLKGLTNGQPSQD

SEQ ID NO: 2009 - protein, 188 aa, Homo sapiens
MFPPSGSTGLIPPSHFQARPLSTLPRMAPTWLSDIPLVQPPGHQDVSERRLDTQRPQVTMWERDVSSDRQEPGRRGRSWGLEGSQALSQQAEVIVRQLQELRRLEEEVRLLRETSLQQKMRLEAQAMELEALARAEKAGRAEAEGLRAALAGAEVVRKNLEEGSQRELEEVQRLHQEQLSSLTQAHEE

SEQ ID NO: 2010 - protein, 71 aa, Homo sapiens
MLPPQKKPWESMAKGLVLGALFTSFLLLVYSYAVPPLHAGLASTTPEAAASCSPPALEPEAVIRANGSAGE

SEQ ID NO: 2011 - protein, 312 aa, Homo sapiens
NRGVVSRGWRPGWRRPGRGSPKDRLPPAPRKRALVSVGVAERAVHETPTLTHETFKALKPGLSAYADDVEKSAQGIRELLDVAKQDIPFDFWKATPLVLKATAGLRLLPGEKAQKLLQKVKKVFKASPFLVGDDCVSIMNGTDEGVSAWITINFLTGSLKTPGGSSVGMLDLGGGSTQIAFLPRVEGTLQASPPGYLTALRMFNRTYKLYSYSYLGLGLMSARLAILGGVEGQPAKDGKELVSPCLSPSFKGEWEHAEVTYRVSGQKAAASLHELCAARVSEVLQNRVHRTEEVKHVDFYAFSYYYDLAAGV

SEQ ID NO: 2012 - protein, 1530 aa, Homo sapiens
MSSQGSPSVALSTTTVSSVAVQAGDSKIVIAVIKCGKWVQLQLAESQPNLLEIGSSQDETKKLLHDHELLLAKLKALEDRVWELLQEADKTAEENKDQSQVYDAMAETLGEAWAALVSMLERRTELLRLTSEFFENALEFAIKIDQAEDFLQNTHEFESAESLKSLLQLHEHHTKELLERSLALLNKSQQLTDFIEKFKCEGPNVNPELTQGAHSSCLKVDRLLELLQDRRRQLDKYLKQQWQELSQVLQICQWDQQENQVTCWFQKTIRNLQEQSLGSSLSDNEDRIHKQEELIIKAKEWNSAVEKLKSEALRILLSKDYVEKEHLQLSHQKLSQLQEEFGQLMVERNTWLKKANEFFNSANKAFDVLGRVEAYLKLLKSEGLSLAVLAVRHEELHRKIKDCTTDALQKGQTLISQVDSCSSQVSGIHEMMGCIKRRVDHLTEQCSAHKEYALKKQQLTASVEGYLRKVEMSIQKISPVLSNAMDVGSTRSESEKILNKYLELDIQAKETSHELEAAAKTMMEKNEFVSDEMVSLSSKARWLAEELNLFGQSIDYRSQVLQTYVAFLKSSEEVEMQFQSLKEFYETEIPQKEQDDAKAKHCSDSAEKQWQLFLKKSFITQDLGLEFLNLINMAKENEILDVKNEVYLMKNTMENQKAEREELSLLRLAWQLKATESKPGKQQWAAFKEQLKKTSHNLKLLQEALMPVSALDLGGSLQFILDLRQKWNDMKPQFQQLNDEVQYIMKESEELTGRGAPVKEKSQQLKDLIHFHQKQKERIQDYEDILYKVVQFHQVKEELGRLIKSRELEFVEQPKELGDAHDVQIHLRCSQEKQARVDHLHRLALSLGVDIISSVQRPHCSNVSAKNLQQQLELLEEDSMKWRAKAEEYGRTLSRSVEYCAMRDEINELKDSFKDIKKKFNNLKFNYTKKNEKSRNLKALKYQIQQVDMYAEKMQALKRKMEKVSNKTSDSFLNYPSDKVNVLLEVMKDLQKHVDDFDKVVTDYKKNLDLTEHFQEVIEECHFWYEDASATVVRVGKYSTECKTKEAVKILHQQFNKFIAPSVPQQEERIQEATDLAQHLYGLEEGQKYIEKIVTKHKEVLESVTELCESLTELEEKLKQGDVLKMNPNLEDFHYDYIDLLKEPAKNKQTIFNEERNKGQVQVADLLGINGTGEERLPQDLKVSTDKEGGVQDLLLPEDMLSGEEYECVSPDDISLPPLPGSPESPLAPSDMEVEEPVSSSLSLHISSYGVQAGTSSPGDAQESVLPPPVAFADACNDKRETFSSHFERPYLQFKAEPPLTSRGFVEKSTALHRISAEHPESMMSEVHERALQQHPQAQGGLLETREKMHADNNFTKTQDRLHASSDAFSGLRFQSGTSRGYQRQMVPREEIKSTSAKSSVVSLADQAPNFSRLLSNVTVMEGSPVTLEVEVTGFPEPTLTWYKKGQKLSADGHLQVLHKETRHSVFIPKVCKADAGLYVARAQNSSGALSSNVILHVTGNCRLPITRVNWITLCVVYVSVSLMYWLLTQ

SEQ ID NO: 2013 - protein, 224 aa, Homo sapiens
GPPGSEGLPGPPGPAGPRGERGPQGNSGEKGDQGFQGQPGFPGPPGPPGFPGKVGSPGPPGPQAEKGPAGLDGLDGKDGKPGLRGDPGPAGPPGLMGPPGFKGKTGHPGLPGPKGDCGKPGPPGSTGRPGAEGEPGAMGPQGRPGPPGHVGPPGPPGQPGPAGISAVGLKGDRGATGERGLAGLPGQPGPPGHPGPPGEPGTDGAAGKEGPPGKQGFYGPPGPK

SEQ ID NO: 2014 - protein, 679 aa, Homo sapiens
IDASGKGEFSRRWCVLGDGVLSYFENERAVTPNGEIRASEIVCLAVPPPDTHGFEHTFEVYTEGERLYLFGLESAEQAHEWVKCIAKAFVPPLAEDLLARDFERLGRLPYKAGLSLQRAQEGWFSLSGSELRAVFPEGPCEEPLQLRKLQELSIQGDSENQVLVLVERRRTLYIQGERRLDFMGWLGAIQKAAASMGDTLSEQQLGDSDIPVIVYRCVDYITQCGLTSEGIYRKCGQTSKTQRLLESLRQDARSVHLKEGEQHVDDVSSALKRFLRDLPDGLFTRAQRLTWLEASEIEDEEEKVSRYRELLVRLPPVNRATVKALISHLYCVQCFSDTNQMNVHNLAIVFGPTLFQTDGQDYKAGRVVEDLINHYVVVFSVDEEELRKQREEITAIVKMRVAGTASGTQHAGDFICTVYLEEKKAETEQHIKVPASMTAEELTLEILDRRNVGIREKDYWTCFEVNEREEAERPLHFAEKVLPILHGLGTDSHLVVKKHQAMEAMLLYLASRVGDTKHGMMKFREDRSLLGLGLPSGGFHDRYFILNSSCLRLYKEVRSHRPEKEWPIKSLKVYLGVKKKLRPPTCWGFTVVHETEKHEKQQWYLCCDTQMELREWFATFLFVQHDGLVWPSEPSRVSRAVPEVRLGSVSLIPLRGSENEMRRSVAAFTADPLSLLRNV

SEQ ID NO: 2015 - protein, 194 aa, Homo sapiens
MQPQHGPWQTRMRKISNHGSLRVAKVAYPLGLCVGVFIYVAYIKWHRATATQAFFSITRAAPGARWGQQAHSPLGTAADGHEVFYGIMFDAGSTGTRVHVFQFTRPPRETPTLTHETFKALKPGLSAYADDVEKVKKVFKASPFLVGDDCVSIMNGTDEGVSAWITINFLTGSLKTPGGSSVGMLDLGGGSTQI

SEQ ID NO: 2016 - protein, 380 aa, Homo sapiens
VDKSCPRGIIRVEESFRSGAKPPLRARDFMATNPEHLEILKKMGVSLIHLKDGRVQLVQHAIQAASSIDAEDGLRFMQEMIELSSQQQKEQQLPPRAVQIVSHPFFGRVVLTAGPAQFGLDLSKHKETRGFVASSKPSNGCSELTNPEAVMGKIALIQRGQCMFAEKARNIQNAGAIGGIVIDDNEGSSSDTAPLFQMAGDGKDTDDIKIPMLFLFSKEGSIILDAIREYEEVEVLLSDKAKDRDPEMENEEQPSSENDSQNQSGEQISSSSQEVDLVDQESSEENSLNSHPESLSLADMDNAASISPSEQTSNPTENHETTNLNGECTDLDNQLQEQSETEEDSNPNVSWGKKVQPIDSILADWNEDIEAFEMMEKDEL

SEQ ID NO: 2017 - protein, 279 aa, Homo sapiens
MLPPQKKPWESMAKGLVLGALFTSFLLLVYSYAVPPLHAGLASTTPEAAASCSPPALEPEAVIRANGSAGECQPRRNIVFLKTHKTASSTLLNILFRFGQKHRLKFAFPNGRNDFDYPTFFARSLVQDYRPGACFNIICNHMRFHYDEVRGLVPTNAIFITVLRDPARLFESSFHYFGPVVPLTWKLSAGDKLTEFLQDPDRYYDPNGFNAHYLRNLLFFDLGYDNSLDPSSPQVQEHILEVERRFHLVLLQEYFDESLVLLKDLLCWELEDVLYFKLN

SEQ ID NO: 2018 - protein, 99 aa, Homo sapiens
MGETEKRIETHRIRCLSKLKMFLLAITCAFVSKTLSGSYMNSMLTQIERQFNIPTSLVGFINGSFEIGNLLLIIFVSYFGTKLHRPIMIGIGCVVMGLG

SEQ ID NO: 2019 - protein, 1956 aa, Homo sapiens
MEFPIGSLETNNFRRFTPESLVEIEKQIAAKQGTKKAREKHREQKDQEEKPRPQLDLKACNQLPKFYGELPAELIGEPLEDLDPFYSTHRTFMVLNKGRTISRFSATRALWLFSPFNLIRRTAIKVSVHSWFSLFITVTILVNCVCMTRTDLPEKIEYVFTVIYTFEALIKILARGFCLNEFTYLRDPWNWLDFSVITLAYVGTAIDLRGISGLRTFRVLRALKTVSVIPGLKVIVGALIHSVKKLADVTILTIFCLSVFALVGLQLFKGNLKNKCVKNDMAVNETTNYSSHRKPDIYINKRGTSDPLLCGNGSDSGHCPDGYICLKTSDNPDFNYTSFDSFAWAFLSLFRLMTQDSWERLYQQTLRTSGKIYMIFFVLVIFLGSFYLVNLILAVVTMAYEEQNQATTDEIEAKEKKFQEALEMLRKEQEVLAALGIDTTSLHSHNGSPLTSKNASERRHRIKPRVSEGSTEDNKSPRSDPYNQRRMSFLGLASGKRRASHGSVFHFRSPGRDISLPEGVTDDGVFPGDHESHRGSLLLGGGAGQQGPLPRSPLPQPSNPDSRHGEDEHQPPPTSELAPGAVDVSAFDAGQKKTFLSAEYLDEPFRAQRAMSVVSIITSVLEELEESEQKCPPCLTSLSQKYLIWDCCPMWVKLKTILFGLVTDPFAELTITLCIVVNTIFMAMEHHGMSPTFEAMLQIGNIVFTIFFTAEMVFKIIAFDPYYYFQKKWNIFDCIIVTVSLLELGVAKKGSLSVLRSFRLLRVFKLAKSWPTLNTLIKIIGNSVGALGNLTIILAIIVFVFALVGKQLLGENYRNNRKNISAPHEDWPRWHMHDFFHSFLIVFRILCGEWIENMWACMEVGQKSICLILFLTVMVLGNLVVLNLFIALLLNSFSADNLTAPEDDGEVNNLQVALARIQVFGHRTKQALCSFFSRSCPFPQPKAEPELVVKLPLSSSKAENHIAANTARGSSGGLQAPRGPRDEHSDFIANPTVWVSVPIAEGESDLDDLEDDGGEDAQSFQQEVIPKGQQEQLQQVERCGDHLTPRSPGTGTSSEDLAPSLGETWKDESVPQVPAEGVDDTSSSEGSTVDCLDPEEILRKIPELADDLEEPDDCFTEGCIRHCPCCKLDTTKSPWDVGWQVRKTCYRIVEHSWFESFIIFMILLSSGSLAFEDYYLDQKPTVKALLEYTDRVFTFIFVFEMLLKWVAYGFKKYFTNAWCWLDFLIVNISLISLTAKILEYSEVAPIKALRTLRALRPLRALSRFEGMRVVVDALVGAIPSIMNVLLVCLIFWLIFSIMGVNLFAGKFWRCINYTDGEFSLVPLSIVNNKSDCKIQNSTGSFFWVNVKVNFDNVAMGYLALLQVATFKGWMDIMYAAVDSREVNMQPKWEDNVYMYLYFVIFIIFGGFFTLNLFVGVIIDNFNQQKKKLGGQDIFMTEEQKKYYNAMKKLGSKKPQKPIPRPLNKFQGFVFDIVTRQAFDITIMVLICLNMITMMVETDDQSEEKTKILGKINQFFVAVFTGECVMKMFALRQYYFTNGWNVFDFIVVVLSIASLIFSAILKSLQSYFSPTLFRVIRLARIGRILRLIRAAKGIRTLLFALMMSLPALFNIGLLLFLVMFIYSIFGMSSFPHVRWEAGIDDMFNFQTFANSMLCLFQITTSAGWDGLLSPILNTGPPYCDPNLPNSNGTRGDCGSPAVGIIFFTTYIIISFLIMVNMYIAVILENFNVATEESTEPLSEDDFDMFYETWEKFDPEATQFITFSALSDFADTLSGPLRIPKPNRNILIQMDLPLVPGDKIHCLDILFAFTKNVLGESGELDSLKANMEEKFMATNLSKSSYEPIATTLRWKQEDISATVIQKAYRSYVLHRSMALSNTPCVPRAEEEAASLPDEGFVAFTANENCVLPDKSETASATSFPPSYESVTRGLSDRVNMRTSSSIQNEDEATSMELIAPGP

SEQ ID NO: 2020 - protein, 482 aa, Homo sapiens
MVDFPGYNLSGAVASFLFILLTMKQSEDFRVIGPAHPILAGVGEDALLTCQLLPKRTTMHVEVRWYRSEPSTPVFVHRDGVEVTEMQMEEYRGWVEWIENGIAKGNVALKIHNIQPSDNGQYWCHFQDGNYCGETSLLLKVAGLGSAPSIHMEGPGESGVQLVCTARGWFPEPQVYWEDIRGEKLLAVSEHRIQDKDGLFYAEATLVVRNASAESVSCLVHNPVLTEEKGSVISLPEKLQTELASLKVNGPSQPILVRVGEDIQLTCYLSPKANAQSMEVRWDRSHRYPAVHVYMDGDHVAGEQMAEYRGRTVLVSDAIDEGRLTLQILSARPSDDGQYRCLFEKDDVYQEASLDLKVVSLGSSPLITVEGQEDGEMQPMCSSDGWFPQPHVPWRDMEGKTIPSSSQALTQGSHGLFHVQTLLRVTNISAVDVTCSISIPFLGEEKIATFSLSESRMTFLWKTLLVWGLLLAVAVGLPRKRS

SEQ ID NO: 2021 - protein, 300 aa, Homo sapiens
MKKGIRYETSRKTSYIFQQPQHGPWQTRMRKISNHGSLRVAKVAYPLGLCVGVFIYVAYIKWHRATATQAFFSITRAAPGARWGQQAHSPLGTAADGHEVFYGIMFDAGSTGTRVHVFQFTRPPRETPTLTHETFKALKPGLSAYADDVEKVKKVFKASPFLVGDDCVSIMNGTDEGVSAWITINFLTGSLKTPGGSSVGMLDLGGGSTQIAFLPRVEGTLQASPPGYLTALRMFNRTYKLYSYSYLGLGLMSARLAILGGVEGQPAKDGKELVSPCLSPSFKGEWEHAEVTYRVSGQKA

SEQ ID NO: 2022 - protein, 483 aa, Homo sapiens
MFCSTSAVNSCARCFFHSVCPAGMIVKFPGTAQKNTVCEPASPGVSPACASPENCKEPSSGTIPQAKPTPVSPATSSASTMPVRGGTRLAQEAASKLTRAPDSPSSVGRPSSDPGLSPTQPCPEGSGDCRKQCEPDYYLDEAGRCTACVSCSRDDLVEKTPCAWNSSRTCECRPGMICATSATNSCARCVPYPICAAETVTKPQDMAEKDTTFEAPPLGTQPDCNPTPENGEAPASTSPTQSLLVDSQASKTLPIPTSAPVALSSTGKPVLDAGPVLFWVILVLVVVVGSSAFLLCHRRACRKRIRQKLHLCYPVQTSQPKLELVDSRPRRSSTLRSGASVTEPVAEERGLMSQPLMETCHSVGAAYLESLPLQDASPAGGPSSPRDLPEPRVSTEHTNNKIEKIYIMKADTVIVGTVKAELPEGRGLAGPAEPELEEELEADHTPHYPEQETEPPLGSCSDVMLSVEEEGKEDPLPTAASGK

SEQ ID NO: 2023 - protein, 51 aa, Homo sapiens
MGETEKRIETHRIRCLSKLKMFLLAITCAFVSKTLSGSYMNSMLTQIERQF

SEQ ID NO: 2024 - protein, 592 aa, Homo sapiens
MWLFFGITGLLTAALSGHPSPAPPDQLNTSSAESELWEPGERLPVRLTNGSSSCSGTVEVRLEASWEPACGALWDSRAAEAVCRALGCGGAEAASQLAPPTPELPPPPAAGNTSVAANATLAGAPALLCSGAEWRLCEVVEHACRSDGRRARVTCAENRALRLVDGGGACAGRVEMLEHGEWGSVCDDTWDLEDAHVVCRQLGCGWAVQALPGLHFTPGRGPIHRDQVNCSGAEAYLWDCPGLPGQHYCGHKEDAGAVCSEHQSWRLTGGADRCEGQVEVHFRGVWNTVCDSEWYPSEAKVLCQSLGCGTAVERPKGLPHSLSGRMYYSCNGEELTLSNCSWRFNNSNLCSQSLAARVLCSASRSLHNLSTPEVPASVQTVTIESSVTVKIENKESRELMLLIPSIVLGILLLGSLIFIAFILLRIKGKYALPVMVNHQHLPTTIPAGSNSYQPVPITIPKEDSQRHRVTDEEVQQSRFQMPPLEEGLEELHASHIPTANPGHCITDPPSLGPQYHPRSNSESSTSSGEDYCNSPKSKLPPWNPQVFSSERSSFLEQPPNLELAGTQPAFSGSPSPQPDSTDNDDYDDISAA

SEQ ID NO: 2025 - protein, 150 aa, Homo sapiens
MGGPVREPALSVALWLSWGAALGAVACAMALLTQQTELQSLRREVSRLQGTGGPSQNGEGYPWQSLPEQSSDALEAWENGERSRKRRAVLTQKQKNDSDVTEVMWQPALRRGRGLQAQGYGVRIQDAGVYLLYSQVLFQDVTFTMGQVVS

SEQ ID NO: 2026 - protein, 1109 aa, Homo sapiens
MGTGDFICISMTGGAPWGFRLQGGKEQKQPLQVAKIRNQSKASGSGLCEGDEVVSINGNPCADLTYPEVIKLMESITDSLQMLIKRPSSGISEALISENENKNLEHLTHGGYVESTTLQIRPATKTQCTEFFLAPVKTEVPLAENQRSGPDCAGSLKEETGPSYQRAPQMPDSQRGRVAEELILREKVEAVQPGPVVELQLSLSQERHKGASGPLVALPGAEKSKSPDPDPNLSHDRIVHINSIPTNEKADPFLRSSKIIQISSGRELRVIQESEAGDAGLPRVEVILDCSDRQKTEGCRLQAGKECVDSPVEGGQSEAPPSLVSFAVSSEGTEQGEDPRSEKDHSRPHKHRARHARLRRSESLSEKQVKEAKSKCKSIALLLTDAPNPNSKGVLMFKKRRRRARKYTLVSYGTGELEREADEEEEGDKEDTCEVAFLGASESEVDEELLSDVDDNTQVVNFDWDSGLVDIEKKLNRGDKMEMLPDTTGKGALMFAKRRERMDQITAQKEEDKVGGTPSREQDAAQTDGLRTTTSYQRKEEESVRTQSSVSKSYIEVSHGLGHVPQQNGFSGTSETANIQRMVPMNRTAKPFPGSVNQPATPFSPTRNMTSPIADFPAPPPYSAVTPPPDAFSRGVSSPIAGPAQPPPWPQPAPWSQPAFYDSSERIASRDERISVPAKRTGILQEAKRRSTTKPMFTFKEPKVSPNPELLSLLQNSEGKRGTGAGGDSGPEEDYLSLGAEACNFMQSSSAKQKTPPPVAPKPAVKSSSSQPVTPVSPVWSPGVAPTQPPAFPTSNPSKGTVVSSIKIAQPSYPPARPASTLNVAGPFKGPQAAVASQNYTPKPTVSTPTVNAVQPGAVGPSNELPGMSGRGAQLFAKRQSRMEKYVVDSDTVQAHAARAQSPTPSLPASWKYSSNVRAPPPVAYNPIHSPSYPLAALKSQPSAAQPSKMGKKKGKKPLNALDVMKHQPYQLNASLFTFQPPDAKDGLPQKSSVKVNSALAMKQALPPRPVNAASPTNVQASSVYSVPAYTSPPSFFAEASSPVSASPVPVGIPTSPKQESASSSYFVAPRPKFSAKKSGVTIQVKCKSGIHSQDIIRTYFPAYLSSST

SEQ ID NO: 2027 - protein, 89 aa, Homo sapiens
VHSVLYSSPAILLKEIILVDDASVDEYLHDKLDEYVKQFSIVKIVRQRERKGLITARLLGATVATAETLTFLDAHSFSTGDYSNDSPSR

SEQ ID NO: 2028 - protein, 341 aa, Homo sapiens
MEEPQSDPSVEPPLSQETFSDLWKLLPENNVLSPLPSQAMDDLMLSPDDIEQWFTEDPGPDEAPRMPEAAPPVAPAPAAPTPAAPAPAPSWPLSSSVPSQKTYQGSYGFRLGFLHSGTAKSVTCTYSPALNKMFCQLAKTCPVQLWVDSTPPPGTRVRAMAIYKQSQHMTEVVRRCPHHERCSDSDGLAPPQHLIRVEGNLRVEYLDDRNTFRHSVVVPYEPPEVGSDCTTIHYNYMCNSSCMGGMNRRPILTIITLEDSSGNLLGRNSFEVRVCACPGRDRRTEEENLRKKGEPHHELPPGSTKRALPNNTSSSPQPKKKPLDGEYFTLQDQTSFQKENC

SEQ ID NO: 2029 - protein, 692 aa, Homo sapiens
MAGLTAAAPRPGVLLLLLSILHPSRPGGVPGAIPGGVPGGVFYPGAGLGALGGGALGPGGKPLKPVPGGLAGAGLGAGLGAFPAVTFPGALVPGGVADAAAAYKAAKAGAGLGGVPGVGGLGVSAAPSVPGAVVPQPGAGVKPGKVPGVGLPGVYPGGVLPGARFPGVGVLPGVPTGAGVKPKAPGVGGAFAGIPGVGPFGGPQPGVPLGYPIKAPKLPGGYGLPYTTGKLPYGYGPGGVAGAAGKAGYPTGTGVGPQAAAAAAAKAAAKFGAGAAGVLPGVGGAGVPGVPGAIPGIGGIAGVGTPAAAAAAAAAAKAAKYGAAAGLVPGGPGFGPGVVGVPGAGVPGVGVPGAGIPVVPGAGIPGAAVPGVVSPEAAAKAAAKAAKYGARPGVGVGGIPTYGVGAGGFPGFGVGVGGIPGVAGVPGVGGVPGVGGVPGVGISPEAQAAAAAKAAKYGLVPGVGVAPGVGVAPGVGVAPGVGLAPGVGVAPGVGVAPGVGVAPGIGPGGVAAAAKSAAKVAAKAQLRAAAGLGAGIPGLGVGVGVPGLGVGAGVPGLGVGAGVPGFGAVPGALAAAKAAKYGAAVPGVLGGLGALGGVGIPGGVVGAGPAAAAAAAKAAAKAAQFGLVGAAGLGGLGVGGLGVPGVGGLGGIPPAAAAKAAKYGVAARPGFGLSPIFPGGACLGKACGRKRK

SEQ ID NO: 2030 - protein, 276 aa, Homo sapiens
QLMVVVGILLAYLAGWVLEWRWLAVLGCVPPSLMLLLMCFMPETPRFLLTQHRRQEAMAALRFLWGSEQGWEDPPIGAEQSFHLALLRQPGIYKPFIIGVSLMAFQQLSGVNAVMFYAETIFEEAKFKDSSLASVVVGVIQVLFTAVAALIMDRAGRRLLLVLSGVVMVFSTSAFGAYFKLTQGGPGNSSHVAISAPVSAQPVDASVGLAWLAVGSMCLFIAGFAVGWGPIPWLLMSEIFPLHVKGVATGICVLTNWLMAFLVTKEFSSLMLLLLL

SEQ ID NO: 2031 - protein, 96 aa, Homo sapiens
MVVQDPLLCDLPIQVTLEEVNSQIALEYGQAMTVRVCKMDGESATVLDLKKAIQRYVQLKQEREGGIQHISWSYVWRTYHLTSAGEKLTEDRKKLR

SEQ ID NO: 2032 - protein, 159 aa, Homo sapiens
MEGAALLRVSVLCIWMSALFLGVGVRAEEAGARVQQNVPSGTDTGDPQSKPLGDWAAGTMDPESSIFIEDAIKYFKEKVSTQNLLLLLTDNEAWNGFVAAAELPRNEADELRKALDNLARQMIMKDKNWHDKGQQYRNWFLKEFPRLKSELEDNIRRLR

SEQ ID NO: 2033 - protein, 788 aa, Homo sapiens
MVLLRLLVFLFAPVVSDLCSLPCFINVSESQGPGTVLQFLSFNCSSYTPTPTLELLNVQPPTTFFNPPSLARWQGTYVGKLTLSSSAQLDALMVNHYKVQLKFTCGNHVMEGSLSVDVQRDLSHIQCAGQFASPAGEMIQVPETVTPGARLYTLLLPGLELHGAQMSIISAQDLPHFPGPFSINEQGWLQAPSQGLLGQAQKVFQLQISVSFGQRQSCQGMVIVKVLPVPSSQVSFLEQAQNITIPENLAPGSEVVQVQARGVDLRYEILSPVPSPLFSIGRADGVVRTTTPLELARTSGTAVSRLQVKAFEQGQLWASAKLNLTMNVQLVNLWPPRCLPALLVSQIPETAPVGTVLNTLTCEDPDSVGATLDYKLWFRSSSNPASLCLYDRVLEVNATLDCDTPGACFQHAASILVLDGGQPQMTTEVPVLVMVTPINEFSPACAPRTFRVQEDAAPHTLLGSVVGTDMDYPHDNIEYYTSGGPTTFAVDRLSGEVHLLGPLDYEQQRLYRLTVLVIDHGQDQNPNHHLSGSCTITIEVEDVNDHAPECEPPFQELTIYAPLGRSVEVTKMSCQIPQEPQRLIYSYSIVGGNSQNRFILQGAILVHSDLVLGPFWPEQPRTYELLICVADAGPSTPHLSTTATIIVHLVPRRASTVATSTHRTTVPSTMTPMLVTDTEAFWQPQPWFVVVLTATGALLLLALGWLLGRLLQGLAQLLQAPSKPAQALLLNSIQGTEGSIEGFLEAPKMEMSQAPSSVMSLHFDGRAQDSRTGRDYLFNTHTGARRWL

SEQ ID NO: 2034 - protein, 170 aa, Homo sapiens
MLPPQKKPWESMAKGLVLGALFTSFLLLVYSYAVPPLHAGLASTTPEAAASCSPPALEPEAVIRANGSAGECQPRRNIVFLKTHKTASSTLLNILFRFGQKHRLKFAFPNGRNDFDYPTFFARSLVQDYRPGACFNIICNHMRFHYDEVRGLVPTNAIFITVLRDPARLF

SEQ ID NO: 2035 - protein, 585 aa, Homo sapiens
MDALLGTGPRRARGCLGAAGPTSSGRAARTPAAPWARFSAWLECVCVVTFDLELGQALELVYPNDFRLTDKEKSSICYLSFPDSHSGCLGDTQFSFRMRQCGGQRSPWHADDRHYNSRAPVALQREPAHYFGYVYFRQVKDSSVKRGYFQKSLVLVSRLPFVRLFQALLSLIAPEYFDKLAPCLEAVCSEIDQWPAPAPGQTLNLPVMGVVVQVRIPSRVDKSESSPPKQFDQENLLPAPVVLASVHELDLFRCFRPVLTHMQTLWELMLLGEPLLVLAPSPDVSSEMVLALTSCLQPLRFCCDFRPYFTIHDSEFKEFTTRTQAPPNVVLGVTNPFFIKTLQHWPHILRVGEPKMSGDLPKQVKLKKPSRLKTLDTKPGLYTAYTAHLHRDKALLKRLLKGVQKKRPSDVQSALLRRHLLELTQSFIIPLEHYMASLMPLQKSITPWKTPPQIQPFSQDDFLRSLEHAGPQLTCILKGDWLGLYRRFFKSPHFDGWYRQRHKEMALKLEALHLEAICEANIETWMKDKSEVEVVDLVLKLREKLVRAQGHQLPVKEATLQRAQLYIETVIGSLPKDLQAVLCPP

SEQ ID NO: 2036 - protein, 709 aa, Homo sapiens
MWWGGRGQSFNIAPQKEEPEMGSVQENRMPEPRSRQPSSCLASRCLPGEQILAWAPGVRKGLEPELSGTLICTNFRVTFQPCGWQWNQDTPLNSEYDFALVNIGRLEAVSGLSRVQLLRPGSLHKFIPEEILIHGRDFRLLRVGFEAGGLEPQAFQVTMAIVQARAQSNQAQQYSGITLSKAGQGSGSRKPPIPLMETAEDWETERKKQAARGWRVSTVNERFDVATSLPRYFWVPNRILDSEVRRAFGHFHQGRGPRLSWHHPGGSDLLRCGGFYTASDPNKEDIRAVELMLQAGHSDVVLVDTMDELPSLADVQLAHLRLRALCLPDSSVAEDKWLSALEGTRWLDYVRACLRKASDISVLVTSRVRSVILQERGDRDLNGLLSSLVQLLSAPEARTLFGFQSLVQREWVAAGHPFLTRLGGTGASEEAPVFLLFLDCVWQLLQQFPADFEFSEFFLLALHDSVRVPDTLTFLRNTPWERGKQSGQLNSYTQVYTPGYSQPPAGNSFNLQLSVWDWDLRYSNAQILQFQNPGYDPEHCPDSWLPRPQPSFMVPGPPSSVWLFSRGALTPLNQLCPWRDSPSLLAVSSRWLPRPAISSESLADQEWGLPSHWGACPLPPGLLLPGYLGPQIRLWRRCYLRGRPEVQMGLSAPTISGLQDELSHLQELLRKWTPRISPEDHSKKRDPHTILNPTEIAGILKGRAEGDLG

SEQ ID NO: 2037 - protein, 916 aa, Homo sapiens
MPAKPFLSSVLLSWKVLDFSGPGPQGTGQPCSCGHWAEGQGGPPEPAGGPNVLAKALYDNVAESPDELSFRKGDIMTVLEQDTQGLDGWWLCSLHGRQGIVPGNRLKILVGMYDKKPAGPGPGPPATPAQPQPGLHAPAPPASQYTPMLPNTYQPQPDSVYLVPTPSKAQQGLYQVPGPSPQFQSPPAKQTSTFSKQTPHHPFPSPATDLYQVPPGPGGPAQDIYQVPPSAGMGHDIYQVPPSMDTRSWEGTKPPAKVVVPTRVGQGYVYEAAQPEQDEYDIPRHLLAPGPQDIYDVPPVRGLLPSQYGQEVYDTPPMAVKGPNGRDPLLEVYDVPPSVEKGLPPSNHHAVYDVPPSVSKDVPDGPLLREETYDVPPAFAKAKPFDPARTPLVLAAPPPDSPPAEDVYDVPPPAPDLYDVPPGLRRPGPGTLYDVPRERVLPPEVADGGVVDSGVYAVPPPAEREAPAEGKRLSASSTGSTRSSQSASSLEVAGPGREPLELEVAVEALARLQQGVSATVAHLLDLAGSAGATGSWRSPSEPQEPLVQDLQAAVAAVQSAVHELLEFARSAVGNAAHTSDRALHAKLSRQLQKMEDVHQTLVAHGQALDAGRGGSGATLEDLDRLVACSRAVPEDAKQLASFLHGNASLLFRRTKATAPGPEGGGTLHPNPTDKTSSIQSRPLPSPPKFTSQDSPDGQYENSEGGWMEDYDYVHLQGKEEFEKTQKELLEKGSITRQGKSQLELQQLKQFERLEQEVSRPIDHDLANWTPAQPLAPGRTGGLGPSDRQLLLFYLEQCEANLTTLTNAVDAFFTAVATNQPPKIFVAHSKFVILSAHKLVFIGDTLSRQAKAADVRSQVTHYSNLLCDLLRGIVATTKAAALQYPSPSAAQDMVERVKELGHSTQQFRRVLGQLAAA

SEQ ID NO: 2038 - protein, 227 aa, Homo sapiens
MGRPLLLPLLLLLQPPAFLQPGGSTGSGPSYLYGVTQPKHLSASMGGSVEIPFSFYYPWELAIVPNVRISWRRGHFHGQSFYSTRPPSIHKDYVNRLFLNWTEGQESGFLRISNLRKEDQSVYFCRVELDTRRSGRQQLQSIKGTKLTITQAVTTTTTWRPSSTTTIAGLRVTESKGHSESWHLSLDTAIRVALAVAVLKTVILGLLCLLLLWWRRRKGSRAPSSDF

SEQ ID NO: 2039 - protein, 526 aa, Homo sapiens
MQSESGIVPDFEVGEEFHEEPKTYYELKSQPLKSSSSAEHPGASKPPISSSSMTSRILLRQQLMREQMQEQERREQQQKLQAAQFMQQRVPVSQTPAINVSVPTTLPSATQVPMEVLKVQTHLENPTKYHIQQAQRQQVKQYLSTTLANKHANQVLSLPCPNQPGDHVMPPVPGSSAPNSPMAMLTLNSNCEKEGFYKFEEQNRAESECPGMNTHSRASCMQMDDVIDDIISLESSYNEEILGLMDPALQMANTLPVSGNLIDLYGNQGLPPPGLTISNSCPANLPNIKRELTACIFPTESEARALAKERQKKDNHNLIERRRRFNINDRIKELGTLIPKSNDPDMRWNKGTILKASVDYIRKLQREQQRAKELENRQKKLEHANRHLLLRIQELEMQARAHGLSLIPSTGLCSPDLVNRIIKQEPVLENCSQDLLQHHADLTCTTTLDLTDGTITFNNNLGTGTEANQAYSVPTKMGSKLEDILMDDTLSPVGVTDPLLSSVSPGASKTSSRRSSMSMEETEHTC

SEQ ID NO: 2040 - protein, 843 aa, Homo sapiens
MRLPDLRPWTSLLLVDAALLWLLQGPLGTLLPQGLPGLWLEGTLRLGGLWGLLKLRGLLGFVGTLLLPLCLATPLTVSLRALVAGASRAPPARVASAPWSWLLVGYGAAGLSWSLWAVLSPPGAQEKEQDQVNNKVLMWRLLKLSRPDLPLLVAAFFFLVLAVLGETLIPHYSGRVIDILGGDFDPHAFASAIFFMCLFSFGSSLSAGCRGGCFTYTMSRINLRIREQLFSSLLRQDLGFFQETKTGELNSRLSSDTTLMSNWLPLNANVLLRSLVKVVGLYGFMLSISPRLTLLSLLHMPFTIAAEKVYNTRHQEVLREIQDAVARAGQVVREAVGGLQTVRSFGAEEHEVCRYKEALEQCRQLYWRRDLERALYLLVRRVLHLGVQMLMLSCGLQQMQDGELTQGSLLSFMIYQESVGSYVQTLVYIYGDMLSNVGAAEKVFSYMDRQPNLPSPGTLAPTTLQGVVKFQDVSFAYPNRPDRPVLKGLTFTLRPGEVTALVGPNGSGKSTVAALLQNLYQPTGGQVLLDEKPISQYEHCYLHSQVVSVGQEPVLFSGSVRNNIAYGLQSCEDDKVMAAAQAAHADDFIQEMEHGIYTDVGEKGSQLAAGQKQRLAIARALVRDPRVLILDEATSALDVQCEQANGFWVGPLGGGSASESDPTGFLHDSRHRLSSDVGMFVALTKLGQPDAEQWNSRLDLLERSRQAVDGVCRHNYRLGAPFTVGRKVQPEVTVYPERTPLLHQHNLLHCSVTGFYPGDIKIKWFLNGQEERAGVMSTGPIRNGDWTFQTVVMLEMTPELGHVYTCLVDHSSLLSPVSVEWRAQSEYSWRKMLSGIAAFLLGL

SEQ ID NO: 2041 - protein, 84 aa, Homo sapiens
MENFILYEEIGRGSKTVVYKGRRKGTINFVAILCTDKCKRPEITNWVRLTREIKHKNIVTFHEWYETSNHLWLVVELCTGQDYG

SEQ ID NO: 2042 - protein, 169 aa, Homo sapiens
METPLDVLSRAASLVHADDEKREAALRGEPRIQTLPVASALSSHRTGPPPISPSKRKFSMEPGDEDLDCDNDHVSKMSRIFNPHLNKTANGDCRRDPRERSRSPIERAVAPTMSLHGSHLYTSLPSLGLEQPLALTKNSLDASRPAGLSPTLTPGERQQVGLCLGGWRG

SEQ ID NO: 2043 - protein, 149 aa, Homo sapiens
MLPPQKKPWESMAKGLVLGALFTSFLLLVYSYAVPPLHAGLASTTPEAAASCSPPALEPEAVIRANGSAGECQPRRNIVFLKTHKTASSTLLNILFRFGQKHRLKFAFPNGRNDFDYPTFFARSLVQDYRPGACFNIICNHMRFHYDEV

SEQ ID NO: 2044 - protein, 683 aa, Homo sapiens
PRSSTHVPLVLPLLVLLLLAPARQAAAQRCPQACICDNSRRHVACRYQNLTEVPDAIPELTQRLDLQGNLLKVIPAAAFQGVPHLTHLDLRHCEVELVAEGAFRGLGRLLLLNLASNHLRELPQEALDGLGSLRRLELEGNALEELRPGTFGALGALATLNLAHNALVYLPAMAFQGLLRVRWLRLSHNALSVLAPEALAGLPALRRLSLHHNELQALPGPVLSQARGLARLELGHNPLTYAGEEDGLALPGLRELLLDGGALQALGPRAFAHCPRLHTLDLRGNQLDTLPPLQGPGQLRRLRLQGNPLWCGCQARPLLEWLARARVRSDGACQGPRRLRGEALDALRPWDLRCPGDAAQEEEELEERAVAGPRAPPRGPPRGPGEERAVAPCPRACVCVPESRHSSCEGCGLQAVPRGFPSDTQLLDLRRNHFPSVPRAAFPGLGHLVSLHLQHCGIAELEAGALAGLGRLIYLYLSDNQLAGLSAAALEGAPRLGYLYLERNRFLQVPGAALRALPSLFSLHLQDNAVDRLAPGDLGRTRALRWVYLSGNRITEVSLGALGPARELEKLHLDRNQLREVPTGALEGLPALLELQLSGNPLRALRDGAFQPVGRSLQHLFLNSSGLEQICPGAFSGLGPGLQSLHLQKNQLRALPALPSARRTPIKGRQCGADKVGKEKGRL

SEQ ID NO: 2045 - protein, 401 aa, Homo sapiens
MPPAIPEATEASGPPSPTPGDKLSPASELPKESPLEVWLNLGGSTPDPQGPELTYPFQGTLEPQPASDIIDIDYFEGLDGEGRGADLGSFPGSPGTSENHPDTEGETPSWSLLDLYDDFTPFDESDFYPTTSFYDDLDEEEEEEEDDKDAVGGGDLEDENELLVPTGKPGLGPGTGQPTSRWHAVPPQHTLGSVPGSSIALRPRPGEPGRDLASSENGTECRSGFVRHNGSCRSVCDLFPSYCHNGGQCYLVENIGAFCRCNTQDYIWHKGMRCESIITDFQVMCVAVGSAALVLLLLFMMTVFFAKKLYLLKTENTKLRRTNKFRTPSELHNDNFSLSTIAEGSHPNDDPSAPHKIQEVLKSCLKEEESFNIQNSMSPKLEGGKGDQADLDVNCLQNNLT

SEQ ID NO: 2046 - protein, 13 aa, Homo sapiens
MGETEKRIETHRI

SEQ ID NO: 2047 - protein, 836 aa, Homo sapiens
METQELRGALALLLLCFFTSASQDLQVIDLLTVGESRQMVAVAEKIRTALLTAGDIYLLSTFRLPPKQGGVLFGLYSRQDNTRWLEASVVGKINKVTNALHSILGEQTKALVTQLTLFNQILVELRDDIRDQVKEMSLIRNTIMECQVCGFHEQRSHCSPNPCFRGVDCMEVYEYPGYRCGPCPPGLQGNGTHCSDINECAHADPCFPGSSCINTMPGFHCEACPRGYKGTQVSGVGIDYARASKQVCNDIDECNDGNNGGCDPNSICTNTVGSFKCGPCRLGFLGNQSQGCLPARTCHSPAHSPCHIHAHCLFERNGAVSCQCNVGWAGNGNVCGTDTDIDGYPDQALPCMDNNKHCKQDNCLLTPNSGQEDADNDGVGDQCDDDADGDGIKNVEDNCRLFPNKDQQNSDTDSFGDACDNCPNVPNNDQKDTDGNGEGDACDNDVDGDGIPNGLDNCPKVPNPLQTDRDEDGVGDACDSCPEMSNPTQTDADSDLVGDVCDTNEDSDGDGHQDTKDNCPQLPNSSQLDSDNDGLGDECDGDDDNDGIPDYVPPGPDNCRLVPNPNQKDSDGNGVGDVCEDDFDNDAVVDPLDVCPESAEVTLTDFRAYQTVVLDPEGDAQIDPNWVVLNQGMEIVQTMNSDPGLAVGYTAFNGVDFEGTFHVNTVTDDDYAGFLFSYQDSGRFYVVMWKQTEQTYWQATPFRAVAQPGLQLKAVTSVSGPGEHLRNALWHTGHTPDQVRLLWTDPRNVGWRDKTSYRWQLLHRPQVGYIRVKLYEGPQLVADSGVIIDTSMRGGRLGVFCFSQENIIWSNLQYRCNDTVPEDFEPFRRQLLQGRV

SEQ ID NO: 2048 - protein, 263 aa, Homo sapiens
SLLLQVRGSGGARLSTKDPLPTIASREEIEATKNHVLETFYPISPIIDLHECNIYDVKNDTGFQEGYPYPYPHTLYLLDKANLRPHRLQPDQLRAKMILFAFGSALAQARLLYGNDAKVLEQPVVVQSVGTDGRVFHFLVFQLNTTDLDCNEGVKNLAWVDSDQLLYQHFWCLPVIKKRVVVTGPCFSKSQMSTSFVLTPSFNAGEEVMQRNLRASASLPPSTGSPASELVKEQEHAAGRVLRRVMLDSETPREELPAADFWK

SEQ ID NO: 2049 - protein, 1194 aa, Homo sapiens
MTKKEEPPPSRVPRAVRVASLLSEGEELSGDDQGDEEEDDHAYEGVPNGGWHTSSLSLSLPSTIAAPHPMDGPPGGSTPVTPVIKAGWLDKNPPQGSYIYQKRWVRLDTDHLRYFDSNKDAYSKRFISVACISHVAAIGDQKFEVITNNRTFAFRAESDVERKEWMQALQQAMAEQRARARLSSAYLLGVPGSEQPDRAGSLELRGFKNKLYVAVVGDKVQLYKNLEEYHLGIGITFIDMSVGNVKEVDRRSFDLTTPYRIFSFSADSELEKEQWLEAMQGAIAEALSTSEVAERIWAAAPNRFCADCGAPQPDWASINLCVVICKRCAGEHRGLGAGVSKVRSLKMDRKVWTETLIELFLQLGNGAGNRFWAANVPPSEALQPSSSPSTRRCHLEAKYREGKYRRYHPLFGNQEELDKALCAAVTTTDLAETQALLGCGAGINCFSGDPEAPTPLALAEQAGQTLQMEFLRNNRTTEVPRLDSMKPLEKHYSVVLPTVSHSGFLYKTASAGKLLQDRRAREEFSRRWCVLGDGVLSYFENERAVTPNGEIRASEIVCLAVPPPDTHGFEHTFEVYTEGERLYLFGLESAEQAHEWVKCIAKAFVPPLAEDLLARDFERLGRLPYKAGLSLQRAQEGWFSLSGSELRAVFPEGPCEEPLQLRKLQELSIQGDSENQVLVLVERRRTLYIQGERRLDFMGWLGAIQKAAASMGDTLSEQQLGDSDIPVIVYRCVDYITQCGLTSEGIYRKCGQTSKTQRLLESLRQDARSVHLKEGEQHVDDVSSALKRFLRDLPDGLFTRAQRLTWLEASEIEDEEEKVSRYRELLVRLPPVNRATVKALISHLYCVQCFSDTNQMNVHNLAIVFGPTLFQTDGQDYKAGRVVEDLINHYVVVFSVDEEELRKQREEITAIVKMRVAGTASGTQHAGDFICTVYLEEKKAETEQHIKVPASMTAEELTLEILDRRNVGIREKDYWTCFEVNEREEAERPLHFAEKVLPILHGLGTDSHLVVKKHQAMEAMLLYLASRVGDTKHGMMKFREDRSLLGLGLPSGGFHDRYFILNSSCLRLYKEVRSHRPEKEWPIKSLKVYLGVKKKLRPPTCWGFTVVHETEKHEKQQWYLCCDTQMELREWFATFLFVQHDGLVWPSEPSRVSRAVPEVRLGSVSLIPLRGSENEMRRSVAAFTADPLSLLRNV

SEQ ID NO: 2050 - protein, 463 aa, Homo sapiens
MGCDRNCGLIAGAVIGAVLAVFGGILMPVGDLLIQKTIKKQVVLEEGTIAFKNWVKTGTEVYRQFWIFDVQNPQEVMMNSSNIQVKQRGPYTYRVRFLAKENVTQDAEDNTVSFLQPNGAIFEPSLSVGTEADNFTVLNLAVAAASHIYQNQFVQMILNSLINKSKSSMFQVRTLRELLWGYRDPFLSLVPYPVTTTVGLFYPYNNTADGVYKVFNGKDNISKVAIIDTYKGKRNLSYWESHCDMINGTDAASFPPFVEKSQVLQFFSSDICRSIYAVFESDVNLKGIPVYRFVLPSKAFASPVENPDNYCFCTEKIISKNCTSYGVLDISKCKEGRPVYISLPHFLYASPDVSEPIDGLNPNEEEHRTYLDIEPITGFTLQFAKRLQVNLLVKPSEKIQVLKNLKRNYIVPILWLNETGTIGDEKANMFRSQVTGKINLLGLIEMILLSVGVVMFVAFMISY

SEQ ID NO: 2051 - protein, 442 aa, Homo sapiens
MPRARKGNTLRKGGQRRGGGARSSAQADSGSSDDEAASEARSTASECPSLLSTTAEDSLGGDVVDEQGQQEDLEEKLKEYVDCLTDKSAKTRQGALESLRLALASRLLPDFLLERRLTLADALEKCLKKGKGEEQALAAAVLGLLCVQLGPGPKGEELFHSLQPLLVSVLSDSTASPAARLHCASALGLGCYVAAADIQDLVSCLACLESVFSRFYGLGGSSTSPVVPASLHGLLSAALQAWALLLTICPSTQISHILDRQLPRLPQLLSSESVNLRIAAGETIALLFELARDLEEEFVYEDMEALCSVLRTLATDSNKYRAKADRRRQRSTFRAVLHSVEGGECEEEIVRFGFEVLYMDSWARHRIYAAFKEVLGSGMHHHLQNNELLRDIFGLGPVLLLDATALKACKVPRFEKHLYNAAAFKARTKARSRVRDKRADIL

SEQ ID NO: 2052 - protein, 265 aa, Homo sapiens
MVVVGILLAYLAGWVLEWRWLAVLGCVPPSLMLLLMCFMPETPRFLLTQHRRQEAMAALRFLWGSEQGWEDPPIGAEQSFHLALLRQPGIYKPFIIGVSLMAFQQLSGVNAVMFYAETIFEEAKFKDSSLASVVVGVIQVLFTAVAALIMDRAGRRLLLVLSGVVMVFSTSAFGAYFKLTQGGPGNSSHVAISAPVSAQPVDASVGLAWLAVGSMCLFIAGFAVGWGPIPWLLMSEIFPLHVKGVATGICVLTNWLMAFLVTKEF

SEQ ID NO: 2053 - protein, 274 aa, Homo sapiens
MECALLLACAFPAAGSGPPRGLAGLGRVAKALQLCCLCCASVAAALASDSSSGASGLNDDYVFVTPVEVDSAGSYISHDILHNGRKKRSAQNARSSLHYRFSAFGQELHLELKPSAILSSHFIVQVLGKDGASETQKPEVQQCFYQGFIRNDSSSSVAVSTCAGLSGLIRTRKNEFLISPLPQLLAQEHNYSSPAGHHPHVLYKRTAEEKIQRYRGYPGSGRNYPGYSPSHIPHASQSRETEYHHRRLQKQHFCGRRKKCICSQASHRGHLSKV

SEQ ID NO: 2054 - protein, 700 aa, Homo sapiens
MAGLTAAAPRPGVLLLLLSILHPSRPGGVPGAIPGGVPGGVFYPALGPGGKPLKPVPGGLAGAGLGAGLGAFPAVTFPGALVPGGVADAAAAYKAAKAGAGLGGVPGVGGLGVSAAPSVPGAVVPQPGAGVKPGKVPGVGLPGVYPGGVLPGARFPGVGVLPGVPTGAGVKPKAPGVGGAFAGIPGVGPFGGPQPGVPLGYPIKAPKLPGGYGLPYTTGKLPYGYGPGGVAGAAGKAGYPTGTGVGPQAAAAAAAKAAAKFGAGAAGVLPGVGGAGVPGVPGAIPGIGGIAGVGTPAAAAAAAAAAKAAKYGAAAGLVPGGPGFGPGVVGVPGAGVPGVGVPGAGIPVVPGAGIPGAAVPGVVSPEAAAKAAAKAAKYGARPGVGVGGIPTYGVGAGGFPGFGVGVGGIPGVAGVPGVGGVPGVGGVPGVGISPEAQAAAAAKAAKYGLVPGVGVAPGVGVAPGVGVAPGVGLAPGVGVAPGVGVAPGVGVAPGIGPGGVAAAAKSAAKVAAKAQLRAAAGLGAGIPGLGVGVGVPGLGVGAGVPGLGVGAGVPGFGAVPGALAAAKAAKYGAAVPGVLGGLGALGGVGIPGGVVGAGPAAAAAAAKAAAKAAQFGLVGAAGLGGLGVGGLGVPGVGGLGGIPPAAAAKAAKYGAAGLGGVLGGAGQFPLGGVAARPGFGLSPIFPGGACLGKACGRKRK

SEQ ID NO: 2055 - protein, 2624 aa, Homo sapiens
QLKNPKGGAEIGINDSVTITILSNDDAYGIVAFAQNSLYKQVEEMEQDSLVTLNVERLKGTYGRITIAWEADGSISDIFPTSGVILFTEGQVLSTITLTILADNIPELSEVVIVTLTRITTEGVEDSYKGATIDQDRSKSVITTLPNDSPFGLVGWRAASVFIRVAEPKENTTTLQLQIARDKGLLGDIAIHLRAQPNFLLHVDNQATENEDYVLQETIIIMKENIKEAHAEVSILPGAGEVITAYEVPPPLNVLQVPVVRLAGSFGAVNVYWKASPDSAGLEDFKPSHGILEFADKQVTAMIEITIIDDAEFELTETFNISLISVAGGGRLGDDVVVTVVIPQNDSPFGVFGFEEKTVMIDESLSSDDPDSYVTLTVVRSPGGKGTVRLEWTIDEKAKHNLSPLNGTLHFDETESQKTIVLHTLQDTVLEEDRRFTIQLISIDEVEISPVKGSASIIIRGDKRASGEVGIAPSSRHILIGEPSAKYNGTAIISLVRGPGILGEVTVFWRIFPPSVGEFAETSGKLTMRDEQSAVIVVIQALNDDIPEEKSFYEFQLTAVSEGGVLSESSSTANITVVASDSPYGRFAFSHEQLRVSEAQRVNITIIRSSGDFGHVRLWYKTMSGTAEAGLDFVPAAGELLFEAGEMRKSLHVEILDDDYPEGPEEFSLTITKVELQGRGYDFTIQENGLQIDQPPEIGNISIVRIIIMKNDNAEGIIEFDPKYTAFEVEEDVGLIMIPVVRLHGTYGYVTADFISQSSSASPGGVDYILHGSTVTFQHGQNLSFINISIIDDNESEFEEPIEILLTGATGGAVLGRHLVSRIIIAKSDSPFGVIRFLNQSKISIANPNSTMILSLVLERTGGLLGEIQVNWETVGPNSQEALLPQNRDIADPVSGLFYFGEGEGGVRTIILTIYPHEEIEVEETFIIKLHLVKGEAKLDSRAKDVTLTIQEFGDPNGVVQFAPETLSKKTYSEPLALEGPLLITFFVRRVKGTFGEIMVYWELSSEFDITEDFLSTSGFFTIADGESEASFDVHLLPDEVPEIEEDYVIQLVSVEGGAELDLEKSITWFSVYANDDPHGVFALYSDRQSILIGQNLIRSIQINITRLAGTFGDVAVGLRISSDHKEQPIVTENAERQLVVKDGATYKVDVVPIKNQVFLSLGSNFTLQLVTVMLVGGRFYGMPTILQEAKSAVLPVSEKAANSQVGFESTAFQLMNITAGTSHVMISRRGTYGALSVAWTTGYAPGLEIPEFIVVGNMTPTLGSLSFSHGEQRKGVFLWTFPSPGWPEAFVLHLSGVQSSAPGGAQLRSGFIVAEIEPMGVFQFSTSSRNIIVSEDTQMIRLHVQRLFGFHSDLIKVSYQTTAGSAKPLEDFEPVQNGELFFQKFQTEVDFEITIINDQLSEIEEFFYINLTSVEIRGLQKFDVNWSPRLNLDFSVAVITILDNDDLAGMDISFPETTVAVAVDTTLIPVETESTTYLSTSKTTTILQPTNVVAIVTEATGVSAIPEKLVTLHGTPAVSEKPDVATVTANVSIHGTFSLGPSIVYIEEEMKNGTFNTAEVLIRRTGGFTGNVSITVKTFGERCAQMEPNALPFRGIYGISNLTWAVEEEDFEEQTLTLIFLDGERERKVSVQILDDDEPEGQEFFYVFLTNPQGGAQIVEEKDDTGFAAFAMVIITGSDLHNGIIGFSEESQSGLELREGAVMRRLHLIVTRQPNRAFEDVKVFWRVTLNKTVVVLQKDGVNLVEELQSVSGTTTCTMGQTKCFISIELKPEKVPQVEVYFFVELYEATAGAAINNSARFAQIKILESDESQSLVYFSVGSRLAVAHKKATLISLQVARDSGTGLMMSVNFSTQELRSAETIGRTIISPAISGKDFVITEGTLVFEPGQRSTVLDVILTPETGSLNSFPKRFQIVLFDPKGGARIDKVYGTANITLVSDADSQAIWGLADQLHQPVNDDILNRVLHTISMKVATENTDEQLSAMMHLIEKITTEGKIQAFSVASRTLFYEILCSLINPKRKDTRGFSHFAEVTENFAFSLLTNVTCGSPGEKSKTILDSCPYLSILALHWYPQQINGHKFEGKEGDYIRIPERLLDVQDAEIMAGKSTCKLVQFTEYSSQQWFISGNNLPTLKNKVLSLSVKGQSSQLLTNDNEVLYRIYAAEPRIIPQTSLCLLWNQAAASWLSDSQFCKVVEETADYVECACSHMSVYAVYARTDNLSSYNEAFFTSGFICISGLCLAVLSHIFCARYSMFAAKLLTHMMAASLGTQILFLASAYASPQLAEESCSAMAAVTHYLYLCQFSWMLIQSVNFWYVLVMNDEHTERRYLLFFLLSWGLPAFVVILLIVILKGIYHQSMSQIYGLIHGDLCFIPNVYAALFTAALVPLTCLVVVFVVFIHAYQVKPQWKAYDDVFRGRTNAAEIPLILYLFALISVTWLWGGLHMAYRHFWMLVLFVIFNSLQGLYVFMVYFILHNQMCCPMKASYTVEMNGHPGPSTAFFTPGSGMPPAGGEISKSTQNLIGAMEEVPPDWERASFQQGSQASPDLKPSPQNGATFPSSGGYGQGSLIADEESQEFDDLIFALKTGAGLSVSDNESGQGSQEGGTLTDSQIVELRRIPIADTHL

SEQ ID NO: 2056 - protein, 477 aa, Homo sapiens
MALQLWALTLLGLLGAGASLRPRKLDFFRSEKELNHLAVDEASGVVYLGAVNALYQLDAKLQLEQQVATGPALDNKKCTPPIEASQCHEAEMTDNVNQLLLLDPPRKRLVECGSLFKGICALRALSNISLRLFYEDGSGEKSFVASNDEGVATVGLVSSTGPGGDRVLFVGKGNGPHDNGIIVSTRLLDRTDSREAFEAYTDHATYKAGYLSTNTQQFVAAFEDGPYVFFVFNQQDKHPARNRTLLARMCREDPNYYSYLEMDLQCRDPDIHAAAFGTCLAASVAAPGSGRVLYAVFSRDSRSSGGPGAGLCLFPLDKVHAKMEANRNACYTGTREARDIFYKPFHGDIQCGGHAPGSSKSFPCGSEHLPYPLGSRDGLRGTAVLQRGGLNLTAVTVAAENNHTVAFLGTSDGRILKVYLTPDGTSSEYDSILVEINKRVKRDLVLSGDLGSLYAMTQDKVFRLPVQECLSYPTCTQ

SEQ ID NO: 2057 - protein, 708 aa, Homo sapiens
MAGGPGPGEPAAPGAQHFLYEVPPWVMCRFYKVMDALEPADWCQFGGWRRAAGGREARGLLAPTPDAPRPAAALIVRDQTELRLCERSGQRTASVLWPWINRNARVADLVHILTHLQLLRARDIITAWHPPAPLPSPGTTAPRPSSIPAPAEAEAWSPRKLPSSASTFLSPAFPGSQTHSGPELGLVPSPASLWPPPPSPAPSSTKPGPESSVSLLQGARPFPFCWPLCEISRGTHNFSEELKIGEGGFGCVYRAVMRNTVYAVKRLKENADLEWTAVKQSFLTEVEQLSRFRHPNIVDFAGYCAQNGFYCLVYGFLPNGSLEDRLHCQTQACPPLSWPQRLDILLGTARAIQFLHQDSPSLIHGDIKSSNVLLDERLTPKLGDFGLARFSRFAGSSPSQSSMVARTQTVRGTLAYLPEEYIKTGRLAVDTDTFSFGVVVLETLAGQRAVKTHGARTKYLKDLVEEEAEEAGVALRSTQSTLQAGLAADAWAAPIAMQIYKKHLDPRPGPCPPELGLGLGQLACCCLHRRAKRRPPMTQENSYVSSTGRAHSGAAPWQPLAAPSGASAQAAEQLQRGPNQPVESDESLGGLSAALRSWHLTPSCPLDPAPLREAGCPQGDTAGESSWGSGPGSRPTAVEGLALGSSASSSSEPPQIIINPARQKMVQKLALYEDGALDSLQLLSSSSLPGLGLEQDRQGPEESDEFQS

SEQ ID NO: 2058 - protein, 888 aa, Homo sapiens
MLTHRPQEAEQRGRTPGPSFEWNVLAKALYDNVAESPDELSFRKGDIMTVLEQDTQGLDGWWLCSLHGRQGIVPGNRLKILVGMYDKKPAGPGPGPPATPAQPQPGLHAPAPPASQYTPMLPNTYQPQPDSVYLVPTPSKAQQGLYQVPGPSPQFQSPPAKQTSTFSKQTPHHPFPSPATDLYQVPPGPGGPAQDIYQVPPSAGMGHDIYQVPPSMDTRSWEGTKPPAKVVVPTRVGQGYVYEAAQPEQDEYDIPRHLLAPGPQDIYDVPPVRGLLPSQYGQEVYDTPPMAVKGPNGRDPLLEVYDVPPSVEKGLPPSNHHAVYDVPPSVSKDVPDGPLLREETYDVPPAFAKAKPFDPARTPLVLAAPPPDSPPAEDVYDVPPPAPDLYDVPPGLRRPGPGTLYDVPRERVLPPEVADGGVVDSGVYAVPPPAEREAPAEGKRLSASSTGSTRSSQSASSLEVAGPGREPLELEVAVEALARLQQGVSATVAHLLDLAGSAGATGSWRSPSEPQEPLVQDLQAAVAAVQSAVHELLEFARSAVGNAAHTSDRALHAKLSRQLQKMEDVHQTLVAHGQALDAGRGGSGATLEDLDRLVACSRAVPEDAKQLASFLHGNASLLFRRTKATAPGPEGGGTLHPNPTDKTSSIQSRPLPSPPKFTSQDSPDGQYENSEGGWMEDYDYVHLQGKEEFEKTQKELLEKGSITRQGKSQLELQQLKQFERLEQEVSRPIDHDLANWTPAQPLAPGRTGGLGPSDRQLLLFYLEQCEANLTTLTNAVDAFFTAVATNQPPKIFVAHSKFVILSAHKLVFIGDTLSRQAKAADVRSQVTHYSNLLCDLLRGIVATTKAAALQYPSPSAAQDMVERVKELGHSTQQFRRVLGQLAAA

SEQ ID NO: 2059 - protein, 51 aa, Homo sapiens
MLPQIPFLLLVSLNLVHGVFYAERYQMPTGIKGPLPNTKTQFFIPYTIKSK

SEQ ID NO: 2060 - protein, 1035 aa, Homo sapiens
MGSFLSKLELSPSSPAQVRTDLPERPTKRRPPQPLHQVHRVQFVHRAHPAPRYRPVRRRPNLDPANPTTWLANEAWRRFPMKKSQNSPLGPLPSDWWESYLKRTIWSLRHPRPIWSPVTIRITPPDQRVPPSTSPEDVIALAGLPPSEELADPCSKETVLRALRECRKGKGRLEEPLFPESLDSKRRSPETRPSAFKPLMKNGTLTSFVPRPGPLKRSLHSWGSDHSLTKRPNCSSMSSLASIYRGGTLSSKRNAIGSSYSSCRNFSDPWKRSVPSVSFETPEWPIKKEKSCHRPSSPVPLVSDFESLGGSESSGQQNQKIPQLPSSPENLVSEIPPPQLGYAVSDENLTLGKKAELQVSNNAGEDTTEVNTDPFPETWLAIQPSLSLALPSSETDLTQGANPQLENLRKMQKSLGPLASPQSTGEATSVAHSPLKTPSLPTPPGCSQSELLPGTSPDSKPTATFILLTPTSPTLPVTDTTWPPSTSQADRSPMPPDPPAPPTIQSTLLGMVSSPTSHLSASAPPDATSAHLMLKPILGPLHNSEIGSSSYSRISVTAAASSISSLSTIQGTLTPTFKPIFGSIDPLKTTPMIAPFSSKQTPPPFTHASTHHFHGLVKATSVVMSTTLASTSKDSVFKPPLDFGVVNVTSAVGNTYSVPSTCDTFLLGTAQAFRADFTPATGFIFPPHHHPTIPTVHTVTMFTQVLSSVVQISPRSSTANFRGMGSPLPASALVSTNWLASTPSISNLTPAITSPLGSSSRPPFPLSQGANPQPAFGATNGQKQGPSQPALMPSVSSSFLFGSSAVALPTPMPTPAQPAFISTTQSALGCLTPSASTSQTPASTWSGIGGIPAGFPISQASTTGFRIVIQTHQSGAFGSVFGSRAPQPFTFGGFVTPMDCDESGIIMTGPDMSPTSGAFSIGALPSGTTNTMIPFGKGWSQNTEGLPSHRTAFSLGRGSISARKTMAPIAQNTPVPGQAKAGSSVGFGMPFPPAQGSVGRGPFRSSASSFSIGAKSKTPKNREKGHSRRHHAYKK

SEQ ID NO: 2061 - protein, 253 aa, Homo sapiens
MVLLKLLEVYRKGSAGTFHKSTIFGNTIMTSQPVPNETIIVLPSNVINFSQAEKPEPTNQGQDSLKKHLHAEIKVIGTIQILCGMMVLSLGIILASASFSPNFTQVTSTLLNSAYPFIGPFFFIISGSLSIATEKRLTKLLVHSSLVGSILSALSALVGFIILSVKQATLNPASLQCELDKNNIPTRSYVSYFYHDSLYTTDCYTAKASLAGTLSLMLICTLLEFCLAVLTAVLRWKQAYSDFPGVSVLAGFT

SEQ ID NO: 2062 - protein, 675 aa, Homo sapiens
MAGPAPPAADELPGPAARRLYSRMEASCLELALEGERLCKAGDFKTGVAFFEAAVQVGTEDLKTLSAIYSQLGNAYFYLKEHGRALEYHKHDLLLARTIGDRMGEAKASGNLGNTLKVLGRFDEAAVCCQRHLSIAQEQGDKVGEARALYNIGNVYHAKGKQLSWNAANATQDPGHLPPDVRETLCKASEFYERNLSLVKELGDRAAQGRAYGNLGNTHYLLGNFTEATTFHKERLAIAKEFGDKAAERRAYSNLGNAHVFLGRFDVAAEYYKKTLQLSRQLRDQAVEAQACYSLGNTYTLLQDYERAAEYHLRHLLIAQELADRVGEGRACWSLGNAYVSMGRPAQALTFAKKHLQISQEIGDRHGELTARMNVAQLQLVLGRLTSPAASEKPDLAGYEAQGARPKRTQRLSAETWDLLRLPLEREQNGDSHHSGDWRGPSRDSLPLPVRSRKYQEGPDAERRPREGSHSPLDSADVRVHVPRTSIPRAPSSDEECFFDLLTKFQSSRMDDQRCPLDDGQAGAAEATAAPTLEDRIAQPSMTASPQTEEFFDLIASSQSRRLDDQRASVGSLPGLRITHSNAGHLRGHGEPQEPGDDFFNMLIKYQSSRIDDQRCPPPDVLPRGPTMPDEDFFSLIQRVQAKRMDEQRVDLAGGPEQGAGGPPEPQQQCQPGAS

SEQ ID NO: 2063 - protein, 366 aa, Homo sapiens
MTSCLPALRFIATPRLSAMPHIDNDVKLDFKDVLLRPKRSTLKSRSEVDLTRSFSFRNSKQTYSGVPIIAANMDTVGTFEMAKVLCKFSLFTAVHKHYSLVQWQEFAGQNPDCLEHLAASSGTGSSDFEQLEQILEAIPQVKYICLDVANGYSEHFVEFVKDVRKRFPQHTIMAGNVVTGEMVEELILSGADIIKVGIGPGSVCTTRKKTGVGYPQLSAVMECADAAHGLKGHIISDGGCSCPGDVAKAFGAGADFVMLGGMLAGHSESGGELIERDGKKYKLFYGMSSEMAMKKYAGGVAEYRASEGKTVEVPFKGDVEHTIRDILGGIRSTCTYVGAAKLKELSRRTTFIRVTQQVNPIFSEAC

SEQ ID NO: 2064 - protein, 178 aa, Homo sapiens
MTSQPVPNETIIVLPSNVINFSQAEKPEPTNQGQDSLKKHLHAEIKVIGTIQILCGMMVLSLGIILASASFSPNFTQVTSTLLNSAYPFIGPFFFIISGSLSIATEKRLTKLLVHSSLVGSILSALSALVGFIILSVKQATLNPASLQWNSLSDADLHSAGILPSCAHCCAAVETGLL

SEQ ID NO: 2065 - protein, 271 aa, Homo sapiens
MASGILVNVKEEVTCPICLELLTQPLSLDCGHSFCQACLTANHKKSMLDKGESSCPVCRISYQPENIRPNRHVANIVEKLREVKLSPEGQKVDHCARHGEKLLLFCQEDGKVICWLCERSQEHRGHHTFLTEEVAREYQVKLQAALEMLRQKQQEAEELEADIREEKASWKTQIQYDKTNVLADFEQLRDILDWEESNELQNLEKEEEDILKSLTNSETEMVQQTQSLRELISDLEHRLQGSVMELLQDGERDLEEARNFSKKSKESVSSS

SEQ ID NO: 2066 - protein, 926 aa, Homo sapiens
MNESASQEELRPAQENRKEDKERKWNLTEVKELHETLQSVPDVPVKEDTNSVVEKAMDEIKSQELNLEGQRKISPGSIKDSKTEASGNIAIRKSAKVIFALDETELKSKPEHTWKKNLFERMEARAQAMQQKIIDKENLKKELEKKAEKKLPRDNLAKEWFNTDSMTLNNTAYLLDKLLPTLVPGVENMLTQVEKKKVLTEADTPSKFDPINYLGEYLIRNNPNYIKDPGMSGYQRLMKEVTEDLKIYVPDTICNRVSKMKENVKQNRKQRESIDKIIVKVANTRKQALQEQFDEWILDPKGMIPKSVIQNVLQEFFQNPDFKLGSHCKQLDITDSTEPRLNKMEFTEYISSHIKDLKSEMFEELLKHLCHSADEFREVIKADMRRQMFAELFLHCDHGKVGFLDRQRTLALLELFYDHSSQMLRSLLRNPRQWPFIEFEEINLTELWGDMDNQKHIYEGFDKVLLEMNTLLSANHASKTQSKLLESPDQPKLNEQRTSTPSPNPPEQQRGVTAEQGPQRISIEEQQQGKKPTAEQELYIESVIEPGTHTESTLEQGSSRRLLTEQETHRESTTEQGQHKGSIEGQGPRRVSVSEQGSSRESVAEQGSRRESIAEQDRHKGSVAEQGSRRMSAAEQGSLRESVIEEPYQKSEQGPYGEIISEEQEDIGSTSQSRKDSILKSTKYGEPITSEYIEVPLQEKRSWEQTYEEEIFLSSELQEEVPTLSRKDHFPETTKKEVQKDKPCEPKSQKIEGKSWSGEFFTCNWKMKYVTFEDEEQANLIYGNSRFTDLHSIIRNIQSCKEVKGRTAFNGVSFNLLQFVQLLETFVGEDAPLSVSETLTSFFKEGYVETEQEKMNALEQFSQNAFQVRQRLLLEAIFQKWDSDGSGFLDLKEVDELLYTYKEGMEKESMKKGLTLSPGWSAVAQL

SEQ ID NO: 2067 - protein, 67 aa, Homo sapiens
MKKKLVVLGLLAVVLVLVIVGLCLWLPSASKEPDNHVYTRAAVAADAKQCSKIGRDALRDGGSAVDA

SEQ ID NO: 2068 - protein, 192 aa, Homo sapiens
MLQTLYDYFWWERLWLPVNLTWADLEDRDGRVYAKASDLYITLPLALLFLIVRYFFELYVATPLAALLNIKEKTRLRAPPNATLEHFYLTSGKQPKQVEVELLSRQSGLSGRQVERWFRRRRNQDRPSLLKKFREASWRFTFYLIAFIAGMAVIVDKPWFYDMKKVWEGYPIQSTIPSQYWYYMIELSFYWS

SEQ ID NO: 2069 - protein, 39 aa, Homo sapiens
MLKNPYTIKKQPLHQFVQRPLFPLPAAFYHPGSYLGLKE

SEQ ID NO: 2070 - protein, 1463 aa, Homo sapiens
MMLPQNSWHIDFGRCCCHQNLFSAVVTCILLLNSCFLISSFNGTDLELRLVNGDGPCSGTVEVKFQGQWGTVCDDGWNTTASTVVCKQLGCPFSFAMFRFGQAVTRHGKIWLDDVSCYGNESALWECQHREWGSHNCYHGEDVGVNCYGKSLTRVGRQGEANLGLRLVDGNNSCSGRVEVKFQERWGTICDDGWNLNTAAVVCRQLGCPSSFISSGVVNSPAVLRPIWLDDILCQGNELALWNCRHRGWGNHDCSHNEDVTLTCYDSSDLELRLVGGTNRCMGRVELKIQGRWGTVCHHKWNNAAADVVCKQLGCGTALHFAGLPHLQSGSDVVWLDGVSCSGNESFLWDCRHSGTVNFDCLHQNDVSVICSDGADLELRLADGSNNCSGRVEVRIHEQWWTICDQNWKNEQALVVCKQLGCPFSVFGSRRAKPSNEARDIWINSISCTGNESALWDCTYDGKAKRTCFRRSDAGVICSDKADLDLRLVGAHSPCYGRLEVKYQGEWGTVCHDRWSTRNAAVVCKQLGCGKPLHVFGMTYFKEASGPIWLDDVSCIGNESNIWDCEHSGWGKHNCVHREDVIVTCSGDATWGLRLVGGSNRCSGRLEVYFQGRWGTVCDDGWNSKAAAVVCSQLDCPSSIIGMGLGNASTGYGKIWLDDVSCDGDESDLWSCRNSGWGNNDCSHSEDVGVICSDASDMELRLVGGSSRCAGKVEVNVQGAVGILCANGWGMNIAEVVCRQLECGSAIRVSREPHFTERTLHILMSNSGCTGGEASLWDCIRWEWKQTACHLNMEASLICSAHRQPRLVGADMPCSGRVEVKHADTWRSVCDSDFSLHAANVLCRELNCGDAISLSVGDHFGKGNGLTWAEKFQCEGSETHLALCPIVQHPEDTCIHSREVGVVCSRYTDVRLVNGKSQCDGQVEINVLGHWGSLCDTHWDPEDARVLCRQLSCGTALSTTGGKYIGERSVRVWGHRFHCLGNESLLDNCQMTVLGAPPCIHGNTVSVICTGSLTQPLFPCLANVSDPYLSAVPEGSALICLEDKRLRLVDGDSRCAGRVEIYHDGFWGTICDDGWDLSDAHVVCQKLGCGVAFNATVSAHFGEGSGPIWLDDLNCTGMESHLWQCPSRGWGQHDCRHKEDAGVICSEFTALRLYSETETESCAGRLEVFYNGTWGSVGRRNITTAIAGIVCRQLGCGENGVVSLAPLSKTGSGFMWVDDIQCPKTHISIWQCLSAPWERRISSPAEETWITCEDRIRVRGGDTECSGRVEIWHAGSWGTVCDDSWDLAEAEVVCQQLGCGSALAALRDASFGQGTGTIWLDDMRCKGNESFLWDCHAKPWGQSDCGHKEDAGVRCSGQSLKSLNASSGHLALILSSIFGLLLLVLFILFLTWCRVQKQKHLPLRVSTRRRGSLEENLFHEMETCLKREDPHGTRTSDDTPNHGCEDASDTSLLGVLPASEATK

SEQ ID NO: 2071 - protein, 463 aa, Homo sapiens
MKKKLVVLGLLAVVLVLVIVGLCLWLPSASKEPDNHVYTRAAVAADAKQCSKIGRDALRDGGSAVDAAIAALLCVGLMNAHSMGIGGGLFLTIYNSTTRKAEVINAREVAPRLAFATMFNSSEQSQKGGLSVAVPGEIRGYELAHQRHGRLPWARLFQPSIQLARQGFPVGKGLAAALENKRTVIEQQPVLCEVFCRDRKVLREGERLTLPQLADTYETLAIEGAQAFYNGSLTAQIVKDIQAAGGIVTAEDLNNYRAELIEHPLNISLGDVVLYMPSAPLSGPVLALILNILKGYNFSRESVESPEQKGLTYHRIVEAFRFAYAKRTLLGDPKFVDVTEVVRNMTSEFFAAQLRAQISDDTTHPISYYKPEFYTPDDGGTAHLSVVAEDGSAVSATSTINLYFGSKVRSPVSGILFNNEMDDFSSPSITNEFGVPPSPANFIQPGKQPLSSMCPTIMVGQDG

SEQ ID NO: 2072 - protein, 1094 aa, Homo sapiens
MEDEAVLDRGASFLKHVCDEEEVEGHHTIYIGVHVPKSYRRRRRHKRKTGHKEKKEKERISENYSDKSDIENADESSSSILKPLISPAAERIRFILGEEDDSPAPPQLFTELDELLAVDGQEMEWKETARWIKFEEKVEQGGERWSKPHVATLSLHSLFELRTCMEKGSIMLDREASSLPQLVEMIVDHQIETGLLKPELKDKVTYTLLRKHRHQTKKSNLRSLADIGKTVSSASRMFTNPDNGSPAMTHRNLTSSSLNDISDKPEKDQLKNKFMKKLPRDAEASNVLVGEVDFLDTPFIAFVRLQQAVMLGALTEVPVPTRFLFILLGPKGKAKSYHEIGRAIATLMSDEVFHDIAYKAKDRHDLIAGIDEFLDEVIVLPPGEWDPAIRIEPPKSLPSSDKRKNMYSGGENVQMNGDTPHDGGHGGGGHGDCEELQRTGRFCGGLIKDIKRKAPFFASDFYDALNIQALSAILFIYLATVTNAITFGGLLGDATDNMQGVLESFLGTAVSGAIFCLFAGQPLTILSSTGPVLVFERLLFNFSKDNNFDYLEFRLWIGLWSAFLCLILVATDASFLVQYFTRFTEEGFSSLISFIFIYDAFKKMIKLADYYPINSNFKVGYNTLFSCTCVPPDPANISISNDTTLAPEYLPTMSSTDMYHNTTFDWAFLSKKECSKYGGNLVGNNCNFVPDITLMSFILFLGTYTSSMALKKFKTSPYFPTTARKLISDFAIILSILIFCVIDALVGVDTPKLIVPSEFKPTSPNRGWFVPPFGENPWWVCLAAAIPALLVTILIFMDQQITAVIVNRKEHKLKKGAGYHLDLFWVAILMVICSLMALPWYVAATVISIAHIDSLKMETETSAPGEQPKFLGVREQRVTGTLVFILTGLSVFMAPILKFIPMPVLYGVFLYMGVASLNGVQFMDRLKLLLMPLKHQPDFIYLRHVPLRRVHLFTFLQVLCLALLWILKSTVAAIIFPVMILALVAVRKGMDYLFSQHDLSFLDDVIPEKDKKKKEDEKKKKKKKGSLDSDNDDEKDHQHSLNATHHADKIPFLQSLGMPSPPRTPVKVVPQIRIELEPEDNDYFWRSKGTETTL

SEQ ID NO: 2073 - protein, 197 aa, Homo sapiens
PAASSPSSNNTAATTAAIVPGSQLMPSKSPSTGTTEISSHESSHGTPSQTTAKNWELTASASHQPPGVYPQGHSDTTVAISTSTVLLCGLSAVSLLACYLKSSSQRKVTYLRLSVNYKAPPGVGDVYREDTSVWAPPNDPVSSCAARTDREPEKVEEMLSPVNPLHRRIQEEENSSQRHFTYICIYTSLSVISTHYI

SEQ ID NO: 2074 - protein, 307 aa, Homo sapiens
EHPLSADIAMATRADEDGDTPLHIAVVQGNLPAVHRLVNLFQQGGRELDIYNNLRQTPLHLAVITTLPSVVRLLVTAGASPMALDRHGQTAAHLACEHRSPTCLRALLDSAAPGTLDLEARNYDGLTALHVAVNTECQETVQLLLERGADIDAVDIKSGRSPLIHAVENNSLSMVQLLLQHGANVNAQMYSGSSALHSASGRGLLPLVRTLVRSGADSSLKNCHNDTPLMVARSRRVSRGSCGHAPCTRVSAGWLQVIDILRGKATRPASTSQPDPSPDRSANTSPESSSRLSSNGLLSASPSSSPS

SEQ ID NO: 2075 - protein, 331 aa, Homo sapiens
AKICLEIMQRTGAHLELSLAKDQGLSIMVSGKLDAVMKARKDIVARLQTQASATVAIPKEHHRFVIGKNGEKLQDLELKTATKIQIPRPDDPSNQIKITGTKEGIEKARHEVLLISAEQDKRAVERLEVEKAFHPFIAGPYNRLVGEIMQETGTRINIPPPSVNRTEIVFTGEKEQLAQAVARIKKIYEEKGNSLQEILERTGVSVEIPPSDSISETVILRGEPEKLGQALTEVYAKANSFTVSSVAAPSWLHRFIIGKKGQNLAKITQQMPKVHIEFTEGEDKITLEGPTEDVNVAQEQIEGMVKDLINRMDYVEINIDHKFHRHLIGKS

SEQ ID NO: 2076 - protein, 104 aa, Homo sapiens
MVHLTPEEKTAVNALWGKVNVDAVGGEALGRLLVVYPWTQRFFESFGDLSSPDAVMGNPKVKAHGKKVLGAFSDGLAHLDNLKGTFSQLSELHCDKLHVDPENF

SEQ ID NO: 2077 - protein, 1044 aa, Homo sapiens
MAPFATPMVQALTTTRIQRQAEGFQCWRECGTRRSPFEGKETCAHRYEARQRVDQILETRDMIGRCFVLSQDLAIRDELDGGEWKFCEGRPQGHEQFGFCQQGTAAAFSPDSHYLLFGAPGTYNWKGTARVELCAQGSADLAHLDDGPYEAGGEKEQDPRLIPVPANSYFGFSIDSGKGLVRAEELSFVAGAPRANHKGAVVILRKDSASRLVPEVMLSGERLTSGFGYSLAVADLNSDGWPDLIVGAPYFFERQEELGGAVYVYLNQGGHWAGISPLRLCGSPDSMFGISLAVLGDLNQDGFPDIAVGAPFDGDGKVFIYHGSSLGVVAKPSQVLEGEAVGIKSFGYSLSGSLDMDGNQYPDLLVGSLADTAVLFRARPILHVSHEVSIAPRSIDLEQPNCAGGHSVCVDLRVCFSYIAVPSSYSPTVALDYVLDADTDRRLRGQVPRVTFLSRNLEEPKHQASGTVWLKHQHDRVCGDAMFQLQENVKDKLRAIVVTLSYSLQTPRLRRQAPGQGLPPVAPILNAHQPSTQRAEIHFLKQGCGEDKICQSNLQLVRARFCTRVSDTEFQPLPMDVDGTTALFALSGQPVIGLELMVTNLPSDPAQPQADGDDAHEAQLLVMLPDSLHYSGVRALDPAEKPLCLSNENASHVECELGNPMKRGAQVTFYLILSTSGISIETTELEVELLLATISEQELHPVSARARVFIELPLSIAGMAIPQQLFFSGVVRGERAMQSERDVGSKVKYEVTVSNQGQSLRTLGSAFLNIMWPHEIANGKWLLYPMQVELEGGQGPGQKGLCSPRPNILHLDVDSRDRRRRELEPPEQQEPGERQEPSMSWWPVSSAEKKKNITLDCARGTANCVVFSCPLYSFDRAAVLHVWGRLWNSTFLEEYSAVKSLEVIVRANITVKSSIKNLMLRDASTVIPVMVYLDPMAVVAEGVPWWVILLAVLAGLLVLALLVLLLWKMGFFKRAKHPEATVPQYHAVKIPREDRQQFKEEKTGTILRNNWGSPRREGPDAHPILAADGHPELGPDGHPGPGTA

SEQ ID NO: 2078 - protein, 302 aa, Homo sapiens
MQSTPFCGFCSLGKMITAKPGKTPIQVLHEYGMKTKNIPVYECERSDVQIHVPTFTFRVTVGDITCTGEGTSKKLAKHRAAEAAINILKANASICFAVPDPLMPDPSKQPKNQLNPIGSLQELAIHHGWRLPEYTLSQEGGPAHKREYTTICRLESFMETGKGASKKQAKRNAAEKFLAKFSNISPENHISLTNVVGHSLGCTWHSLRNSPGEKINLLKRSLLSIPNTDYIQLLSEIAKEQGFNITYLDIDELSANGQYQCLAELSTSPITVCHGSGISCGNAQSDAAHNALQYLKIIAERK

SEQ ID NO: 2079 - protein, 783 aa, Homo sapiens
MAACRYCCSCLRLRPLSDGPFLLPRRDRALTQLQVRALWSSAGSRAVAVDLGNRKLEISSGKLARFADGSAVVQSGDTAVMVTAVSKTKPSPSQFMPLVVDYRQKAAAAGRIPTNYLRREIGTSDKEILTSRIIDRSIRPLFPAGYFYDTQVLCNLLAVDGVNEPDVLAINGASVALSLSDIPWNGPVGAVRIGIIDGEYVVNPTRKEMSSSTLNLVVAGAPKSQIVMLEASAENILQQDFCHAIKVGVKYTQQIIQGIQQLVKETGVTKRTPQKLFTPSPEIVKYTHKLAMERLYAVFTDYEHDKVSRDEAVNKIRLDTEEQLKEKFPEADPYEIIESFNVVAKEVFRSIVLNEYKRCDGRDLTSLRNVSCEVDMFKTLHGSALFQRGQTQVLCTVTFDSLESGIKSDQVITAINGIKDKNFMLHYEFPPYATNEIGKVTGLNRRELGHGALAEKALYPVIPRDFPFTIRVTSEVLESNGSSSMASACGGSLALMDSGVPISSAVAGVAIGLVTKTDPEKGEIEDYRLLTDILGIEDYNGDMDFKIAGTNKGITALQADIKLPGIPIKIVMEAIQQASVAKKEILQIMNKTISKPRASRKENGPVVETVQVPLSKRAKFVGPGGYNLKKLQAETGVTISQVDEETFSVFAPTPSAMHEARDFITEICKDDQEQQLEFGAVYTATITEIRDTGVMVKLYPNMTAVLLHNTQLDQRKIKHPTALGLEVGQEIQVKYFGRDPADGRMRLSRKVLQSPATTVVRTLNDRSSIVMGEPISQSSSNSQ

SEQ ID NO: 2080 - protein, 901 aa, Homo sapiens
MAEPGHSHHLSARVRGRTERRIPRLWRLLLWAGTAFQVTQGTGPELHACKESEYHYEYTACDSTGSRWRVAVPHTPGLCTSLPDPIKGTECSFSCNAGEFLDMKDQSCKPCAEGRYSLGTGIRFDEWDELPHGFASLSANMELDDSAAESTGNCTSSKWVPRGDYIASNTDECTATLMYAVNLKQSGTVNFEYYYPDSSIIFEFFVQNDQCQPNADDSRWMKTTEKGWEFHSVELNRGNNVLYWRTTAFSVWTKVPKPVLVRNIAITEKGSSSCNVRPACTDKDYFYTHTACDANGETQLMYKWAKPKICSEDLEGAVKLPASGVKTHCPPCNPGFFKTNNSTCQPCPYGSYSNGSDCTRCPAGTEPAVGFEYKWWNTLPTNMETTVLSGINFEYKGMTGWEVAGDHIYTAAGASDNDFMILTLVVPGFRPPQSVMADTENKEVARITFVFETLCSVNCELYFMVGVNSRTNTPVETWKGSKGKQSYTYIIEENTTTSFTWAFQRTTFHEASRKYTNDVAKIYSINVTNVMNGVASYCRPCALEASDVGSSCTSCPAGYYIDRDSGTCHSCPTNTILKAHQPYGVQACVPCGPGTKNNKIHSLCYNDCTFSRNTPTRTFNYNFSALANTVTLAGGPSFTSKGLKYFHHFTLSLCGNQGRKMSVCTDNVTDLRIPEGESGFSKSITAYVCQAVIIPPEVTGYKAGVSSQPVSLADRLIGVTTDMTLDGITSPAELFHLESLGIPDVIFFYRSNDVTQSCSSGRSTTIRVRCSPQKTVPGSLLLPGTCSDGTCDGCNFHFLWESAAACPLCSVADYHAIVSSCVAGIQKTTYVWREPKLCSGGISLPEQRVTICKTIDFWLKVGISAGTCTAILLTVLTCYFWKKNQKLEYKYSKLVMNATLK

SEQ ID NO: 2081 - protein, 128 aa, Homo sapiens
MLQTLYDYFWWERLWLPVNLTWADLEDRDGRVYAKASDLYITLPLALLFLIVRYFFELYVATPLAALLNIKEKTRLRAPPNATLEHFYLTSGKQPKQVEVELLSRQSGLSGRQVERWFRRRRNQDRPS

SEQ ID NO: 2082 - protein, 148 aa, Homo sapiens
MLSDGCGSEEKISVPSCYGGIGAPVSRQVPASHDSELMAFMTRKLWDLEQQVKAQTDEILSKDQKIAALEDLVQTLRPHPAEATLQRQEELETMCVQLQRQVREMERFLSDYGLQWVGEPMDQEDSESKTVSEHGERDWMTAKKFWKP

SEQ ID NO: 2083 - protein, 144 aa, Homo sapiens
MKPKMKYSTNKISTAKWKNTASKALCFKLGNKVLLSYYESQHPSNESGDGVDGKMLMVTLSPTKDFWLHANNKEHSVELHKCEKPLPDQAFFVLHNMHSNCVSFECKTDPGVFIGVKDNHLALIKVDSSENLCTENILFKLSET

SEQ ID NO: 2084 - protein, 563 aa, Homo sapiens
MRDPLTDCPYNKVYKNLKEFSQNGENFCKQVTSVLQQRANLEISYAKGLQKLASKLSKALQNTRKSCVSSAWAWASEGMKSTADLHQKLGKAIELEAIKPTYQVLNVQEKKRKSLDNEVEKTANLVISNWNQQIKAKKKLMVSTKKHEALFQLVESSKQSMTEKEKRKLLNKLTKSTEKLEKEDENYYQKNMAGYSTRLKWENTLENCYQVTHSICLYAFWVKRAWGKCVSDLRYQDTFLPGNLPPLWFGYDIVKRLIMRLCSVCLQSILELEKERIQLLCNNLNQYSQHISLFGQTLTTCHTQIHCAISKIDIEKDIQAVMEETAILSTENKSEFLLTDYFEEDPNSAMDKERRKSLLKPKLLRLQRDIEKASKDKEGLERMLKTYSSTSSFSDAKSQKDTAALMDENNLKLDLLEANSYKLSSMLAELEQRPQPSHPCSNSIFRWREKEHTHSYVKISRPFLMKRLENIVSKASSGGQSNPGSSTPAPGAAQLSSRLCKALYSFQARQDDELNLEKGDIVIIHEKKEGGWWFGSLNGKKGHFPAAYVEELPSNAGNTATKA

SEQ ID NO: 2085 - protein, 574 aa, Homo sapiens
MGTTGLESLSLGDRGAAPTVTSSERLVPDPPNDLRKEDVAMELERVGEDEEQMMIKRSSECNPLLQEPIASAQFGATAGTECRKSVPCGWERVVKQRLFGKTAGRFDVYFISPQGLKFRSKSSLANYLHKNGETSLKPEDFDFTVLSKRGIKSRYKDCSMAALTSHLQNQSNNSNWNLRTRSKCKKDVFMPPSSSSELQESRGLSNFTSTHLLLKEDEGVDDVNFRKVRKPKGKVTILKGIPIKKTKKGCRKSCSGFVQSDSKRESVCNKADAESEPVAQKSQLDRTVCISDAGACGETLSVTSEENSLVKKKERSLSSGSNFCSEQKTSGIINKFCSAKDSEHNEKYEDTFLESEEIGTKVEVVERKEHLHTDILKRGSEMDNNCSPTRKDFTEDTIPRTQIERRKTSLYFSSKYNKEALSPPRRKAFKKWTPPRSPFNLVQETLFHDPWKLLIATIFLNRTSGKMAIPVLWKFLEKYPSAEVARTADWRDVSELLKPLGLYDLRAKTIVKFSDEYLTKQWKYPIELHGIGKYGNDSYRIFCVNEWKQVHPEDHKLNKYHDWLWENHEKLSLS

SEQ ID NO: 2086 - protein, 549 aa, Homo sapiens
MKVTLSALDTSESSFTPLVVIELAQDVKEETKEWLKNRIIAKKKDGVRRLLTSGIVIQVFPLHDSEALKKLEDTWYTRFALKYQPIDSIRGYFGETIALYFGFLEYFTFALIPMAVIGLPYYLFVWEDYDKYVIFASFNLIWSTVILELWKRGCANMTYRWGTLLMKRKFEEPRPGFHGVLGINSITGKEEPLYPSYKRQLRIYLVSLPFVCLCLYFSLYVMMIYFDMEVWALGLHENSGSEWTSVLLYVPSIIYAIVIEIMNRLYRYAAEFLTSWENHRLESAYQNHLILKVLVFNFLNCFASLFYIAFVLKDMKLLRQSLATLLITSQILNQIMESFLPYWLQRKHGVRVKRKVQALKADIDATLYEQVILEKEMGTYLGTFDDYLELFLQFGYVSLFSCVYPLAAAFAVLNNFTEVNSDALKMCRVFKRPFSEPSANIGVWQLAFETMSVISVVTNCALIGMSPQVNAVFPESKADLILIVVAVEHALLALKFILAFAIPDKPRHIQMKLARLEFESLEALKQQQMKLVTENLKEEPMESGKEKAT

SEQ ID NO: 2087 - protein, 190 aa, Homo sapiens
MKDLKKRVALGYISTHTGEAALRGEPRIQTLPVASALSSHRTGPPPISPSKRKFSMEPGDEDLDCDNDHVSKMSRIFNPHLNKTANGDCRRDPRERSRSPIERAVAPTMSLHGSHLYTSLPSLGLEQPLALTKNSLDASRPAGLSPTLTPGERQQNRPSVITCASAGARNCNLSHCPIAHSGCAAPGPAS

SEQ ID NO: 2088 - protein, 295 aa, Homo sapiens
MEVMNLMEQPIKVTEWQQTYTYDSGIHSGANTCVPSVSSKGIMEEDEACGRQYTLKKTTTYTQGVPPSQGDLEYQMSTTARAKRVREAMCPGVSGEDSSLLLATQVEGQATNLQRLAEPSQLLKSAIVHLINYQDDAELATRALPELTKLLNDEDPVVVTKAAMIVNQLSKKEASRRALMGSPQLVAAVVRTMQNTSDLDTARCTTSILHNLSHHREGLLAIFKSGGIPALVRMLSSPVESVLFYAITTLHNLLLYQEGAKMAVRLADGLQKMVPLLNKNNPKFLAITTDCLQLL

SEQ ID NO: 2089 - protein, 846 aa, Homo sapiens
MEQLVKERKGVQAREKQPAEPPAPLRRRAASDGQYENQSPEATSPRSPGVRSPVQCVSPELALTIALNPGGRPKEPHLHSYKEAFEEMEGTSPSSPPPSGVRSPPGLAKTPLSALGLKPHNPADILLHPTGEPRSYVESVARTAVAGPRAQDSEPKSFSAPATQAYGHEIPLRNGTLGGSFVSPSPLSTSSPILSADSTSVGSFPSGESSDQGPRTPTQPLLESGFRSGSLGQPSPSAQRNYQSSSPLPTVGSSYSSPDYSLQHFSSSPESQARAQFSVAGVHTVPGSPQARHRTVGTNTPPSPGFGWRAINPSMAAPSSPSLSHHQMMGPPGTGFHGSTVSSPQSSAATTPGSPSLCRHPAGVYQVSGLHNKVATTPGSPSLGRHPGAHQGNLASGLHSNAIASPGSPSLGRHLGGSGSVVPGSPCLDRHVAYGGYSTPEDRRPTLSRQSSASGYQAPSTPSFPVSPAYYPGLSSPATSPSPDSAAFRQGSPTPALPEKRRMSVGDRAGSLPNYATINGKVSSPVASGMSSPSGGSTVSFSHTLPDFSKYSMPDNSPETRAKVKFVQDTSKYWYKPEISREQAIALLKDQEPGAFIIRDSHSFRGAYGLAMKVSSPPPTIMQQNKKGDMTHELVRHFLIETGPRGVKLKGCPNEPNFGSLSALVYQHSIIPLALPCKLVIPNRDPTDESKDSSGPANSTADLLKQGAACNVLFVNSVDMESLTGPQAISKATSETLAADPTPAATIVHFKVSAQGITLTDNQRKLFFRRHYPLNTVTFCDLDPQERKWMKTEGGAPAKLFGFVARKQGSTTDNACHLFAELDPNQPASAIVNFVSKVMLNAGQKR

SEQ ID NO: 2090 - protein, 402 aa, Homo sapiens
MDSHLVEKLGQHLLPWMDRLSLEHLNPSIYVGLRLSSLQAGTKEDLYLHSLKLGYQQCLLGSAFSEDDGDCQGKPSMGQLALYLLALRANCEFVRGHKGDRLVSQLKWFLEDEKRAIGHDHKGHPHTSYYQYGLGILALCLHQKRVHDSVVDKLLYAVEPFHQGHHSVDTAAMAGLAFTCLKRSNFNPGRRQRITMAIRTVREEILKAQTPEGHFGNVYSTPLALQFLMTSPMRGAELGTACLKARVALLASLQDGAFQNALMISQLLPVLNHKTYIDLIFPDCLAPRVMLEPAAETIPQTQEIISVTLQVLSLLPPYRQSISVLAGSTVEDVLKKAHELGGFTYETQASLSGPYLTSVMGKAAGEREFWQLLRDPNTPLLQGIADYRPKDGETIELRLVSW

SEQ ID NO: 2091 - protein, 165 aa, Homo sapiens
PRRFEFCAAGVRWFSELCPRLPRAGARERVRGFLTQTRVRSAQSPEMESSSSDYYNKDNEEESLLANVASLRHELKITEWSLQSLGEELSSVSPSENSDYAPNPSRSEKLILDVQPSHPGLLNYSPYENVCKISGSSTDFQKKPRDKMFSSSAPVDQEIKSLREK

SEQ ID NO: 2092 - protein, 177 aa, Homo sapiens
MAGPVKDREAFQRLNFLYQVSLRQGPHGDGARRPRVTAPLPQAAHCVLAQDPENQALARFYCYTERTIAKRLVLRRDPSVKRTLCRGCSSLLVPGLTCTQRQRRCRGQRWTVQTCLTCQRSQRFLNDPGHLLWGDRPEAQLGSQADSKPLQPLPNTAHSISDRLPEEKMQTQGSSNQ

SEQ ID NO: 2093 - protein, 218 aa, Homo sapiens
MFLSTSKHGRQEAMLLFLLSALVLLTQPLGYLEAEMKTYSHRTMPSACTLVMCSSVESGLPGRDGRDGREGPRGEKGDPGLPGAAGQAGMPGQAGPVGPKGDNGSVGEPGPKGDTGPSGPPGPPGVPGPAGREGPLGKQGNIGPQGKPGPKGEAGPKGEVGAPGMQGSAGARGLAGPKGERGVPGERGVPGNTGAAGSAGAMGPQGSPGARGPPGLKG

SEQ ID NO: 2094 - protein, 2240 aa, Homo sapiens
MLRGPGPGLLLLAVQCLGTAVPSTGASKSKRQAQQMVQPQSPVAVSQSKPGCYDNGKHYQINQQWERTYLGNALVCTCYGGSRGFNCESKPEAEETCFDKYTGNTYRVGDTYERPKDSMIWDCTCIGAGRGRISCTIANRCHEGGQSYKIGDTWRRPHETGGYMLECVCLGNGKGEWTCKPIAEKCFDHAAGTSYVVGETWEKPYQGWMMVDCTCLGEGSGRITCTSRNRCNDQDTRTSYRIGDTWSKKDNRGNLLQCICTGNGRGEWKCERHTSVQTTSSGSGPFTDVRAAVYQPQPHPQPPPYGHCVTDSGVVYSVGMQWLKTQGNKQMLCTCLGNGVSCQETAVTQTYGGNSNGEPCVLPFTYNGRTFYSCTTEGRQDGHLWCSTTSNYEQDQKYSFCTDHTVLVQTRGGNSNGALCHFPFLYNNHNYTDCTSEGRRDNMKWCGTTQNYDADQKFGFCPMAAHEEICTTNEGVMYRIGDQWDKQHDMGHMMRCTCVGNGRGEWTCIAYSQLRDQCIVDDITYNVNDTFHKRHEEGHMLNCTCFGQGRGRWKCDPVDQCQDSETGTFYQIGDSWEKYVHGVRYQCYCYGRGIGEWHCQPLQTYPSSSGPVEVFITETPSQPNSHPIQWNAPQPSHISKYILRWRPKNSVGRWKEATIPGHLNSYTIKGLKPGVVYEGQLISIQQYGHQEVTRFDFTTTSTSTPVTSNTVTGETTPFSPLVATSESVTEITASSFVVSWVSASDTVSGFRVEYELSEEGDEPQYLDLPSTATSVNIPDLLPGRKYIVNVYQISEDGEQSLILSTSQTTAPDAPPDTTVDQVDDTSIVVRWSRPQAPITGYRIVYSPSVEGSSTELNLPETANSVTLSDLQPGVQYNITIYAVEENQESTPVVIQQETTGTPRSDTVPSPRDLQFVEVTDVKVTIMWTPPESAVTGYRVDVIPVNLPGEHGQRLPISRNTFAEVTGLSPGVTYYFKVFAVSHGRESKPLTAQQTTKLDAPTNLQFVNETDSTVLVRWTPPRAQITGYRLTVGLTRRGQPRQYNVGPSVSKYPLRNLQPASEYTVSLVAIKGNQESPKATGVFTTLQPGSSIPPYNTEVTETTIVITWTPAPRIGFKLGVRPSQGGEAPREVTSDSGSIVVSGLTPGVEYVYTIQVLRDGQERDAPIVNKVVTPLSPPTNLHLEANPDTGVLTVSWERSTTPDITGYRITTTPTNGQQGNSLEEVVHADQSSCTFDNLSPGLEYNVSVYTVKDDKESVPISDTIIPAVPPPTDLRFTNIGPDTMRVTWAPPPSIDLTNFLVRYSPVKNEEDVAELSISPSDNAVVLTNLLPGTEYVVSVSSVYEQHESTPLRGRQKTGLDSPTGIDFSDITANSFTVHWIAPRATITGYRIRHHPEHFSGRPREDRVPHSRNSITLTNLTPGTEYVVSIVALNGREESPLLIGQQSTVSDVPRDLEVVAATPTSLLISWDAPAVTVRYYRITYGETGGNSPVQEFTVPGSKSTATISGLKPGVDYTITVYAVTGRGDSPASSKPISINYRTEIDKPSQMQVTDVQDNSISVKWLPSSSPVTGYRVTTTPKNGPGPTKTKTAGPDQTEMTIEGLQPTVEYVVSVYAQNPSGESQPLVQTAVTTIPAPTDLKFTQVTPTSLSAQWTPPNVQLTGYRVRVTPKEKTGPMKEINLAPDSSSVVVSGLMVATKYEVSVYALKDTLTSRPAQGVVTTLENVSPPRRARVTDATETTITISWRTKTETITGFQVDAVPANGQTPIQRTIKPDVRSYTITGLQPGTDYKIYLYTLNDNARSSPVVIDASTAIDAPSNLRFLATTPNSLLVSWQPPRARITGYIIKYEKPGSPPREVVPRPRPGVTEATITGLEPGTEYTIYVIALKNNQKSEPLIGRKKTVQKTPFVTHPGYDTGNGIQLPGTSGQQPSVGQQMIFEEHGFRRTTPPTTATPIRHRPRPYPPNVGQEALSQTTISWAPFQDTSEYIISCHPVGTDEEPLQFRVPGTSTSATLTGLTRGATYNVIVEALKDQQRHKVREEVVTVGNSVNEGLNQPTDDSCFDPYTVSHYAVGDEWERMSESGFKLLCQCLGFGSGHFRCDSSRWCHDNGVNYKIGEKWDRQGENGQMMSCTCLGNGKGEFKCDPHEATCYDDGKTYHVGEQWQKEYLGAICSCTCFGGQRGWRCDNCRRPGGEPSPEGTTGQSYNQYSQRYHQRTNTNVNCPIECFMPLDVQADREDSRE

SEQ ID NO: 2095 - protein, 200 aa, Homo sapiens
METPLDVLSRAASLVHADDEKREAALRGEPRIQTLPVASALSSHRTGPPPISPSKRKFSMEPGDEDLDCDNDHVSKMSRIFNPHLNKTANGDCRRDPRERSRSPIERAVAPTMSLHGSHLYTSLPSLGLEQPLALTKNSLDASRPAGLSPTLTPGERQQNRPSVITCASAGARNCNLSHCPIAHSGCAAPGPASYRRPPS

SEQ ID NO: 2096 - protein, 439 aa, Homo sapiens
MTPQPAGPPDGGWGWVVAAAAFAINGLSYGLLRSLGLAFPDLAEHFDRSAQDTAWISALALAVQQAASPVGSALSTRWGARPVVMVGGVLASLGFVFSAFASDLLHLYLGLGLLAGFGWALVFAPALGTLSRYFSRRRVLAVGLALTGNGASSLLLAPALQLLLDTFGWRGALLLLGAITLHLTPCGALLLPLVLPGDPPAPPRSPLAALGLSLFTRRAFSIFALGTALVGGGYFVPYVHLAPHALDRGLGGYGAALVVAVAAMGDAGARLVCGWLADQGWVPLPRLLAVFGALTGLGLWVVGLSWGGPLLAAAVAYGLSAGSYAPLVFGVLPGLVGVGGVVQATGLVMMLMSLGGLLGPPLSGFLRDETGDFTASFLLSGSLILSGSFIYIGLPRALPSCGPASPPATPPPETGELLPAPQAVLLSPGGPGSTLDTTC

SEQ ID NO: 2097 - protein, 2036 aa, Homo sapiens
MDRNYPSAGFGDPLGAGAGWSYERSAKASLVYGSSRTSHPETDILHRQAYAAPHPLQSYATNHHPAGLSGLFDTGLHHAGSAGPDASVMNLISALESRGPQPGPSASSLLSQFRSPSWQTAMHTPGPTELFISGALPGSSTFPSSSALSAYQHPASFGSRPFPVPSSLSLQDPPFSPPANGLLSPHDVLHLKPSQAPTVPSSLGFERLAGGGVLGPAGLGPAQTPPYRPGPPDPPPPPRHLPTQFNLLASSSAAAAAAEQSSPQLYNFSGAAPGPPPPERALPRQDTVIKHYQRPASAQPPPPPPPAHALQHYLSCGGSYPSMGHRANLACSPLGGGEPSPGAGEPSKAGPSGATAGASGRATGPEAAGGGGAGGGGGGYRPIIQSPGYKTGKGGYGAAAGGATRPPPPRSTATPKCQSLGGPAAAYATGKASGAGGAGGQAYSPGQPQGLLGPQAYGQGFGGGQAQDLSKAPSYSGGPPQPPSGPPPPGLATCQSYSPDQLQGQLYGVQGEPYPGPAAHSQGLPTASPSLSYSTGHSPALSGHGGGWGPSSLGGGGEASPSHIIRPLQSPPATGRPPGVGSPGAPGKYLSSVLASAPFLAPPGAGSYAAGAGGYKGKGDGSELLAGPGGPPAERTEDEEFLIQHLLQAPSPPRTSGADGLVGEDGAADASKGLGGSGGAGGPPGTPYELAKEDPQRYHLQSVIRTSASLDEGATAALELGLGRLKEKKKGPERGGETPEGLATSVVHYGAGAKELGAFLQKSPPPPPPTAQSTQPTPHGLLLEAGGPDLPLVLPPPPPQLLPSVLSHAPSPSPSASKVGVHLLEPATRDGAPQPPPPPPPPPPPMPLQLEAHLRSHGLEPAAPSPRLRPEESLDPPGAMQELLGALEPLPPAPGDTGVGPPNSEGKDPAGAYRSPSPQGTKAPRFVPLTSICFPDSLLQDEERSFFPTMEEMFGGGAADDYGKAGPPEDEGDPKAGAGPPPGPPAYDPYGPYCPGRASGAGPETPGLGLDPNKPPELPSTVNAEPLGLIQSGPHQAAPPPPPPPPPPPAPASEPKGGLTSPIFCSTKPKKLLKTSSFHLLRRRDPPFQTPKKLYAQEYEFEADEDKADVPADIRLNPRRLPDLVSSCRSRPALSPLGDIDFCPPNPGPDGPRRRGRKPTKAKRDGPPRPRGRPRIRPLEVPTTAGPASASTPTDGAKKPRGRGRGRGRKAEEAGGTRLEPLKPLKIKLSVPKAGEGLGTSSGDAISGTDHNSLDSSLTREKIEAKIKEVEEKQPEMKSGFMASFLDFLKSGKRHPPLYQAGLTPPLSPPKSVPPSVPARGLQPQPPATPAVPHPPPSGAFGLGGALEAAESEGLGLGCPSPCKRLDEELKRNLETLPSFSSDEEDSVAKNRDLQESISSAISALDDPPLAGPKDTSTPDGPPLAPAAAVPGPPPLPGLPSANSNGTPEPPLLEEKPPPTPPPAPTPQPQPPPPPPPPQPALPSPPPLVAPTPSSPPPPPLPPPPPPAMPSPPPPPPPAAAPLAAPPEEPAAPSPEDPELPDTRPLHLAKKQETAAVCGETDEEAGESGGEGIFRERDEFVIRAEDIPSLKLALQTGREPPPIWRVQKALLQKFTPEIKDGQRQFCATSNYLGYFGDAKNRYQRLYVKFLENVNKKDYVRVCARKPWHRPPVPVRRSGQAKNPVSAGGSSAPPPKAPAPPPKPETPEKTTSEKPPEQTPETAMPEPPAPEKPSLLRPVEKEKEKEKVTRGERPLRGERATSGRQTRPERSLATGQPATSRLPKARPTKVKAEPPPKKRKKWLKEAGGNATAGGGPPGSSSDSESSPGAPSEDERAVPGRLLKTRAMREMYRSYVEMLVSTALDPDMIQALEDTHDELYLPPMRKIDGLLNEHKKKVLKRLSLSPALQDALHTFPQLQVEQSGEGSPEEGAVRLRPAGEPYNRKTLSKLKRSVVRAQEFKVELEKSGYYTLYHSLHHYKYHTFLRCRDQTLAIEGGAEDLGQEEVVQQCMRNQPWLEQLFDSFSDLLAQAQAHSRCG

SEQ ID NO: 2098 - protein, 444 aa, Homo sapiens
MAPGRAVAGLLLLAAAGLGGVAEGPGLAFSEDVLSVFGANLSLSAAQLQHLLEQMGAASRVGVPEPGQLHFNQCLTAEEIFSLHGFSNATQITSSKFSVICPAVLQQLNFHPCEDRPKHKTRPSHSEVWGYGFLSVTIINLASLLGLILTPLIKKSYFPKILTFFVGLAIGTLFSNAIFQLIPEAFGFDPKVDSYVEKAVAVFGGFYLLFFFERMLKMLLKTYGQNGHTHFGNDNFGPQEKTHQPKALPAINGVTCYANPAVTEANGHIHFDNVSVVSLQDGKKEPSSCTCLKGPKLSEIGTIAWMITLCDALHNFIDGLAIGASCTLSLLQGLSTSIAILCEEFPHELGDFVILLNAGMSTRQALLFNFLSACSCYVGLAFGILVGNNFAPNIIFALAGGMFLYISLADMFPEMNDMLREKIIKWATDDIKSQLHLLWIYTAR

SEQ ID NO: 2099 - protein, 493 aa, Homo sapiens
MCLHRRVPSEETYSLDRFAQNPPLFPPPSLPASESRMAHAPLLQRCGAARTGFCKKQQELWQRRKEAAEALGTRKVSVLLATSHSGARPAVSTMDSSAAPTNASNCTDALAYSSCSPAPSPGSWVNLSHLDGNLSDPCGPNRTDLGGRDSLCPPTGSPSMITAITIMALYSIVCVVGLFGNFLVMYVIVRYTKMKTATNIYIFNLALADALATSTLPFQSVNYLMGTWPFGTILCKIVISIDYYNMFTSIFTLCTMSVDRYIAVCHPVKALDFRTPRNAKIINVCNWILSSAIGLPVMFMATTKYRQGSIDCTLTFSHPTWYWENLLKICVFIFAFIMPVLIITVCYGLMILRLKSVRMLSGSKEKDRNLRRITRMVLVVVAVFIVCWTPIHIYVIIKALVTIPETTFQTVSWHFCIALGYTNSCLNPVLYAFLDENFKRCFREFCIPTSSNIEQQNSTRIRQNTRDHPSTANTVDRTNHQLENLEAETAPLP

SEQ ID NO: 2100 - protein, 825 aa, Homo sapiens
MRSGAAPRARPRPPALALPPTGPESLTHFPFSDEDTRRHPPGRSVSFEAENGPTPSPGRSPLDSQASPGLVLHAGAATSQRRESFLYRSDSDYDMSPKTMSRNSSVTSEAHAEDLIVTPFAQVLASLRSVRSNFSLLTNVPVPSNKRSPLGGPTPVCKATLSEETCQQLARETLEELDWCLEQLETMQTYRSVSEMASHKFKRMLNRELTHLSEMSRSGNQVSEYISTTFLDKQNEVEIPSPTMKEREKQQAPRPRPSQPPPPPVPHLQPMSQITGLKKLMHSNSLNNSNIPRFGVKTDQEELLAQELENLNKWGLNIFCVSDYAGGRSLTCIMYMIFQERDLLKKFRIPVDTMVTYMLTLEDHYHADVAYHNSLHAADVLQSTHVLLATPALDAVFTDLEILAALFAAAIHDVDHPGVSNQFLINTNSELALMYNDESVLENHHLAVGFKLLQEDNCDIFQNLSKRQRQSLRKMVIDMVLATDMSKHMTLLADLKTMVETKKVTSSGVLLLDNYSDRIQVLRNMVHCADLSNPTKPLELYRQWTDRIMAEFFQQGDRERERGMEISPMCDKHTASVEKSQVGFIDYIVHPLWETWADLVHPDAQEILDTLEDNRDWYYSAIRQSPSPPPEEESRGPGHPPLPDKFQFELTLEEEEEEEISMAQIPCTAQEALTAQGLSGVEEALDATIAWEASPAQESLEVMAQEASLEAELEAVYLTQQAQSTGSAPVAPDEFSSREEFVVAVSHSSPSALALQSPLLPAWRTLSVSEHAPGLPGLPSTAAEVEAQREHQAAKRACSACAGTFGEDTSALPAPGGGGSGGDPT

SEQ ID NO: 2101 - protein, 194 aa, Homo sapiens
AGPAFLRGVSSEGAVDTDCPAVLLLLNPQHGEPSLQRVPVAKMVCGPSGSQLVLLKLERSVTLNQRVALICLPPEWYVVPPGTKCEIAGWGETKGTGNDTVLNVALLNVISNQECNIKHRGRVRESEMCTEGLLAPVGACEGDYGGPLACFTHNCWVLEGIIIPNRVCARSRWPAVFTRVSVFVDWIHKVMRLG

SEQ ID NO: 2102 - protein, 4069 aa, Homo sapiens
MASRDSNHAGESFLGSDGDEEATRELETEEESEGEEDETAAESEEEPDSRLSDQDEEGKIKQEYIISDPSFSMVTVQREDSGITWETNSSRSSTPWASEESQTSGVCSREGSTVNSPPGNVSFIVDEVKKVRKRTHKSKHGSPSLRRKGNRKRNSFESQDVPTNKKGSPLTSASQVLTTEKEKSYTGIYDKARKKKTTSNTPPITGAIYKEHKPLVLRPVYIGTVQYKIKMFNSVKEELIPLQFYGTLPKGYVIKEIHYRKGKDASISLEPDLDNSGSNTVSKTRKLVAQSIEDKVKEVFPPWRGALSKGSESLTLMFSHEDQKKIYADSPLNATSALEHTVPSYSSSGRAEQGIQLRHSQSVPQQPEDEAKPHEVEPPSVTPDTPATMFLRTTKEECELASPGTAASENDSSVSPSFANEVKKEDVYSAHHSISLEAASPGLAASTQDGLDPDQEQPDLTSIERAEPVSAKLTPTHPSVKGEKEENMLEPSISLSEPLMLEEPEKEEIETSLPIAITPEPEDSNLVEEEIVELDYPESPLVSEKPFPPHMSPEVEHKEEELILPLLAASSPEHVALSEEEREEIASVSTGSAFVSEYSVPQDLNHELQEQEGEPVPPSNVEAIAEHAVLSEEENEEFEAYSPAAAPTSESSLSPSTTEKTSENQSPLFSTVTPEYMVLSGDEASESGCYTPDSTSASEYSVPSLATKESLKKTIDRKSPLILKGVSEYMIPSEEKEDTGSFTPAVAPASEPSLSPSTTEKTSECQSPLPSTATSEHVVPSEGEDLGSERFTPDSKLISKYAAPLNATQESQKKIINEASQFKPKGISEHTVLSVDGKEVIGPSSPDLVVASEHSFPPHTTEMTSECQAPPLSATPSEYVVLSDEEAVELERYTPSSTSASEFSVPPYATPEAQEEEIVHRSLNLKGASSPMNLSEEDQEDIGPFSPDSAFVSEFSFPPYATQEAEKREFECDSPICLTSPSEHTILSDEDTEEAELFSPDSASQVSIPPFRISETEKNELEPDSLLTAVSASGYSCFSEADEEDIGSTAATPVSEQFSSSQKQKAETFPLMSPLEDLSLPPSTDKSEKAEIKPEIPTTSTSVSEYLILAQKQKTQAYLEPESEDLIPSHLTSEVEKGEREASSSVAAIPAALPAQSSIVKEETKPASPHSVLPDSVPAIKKEQEPTAALTLKAADEQMALSKVRKEEIVPDSQEATAHVSQDQKMEPQPPNVPESEMKYSVLPDMVDEPKKGVKPKLVLNVTSELEQRKLSKNEPEVIKPYSPLKETSLSGPEALSAVKMEMKHDSKITTTPIVLHSASSGVEKQVEHGPPALAFSALSEEIKKEIEPSSSTTTASVTKLDSNLTRAVKEEIPTDSSLITPVDRPVLTKVGKGELGSGLPPLVTSADEHSVLAEEDKVAIKGASPIETSSKHLAWSEAEKEIKFDSLPSVSSIAEHSVLSEVEAKEVKAGLPVIKTSSSQHSDKSEEARVEDKQDLLFSTVCDSERLVSSQKKSLMSTSEVLEPEHELPLSLWGEIKKKETELPSSQNVSPASKHIIPKGKDEETASSSPELENLASGLAPTLLLLSDDKNKPAVEVSSTAQGDFPSEKQDVALAELSLEPEKKDKPHQPLELPNAGSEFSSDLGRQSGSIGTKQAKSPITETEDSVLEKGPAELRSREGKEENRELCASSTMPAISELSSLLREESQNEEIKPFSPKIISLESKEPPASVAEGGNPEEFQPFTFSLKGLSEEVSHPADFKKGGNQEIGPLPPTGNLKAQVMGDILDKLSEETGHPNSSQVLQSITEPSKIAPSDLLVEQKKTEKALHSDQTVKLPDVSTSSEDKQDLGIKQFSLMRENLPLEQSKSFMTTKPADVKETKMEEFFISPKDENWMLGKPENVASQHEQRIAGSVQLDSSSSNELRPGQLKAAVSSKDHTCEVRKQVLPHSAEESHLSSQEAVSALDTSSGNTETLSSKSYSSEEVKLAEEPKSLVLAGNVERNIAEGKEIHSLMESESLLLEKANTELSWPSKEDSQEKIKLPPERFFQKPVSGLSVEQVKSETISSSVKTAHFPAEGVEPALGNEKEAHRSTPPFPEEKPLEESKMVQSKVIDDADEGKKPSPEVKIPTQRKPISSIHAREPQSPESPEVTQNPPTQPKVAKPDLPEEKGKKGISSFKSWMSSLFFGSSTPDNKVAEQEDLETQPSPSVEKAVTVIDPEGTIPTNFNVAEKPADHSLSEVKLKTADEPRGTLVKSGDGQNVKEKSMILSNVEDLQQPKFISEVSREDYGKKEISGDSEEMNINSVVTSADGENLEIQSYSLIGEKLVMEEAKTIVPPHVTDSKRVQKPAIAPPSKWNISIFKEEPRSDQKQKSLLSFDVVDKVPQQPKSASSNFASKNITKESEKPESIILPVEESKGSLIDFSEDRLKKEMQNPTSLKISEEETKLRSVSPTEKKDNLENRSYTLAEKKVLAEKQNSVAPLELRDSNEIGKTQITLGSRSTELKESKADAMPQHFYQNEDYNERPKIIVGSEKEKGEEKENQVYVLSEGKKQQEHQPYSVNVAESMSRESDISLGHSLGETQSFSLVKATSVTEKSEAMLAEAHPEIREAKAVGTQPHPLEESKVLVEKTKTFLPVALSCRDEIENHSLSQEGNLVLEKSSRDMPDHSEEKEQFRESELSKGGSVDITKETVKQGFQEKAVGTQPRPLEESKVLVEKTKTFLPVVLSCHDEIENHSLSQEGNLVLEKSSRDMPDHSEEKEQFKESELWKGGSVDITKESMKEGFPSKESERTLARPFDETKSSETPPYLLSPVKPQTLASGASPEINAVKKKEMPRSELTPERHTVHTIQTSKDDTSDVPKQSVLVSKHHLEAAEDTRVKEPLSSAKSNYAQFISNTSASNADKMVSNKEMPKEPEDTYAKGEDFTVTSKPAGLSEDQKTAFSIISEGCEILNIHAPAFISSIDQEESEQMQDKLEYLEEKASFKTIPLPDDSETVACHKTLKSRLEDEKVTPLKENKQKETHKTKEEISTDSETDLSFIQPTIPSEEDYFEKYTLIDYNISPDPEKQKAPQKLNVEEKLSKEVTEETISFPVSSVESALEHEYDLVKLDESFYGPEKGHNILSHPETQSQNSADRNVSKDTKRDVDSKSPGMPLFEAEEGVLSRTQIFPTTIKVIDPEFLEEPPALAFLYKDLYEEAVGEKKKEEETASEGDSVNSEASFPSRNSDTDDGTGIYFEKYILKDDILHDTSLTQKDQGQGLEEKRVGKDDSYQPIAAEGEIWGKFGTICREKSLEEQKGVYGEGESVDHVETVGNVAMQKKAPITEDVRVATQKISYAVPFEDTHHVLERADEAGSHGNEVGNASPEVNLNVPVQVSFPEEEFASGATHVQETSLEEPKILVPPEPSEERLRNSPVQDEYEFTESLHNEVVPQDILSEELSSESTPEDVLSQGKESFEHISENEFASEAEQSTPAEQKELGSERKEEDQLSSEVVTEKAQKELKKSQIDTYCYTCKCPISATDKVFGTHKDHEVSTLDTAISAVKVQLAEFLENLQEKSLRIEAFVSEIESFFNTIEENCSKNEKRLEEQNEEMMKKVLAQYDEKAQSFEEVKKKKMEFLHEQMVHFLQSMDTAKDTLETIVREAEELDEAVFLTSFEEINERLLSAMESTASLEKMPAAFSLFEHYDDSSARSDQMLKQVAVPQPPRLEPQEPNSATSTTIAVYWSMNKEDVIDSFQVYCMEEPQDDQEVNELVEEYRLTVKESYCIFEDLEPDRCYQVWVMAVNFTGCSLPSERAIFRTAPSTPVIRAEDCTVCWNTATIRWRPTTPEATETYTLEYCRQHSPEGEGLRSFSGIKGLQLKVNLQPNDNYFFYVRAINAFGTSEQSEAALISTRGTRFLLLRETAHPALHISSSGTVISFGERRRLTEIPSVLGEELPSCGQHYWETTVTDCPAYRLGICSSSAVQAGALGQGETSWYMHCSEPQRYTFFYSGIVSDVHVTERPARVGILLDYNNQRLIFINAESEQLLFIIRHRFNEGVHPAFALEKPGKCTLHLGIEPPDSVRHK

SEQ ID NO: 2103 - protein, 251 aa, Homo sapiens
QIPPRRPARAGAFTKLFEDQSRALSTANENDGYVDMSSFNAFESKQQSADQDAESAYTEPYKVCPISSAAPKEDLTSDEEQRSSEEEDSASRDPSVTHKDFHGAVMRALDDMDHEGRDTLAREELRQGLSELPAIHDLHQGILEELEERLSNWESQQKVADVFLAREQGFDHHATHILQFDRYLGLLSENCLHSPRLAAAVREFEQSVQGGSQTAKHRLLRVVQRLFQYQVLLTDYLNNLCPDSAEYDNTQ

SEQ ID NO: 2104 - protein, 538 aa, Homo sapiens
MENGTQILRPTQDPSECTKEVKSLMWVYVLVGNIVRGMGETPILPLGISYIEDFAKFENSPLYIGLVETGAIIGPLIGLLLASFCANVYVDTGFVNTDDLIITPTDTRWVGAWWFGFLICAGVNVLTAIPFFFLPNTLPKEGLETNADIIKNENEDKQKEEVKKEKYGITKDFLPFMKSLSCNPIYMLFILVSVIQFNAFVNMISFMPKYLEQQYGISSSDAIFLMGIYNLPPICIGYIIGGLIMKKFKITVKQAAHIGCWLSLLEYLLYFLSFLMTCENSSVVGINTSYEGIPQDLYVENDIFADCNVDCNCPSKIWDPVCGNNGLSYLSACLAGCETSIGTGINMVFQNCSCIQTSGNSSAVLGLCDKGPDCSLMLQYFLILSAMSSFIYSLAAIPGYMVLLRCMKSEEKSLGVGLHTFCTRVFAGIPAPIYFGALMDSTCLHWGTLKCGESGACRIYDSTTFRYIYLGLPAALRGSSFVPALIILILLRKCHLPGENASSGTELIETKVKGKENECKDIYQKSTVLKDDELKTKL

SEQ ID NO: 2105 - protein, 85 aa, Homo sapiens
MLPPQKKPWESMAKGLVLGALFTSFLLLVYSYAVPPLHAGLASTTPEAAASCSPPALEPEAVIRANGSAGECQPRRNIVFLKTHK

SEQ ID NO: 2106 - protein, 73 aa, Homo sapiens
MSNPSAPPPYEDRNPLYPGPPPPGGYGQPSVLPGGYPAYPGYPQPGYGHPAGYPQPMPPTHPMPMNYGPGHGY

SEQ ID NO: 2107 - protein, 438 aa, Homo sapiens
MDTSPLCFSILLVLCIFIQSSALGQSLKPEPFGRRAQAVETNKTLHEMKTRFLLFGETNQGCQIRINHPDTLQECGFNSSLPLVMIIHGWSESVQLSRSHVHLIGYSLGAHVSGFAGSSIGGTHKIGRITGLDAAGPLFEGSAPSNRLSPDDANFVDAIHTFTREHMGLSVGIKQPIGHYDFYPNGGSFQPGCHFLELYRHIAQHGFNAITQTIKCSHERSVHLFIDSLLHAGTQSMAYPCGDMNSFSQGLCLSCKKGRCNTLGYHVRQEPRSKSKRLFLVTRAQSPFKVYHYQFKIQFINQTETPIQTTFTMSLLGTKEKMQKIPITLGKGIASNKTYSFLITLDVDIGELIMIKFKWENSAVWANVWDTVQTIIPWSTGPRHSGLVLKTIRVKAGETQQRMTFCSENTDDLLLRPTQEKIFVKCEIKSKTSKRKIR

SEQ ID NO: 2108 - protein, 226 aa, Homo sapiens
MPQHGPWQTRMRKISNHGSLRVAKVAYPLGLCVGVFIYVAYIKWHRATATQAFFSITRAAPGARWGQQAHSPLGTAADGHEVFYGIMFDAGSTGTRVHVFQFTRPPRETPTLTHETFKALKPGLSAYADDVEKVKKVFKASPFLVGDDCVSIMNGTDEGVSAWITINFLTGSLKTPGGSSVGMLDLGGGSTQIAFLPRVEGTLQASPPGYLTALRMFNRTYKLYSY

SEQ ID NO: 2109 - protein, 265 aa, Homo sapiens
MLPPQKKPWESMAKGLVLGALFTSFLLLVYSYAVPPLHAGLASTRTPEAAASCSPPALEPEAVIRANGSAGECQPRRNIVFLKTHKTASSTLLNILFRFGQKHRLKFAFPNGRNDFDYPTFFARSLVQDYRPGACFNIICNHMRFHYDEVRGLVPTNAIFITVLRDPARLFESSFHYFGPVVPLTWKLSAGDKLTEFLQDPDRYYDPNGFNAHYLRNLLFFDLGYDNSLDPSSPQVQEHILEVERRFHLVLLQEYFDESLVLLKD

SEQ ID NO: 2110 - protein, 172 aa, Homo sapiens
MAPRRARGCRTLGLPALLLLLLLRPPATRGITCPPPMSVEHADIWVKSYSLYSRERYICNSGFKRKAGTSSLTECVLNKATNVAHWTTPSLKCIKPAASSPSSNNTAATTAAIVPGSQLMPSKSPSTGTTEISSHESSHGTPSQTTAKNWELTASASHQPPGVYPQGHSDTT

SEQ ID NO: 2111 - protein, 1093 aa, Homo sapiens
MGTGDFICISMTGGAPWGFRLQGGKEQKQPLQVAKIRNQSKASGSGLCEGDEVVSINGNPCADLTYPEVIKLMESITDSLQMLIKRPSSGISEALISENENKNLEHLTHGGYVESTTLQIRPATKTQCTEFFLAPVKTEVPLAENQRSGPDCAGSLKEETGPSYQRAPQMPDSQRGRVAEELILREKVEAVQPGPVVELQLSLSQERHKGASGPLVALPGAEKSKSPDPDPNLSHDRIVHINSIPTNEKADPFLRSSKIIQISSGRELRVIQESEAGDAGLPRVEVILDCSDRQKTEGCRLQAGKECVDSPVEGGQSEAPPSLVSFAVSSEGTEQGEDPRSEKDHSRPHKHRARHARLRRSESLSEKQVKEAKSKCKSIALLLTDAPNPNSKGVLMFKKRRRRARKYTLVSYGTGELEREADEEEEGDKEDTCEVAFLGASESEVDEELLSDVDDNTQVVNFDWDSGLVDIEKKLNRGDKMEMLPDTTGKGALMFAKRRERMDQITAQKEEDKVGGTPSREQDAAQTDGLRTTTSYQRKEEESVRTQSSVSKSYIEVSHGLGHVPQQNGFSGTSETANIQRMVPMNRTAKPFPGSVNQPATPFSPTRNMTSPIADFPAPPPYSAVTPPPDAFSRGVSSPIAGPAQPPPWPQPAPWSQPAFYDSSERIASRDERISVPAKRTGILQEAKRRSTTKPMFTFKEPKVSPNPELLSLLQNSEGKRGTGAGGDSGPEEDYLSLGAEACNFMQSSSAKQKTPPPVAPKPAVKSSSSQPVTPVSPVWSPGVAPTQPPAFPTSNPSKGTVVSSIKIAQPSYPPARPASTLNVAGPFKGPQAAVASQNYTPKPTVSTPTVNAVQPGAVGPSNELPGMSGRGAQLFAKRQSRMEKYVVDSDTVQAHAARAQSPTPSLPASWKYSSNVRAPPPVAYNPIHSPSYPLAALKSQPSAAQPSKMGKKKGKKPLNALDVMKHQPYQLNASLFTFQPPDAKDGLPQKSSVKVNSALAMKQALPPRPVNAASPTNVQASSVYSVPAYTSPPSFFAEASSPVSASPVPVGIPTSPKQESASSSYFVAPRPKFSAKKSGVTIQVWKPSVVEE

SEQ ID NO: 2112 - protein, 72 aa, Homo sapiens
MRLLLALLGVLLSVPGPPVLSLEASEEVELASIHLSLCLRERTGLAGRRALSWAAELVSPAWLPAWSSKSRS

SEQ ID NO: 2113 - protein, 221 aa, Homo sapiens
MRRVLRLLLGCFLTELCARVCRAQERAGHGQLAQLGGVLLLAGGNRSGAASGEASEGAEASDAPPTRAPTPDFCRGYFDVMGQWDPPFNCSSGDFIFCCGTCGFRFCCTFKKRRLNQSTCTNYDTPLWLNTGKPPARKDDPLHDPTKDKTNLIVYIICGVVAVMVLVGIFTKLGLEKAHRPQREHMSRLYDNLLFMEAQISFQEDEPAPGEWSVGLQTWTV

SEQ ID NO: 2114 - protein, 174 aa, Homo sapiens
MKKKLVVLGLLAVVLVLVIVGLCLWLPSASKEPDNHVYTRAAVAADAKQCSKIGRDALRDGGSAVDAAIAALLCVGLMNAHSMGIGGGLFLTIYNSTTRKAEVINAREVAPRLAFATMFNSSEQSQKGGLSVAVPGEIRGYELAHQRHGRLPWARLFQPSIQLARQGFPVGKGL

SEQ ID NO: 2115 - protein, 164 aa, Homo sapiens
MSRPLLITFTPATDPSDLWKDGQQQPQPEKPESTLDGAAARAFYEALIGDESSAPDSQRSQTEPARERKRKKRRIMKAPAAEAVAEGASGRHGQGRSLEAEDKMTHRILRAAQEGDLPELRRLLEPHEAGGAGGNINARDAFWWTPLMCAARAGQGAAVSYLLG

SEQ ID NO: 2116 - protein, 534 aa, Homo sapiens
MDTQAGSVDEENGRQLGEVELQCGICTKWFTADTFGIDTSSCLPFMTNYSFHCNVCHHSGNTYFLRKQANLKEMCLSALANLTWQSRTQDEHPKTMFSKDKDIIPFIDKYWECMTTRQRPGKMTWPNNIVKTMSKERDVFLVKEHPDPGSKDPEEDYPKFGLLDQDLSNIGPAYDNQKQSSAVSTSGNLNGGIAAGSSGKGRGAKRKQQDGGTTGTTKKARSDPLFSAQRLPPHGYPLEHPFNKDGYRYILAEPDPHAPDPEKLELDCWAGKPIPGDLYRACLYERVLLALHDRAPQLKISDDRLTVVGEKGYSMVRASHGVRKGAWYFEITVDEMPPDTAARLGWSQPLGNLQAPLGYDKFSYSWRSKKGTKFHQSIGKHYSSGYGQGDVLGFYINLPEDTETAKSLPDTYKDKALIKFKSYLYFEEKDFVDKAEKSLKQTPHSEIIFYKNGVNQGVAYKDIFEGVYFPAISLYKSCTVSINFGPCFKYPPKDLTYRPMSDMGWGAVVEHTLADVLYHVETEVDGRRSPPWEP

SEQ ID NO: 2117 - protein, 142 aa, Homo sapiens
MAPGVARGPTPYWRLRLGGAALLLLLIPVAAAQEPPGAACSQNTNKTCEECLKNVSACLKKKTRMLDLKTTKALQHISPDASCEVHAPQPSPAGRPRGHCGLLTLASEPASLPGQAAGELPLKDSPLVLQTGDLLFPVHLCF

SEQ ID NO: 2118 - protein, 89 aa, Homo sapiens
MSRPLLITFTPATDPSDLWKDGQQQPQPEKPESTLDGAAARAFYEALIGDESSAPDSQRSQTEPARERKRKKRRIMKAPAAEAVAEGAS

SEQ ID NO: 2119 - protein, 264 aa, Homo sapiens
MEKARPLWANSLQFVFACISYAVGLGNVWRFPYLCQMYGGGVASVVVSFFLSMYYNVINAWAFWYLFHSFQDPLPWSVCPLNGNHTGYDEECEKASSTQYFWYRKTLNISPSLQENGGVQWEPALCLLLAWLVVYLCILRGTESTGKVVYFTASLPYCVLIIYLIRGLTLHGATNGLMYMFTPKIEQLANPKAWINAATQIFFSLGLGFGSLIAFASYNEPSNNCQKHAIIVSLINSFTSIFASIVTFSIYGFKATFNYENCLK

SEQ ID NO: 2120 - protein, 127 aa, Homo sapiens
METPLDVLSRAASLVHADDEKREAALRGEPRIQTLPVASALSSHRTGPPPISPSKRKFSMEPGDEDLDCDNDHVSKMSRIFNPHLNKTANGDCRRDPRERSRSPIERAVAPTMSLHGSHLYTSLPSL

SEQ ID NO: 2121 - protein, 211 aa, Homo sapiens
MDHAEENEILAATQRYYVERPIFSHPVLQERLHTKDKVPDSIADKLKQAFTCTPKKIRNIIYMFLPITKWLPAYKFKEYVLGDLVSGISTGVLQLPQGPFAVISLMIGGVAVRLVPDDIVIPGGVNATNGTEARDALRVKVAMSVTLLSGIIQFCLGVCRFGFVAIYLTEPLVRGFTTAAAVHVFTSMLKYLFGVKTKRYSGIFSVVYASG

SEQ ID NO: 2122 - protein, 499 aa, Homo sapiens
MDTSPLCFSILLVLCIFIQSSALGQSLKPEPFGRRAQAVETNKTLHEMKTRFLLFGETNQGCQIRINHPDTLQECGFNSSLPLVMIIHGWSVDGVLENWIWQMVAALKSQPAQPVNVGLVDWITLAHDHYTIAVRNTRLVGKEVAALLRWLEESVQLSRSHVHLIGYSLGAHVSGFAGSSIGGTHKIGRITGLDAAGPLFEGSAPSNRLSPDDANFVDAIHTFTREHMGLSVGIKQPIGHYDFYPNGGSFQPGCHFLELYRHIAQHGFNAITQTIKCSHERSVHLFIDSLLHAGTQSMAYPCGDMNSFSQGLCLSCKKGRCNTLGYHVRQEPRSKSKRLFLVTRAQSPFKVYHYQFKIQFINQTETPIQTTFTMSLLGTKEKMQKIPITLGKGIASNKTYSFLITLDVDIGELIMIKFKWENSAVWANVWDTVQTIIPWSTGPRHSGLVLKTIRVKAGETQQRSPNRINLGRLNCSLLFCTELFSHDSLAHWSSAASEL

SEQ ID NO: 2123 - protein, 182 aa, Homo sapiens
MRLILFFGALFGHIYCLETFVGDQVLEIVPSNEEQIKNLLQLEAQEHLQLDFWKSPTTPGETAHVRVPFVNVQAVKVFLESQGIAYSIMIEDVQVLLDKENEEMLFNRRRERSGNFNFGAYHTLEEISQEMDNLVAEHPGLVSKVNIGSSFENRPMNVLKKSSGRMQKDDGQLNPKPQRQTP

SEQ ID NO: 2124 - protein, 84 aa, Homo sapiens
MSNPSAPPPYEDRNPLYPGPPPPGGYGQPSVLPGGYPAYPGYPQPGYGHPAGYPQPMPPTHPMPMNYGPGHGYDGEERAVSDSF

SEQ ID NO: 2125 - protein, 432 aa, Homo sapiens
DYVTVQLQNGEIWELSRCSRNKRENTSSLGYEYTGSKKEFPCVDGYIYDQNTWKSTAVTQWNLVCDRKWLAMLIQPLFMFGVLLGSVTFGYFSDRLGRRVVLWATSSSMFLFGIAAAFAVDYYTFMAARFFLAMVASGYLVVGFVYVMEFIGMKSRTWASVHLHSFFAVGTLLVALTGYLVRTWWLYQMILSTVTVPFILCCWVLPETPFWLLSEGRYEEAQKIVDIMAKWNRASSCKLSELLSLDLQGPVSNSPTEVQKHNLSYLFYNWSITKRTLTVWLIWFTGSLGFYSFSLNSVNLGGNEYLNLFLLGVVEIPAYTFVCIAMDKVGRRTVLAYSLFCSALACGVVMVIPQKHYILGVVTAMVGKFAIGAAFGLIYLYTAELYPTIVRSLAVGSGSMVCRLASILAPFSVDLSSIWIFIPQLLGQHLQE

SEQ ID NO: 2126 - protein, 772 aa, Homo sapiens
MQELEELRKQLGSVATGSTLQQSLELKRKMLRDKQNKKNSGQHLPIFPAWVYERPALIGDFLIGAGISTDTALPIGTLPLASQESAVVEDLLYVLVGVDGRYVSAQPLAGRQSRTFLVDPNLDLSIRELVHRILPVAASYSAVTRFIEEKSSFEYGQVNHALAAAMRTLVKEHLILVSQLEQLHRQGLLSLQKLWFYIQPAMRTMDILASLATSVDKGECLGGSTLSLLHDRSFSYTGDSQAQELCLYLTKAASAPYFEVLEKWIYRGIIHDPYSEFMVEEHELRKERIQEDYNDKYWDQRYTIVQQQIPSFLQKMADKILSTGKYLNVVRECGHDVTCPVAKEIIYTLKERAYVEQIEKAFNYASKVLLDFLMEEKELVAHLRSIKRYFLMDQGDFFVHFMDLAEEELRKPVEDITPPRLEALLELALRMSTANTDPFKDDLKIDLMPHDLITQLLRVLAIETKQEKAMAHADPTELALSGLEAFSFDYIVKWPLSLIINRKALTRYQMLFRHMFYCKHVERQLCSVWISNKTAKQHSLHSAQWFAGAFTLRQRMLNFVQNIQYYMMFEVMEPTWHILEKNLKSASNIDDVLGHHTGFLDTCLKDCMLTNPELLKVFSKLMSVCVMFTNCMQKFTQSMKLDGELGGQTLEHSTVLGLPAGAEERARKELARKHLAEHADTVQLVSGFEATINKFDKNFSAHLLDLLARLSIYSTSDCEHGMASVISRLDFNGFYTERLERLSAERSQKATPQVPVLRGPPAPAPRVAVTAQ

SEQ ID NO: 2127 - protein, 620 aa, Homo sapiens
MGPLMVLFCLLFLYPAGHCPNPGISLGAVRTGFRFGHGDKVRYRCSSNLVLTGSSERECQGNGVWSGTEPICRQPYSYDFPEDVAPALGTSFSHMLGATNPTQKTKESLGRKIQIQRSGHLNLYLLLDCSQSVSENDFLIFKESASLMVDRIFSFEINVSVAIITFASEPKVLMSVLNDNSRDMTEVISSLENANYKDHENGTGTNTYAALNSVYLMMNNQMRLLGMETMAWQEIRHAIILLTDGKSNMGGSPKTAVDHIREILNINQKRNDYLDIYAIGVGKLDVDWRELNELGSKKDGERHAFILQDTKALHQVFEHMLDVSKLTDTICGVGNMSANASDQERTPWHVTIKPKSQETCRGALISDQWVLTAAHCFRDGNDHSLWRVNVGDPKSQWGKEFLIEKAVISPGFDVFAKKNQGILEFYGDDIALLKLAQKVKMSTHARPICLPCTMEANLALRRPQGSTCRDHENELLNKQSVPAHFVALNGSKLNINLKMGVEWTSCAEVVSQEKTMFPNLTDVREVVTDQFLCSGTQEDESPCKGESGGAVFLERRFRFFQVGLVSWGLYNPCLGSADKNSRKRAPRSKVPPPRDFHINLFRMQPWLRQHLGDVLNFLPL

SEQ ID NO: 2128 - protein, 141 aa, Homo sapiens
MKSYAGFLTVNKTYNSNLFFWFFPAQIQPEDAPVVLWLQGGPGGSSMFGLFVEHGPYVVTSNMTLRDRDFPWTTTLSMLYIDNPVGTGFSFTDDTHGYAVNEDDVARDLYSALIQFFQIFPEYKNNDFYVTGESYAGKYVP

SEQ ID NO: 2129 - protein, 549 aa, Homo sapiens
MKRPKLKKASKRMTCHKRYKIQKKVREHHRKLRKEAKKRGHKKPRKDPGVPNSAPFKEALLREAELRKQRLEELKQQQKLDRQKELEKKRKLETNPDIKPSNVEPMEKEFGLCKTENKAKSGKQNSKKLYCQELKKVIEASDVVLEVLDARDPLGCRCPQVEEAIVQSGQKKLVLILNKSDLVPKENLESWLNYLKKELPTVVFRASTKPKDKGKITKRVKAKKNAAPFRSEVCFGKEGLWKLLGGFQETCSKAIRVGVIGFPNVGKSSIINSLKQEQMCNVGVSMGLTRSMQVVPLDKQITIIDSPSFIVSPLNSSSALALRSPASIEVVKPMEAASAILSQADARQVVLKYTVPGYRNSLEFFTVLAQRRGMHQKGGIPNVEGAAKLLWSEWTGASLAYYCHPPTSWTPPPYFNESIVVDMKSGFNLEELEKNNAQSIRAIKGPHLANSILFQSSGLTNGIIEEKDIHEELPKRKERKQEEREDDKDSDQETVDEEVDENSSGMFAAEETGEALSEETTAGEQSTRSFILDKIIEEDDAYDFSTDYV

SEQ ID NO: 2130 - protein, 462 aa, Homo sapiens
LALVLCTVDSRPPAQLALSHAGRLLASSTAASVPNTLRLELRGPQPRDEGFYSCSARSPLGQANTSLELRLEGVRVILAPEAAVPEGAPITVTCADPAAHAPTLYTWYHNGRWLQEGPAASLSFLVATRAHAGAYSCQAQDAQGTRSSRPAALQVLYAPQDAVLSSFRDSRARSMAVIQCTVDSEPPAELALSHDGKVLATSSGVHSLASGTGHVQVARNALRLQVQDVPAGDDTYVCTAQNLLGSISTIGRLQVEGARVVAEPGLDVPEGAALNLSCRLLGGPGPVGNSTFAWFWNDRRLHAEPVPTLAFTHVARAQAGMYHCLAELPTGAAASAPVMLRVLYPPKTPTMMVFVEPEGGLRGILDCRVDSEPLASLTLHLGSRLVASSQPQGAPAEPHIHVLASPNALRVDIEALRPSDQGEYICSASNVLGSASTSTYFGVRGEGRGLHLPGHSAQKPSS

SEQ ID NO: 2131 - protein, 231 aa, Homo sapiens
MGIKTALPAAELGLYSLVLSGALAYAGRGLLEASQDGAHRKAFRESVRPGWEYIGRKMDVADFEWVMWFTSFRNVIIFALSGHVLFAKLCTMVAPKLRSWMYAVYGALAVMGTMGPWYLLLLLGHCVGLYVASLLGQPWLCLGLGLASLASFKMDPLISWQSGFVTGTFDLQEVLFHGGSSFTVLRCTSFALESCAHPDRHYSLADLLKYNFYLPFFFFGPIMTFDRFHAQ

SEQ ID NO: 2132 - protein, 1062 aa, Homo sapiens
MPTTASCKTISLLKLLYSVSLQNYSPMMAQKSQGSDNLQEGQEKSKREILKCTKSAWAPLDEWLPPDPEEESQSLTIPMLEDSKQESIQQWLDSGFFVSANENFQQVIDRTVSLYEQGMVQMTVKDYMRSLHQFSETPILSRGTSFNSCYSTASVPQSIPEWLEFWEIDPVEILLDLGFGADEPDICMQIPARFLGCGSAARGINIRVFLEAQKQRMDIENPNLYGRFRQLEILDHVTNAFSSLLSDVSILPNRAEEKAGGESVQRTSVSAAKEHRRRMGKLLRRASKQNIRRDCNPEVSESFKVKDEVFVPFTKPWDCGAELAATSINHKQNHLSLSVEHQSLQACDDLLPYPPHGLLSKQWPCSSMPAKQAPPSCVSEGSVKGRTQKENLFQTNKLKSLSHLAGKGPDSFEMEEVQSFEEETGNPLDMTSGTVGARVDRANSCQSDSSGFLEEPLEPLPLQMPSLPNSQSPAENGGRKPRDQSHSLVSSQDCQLESDGPDSKSRASMSFSSQEANALEQRASVSVMEEEFLLEAMEGPPELYIPDMACAKTTTRGECPRKDSHLWQLLPMPHAEYEVTRPTATSKYDHPLGFMVTHVTEMQDSFVRPEGAGKVQSHHNESQRSPGNDHTQDKFLHVDSEAPREEESSGFCPHTNHSLLVPESSSQCIPKHSEITPYATDLAQTSEKLIPHLHKLPGDPAQVKSRSGTLGQILPGTEAEMENLPLNTGSSRSVMTQMSSSLVSAAQRAVALGTGPRGTSLECTVCDPVTATETRLGTKARQLNDASIQTSALSNKTLTHGPQPLTKSVSLDSGFSSICPMGTCHAIPAHCCICCHHHPHCHGERQSPGPEPSVCRHCLCSLTGHQEAQFMTTLKALQDTTVRELCSCTVHEMEAMKTICQSFREYLEEIEQHLMGQQALFSRDMSEEEREEAEQLQTLREALRQQVAELEFQLGDRAQQIREGILLQLEVLTAEPPEHYSNLHQYNWIEESNGQTSCSKIHPGMAPRTVFPPDDGQEAPCSGELLSAELDPFFFSSKANNSAKDEKIKSKDFLKTQDSGLL

SEQ ID NO: 2133 - protein, 464 aa, Homo sapiens
SMENNGRAQRIYEDHDATQQLQGFYSQVAKPLLVDVDLQYPQDAVLALTQNHHKQYYEGSEIVVAGRIADNKQSSFKADVQAHGEGQEFSITCLVDEEEMKKLLRERGHMLENHVERLWAYLTIQELLAKRMKVDREERANLSSQALQMSLDYGFVTPLTSMSIRGMADQDGLKPTIDKPSEGIGCREMLGPRRTFVLSALQPSPTHSSSNTQRLPDRVTGVDTDPHFIIHVPQKEDTLCFNINEEPGVILSLVQDPNTGFSVNGQLIGNKARSPGQHDGTYFGRLGIANPATDFQLEVTPQNITLNPGFGGPVFSWRDQAVLRQDGVVVTINKKRNLVVSVDDGGTFEVVLHRVWKGSSVHQDFLGFYVLDSHRMSARTHGLLGQFFHPIGFEVSDIHPGSDPTKPDATMVVRNRRLTVTRGLQKDYSKDPWHGAEVSCWFIHNNGAGLIDGAYTDYIVPDIF

SEQ ID NO: 2134 - protein, 188 aa, Homo sapiens
SVFCSDPTPTAVTCVPPACGPGSPRPARLPHPALRTPGCPGFAEVLQTFSTCKGMLGEILSAFEFMDAVCMQLVGRHLHLASPVQESPFYVLIETSGSNAGHDAEKLGHFLEHALGSGLVTDGTMATDQRKVKMLWALRERITEALSRDGYVYKYDLSLPVERLYDIVTDLRARLGPHAKHVVGYGHL

SEQ ID NO: 2135 - protein, 585 aa, Homo sapiens
MEDSQDLNEQSVKKTCTESDVSQSQNSRSMEMQDLASPHTLVGGGDTPGSSKLEKSNLSSTSVTTNGTGVITSSGYSPRSAHQYSPQLYPSKPYPHILSTPAAQTMSAYAGQTQYSGMQQPAVYTAYSQTGQPYSLPTYDLGVMLPAIKTESGLSQTQSPLQSGCLSYSPGFSTPQPGQTPYSYQMPGSSFAPSSTIYANNSVSNSTNFSGSQQDYPSYTAFGQNQYAQYYSASTYGAYMTSNNTADGTPSSTSTYQLQESLPGLTNQPGEFDTMQSPSTPIKDLDERTCRSSGSKSRGRGRKNNPSPPPDSDLERVFVWDLDETIIVFHSLLTGSYAQKYGKDPPMAVTLGLRMEEMIFNLADTHLFFNDLEECDQVHIDDVSSDDNGQDLSTYSFATDGFHAAASSANLCLPTGVRGGVDWMRKLAFRYRRVKELYNTYKNNVGGLLGPAKRDAWLQLRAEIEGLTDSWLTNALKSLSIISTRSNCINVLVTTTQLIPALAKVLLYSLGGAFPIENIYSATKIGKESCFERIVSRFGTNITYVVIGDGRDEEHAANQHNMPFWRISSHSDLLALHQALELEYL

SEQ ID NO: 2136 - protein, 776 aa, Homo sapiens
MAKSSSLNVRVVEGRALPAKDVSGSSDPYCLVKVDDEVVARTATVWRSLGPFWGEEYTVHLPLDFHQLAFYVLDEDTVGHDDIIGKISLSREAITADPRGIDSWINLSRVDPDAEVQGEICLSVQMLEDGQGRCLRCHVLQARDLAPRDISGTSDPFARVFWGSQSLETSTIKKTRFPHWDEVLELREMPGAPSPLRVELWDWDMVGKNDFLGMVEFSPKTLQQKPPKGWFRLLPFPRAEEDSGGNLGALRVKVRLIEDRVLPSQCYQPLMELLMESVQGPAEEDTASPLALLEELTLGDCRQDLATKLVKLFLGRGLAGRFLDYLTRREVARTMDPNTLFRSNSLASKSMEQFMKLVGMPYLHEVLKPVISRVFEEKKYMELDPCKMDLGRTRRISFKGALSEEQMRETSLGLLTGYLGPIVDAIVGSVGRCPPAMRLAFKQLHRRVEERFPQAEHQDVKYLAISGFLFLRFFAPAILTPKLFDLRDQHADPQTSRSLLLLAKAVQSIGNLGQQLGQGKELWMAPLHPFLLQCVSRVRDFLDRLVDVDGDEAGVPARALFPPSAIVREGYLLKRKEEPAGLATRFAFKKRYVWLSGETLSFSKSPEWQVVTQDGTGALHTTYLQCKNVNELNQWLSALRKASAPNPNKLAACHPGAFRSARWTCCLQAERSAAGCSRTHSAVTLGDWSDPLDPDAEAQTVYRQLLLGRDQLRLKLLEDSNMDTTLEADTGACPEVLARQRAATARLLEVLADLDRAHEEFQQQERGKAALGPLGP

SEQ ID NO: 2137 - protein, 73 aa, Homo sapiens
MMCQSEARQGPELRAAKWLHFPQLALRRRLGQLSCMSRPALKLRSWPLTVLYYLLPFGALRPLSRVGWRPVSR

SEQ ID NO: 2138 - protein, 782 aa, Homo sapiens
MARQVRTHQETLNRFQQQSIHLLTELLRLKMKAMVESMSVGANPLDITRRFVEASQLLHLNAKEMAFNCLISTAGRSGYSSGQLWKESLANMSAIGVNSPYQLIYHSSTACLSFSLSAGKEAKKKIGKSRTTEDVSMPPLHRGVGTPANSLEFSDPCPEAREKLQELCRHIEAERATWKGRNISYPMILRNYKAKMPSHLMLARKGDSQTPGLHYPPTAGAQTLSPTSHPSSANHHFSQHCQEGKAPKKAFKFHYTFYDGSSFVYYPSGNVAVCQIPTCCRGRTITCLFNDIPGFSLLALFNTEGQGCVHYNLKTSCPYVLILDEEGGTTNDQQGYVVHKWSWTSRTETLLSLEYKVNEEMKLKVLGQDSITVTFTSLNETVTLTVSANNCPHGMAYDKRLNRRISNMDDKVYKMSRALAEIKKRFQKTVTQFINSILLAAGLFTIEYPTKKEEEEFVRFKMRSRTHPERLPKLSLYSGESLLRSQSGHLESSIAETLKDEPESAPVSPVRKTTKIHTKAKVTSRGKAREGRSPTRWAALPSDCPLVLRKLMLKEDTRAGCKCLVKAPLVSDVELERFLLAPRDPSQVLVFGIISSQNYTSTGQLQWLLNTLYNHQQRGRGSPCIQCRYDSYRLLQYDLDSPLQEDPPLMVKKNSVVQGMILMFAGGKLIFGGRVLNGYGLSKQNLLKQIFRSQQDYKMGYFLPDDYKFSVPNSVLSLEDSESVKKAESEDIQGSSSSLALEDYVEKELSLEAEKTREPEVELHPLSRDSKITSWKKQASKK

SEQ ID NO: 2139 - protein, 313 aa, Homo sapiens
MANLSQPSEFVLLGFSSFGELQALLYGPFLMLYLLAFMGNTIIIVMVIADTHLHTPMYFFLGNFSLLEILVTMTAVPRMLSDLLVPHKVITFTGCMVQFYFHFSLGSTSFLILTDMALDRFVAICHPLRYGTLMSRAMCVQLAGAAWAAPFLAMVPTVLSRAHLDYCHGDVINHFFCDNEPLLQLSCSDTRLLEFWDFLMALTFVLSSFLVTLISYGYIVTTVLRIPSASSCQKAFSTCGSHLTLVFIGYSSTIFLYVRPGKAHSVQVRKVVALVTSVLTPFLNPFILTFCNQTVKTVLQGQMQRLKGLCKAQ

SEQ ID NO: 2140 - protein, 384 aa, Homo sapiens
MAATASPQPLATEDADSENSSFYYYDYLDEVAFMLCRKDAVVSFGKVFLPVFYSLIFVLGLSGNLLLLMVLLRYVPRRRMVEIYLLNLAISNLLFLVTLPFWGISVAWHWVFGSFLCKMVSTLYTINFYSGIFFISCMSLDKYLEIVHAQPYHRLRTRAKSLLLATIVWAVSLAVSIPDMVFVQTHENPKGVWNCHADFGGHGTIWKLFLRFQQNLLGFLLPLLAMIFFYSRIGCVLVRLRPAGQGRALKIAAALVVAFFVLWFPYNLTLFLHTLLDLQVFGNCEVSQHLDYALQVTESIAFLHCCFSPILYAFSSHRFRQYLKAFLAAVLGWHLAPGTAQASLSSCSESSILTAQEEMTGMNDLGERQSENYPNKEDVGNKSA

SEQ ID NO: 2141 - protein, 442 aa, Homo sapiens
MVSVNAPLGAPVESSYDTSPSEGTNLNAPNSLGVSALCAICGDRATGKHYGASSCDGCKGFFRRSVRKNHMYSCRFSRQCVVDKDKRNQCRYCRLKKCFRAGMKKEAVQNERDRISTRRSSYEDSSLPSINALLQAEVLSRQITSPVSGINGDIRAKKIASIADVCESMKEQLLVLVEWAKYIPAFCELPLDDQVALLRAHAGEHLLLGATKRSMVFKDVLLLGNDYIVPRHCPELAEMSRVSIRILDELVLPFQELQIDDNEYAYLKAIIFFDPDAKGLSDPGKIKRLRSQVQVSLEDYINDRQYDSRGRFGELLLLLPTLQSITWQMIEQIQFIKLFGMAKIDNLLQEMLLGGSPSDAPHAHHPLHPHLMQEHMGTNVIVANTMPTHLSNGQMSTPETPQPSPPGGSGSEPYKLLPGAVATIVKPLSAIPQPTITKQEVI

SEQ ID NO: 2142 - protein, 920 aa, Homo sapiens
MSRGGSYPHLLWDVRKRSLGLEDPSRLRSRYLGRREFIQRLKLEATLNVHDGCVLTTIRSGHRANIFSAKFLPCTNDKQIVSCSGDGVIFYTNVEQDAETNRQCQFTCHYGTTYEIMTVPNDPYTFLSCGEDGTVRWFDTRIKTSCTKEDCKDDILINCRRAATSVAICPPIPYYLAVGCSDSSVRIYDRRMLGTRATGNYAGRGTTGMVARFIPSHLNNKSCRVTSLCYSEDGQEILVSYSSDYIYLFDPKDDTARELKTPSAEERREELRQPPVKRLRLRGDWSDTGPRARPESERERDGEQSPNVSLMQRMSDMLSRWFEEASEVAQSNRGRGRSRPRGGTSQSDISTLPTVPSSPDLEVSETAMEVDTPAEQFLQPSTSSTMSAQAHSTSSPTESPHSTPLLSSPDSEQRQSVEASGHHTHHQSEFLRGPEIALLRKRLQQLRLKKAEQQRQQELAAHTQQQPSTSDQSSHEGSSQDPHASDSPSSVVNKQLGSMSLDEQQDNNNEKLSPKPGTGEPVLSLHYSTEGTTTSTIKLNFTDEWSSIASSSRGIGSHCKSEGQEESFVPQSSVQPPEGDSETKAPEESSEDVTKYQEGVSAENPVENHINITQSDKFTAKPLDSNSGERNDLNLDRSCGVPEESASSEKAKEPETSDQTSTESATNENNTNPEPQFQTEATGPSAHEETSTRDSALQDTDDSDDDPVLIPGARYRAGPGDRFNIRGTTIGDRIMRRSAVARIQEFFRRRKERKEMEELDTLNIRRPLVKMVYKGHRNSRTMIKEANFWGANFVMSGSDCGHIFIWDRHTAEHLMLLEADNHVVNCLQPHPFDPILASSGIDYDIKIWSPLEESRIFNRKLADEVITRNELMLEETRNTITVPASFMLRMLASLNHIRADRLEGDRSEGSGQENENEDEE

SEQ ID NO: 2143 - protein, 476 aa, Homo sapiens
TLPVAAGPGQDTDKTPGHAPAQDKVLSAARDPTLLPPETGGAGGEAPSKPKDSSFFDKFFKLDKGQEKVPGDSQQEAKRAEHQDKVDEVPGLSGQSDDVPAGKDIVDGKEKEGQELGTADCSVPGDPEGLETAKDDSQAAAIAENNNSIMSFFKTLVSPNKAETKKDPEDTASKAESVCDGQAGQKTSEIQARGTKKKHLDSPRLGLAFRKFFRHKGAEKSPTTSADLKSDKANFTSQETQGAGKNSKGCNPSGHTQSVTTPEPAKEGTKEKSGPTSLPLGKLFWKKVVCESPVEIIKSKEVESALQTVDLNEGDAAPEPTEAKLKREESKPRTSLMAFLRQMTSDSTEKTITPPEPEPTGAPQKGKEGSSKDKKSAAEMNKQKSNKQEAKEPAQCTEQATVDTNSLQNGDKLQKRPEKRQQSLGGFFKGLGPKRMLDAQVQTDPVSIGPVGKSKYTGKCVFSHVKKKWPFQEWSY

SEQ ID NO: 2144 - protein, 973 aa, Homo sapiens [sequence omitted]

SEQ ID NO: 2145 - protein, 145 aa, Homo sapiens
MAVWLAQWLGPLLLVSLWGLLAPASLLRRLGEHIQQFQESSAQGLGLSLGPGAAALPKVGWLEQLLDPFNVSDRRSFLQRYWVNDQHWVGQDGPIFLHLGGEGSLGPGSVMRDCLAQPGPEVFKLFPSRDSGTAEEHRTSTVWCG

SEQ ID NO: 2146 - protein, 1323 aa, Homo sapiens
MALSPGANLVFHEDPKMTPSPPSCGAPGLGSGTIPQPHPDMAQVPMLNLLPSPGLALVPDLNDSLSPVSGEASGLVSENTPRPDDSRAIAPASLQITSSCSGEALDLDSKDVSRPDSQGRLCPASNPILSPSSTEAPRLSSGNHPQSNSEDAFKCLSSKIFKLGQRNSNPSRHELNPFIRHHSREGLVLGHCISRPSSKALLIPTSNSSLDLDSNPLLNMGSRNTSKLNLNVAPDSHGTLIPDTNETITLASHNISESVSKGAFSTTWSTSSKETMNVASSGHSRSDLSVTITQASYVTLIPGSSYGISLHSSTHEPNSTISPPSCMTLILGSNETLSLDSSLLFSDTSTLTLSSQQDDAKDNSIHTVPLEENLESWSEMASIKVGQFPLGFPISNPAGKDAVTLQGIPEGAFDEVTSCLVKVPEKTEGGNNMALVENVTTLQKSQDLLEAEGEKKTMIKKIMRQIQEEPLDSLSSSVRKQAMEILTQLSHTQPTLGMRERSELVNVCVHSVFSLPSVQAMQEKDEAKAETIQALYHQTLEALQTLLKALFIEDPTPAGLKSILEALGPWMNSGKAHERARAVNTNVSVLNHMLLTLPFFMPLGFPALGLLLGRLILHIGDPDEEIGCEALDGIIILYTILELQKRARDKEETNKKELYESNKHFLGPYNPVSPCQNILRVIEEFGDFLGPQQIKDLLLAALEGLKGSSEAPGKDSREMMQLASEVMLSSVLEWYRHRALEVIPEIMQGIYMQLSHIQEPRARQVALLPVSLLASSFMTEVVVALLMCPLPLNSNGAEMWRQLILCKPSCDVRDLLDLLLGSLKEKPVTKEGRASIVPLAAASGLCELLSVNSCMGRVRRIYPQLLLALLIQVHYHIGLNLPGCVAPPKDTKKGAQPSPFVPVRWVVKVVKTLLLRMGCSYETTFLEDQGGWELMEQVESHHRGVALLARAMVQYSCQELCRILYLLIPLLERGDEKHRITATAFFVELLQMEQVRRIPEEYSLGRMAEGLSHHDPIMKVLSIRGLVILARRSEKTAKVKALLPSMVKGLKNMDGMLVVEAVHNLKAVFKGRDQKLMDSAVYVEMLQILLPHFSDAREVVRSSCINLYGKVVQKLRAPRTQAMEEQLVSTLVPLLLTMQEGNSKVSQKCVKTLLRCSYFMAWELPKRAYSRKPWDNQQQTVAKICKCLVNTHRDSAFIFLSQSLEYAKNSRASLRKCSVMFIGSLVPCMESIMTEDRLNEVKAALDNLRHDPEASVCIYAAQVQDHILASCWQNSWLPHGNSWVCYSATTHRWSPSCENLPTSHQRRSWIMQALGSWKMSLKK

SEQ ID NO: 2147 - protein, 378 aa, Homo sapiens
MKMASFLAFLLLNFRVCLLLLQLLMPHSAQFSVLGPSGPILAMVGEDADLPCHLFPTMSAETMELKWVSSSLRQVVNVYADGKEVEDRQSAPYRGRTSILRDGITAGKAALRIHNVTASDSGKYLCYFQDGDFYEKALVELKVAALGSDLHVDVKGYKDGGIHLECRSTGWYPQPQIQWSNNKGENIPTVEAPVVADGVGLYAVAASVIMRGSSGEGVSCTIRSSLLGLEKTASISIADPFFRSAQRWIAALAGTLPVLLLLLGGAGYFLWQQQEEKKTQFRKKKREQELREMAWSTMKQEQSTRVKLLEELRWRSIQYASRGERHSAYNEWKKALFKPGPPIGQTQQQTRGQGSPVALSQESAQRTDSWGPEEGGES

SEQ ID NO: 2148 - protein, 139 aa, Homo sapiens
MDMRWHCENLQTTDDILVASAECPSDDEDIDPCEPSSANPTRAGGREPYPGSAEVIRESSSTTGMVVGIVAAAALCILILLYAMYKYRNRDEGSYHVDESRNYISNSAQSNGAVVKEKQPSSAKSSNKNKKNKDKEYYV

SEQ ID NO: 2149 - protein, 248 aa, Homo sapiens
MDHAEENEILAATQRYYVERPIFSHPVLQERLHTKDKVPDSIADKLKQAFTCTPKKIRNIIYMFLPITKWLPAYKFKEYVLGDLVSGISTGVLQLPQGLAFAMLAAVPPIFGLYSSFYPVIMYCFLGTSRHISIGPFAVISLMIGGVAVRLVPDDIVIPGGVNATNGTEARDALRVKVAMSVTLLSGIIQFCLGVCRFGFVAIYLTEPLVRGFTTAAAVHVFTSMLKYLFGVKTKRYSGIFSVVYASG

SEQ ID NO: 2150 - protein, 57 aa, Homo sapiens
FREVGPKNSYIAYIEDHSGNGTFVNTELVGKGKRRPLNNNSEIALSLSRNKVVPVER

SEQ ID NO: 2151 - protein, 627 aa, Homo sapiens
MKVTLSALDTSESSFTPLVVIELAQDVKEETKEWLKNRIIAKKKDGGAQLLFRPLLNKYEQETLENQNLYLVGASKIRMLLGAEAVGLVKECNDNTMRAFTYRTRQNFKGFDDNNDDFLTMAECQFIIKHELENLRAKDEKMIPGYPQAKLYPGKSLLRRLLTSGIVIQVFPLHDSEALKKLEDTWYTRFALKYQPIDSIRGYFGETIALYFGFLEYFTFALIPMAVIGLPYYLFVWEDYDKYVIFASFNLIWSTVILELWKRGCANMTYRWGTLLMKRKFEEPRPGFHGVLGINSITGKEEPLYPSYKRQLRIYLVSLPFVCLCLYFSLYVMMIYFDMEVWALGLHENSGSEWTSVLLYVPSIIYAIVIEIMNRLYRYAAEFLTSWENHRLESAYQNHLILKVLVFNFLNCFASLFYIAFVLKDMKLLRQSLATLLITSQILNQIMESFLPYWLQRKHGVRVKRKVQALKADIDATLYEQVILEKEMGTYLGTFDDYLELFLQFGYVSLFSCVYPLAAAFAVLNNFTEVNSDALKMCRVFKRPFSEPSANIGVWQLAFETMSVISVVTNCALIGMSPQVNAVFPESKADLILIVVAVEAASCKLVSLPRYSWSTNSVPGTVIGPGV

SEQ ID NO: 2152 - protein, 163 aa, Homo sapiens
MLPPQKKPWESMAKGLVLGALFTSFLLLVYSYAVPPLHAGLASTRTPEAAASCSPPALEPEAVIRANGSAGECQPRRNIVFLKTHKTASSTLLNILFRFGQKHRLKFAFPNGRNDFDYPTFFARSLVQDYRPGACFNIICNHMRFHYDEVRGLVPTNAIFITV

SEQ ID NO: 2153 - protein, 397 aa, Homo sapiens
MRPPQCLLHTPSLASPLLLLLLWLLGGGVGAEGREDAELLVTVRGGRLRGIRLKTPGGPVSAFLGIPFAEPPMGPRRFLPPEPKQPWSGVVDATTFQSVCYQYVDTLYPGFEGTEMWNPNRELSEDCLYLNVWTPYPRPTSPTPVLVWIYGGGFYSGASSLDVYDGRFLVQAERTVLVSMNYRVGAFGFLALPGSREAPGNVGLLDQRLALQWVQENVAAFGGDPTSVTLFGESAGAASVGMHLLSPPSRGLFHRAVLQSGAPNGPWATVGMGEARRRATQLAHLVGCPPGGTGGNDTELVACLRTRPAQVLVNHEWHVLPQESVFRFSFVPVVDGDFLSDTPEALINAGDFHGLQTRSTRRSASGRPSSTAGAPTWCTGRTSSTTTASRIAAQTCD

SEQ ID NO: 2154 - protein, 56 aa, Homo sapiens
MPYTLKVHYKYTVVMKTQPGLPYSQVRDMVSKKLELRLEHTKLSYRPRDSNELVPL

SEQ ID NO: 2155 - protein, 758 aa, Homo sapiens
MTTAKEPSASGKSVQQQEQELVGSNPPQRNWKGIAIALLVILVICSLIVTSVILLTPAEDNSLSQKKKVTVEDLFSEDFKIHDPEAKWISDTEFIYREQKGTVRLWNVETNTSTVLIEGKKIESLRAIRYEISPDREYALFSYNVEPIFIFENNIYYCAHVGKQAIRVVSTGKEGVIYNGLSDWLYEEEILKTHIAHWWSPDGTRLAYAAINDSRVPIMELPTYTGSIYPTVKPYHYPKAGSENPSISLHVIGLNGPTHDLEMMPPDDPRMREYYITMVKWATSTKVAVTWLNRAQNVSILTLCDATTGVCTKKHEDESEAWLHRQNEEPVFSKDGRKFFFIRAIPQGGRGKFYHITVSSSQPNSSNDNIQSITSGDWDVTKILAYDEKGNKIYFLSTEDLPRRRQLYSANTVGNFNRQCLSCDLVENCTYFSASFSHSMDFFLLKCEGPGVPMVTVHNTTDKKKMFDLETNEHVKKAINDRQMPKVEYRDIEIDDYNLPMQILKPATFTDTTHYPLLLVVDGTPGSQSVAEKFEVSWETVMVSSHGAVVVKCDGRGSGFQGTKLLHEVRRRLGLLEEKDQMEAVRTMLKEQYIDRTRVAVFGKDYGGYLSTYILPAKGENQGQTFTCGSALSPITDFKLYASAFSERYLGLHGLDNRAYEMTKVAHRVSALEEQQFLIIHPTADEKIHFQHTAELITQLIRGKANYSLQIYPDESHYFTSSSLKQHLYRSIINFFVECFRIQDKLLTVTAKEDEEED

SEQ ID NO: 2156 - protein, 1998 aa, Homo sapiens
IASFRGTVPYGLSLEIGDTVQILEKCDGWYRGFALKNPNIKGIFPSSYVHLKNACVKNKGQFEMVIPTEDSVITEMTSTLRDWGTMWKQLYVRNEGDLFHRLWHIMNEILDLRRQVLVGHLTHDRMKDVKRHITARLDWGNEQLGLDLVPRKEYAMVDPEDISITELYRLMEHRHRKKDTPVQASSHHLFVQMKSLMCSNLGEELEVIFSLFDSKENRPISERFFLRLNRNGLPKAPDKPERHCSLFVDLGSSELRKDIYITVHIIRIGRMGAGEKKNACSVQYRRPFGCAVLSIADLLTGETKDDLILKVYMCNTESEWYQIHENIIKKLNARYNLTGSNAGLAVSLQLLHGDIEQIRREYSSVFSHGVSITRKLGFSNIIMPGEMRNDLYITIERGEFEKGGKSVARNVEVTMFIVDSSGQTLKDFISFGSGEPPASEYHSFVLYHNNSPRWSELLKLPIPVDKFRGAHIRFEFRHCSTKEKGEKKLFGFSFVPLMQEDGRTLPDGTHELIVHKCEENTNLQDTTRYLKLPFSKGIFLGNNNQAMKATKESFCITSFLCSTKLTQNGDMLDLLKWRTHPDKITGCLSKLKEIDGSEIVKFLQDTLDTLFGILDENSQKYGSKVFDSLVHIINLLQDSKFHHFKPVMDTYIESHFAGALAYRDLIKVLKWYVDRITEAERQEHIQEVLKAQEYIFKYIVQSRRLFSLATGGQNEEEFRCCIQELLMSVRFFLSQESKGSGALSQSQAVFLSSFPAVYSELLKLFDVREVANLVQDTLGSLPTILHVDDSLQAIKLQCIGKTVESQLYTNPDSRYILLPVVLHHLHIHLQEQKDLIMCARILSNVFCLIKKNSSEKSVLEEIDVIVASLLDILLRTILEITSRPQPSSSAMRFQFQDVTRTGFLNRESSHGSTTLSTFSVCADTYGKVPMTSRHTGEFVACLLSLLRQMTDRHYQQLLDSFNTKEELRDFLLQIFTVFRILIRPEMFPKDWTVMRLVANNVIITTVLYLSDALRKNFLNENFDYKIWDSYFYLAVIFINQLCLQLEMFTPSKKKKVLEKYGDMRVTMGCEIFSMWQNLGEHKLHFIPALIGPFLEVTLIPQPDLRNVMIPIFHDMMDWEQRRSGNFKQVEAKLIDKLDSLMSEGKGDETYRELFNSIIPLFGPYPSLLKKIERETWRESGVSLIATVTRLMERLLDYRDCMKMGEVDGKKIGCTVSLLNFYKTELNKEEMYIRYIHKLYDLHLKAQNFTEAAYTLLLYDELLEWSDRPLREFLTYPMQTEWQRKEHLHLTIIQNFDRGKCWENGIILCRKIAEQYESYYDYRNLSKMRMMEASLYDKIMDQQRLEPEFFRVGFYGKKFPFFLRNKEFVCRGHDYERLEAFQQRMLNEFPHAIAMQHANQPDETIFQAEAQYLQIYAVTPIPESQEVLQREGVPDNIKSFYKVNHIWKFRYDRPFHKGTKDKENEFKSLWVERTSLYLVQSLPGISRWFEVEKREVVEMSPLENAIEVLENKNQQLKTLISQCQTRQMQNINPLTMCLNGVIDAAVNGGVSRYQEAFFVKEYILSHPEDGEKIARLRELMLEQAQILEFGLAVHEKFVPQDMRPLHKKLVDQFFVMKSSLGIQEFSACMQASPVHFPNGSPRVCRNSAPASVSPDGTRVIPRRSPLSYPAVNRYSSSSLSSQASAEVSNITGQSESSDEVFNMQPSPSTSSLSSTHSASPNVTSSAPSSARASPLLSDKHKHSRENSCLSPRERPCSAIYPTPVEPSQRMLFNHIGDGALPRSDPNLSAPEKAVNPTPSSWSLDSGKEAKNMSDSGKLISPPVPPRPTQTASPARHTTSVSPSPAGRSPLKGSVQSFTPSPVEYHSPGLISNSPVLSGSYSSGISSLSRCSTSETSGFENQVNEQSAPLPVPVPVPVPSYGGEEPVRKESKTPPPYSVYERTLRRPVPLPHSLSIPVTSEPPALPPKPLAARSSHLENGARRTDPGPRPRPLPRKVSQL

SEQ ID NO: 2157 - protein, 810 aa, Homo sapiens
KREGFCQLLQQMKNKHSEQPEPDMITIFIGTWNMGNAPPPKKITSWFLSKGQGKTRDDSADYIPHDIYVIGTQEDPLSEKEWLEILKHSLQEITSVTFKTVAIHTLWNIRIVVLAKPEHENRISHICTDNVKTGIANTLGNKGAVGVSFMFNGTSLGFVNSHLTSGSEKKLRRNQNYMNILRFLALGDKKLSPFNITHRFTHLFWFGDLNYRVDLPTWEAETIIQKIKQQQYADLLSHDQLLTERREQKVFLHFEEEEITFAPTYRFERLTRDKYAYTKQKATGMKYNLPSWCDRVLWKSYPLVHVVCQSYGSTSDIMTSDHSPVFATFEAGVTSQFVSKNGPGTVDSQGQIEFLRCYATLKTKSQTKFYLEFHSSCLESFVKSQEGENEEGSEGELVVKFGETLPKLKPIISDPEYLLDQHILISIKSSDSDESYGEGCIALRLEATETQLPIYTPLTHHGELTGHFQGEIKLQTSQGKTREKLYDFVKTERDESSGPKTLKSLTSHDPMKQWEVTSRAPPCSGSSITEIINPNYMGVGPFGPPMPLHVKQTLSPDQQPTAWSYDQPPKDSPLGPCRGESPPTPPGQPPISPKKFLPSTANRGLPPRTQESRPSDLGKNAGDTLPQEDLPLTKPEMFENPLYGSLSSFPKPAPRKDQESPKMPRKEPPPCPEPGILSPSIVLTKAQEADRGEGPGKQVPAPRLRSFTCSSSAEGRAAGGDKSQGKPKTPVSSQAPVPAKRPIKPSRSEINQQTPPTPTPRPPLPVKSPAVLHLQHSKGRDYRDNTELPHHGKHRPEEGPPGPLGRTAMQ

SEQ ID NO: 2158 - protein, 1242 aa, Homo sapiens
MGAASGRRGPGLLLPLPLLLLLPPQPALALDPGLQPGNFSADEAGAQLFAQSYNSSAEQVLFQSVAASWAHDTNITAENARRQEEAALLSQEFAEAWGQKAKELYEPIWQNFTDPQLRRIIGAVRTLGSANLPLAKRQQYNALLSNMSRIYSTAKVCLPNKTATCWSLDPDLTNILASSRSYAMLLFAWEGWHNAAGIPLKPLYEDFTALSNEAYKQDGFTDTGAYWRSWYNSPTFEDDLEHLYQQLEPLYLNLHAFVRRALHRRYGDRYINLRGPIPAHLLGDMWAQSWENIYDMVVPFPDKPNLDVTSTMLQQGWNATHMFRVAEEFFTSLELSPMPPEFWEGSMLEKPADGREVVCHASAWDFYNRKDFRIKQCTRVTMDQLSTVHHEMGHIQYYLQYKDLPVSLRRGANPGFHEAIGDVLALSVSTPEHLHKIGLLDRVTNDTESDINYLLKMALEKIAFLPFGYLVDQWRWGVFSGRTPPSRYNFDWWYLRTKYQGICPPVTRNETHFDAGAKFHVPNVTPYIRYFVSFVLQFQFHEALCKEAGYEGPLHQCDIYRSTKAGAKLRKVLQAGSSRPWQEVLKDMVGLDALDAQPLLKYFQPVTQWLQEQNQQNGEVLGWPEYQWHPPLPDNYPEGIDLVTDEAEASKFVEEYDRTSQVVWNEYAEANWNYNTNITTETSKILLQKNMQIANHTLKYGTQARKFDVNQLQNTTIKRIIKKVQDLERAALPAQELEEYNKILLDMETTYSVATVCHPNGSCLQLEPDLTNVMATSRKYEDLLWAWEGWRDKAGRAILQFYPKYVELINQAARLNGYVDAGDSWRSMYETPSLEQDLERLFQELQPLYLNLHAYVRRALHRHYGAQHINLEGPIPAHLLGNMWAQTWSNIYDLVVPFPSAPSMDTTEAMLKQGWTPRRMFKEADDFFTSLGLLPVPPEFWNKSMLEKPTDGREVVCHASAWDFYNGKDFRIKQCTTVNLEDLVVAHHEMGHIQYFMQYKDLPVALREGANPGFHEAIGDVLALSVSTPKHLHSLNLLSSEGGSDEHDINFLMKMALDKIAFIPFSYLVDQWRWRVFDGSITKENYNQEWWSLRLKYQGLCPPVPRTQGDFDPGAKFHIPSSVPYIRYFVSFIIQFQFHEALCQAAGHTGPLHKCDIYQSKEAGQRLATAMKLGFSRPWPEAMQLITGQPNMSASAMLSYFKPLLDWLRTENELHGEKLGWPQYNWTPNSGTATHPTSSLGS

SEQ ID NO: 2159 - protein, 238 aa, Homo sapiens
LVPCLNDCGPYGQCLLLRRHSYLYASCSCKAGWRGWSCTDNSTAQTVAQQRAATLLLTLSNLMFLAPIAVSVRRFFLVEASVYAYTMFFSTFYHACDQPGEAVLCILSYDTLQYCDFLGSGAAIWVTILCMARLKTVLKYAYRCGHRRQCYPTSWQRWAFYLLPGVSMASVGIAIYTSMMTSDNYYYTHSIWHILLAGSAALLLPPPDQPAEPWACSQKFPCHYQICKNDREELYAVT

SEQ ID NO: 2160 - protein, 518 aa, Homo sapiens
MSLVPATNYIYTPLNQLKGGTIVNVYGVVKFFKPPYLSKGTDYCSVVTIVDQTNVKLTCLLFSGNYEALPIIYKNGDIVRFHRLKIQVYKKETQGITSSGFASLTFEGTLGAPIIPRTSSKYFNFTTEDHKMVEALRVWASTHMSPSWTLLKLCDVQPMQYFDLTCQLLGKAEVDGASFLLKVWDGTRTPFPSWRVLIQDLVLEGDLSHIHRLQNLTIDILVYDNHVHVARSLKVGSFLRIYSLHTKLQSMNSENQTMLSLEFHLHGGTSYGRGIRVLPESNSDVDQLKKDLESANLTANQHSDVICQSEPDDSFPSSGSVSLYEVERCQQLSATILTDHQYLERTPLCAILKQKAPQQYRIRAKLRSYKPRRLFQSVKLHCPKCHLLQEVPHEGDLDIIFQDGATKTPDVKLQNTSLYDSKIWTTKNQKGRKVAVHFVKNNGILPLSNECLLLIEGGTLSEICKLSNKFNSVIPVRSGHEDLELLDLSAPFLIQGTIHHYGTGYCTPPICVCYDLYT

SEQ ID NO: 2161 - protein, 144 aa, Homo sapiens
MAGPVKDREAFQRLNFLYQAAHCVLAQDPENQALARFYCYTERTIAKRLVLRRDPSVKRTLCRGCSSLLVPGLTCTQRQRRCRGQRWTVQTCLTCQRSQRFLNDPGHLLWGDRPEAQLGSQAGERFQTTTTLAKHSPLHFRPPS

SEQ ID NO: 2162 - protein, 692 aa, Homo sapiens
MGPWGWKLRWTVALLLAAAGTAVGDRCERNEFQCQDGKCISYKWVCDGSAECQDGSDESQETCLSVTCKSGDFSCGGRVNRCIPQFWRCDGQVDCDNGSDEQGCLTLCEGPNKFKCHSGECITLDKVCNMARDCRDWSDEPIKECGTNECLDNNGGCSHVCNDLKIGYECLCPDGFQLVAQRRCEDIDECQDPDTCSQLCVNLEGGYKCQCEEGFQLDPHTKACKAVGSIAYLFFTNRHEVRKMTLDRSEYTSLIPNLRNVVALDTEVASNRIYWSDLSQRMICSTQLDRAHGVSSYDTVISRDIQAPDGLAVDWIHSNIYWTDSVLGTVSVADTKGVKRKTLFRENGSKPRAIVVDPVHGFMYWTDWGTPAKIKKGGLNGVDIYSLVTENIQWPNGITLDLLSGRLYWVDSKLHSISSIDVNGGNRKTILEDEKRLAHPFSLAVFEDKVFWTDIINEAIFSANRLTGSDVNLLAENLLSPEDMVLFHNLTQPRGVNWCERTTLSNGGCQYLCLPAPQINPHSPKFTCACPDGMLLARDMRSCLTEAEAAVATQETSTVRLKVSSTAVRTQHTTTRPVPDTSRLPGATPGLTTVEIVTMSHQALGDVAGRGNEKKPSSVRALSIVLPIVLLVFLCLGVFLLWKNWRLKNINSINFDNPVYQKTTEDEVHICHNQDGYSYPSRQMVSLEDDVA

SEQ ID NO: 2163 - protein, 449 aa, Homo sapiens
MELSMGPIQANHTGTGLLLTLQPEQKFQKVKGFGGAMTDAAALNILALSPPAQNLLLKSYFSEEGIGYNIIRVPMASCDFSIRTYTYADTPDDFQLHNFSLPEEDTKLKIPLIHRALQLAQRPVSLLASPWTSPTWLKTNGAVNGKGSLKGQPGDIYHQTWARYFVKFLDAYAEHKLQFWAVTAENEPSAGLLSGYPFQCLGFTPEHQRDFIARDLGPTLANSTHHNVRLLMLDDQRLLLPHWAKVVLTDPEAAKYVHGIAVHWYLDFLAPAKATLGETHRLFPNTMLFASEACVGSKFWEQSVRLGSWDRGMQYSHSIITNLLYHVVGWTDWNLALNPEGGPNWVRNFVDSPIIVDITKDTFYKQPMFYHLGHFSKFIPEGSQRVGLVASQKNDLDAVALMHPDGSAVVVVLNRSSKDVPLTIKDPAVGFLETISPGYSIHTYLWRRQ

SEQ ID NO: 2164 - protein, 477 aa, Homo sapiens
MYDAERGWSLSFAGCGFLGFYHVGATRCLSEHAPHLLRDARMLFGASAGALHCVGVLSEQTLQVLSDLVRKARSRNIGIFHPSFNLSKFLRQGLCKCLPANVHQLISGKIGISLTRVSDGENVLVSDFRSKDEVVDALVCSCFIPFYSGLIPPSFRGVRYVDGGVSDNVPFIDAKTTITVSPFYGEYDICPKVKSTNFLHVDITKLSLRLCTGNLYLLSRAFVPPDLKVLGEICLRGYLDAFRFLEEKGICNRPQPGLKSSSEGMDPEVAMPSWANMSLDSSPESAALAVRLEGDELLDHLRLSILPWDESILDTLSPRLATALSEEMKDKGGYMSKICNLLPIRIMSYVMLPCTLPVESAIAIVQRLVTWLPDMPDDVLWLQWVTSQVFTRVLMCLLPASRSQMPVSSQQASPCTPEQDWPCWTPCSPKGCPAETKAEATPRSILRSSLNFFLGNKVPAGAEGLSTFPSFSLEKSL

SEQ ID NO: 2165 - protein, 278 aa, Homo sapiens
MQRGLFSDGDTSKKKKNVTMRSIKTTRDRVPTYQYNMNFEKLGKCIIINNKNFDKVTGMGVRNGTDKDAEALFKCFRSLGFDVIVYNDCSCAKMQDLLKKASEEDHTNAACFACILLSHGEENVIYGKDGVTPIKDLTAHFRGDRCKTLLEKPKLFFIQACRGTELDDGIQADSGPINDTDANPRYKIPVEADFLFAYSTVPGYYSWRSPGRGSWFVQALCSILEEHGKDLEIMQILTRVNDRVARHFESQSDDPHFHEKKQIPCVVSMLTKELYFSQ

SEQ ID NO: 2166 - protein, 615 aa, Homo sapiens
RAPTLPDTLQGSLLWAAGQRQQGQCLLLWQARAQQFQGTARWYQHTRQRRIFLSWSRWATAQWAWRELASHRAWDRTCRAVLGLWRQRLLQSRLVEWWAQERGWRLARDALCHWHSCWQGQQFLHEKCQTWVQVHLQGLQKVVFRSWQQAAAHQRCTVTRPEQLLLQSYFQAWCEVVRDTGVLRAQHQAFQDGLRRRALGAVFATWREAQEVAAGAQEQRVAQASLARWRSCGQQGQEDGQQKKARAPQAFPAWPVAPGMHHEAQQQAGESAGAQAAQCWTWCWALWVHESCRGQVSRAHASWKPRAWVLEASVQSAVRGGVQRAILTQLRPAELRRFLRTVQLRVRLGLPGAGKTRSCWTQATELVPPAPSLQCSLGGRRKPRGTAWAQRCREHSLCPAFQLWPQWPGQSSWVPGLPLWTRDQGPRAHSSPEPRACKAQSKAHKRRLRARSCRILEKQAQAHGSALLLALKGHDALGHQEEVPAAPVPRGTASRAAGFPAGQVPGSGMAALGGCPRGRAAGADPAQGVAPEMGLADVVAADPATASGSAVTAAGRWAFKKWHQRLAARSPRRGAASSPRPWSKPGPKGPESGQEAARAPRGWGLGAEHGAQLQL

SEQ ID NO: 2167 - protein, 163 aa, Homo sapiens
KKHQVETAFERLQQELEQQRCLLLARLRELEQQIWKERDEYITKVSEEVTRLGAQVKELEEKCQQPASELLQDVRVNQSRCEMKTFVSPEAISPDLVKKIRDFHRKILTLPEMMRMFSENLAHHLEIDSDRQPEPGSLGRQEVSEVHPAEEEPARQPPALRRP

SEQ ID NO: 2168 - protein, 485 aa, Homo sapiens
MEGNQWVLGKKIGSGGFGLIYLAFPTNKPEKDARHVVKVEYQENGPLFSELKFYQRVAKKDCIKKWIERKQLDYLGIPLFYGSGLTEFKGRSYRFMVMERLGIDLQKISGQNGTFKKSTVLQLGIRMLDVLEYIHENEYVHGDIKAANLLLGYKNPDQVYLADYGLSYRYCPNGNHKQYQENPRKGHNGTIEFTSLDAHKGVALSRRSDVEILGYCMLRWLCGKLPWEQNLKDPVAVQTAKTNLLDELPQSVLKWAPSGSSCCEIAQFLVCAHSLAYDEKPNYQALKKILNPHGIPLGPLDFSTKGQSINVHTPNSQKVDSQKAATKQVNKAHNRLIEKKVHSERSAESCATWKVQKEEKLIGLMNNEAAQESTRRRQKYQESQEPLNEVNSFPQKISYTQFPNSFYEPHQDFTSPDIFKKSRSPSWYKYTSTVSTGITDLESSTGLWPTISQFTLSEETNADVYYYRIIIPVLLMLVFLALFFL

SEQ ID NO: 2169 - protein, 100 aa, Homo sapiens
MLPPQKKPWESMAKGLVLGALFTSFLLLVYSYAVPPLHAGLASTTPEAAASCSPPALEPEAVIRANGSAGECQPRRNIVFLKTHKTASSTLLNILFRFGQ

SEQ ID NO: 2170 - protein, 1147 aa, Homo sapiens
MAVDSAMELLFLDTFKHPSAEQSSHIDVVRFPCVVYINEVRVIPPGVRAHSSLPDNRAYGETSPHTFQLDLFFNNVSKPSAPVFDRLGSLEYDENTSIIFRPNSKVNTDGLVLRGWYNCLTLAIYGSVDRVISHDRDSPPPPPPPPPPPQPQPSLKRNPKHADGEKEDQFNGSPPRPQPRGPRTPPGPPPPDDDEDDPVPLPVSGDKEEDAPHREDYFEPISPDRNSVPQEGQYSDEGEVEEEQQEEGEEDEDDVDVEEEEDEDEDDRRTVDSIPEEEEEDEEEEGEEDEEGEGDDGYEQISSDEDGIADLERETFKYPNFDVEYTAEDLASVPPMTYDPYDRELVPLLYFSCPYKTTFEIEISRMKDQGPDKENSGAIEASVKLTELLDLYREDRGAKWVTALEEIPSLIIKGLSYLQLKNTKQDSLGQLVDWTMQALNLQVALRQPIALNVRQLKAGTKLVSSLAECGAQGVTGLLQAGVISGLFELLFADHVSSSLKLNAFKALDSVISMTEGMEAFLRGRQNEKSGYQKLLELILLDQTVRVVTAGSAILQKCHFYEVLSEIKRLGDHLAEKTSSLPNHSEPDHDTDAGLERTNPEYENEVEASMDMDLLESSNISEGEIERLINLLEEVFHLMETAPHTMIQQPVKSFPTMARITGPPERDDPYPVLFRYLHSHHFLELVTLLLSIPVTSAHPGVLQATKDVLKFLAQSQKGLLFFMSEYEATNLLIRALCHFYDQDEEEGLQSDGVIDDAFALWLQDSTQTLQCITELFSHFQRCTASEETDHSDLLGTLHNLYLITFNPVGRSAVGHVFSLEKNLQSLITLMEYYSKEALGDSKSKKSVAYNYACILILVVVQSSSDVQMLEQHAASLLKLCKADENNAKLQELGKWLEPLKNLRFEINCIPNLIEYVKQNIDNLMTPEGVGLTTALRVLCNVACPPPPVEGQQKDLKWNLAVIQLFSAEGMDTFIRVLQKLNSILTQPWRLHVNMGTTLHRVTTISMARCTLTLLKTMLTELLRGGSFEFKDMRVPSALVTLHMLLCSIPLSGRLDSDEQKIQNDIIDILLTFTQGVNEKLTISEETLANNTWSLMLKEVLSSILKVPEGFFSGLILLSELLPLPLPMQTTQVSLPYNMHLINDCSNTF

SEQ ID NO: 2171 - protein, 234 aa, Homo sapiens
MAAGTAVGAWVLVLSLWGAVVGAQNITARIGEPLVLKCKGAPKKPPQRLEWKLNTGRTEAWKVLSPQGGGPWDSVARVLPNGSLFLPAVGIQDEGIFRCQAMNRNGKETKSNYRSLRTFTITASDWIFPPSEIPGKPEIVDSASELTAGVPNKVGTCVSEGSYPAGTLSWHLDGKPLVPNEKGVSVKEQTRRHPETGLFTLQSELMVTPARGGDPRPTFSCSFSPGLPRHRALR

SEQ ID NO: 2172 - protein, 271 aa, Homo sapiens
MPESLDSPTSGRPGVTSLTAAAAFKPVGSTGVIKSPSWQRPNQGVPSTGRISNSATYSGSVAPANSALGQTQPSDQDTLVQRAEHIPAGKRTPMCAHCNQVIRGPFLVALGKSWHPEEFNCAHCKNTMAYIGFVEEKGALYCELCYEKFFAPECGRCQRKILGEVISALKQTWHVSCFVCVACGKPIRNNVFHLEDGEPYCETDYYALFGTICHGCEFPIEAGDMFLEALGYTWHDTCFVCSVCCESLEGQTFFSKKDKPLCKKHAHSVNF

SEQ ID NO: 2173 - protein, 470 aa, Homo sapiens
MEETIKDPPTSAVLLDHCHFSQVIFNSVEKFYIPGGDVTCHYTFTQHFIPRRKDWIGIFRAFKCFQDKLEQELLKWRSQGQKLQVGWKTTREYYTFMWVTLPIDLNNKSAKQQEVQFKAYYLPKDDEYYQFCYVDEDGVVRGASIPFQFRPENEEDILVVTTQGEVEEIEQHNKELCKENQELKDSCISLQKQNSDMQAELQKKQEELETLQSINKKLELKVKEQKDYWETELLQLKEQNQKMSSENEKMGIRVDQLQAQLSTQEKEMEKLVQGDQDKTEQLEQLKKENDHLFLSLTEQRKDQKKLEQTVEQMKQNETTAMKKQQELMDENFDLSKRLSENEIICNALQRQKERLEGENDLLKRENSRLLSYMGLDFNSLPYQVPTSDEGGARQNPGLAYGNPYSGIQESSSPSPLSIKKCPICKADDICDHTLEQQQMQPLCFNCPICDKIFPATEKQIFEDHVFCHSL

SEQ ID NO: 2174 - protein, 172 aa, Homo sapiens
MADRMQIVVILSEFFNTTWQEANCANCLTNNSEELSNSTVYFLNLFNHTLTCFEHNLQGNAHSLLQTKNYSEVCKNCREAYKTLSSLYSEMQKMNELENKAEPGTHLCIDVEDAMNITRKLWSRTFNCSVPCSDTVPVIAVSVFILFLPVVFYLSSFLHSEQKKRKLILPKR

SEQ ID NO: 2175 - protein, 1216 aa, Homo sapiens
MPRRAGSGQLPLPRGWEEARDYDGKVFYIDHNTRRTSWIDPRDRLTKPLSFADCVGDELPWGWEAGFDPQIGVYYIDHINKTTQIEDPRKQWRGEQEKMLKDYLSVAQDALRTQKELYHVKEQRLALALDEYVRLNDAYKEKSSSHTSLFSGSSSSTKYDPDILKAEISTTRLRVKKLKRELSQMKQELLYKEQGFETLQQIDKKMSGGQSGYELSEAKAILTELKSIRKAISSGEKEKQDLMQSLAKLQERFHLDQNIGRSEPDLRCSPVNSHLCLSRQTLDAGSQTSISGDIGVRSRSNLAEKVRLSLQYEEAKRSMANLKIELSKLDSEAWPGALDIEKEKLMLINEKEELLKELQFVTPQKRTQDELERLEAERQRLEEELLSVRGTPSRALAERLRLEERRKELLQKLEETTKLTTYLHSQLKSLSASTLSMSSGSSLGSLASSRGSLNTSSRGSLNSLSSTELYYSSQSDQIDVDYQYKLDFLLQEKSGYIPSGPITTIHENEVVKSPSQPGQSGLCGVAAAATGHTPPLAEAPKSVASLSSRSSLSSLSPPGSPLVLEGTFPMSSSHDASLHQFTADFEDCELSSHFADISLIENQILLDSDSGGASQSLSEDKDLNECAREPLYEGTADVEKSLPKRRVIHLLGEKTTCVSAAVSDESVAGDSGVYEAFVKQPSEMEDVTYSEEDVAIVETAQVQIGLRYNAKSSSFMVIIAQLRNLHAFLIPHTSKVYFRVAVLPSSTDVSCLFRTKVHPPTESILFNDVFRVAISQTALQQKTLRVDLCSVSKHRREECLAGTQISLADLPFSSEVFTLWYNLLPSKQMPCKKNEENEDSVFQPNQPLVDSIDLDAVSALLARTSAELLAVEQELAQEEEEESGQEEPRGPDGDWLNTYFLCCWELKDDVFTRLTVKPLLTMLREASDEIVAEKEAEVKLPEDSSCTEDLSSCTSVPEMNEDGNRKESNCAKDLRSQPPTRIPTLVDKETNTDEAANDNMAVRPKERSSLSSRQHPFVRSSVIVRSQTFSPGERNQYICRLNRSDSDSSTLAKKSLFVRNSTERRSLRVKRTVCQSVLRRTTQECPVRTSLDLELDLQASLTRQSRLNDELQALRDLRQKLEELKAQGETDLPPGVLEDERFQRLLKQAEKQAEQSKEEQKQGLNAEKLMRQVSKDVCRLREQSQKVPRQVQSFREKIAYFTRAKISIPSLPADDV

SEQ ID NO: 2176 - protein, 111 aa, Homo sapiens
MKKKLVVLGLLAVVLVLVIVGLCLWLPSASKEPDNHVYTRAAVAADAKQCSKIGRDALRDGGSAVDAAIAALLCVGLMNAHSMGIGGGLFLTIYNSTTRKAEVINAREVAP

SEQ ID NO: 2177 - protein, 152 aa, Homo sapiens
MFPPSGSTGLIPPSHFQARPLSTLPRMAPTWLSDIPLVQPPGHQDVSERRLDTQRPQVTMWERDVSSDRQEPGRRGRSWGLEGSQALSQQAEVIVRQLQELRRLEEEVRLLRETSLQQKMRLEAQAMELEALARAEKAGRAEAEGLRAALAG

SEQ ID NO: 2178 - protein, 164 aa, Homo sapiens
MSSGLRAADFPRWKRHISEQLRRRDRLQRQAFEEIILQYNKLLEKSDLHSVLAQKLQAEKHDVPNRHEIRRRQARLQKELAEAAKEPLPVEQDDDIEVIVDETSDHTEETSPVRAISRAATRRSVSSFPVPQDNVDTHPGSGKEVRVPATALCVFDAHDGEVNA

SEQ ID NO: 2179 - protein, 188 aa, Homo sapiens
MKKGIRYETSRKTSYIFQPQHGPWQTRMRKISNHGSLRVAKVAYPLGLCVGVFIYVAYIKWHRATATQAFFSITRAAPGARWGQQAHSPLGTAADGHEVFYGIMFDAGSTGTRVHVFQFTRPPRETPTLTHETFKALKPGLSAYADDVEKSAQGIRELLDVAKQDIPFDFWKATPLVLKATAGLRLLP

SEQ ID NO: 2180 - protein, 346 aa, Homo sapiens
MEEPQSDPSVEPPLSQETFSDLWKLLPENNVLSPLPSQAMDDLMLSPDDIEQWFTEDPGPDEAPRMPEAAPPVAPAPAAPTPAAPAPAPSWPLSSSVPSQKTYQGSYGFRLGFLHSGTAKSVTCTYSPALNKMFCQLAKTCPVQLWVDSTPPPGTRVRAMAIYKQSQHMTEVVRRCPHHERCSDSDGLAPPQHLIRVEGNLRVEYLDDRNTFRHSVVVPYEPPEVGSDCTTIHYNYMCNSSCMGGMNRRPILTIITLEDSSGNLLGRNSFEVRVCACPGRDRRTEEENLRKKGEPHHELPPGSTKRALPNNTSSSPQPKKKPLDGEYFTLQMLLDLRWCYFLINSS

SEQ ID NO: 2181 - protein, 605 aa, Homo sapiens
YFCFRALKDNVTHAHLQQIRRNLAHQQHGVTLLHRFWNLWRSQIEQKKERELLPLLHAAWDHYRIALLCKCIELWLQYTQKRRYKQLLQARADGHFQQRALPAAFHTWNRLWRWRHQENVLSARATRFHRETLEKQVFSLWRQKMFQHRENRLAERMAILHAERQLLYRSWFMWHQQAAARHQEQEWQTVACAHHRHGRLKKAFCLWRESAQGLRTERTGRVRAAEFHMAQLLRWAWSQWRETYQGRVRSILREVAARESQHNRQLLRGALRRWKENTMARVDEAKKTFQASTHYRRTICSKVLVQWREAVSVQMYYRQQEDCAIWEAQKVLDRGCLRTWFQRWWDCSRRSAQQRLQLERAVQHHHRQLLLEGLARWKTHHLQCVRKRLLHRQSTQLLAQRLSRTCFRQWRQQLAARRQEQRATVRALWFWAFSLQAKVWATWLAFVLERRRKKARLQWALQAYQGQLLQEGATRLLRFAASMKASRQQLQAQQQVQAAHSLHRAVRRCATLWKQKVLGRGGKPQPLAAIAPSRKVTFEGPLLNRIAAGAGDGTLETKRPQASRPLGALGRLAAEEPHALELNTAHSARKQPRRPHFLLEPAQSQ

SEQ ID NO: 2182 - protein, 714 aa, Homo sapiens
MLPGLALLLLAAWTARALEVYPELQITNVVEANQPVTIQNWCKRGRKQCKTHPHFVIPYRCLVGEFVSDALLVPDKCKFLHQERMDVCETHLHWHTVAKETCSEKSTNLHDYGMLLPCGIDKFRGVEFVCCPLAEESDNVDSADAEEDDSDVWWGGADTDYADGSEDKVVEVAEEEEVAEVEEEEADDDEDDEDGDEVEEEAEEPYEEATERTTSIATTTTTTTESVEEVVREVCSEQAETGPCRAMISRWYFDVTEGKCAPFFYGGCGGNRNNFDTEEYCMAVCGSAMSQSLLKTTQEPLARDPVKLPTTAASTPDAVDKYLETPGDENEHAHFQKAKERLEAKHRERMSQVMREWEEAERQAKNLPKADKKAVIQHFQEKVESLEQEAANERQQLVETHMARVEAMLNDRRRLALENYITALQAVPPRPRHVFNMLKKYVRAEQKDRQHTLKHFEHVRMVDPKKAAQIRSQVMTHLRVIYERMNQSLSLLYNVPAVAEEIQDEVDELLQKEQNYSDDVLANMISEPRISYGNDALMPSLTETKTTVELLPVNGEFSLDDLQPWHSFGADSVPANTENEVEPVDARPAADRGLTTRPGSGLTNIKTEEISEVKMDAEFRHDSGYEVHHQKLVFFAEDVGSNKGAIIGLMVGGVVIATVIVITLVMLKKKQYTSIHHGVVEVDAAVTPEERHLSKMQQNGYENPTYKFFEQMQN

SEQ ID NO: 2183 - protein, 410 aa, Homo sapiens
RDEDDEAYGKPVKYDPSFRGPIKNRSCTDVICCVLFLLFILGYIVVGIVAWLYGDPRQVLYPRNSTGAYCGMGENKDKPYLLYFNIFSCILSSNIISVAENGLQCPTPQVCVSSCPEDPWTVGKNEFSQTVGEVFYTKNRNFCLPGVPWNMTVITSLQQELCPSFLLPSAPALGRCFPWTNVTPPALPGITNDTTIQQGISGLIDSLNARDISVKIFEDFAQSWYWILVAVGQMMSTMFYPLVTFVLLLICIAYWAMTALYLATSGQPQYVLWASNISSPGCEKVPINTSCNPTAHLVNSSCPGLMCVFQGYSSKGLIQRSVFNLQIYGVLGLFWTLNWVLALGQCVLAGAFASFYWAFHKPQDIPTFPLISAFIRTLRYHTGSLAFGALILTLVQIARVILEYIDHKLR

SEQ ID NO: 2184 - protein, 657 aa, Homo sapiens
MLRGPGPGLLLLAVQCLGTAVPSTGASKSKRQAQQMVQPQSPVAVSQSKPGCYDNGKHYQINQQWERTYLGNALVCTCYGGSRGFNCESKPEAEETCFDKYTGNTYRVGDTYERPKDSMIWDCTCIGAGRGRISCTIANRCHEGGQSYKIGDTWRRPHETGGYMLECVCLGNGKGEWTCKPIAEKCFDHAAGTSYVVGETWEKPYQGWMMVDCTCLGEGSGRITCTSRNRCNDQDTRTSYRIGDTWSKKDNRGNLLQCICTGNGRGEWKCERHTSVQTTSSGSGPFTDVRAAVYQPQPHPQPPPYGHCVTDSGVVYSVGMQWLKTQGNKQMLCTCLGNGVSCQETAVTQTYGGNSNGEPCVLPFTYNGRTFYSCTTEGRQDGHLWCSTTSNYEQDQKYSFCTDHTVLVQTRGGNSNGALCHFPFLYNNHNYTDCTSEGRRDNMKWCGTTQNYDADQKFGFCPMAAHEEICTTNEGVMYRIGDQWDKQHDMGHMMRCTCVGNGRGEWTCIAYSQLRDQCIVDDITYNVNDTFHKRHEEGHMLNCTCFGQGRGRWKCDPVDQCQDSETGTFYQIGDSWEKYVHGVRYQCYCYGRGIGEWHCQPLQTYPSSSGPVEVFITETPSQPNSHPIQWNAPQPSHISKYILRWRPVSIPPRNLGY

SEQ ID NO: 2185 - protein, 696 aa, Homo sapiens
MDHRKARVLPAGHYCPSLGIWASQVGSVRSSVPPSIRNPAMVNEARGNSSLNPCLEGSASSGSESSKDSSRCSTPGLDPERHERLREKMRRRLESGDKWFSLEFFPPRTAEGAVNLISRFDRMAAGGPLYIDVTWHPAGDPGSDKETSSMMIASTAVNYCGLETILHMTCCRQRLEEITGHLHKAKQLGLKNIMALRGDPIGDQWEEEEGGFNYAVDLVKHIRSEFGDYFDICVAGYPKGHPEAGSFEADLKHLKEKVSAGADFIITQLFFEADTFFRFVKACTDMGITCPIVPGIFPIQGYHSLRQLVKLSKLEVPQEIKDVIEPIKDNDAAIRNYGIELAVSLCQELLASGLVPGLHFYTLNREMATTEVLKRLGMWTEDPRRPLPWALSAHPKRREEDVRPIFWASRPKSYIYRTQEWDEFPNGRWGNSSSPAFGELKDYYLFYLKSKSPKEELLKMWGEELTSEESVFEVFVLYLSGEPNRNGHKVTCLPWNDEPLAAETSLLKEELLRVNRQGILTINSQPNINGKPSSDPIVGWGPSGGYVFQKAYLEFFTSRETAEALLQVLKKYELRVNYHLVNVKGENITNAPELQPNAVTWGIFPGREIIQPTVVDPVSFMFWKDEAFALWIERWGKLYEEESPSRTIIQYIHDNYFLVNLVDNDFPLDNCLWQVVEDTLELLNRPTQNARETEAP

SEQ ID NO: 2186 - protein, 527 aa, Homo sapiens
MGSLKEELLKAIWHAFTALDQDHSGKVSKSQLKVLSHNLCTVLKVPHDPVALEEHFRDDDEGPVSNQGYMPYLNRFILEKIEYLLKKLTEAMGGGWQQEQFEHYKINFDDSKNGLSAWELIELIGNGQFSKGMDRQTVSMAINEVFNELILDVLKQGYMMKKGHRRKNWTERWFVLKPNIISYYVSEDLKDKKGDILLDENCCVESLPDKDGKKCLFLVKCFDKTFEISASDKKKKQEWIQAIHSTIHLLKLGSPPPHKEARQRRKELRKKQLAEQEELERQMKELQAANESKQQELEAVRKKLEEAASRAAEEEKKRLQTQVELQARFSTELEREKLIRQQMEEQVAQKSSELEQYLQRVRELEDMYLKLQEALEDERQARQDEETVRKLQARLLEEESSKRAELEKWHLEQQQAIQTTEAEKQELENQRVLKEQALQEAMEQLEQLELERKQALEQYEEVKKKLEMATNKTKSWKDKVAHHEGLIRLIEPGSKNPHLITNWGPAAFTEAELEEREKNWKEKKTTE

SEQ ID NO: 2187 - protein, 1235 aa, Homo sapiens
MHLAERDRWLFVATVMMHFVSIKSGFPGLCVGVRSTMSSVAVLTQESFAEHRSGLVPQQIKVATLNSEEESDPPTYKDAFPPLPEKAACLESAQEPAGAWGNKIRPIKASVITQVFHVPLEERKYKDMNQFGEGEQAKICLEIMQRTGAHLELSLAKDQGLSIMVSGKLDAVMKARKDIVARLQTQASATVAIPKEHHRFVIGKNGEKLQDLELKTATKIQIPRPDDPSNQIKITGTKEGIEKARHEVLLISAEQDKRAVERLEVEKAFHPFIAGPYNRLVGEIMQETGTRINIPPPSVNRTEIVFTGEKEQLAQAVARIKKIYEEKANSFTVSSVAAPSWLHRFIIGKKGQNLAKITQQMPKVHIEFTEGEDKITLEGPTEDVNVAQEQIEGMVKDLINRMDYVEINIDHKFHRHLIGKSGANINRIKDQYKVSVRIPPDSEKSNLIRIEGDPQGVQQAKRELLELASRMENERTKDLIIEQRFHRTIIGQKGERIREIRDKFPEVIINFPDPAQKSDIVQLRGPKNEVEKCTKYMQKMVADLVENSYSISVPIFKQFHKNIIGKGGANIKKIREESNTKIDLPAENSNSETIIITGKRANCEAARSRILSIQKDLANIAEVEVSIPAKLHNSLIGTKGRLIRSIMEECGGVHIHFPVEGSGSDTVVIRGPSSDVEKAKKQLLHLAEEKQTKSFTVDIRAKPEYHKFLIGKGGGKIRKVRDSTGARVIFPAAEDKDQDLITIIGKEDAVREAQKELEALIQNLDNVVEDSMLVDPKHHRHFVIRRGQVLREIAEEYGGVMVSFPRSGTQSDKVTLKGAKDCVEAAKKRIQEIIEDLEAQVTLECAIPQKFHRSVMGPKGSRIQQITRDFSVQIKFPDREENAVHSTEPVVQENGDEAGEGREAKDCDPGSPRRCDIIIISGRKEKCEAAKEALEALVPVTIEVEVPFDLHRYVIGQKGSGIRKMMDEFEVNIHVPAPELQSDIIAITGLAANLDRAKAGLLERVKELQAEQEDRALRSFKLSVTVDPKYHPKIIGRKGAVITQIRLEHDVNIQFPDKDDGNQPQDQITITGYEKNTEAARDAILRIVGELEQMVSEDVPLDHRVHARIIGARGKAIRKIMDEFKVDIRFPQSGAPDPNCVTVTGLPENVEEAIDHILNLEEEYLADVVDSEALQVYMKPPAHEEAKAPSRGFVVRDAPWTASSSEKAPDMSSSEEFPSFGAQVAPKTLPWGPKR

SEQ ID NO: 2188 - protein, 362 aa, Homo sapiens
MLVMAPRTVLLLLSAALALTETWAGSHSMRYFYTSVSRPGRGEPRFISVGYVDDTQFVRFDSDAASPREEPRAPWIEQEGPEYWDRNTQIYKAQAQTDRESLRNLRGYYNQSEAGSHTLQSMYGCDVGPDGRLLRGHDQYAYDGKDYIALNEDLRSWTAADTAAQITQRKWEAAREAEQRRAYLEGECVEWLRRYLENGKDKLERADPPKTHVTHHPISDHEATLRCWALGFYPAEITLTWQRDGEDQTQDTELVETRPAGDRTFQKWAAVVVPSGEEQRYTCHVQHEGLPKPLTLRWEPSSQSTVPIVGIVAGLAVLAVVVIGAVVAAVMCRRKSSGGKGGSYSQAACSDSAQGSDVSLTA

SEQ ID NO: 2189 - protein, 203 aa, Homo sapiens
GKITDTETMVGIRFENESRRGYQLEPDLSEEVSARLRLGSGSNGLLRRKVSIIETKEKNCSGKERDRRTDDLLELTEVINFYMNLLVERNKKQGYPALHVFSTFFYPKLKSGGYQAVKRWTKGVNLFEQEIILVPIHRKVHWSLVVIDLRKKCLKYLDSMGQKGHRICEILLQYLQDESKTKRNSDLNLLEWTHHSMKPHEIP

SEQ ID NO: 2190 - protein, 584 aa, Homo sapiens
MRIGTPTAGPGPSAVMEGCLGVAELRKLSTFSAYLEDHSYNVEQIWRDIEDVIIKTLISAHPIIRHNYHTCFPNHTLNSACFEILGFDILLDHKLKPWLLEVNHSPSFSTDSRLDKEVKDGLLYDTLVLINLESCDKKKVLEEERQRGQFLQQCCSREMRIEEAKGFRAVQLKKTETYEKENCGGFRLIYPSLNSEKYEKFFQDNNSLFQNTVASRAREEYARQLIQELRLKREKKPFQMKKKVEMQGESAGEQVRKKGMRGWQQKQQQKDKAATQASKQYIQPLTLVSYTPDLLLSVRGERKNETDSSLNQEAPTEEASSVFPKLTSAKPFSSLPDLRNINLSSSKLEPSKPNFSIKEAKSASAVNVFTGTVHLTSVETTPESTTQLSISPKSPPTLAVTASSEYSGPETDRVVSFKCKKQQTPPHLTQKKMLKSFLPTKSKSFWESPNTNWTLLKSDMNKPHLISELLTKLQLSGKLSFFPAHYNPKLGMNNLSQNPSLPGECHSRSDSSGEKRQLDVSSLLLQSPQSYNVTLRDLLVIATPAQLDPRPCRSHASAMRDPCMQDQEAYSHCLISGQKGCERS

SEQ ID NO: 2191 - protein, 116 aa, Homo sapiens
MQWLRVRESPGEATGHRVTMGTAALGPVWAALLLFLLMCEIPMVELTFDRAVASGCQRCCDSEDPLDPAHVSSASSSGRPHALPEIRPYINITILKGRGRTRFPSRLWWLTAVTRP

SEQ ID NO: 2192 - protein, 284 aa, Homo sapiens
MFRAAAPGQLRRAVAQDLCKVAGIAKVLVAQHDVYKGLLPEELTPLILATQKQFNYTHICAGASAFGKNLLPRVAAKLEVAPISDIIAIKSPDTFVRTIYAGNALCTVKCDEKVKVFSVRGTSFDAAATSGGSASSEKASSTSPVEISEWLDQKLTKSDRPELTGAKVVVSGGRGLKSGENFKLLYDLADQLHAAVGASRAAVDAGFVPNDMQVGQTGKIVAPELYIAVGISGAIQHLAGMKDSKTIVAINKDPEAPIFQVADYGIVADLFKVVPEMTEILKKK

SEQ ID NO: 2193 - protein, 481 aa, Homo sapiens
MSLVEAISLWNEGVLAADKKDWKGALDAFSAVQDPHSRICFNIGCMYTILKNMTEAEKAFTRSINRDKHLAVAYFQRGMLYYQTEKYDLAIKDLKEALIQLRGNQLIDYKILGLQFKLFACEKQKLYEPVVIPVGKLFRPNERQVAQLAKKDYLGKATVVASVVDQDSFSGFAPLQPQAAEPPPRPKTPEIFRALEGEAHRVLFGFVPETKEELQVMPGNIVFVLKKGNDNWATVMFNGQKGLVPCNYLEPVELRIHPQQQPQEESSPQSDIPAPPSSKAPGRPQLSPGQKQKEEPKEVKLSVPMPYTLKVHYKYTVVMKTQPGLPYSQVRDMVSKKLELRLEHTKLSYRPRDSNELVPLSEDSMKDAWGQVKNYCLTLWCENTVGDQGFPDEPKESEKADANNQTTEPQLKKGSQVEALFSYEATQPEDLEFQEGDIILVLSKVNEEWLEGECKGKVGIFPKVFVEDCATTDLESTRREV

SEQ ID NO: 2194 - protein, 167 aa, Homo sapiens
MSNPSAPPPYEDRNPLYPGPPPPGGYGQPSVLPGGYPAYPGYPQPGYGHPAGYPQPMPPTHPMPMNYGPGHGYDGEERAVSDSFGPGEWDDRKVRHTFIRKVYSIISVQLLITVAIIAIFTFVEPVSAFVRRNVAVYYVSYAVFVVTYLILACCQGPRRRFPWNIIL

SEQ ID NO: 2195 - protein, 403 aa, Homo sapiens
MDSSAAPTNASNCTDALAYSSCSPAPSPGSWVNLSHLDGNLSDPCGPNRTDLGGRDSLCPPTGSPSMITAITIMALYSIVCVVGLFGNFLVMYVIVRYTKMKTATNIYIFNLALADALATSTLPFQSVNYLMGTWPFGTILCKIVISIDYYNMFTSIFTLCTMSVDRYIAVCHPVKALDFRTPRNAKIINVCNWILSSAIGLPVMFMATTKYRQGSIDCTLTFSHPTWYWENLLKICVFIFAFIMPVLIITVCYGLMILRLKSVRMLSGSKEKDRNLRRITRMVLVVVAVFIVCWTPIHIYVIIKALVTIPETTFQTVSWHFCIALGYTNSCLNPVLYAFLDENFKRCFREFCIPTSSNIEQQNSTRIRQNTRDHPSTANTVDRTNHQGPPAKFVADQLAGSS

SEQ ID NO: 2196 - protein, 1504 aa, Homo sapiens
MVSESDFSKDVAVQVLPLDKIEENNKQKANDIFISQYTMGQKDALRTVLKQNVSLCLTGWSDHSGVITTHCSLYLLRLMRSSHLSLPSSWDYRAQSMPVFKEVKVHLLEDAGIEKDAVTQETRISPSGIDSATTVAAATAAAIATAAPLIKVQSDLEAKVNSVTELLSKLQETDKHLQRVTEQQTSIQRKQEKLHCHDHEKQMNVFMEQHIRHLEKLQQQQIDIQTHFISAALKTSSFQPVSMPSSRAVEKYSVKPEHPNLGSCNPSLYNTFASKQAPLKEVEDTSFDKQKSPLETPAPRRFAPVPVSRDDELSKRENLLEEKENMEVSCHRGNVRLLEQILNNNDSLTRKSESSNTTSLTRSKIGWTPEKTNRFPSCEELETTKVTMQKSDDVLHDLGQKEKETNSMVQPKESLSMLKLPDLPQNSVKLQTTNTTRSVLKDAEKILRGVQNNKKVLEENLEAIIRAKDGAAMYSLINALSTNREMSEKIRIRKTVDEWIKTISAEIQDELSRTDYEQKRFDQKNQRTKKGQNMTKDIRTNTQDKTVNKSVIPRKHSQKQIEEHFRNLPMRGMPASSLQKERKEGLLKATTVIQDEDYMLQVYGKPVYQGHRSTLKKGPYLRFNSPSPKSRPQRPKVIERVKGTKVKSIRTQTDFYATKPKKMDSKMKHSVPVLPHGDQQYLFSPSREMPTFSGTLEGHLIPMAILLGQTQSNSDTMPPAGVIVSKPHPVTVTTSIPPSSRKVETGVKKPNIAIVEMKSEKKDPPQLTVQVLPSVDIDSISNSSADVLSPLSSPKEASLPPVQTWIKTPEIMKVDEEEVKFPGTNFDEIIDVIQEEEKCDEIPDSEPILEFNRSVKADSTKYNGPPFPPVASTFQPTADILDKVIERKETLENSLIQWVEQEIMSRIISGLFPVQQQIAPSISVSVSETSEPLTSDIVEGTSSGALQLFVDAGVPVNSNVIKHFVNEALAETIAVMLGDREAKKQGPVATGVSGDASTNETYLPARVCTPLPTPQPTPPCSPSSPAKECVLVKTPDSSPCDSDHDMAFPVKEICAEKGDDMPAIMLVNTPTVTPTTTPPPAAAVFTPTLSDISIDKLKVSSPELPKPWGDGDLPLEEENPNSPQEELHPRAIVMSVAKDEEPESMDFPAQPPPPEPVPFMPFPAGTKAPSPSQMPGSDSSTLESTLSVTVTETETLDKPISEGEILFSCGQKLAPKILEDIGLYLTNLNDSLSSTLHDAVEMEDDPPSEGQVIRMSHKKFHADAILSFAKQNQESAVSQQAVYHSEDLENSVGELSEGQRPQLTAAAENILMGHSLYMQPPVTNTQSLDQQCDPKPLSRQFDTVSGSIYEDSCASHGPMSLGELELEPNSKLVLPTTLLTAQENDVNLPVAAEDFSQYQLKQNQDVKQVEHKPSQSYLRVRNKSDIAPSQQQVSPGDMDRTQIELNPYLTCVFSGGKAVPLSASQMPPAKMSVMLPSVNLEDCSQSLSLSTMQEDMESSGADTF

SEQ ID NO: 2197 - protein, 550 aa, Homo sapiens
MKWEEYEELLHYAIVTPNIEPCASQSSHPKGELVPDVRISTIHDILHSQGNNSEVRETAIEVGKGCDFHISSHSKTDESSPVLSPRKPSHPVMDFFSSHLLADSSSPATNSSHTDAHEILVSDFLVSDENLQKMENVLDLWSSGLKTNIISELSKWRLNFIDWHRMEMRKEKEKHAAHLKQLCNQINELKELQKTFEISIGRKDEVISSLSHAIGKQKEKIELMRTFFHWRIGHVRARQDVYEGKLADQYYQRTLLKKVWKVWRSVVQKQWKDVVERACQARAEEVCIQISNDYEAKVAMLSGALENAKAEIQRMQHEKEHFEDSMKKAFMRGVCALNLEAMTIFQNRNDAGIDSTNNKKEEYGPGVQGKEHSAHLDPSAPPMPLPVTSPLLPSPPAAVGGASATAVPSAASMTSTRAASASSVHVPVSALGAGSAATAASEEMYVPRVVTSAQQKAGRTITARITGRCDFASKNRISSSLAIMGVSPPMSSVVVEKHHPVTVQTIPQATAAKYPRTIHPESSTSASRSLGTRSAHTQSLTSVHSIKVVD

SEQ ID NO: 2198 - protein, 4302 aa, Homo sapiens
MPPAAPARLALALGLGLWLGALAGGPGRGCGPCEPPCLCGPAPGAACRVNCSGRGLRTLGPALRIPADATALDVSHNLLRALDVGLLANLSALAELDISNNKISTLEEGIFANLFNLSEINLSGNPFECDCGLAWLPRWAEEQQVRVVQPEAATCAGPGSLAGQPLLGIPLLDSGCGEEYVACLPDNSSGTVAAVSFSAAHEGLLQPEACSAFCFSTGQGLAALSEQGWCLCGAAQPSSASFACLSLCSGPPPPPAPTCRGPTLLQHVFPASPGATLVGPHGPLASGQLAAFHIAAPLPVTATRWDFGDGSAEVDAAGPAASHRYVLPGRYHVTAVLALGAGSALLGTDVQVEAAPAALELVCPSSVQSDESLDLSIQNRGGSGLEAAYSIVALGEEPARAVHPLCPSDTEIFPGNGHCYRLVVEKAAWLQAQEQCQAWAGAALAMVDSPAVQRFLVSRVTRSLDVWIGFSTVQGVEVGPAPQGEAFSLESCQNWLPGEPHPATAEHCVRLGPTGWCNTDLCSAPHSYVCELQPGGPVQDAENLLVGAPSGDLQGPLTPLAQQDGLSAPHEPVEVMVFPGLRLSREAFLTTAEFGTQELRRPAQLRLQVYRLLSTAGTPENGSEPESRSPDNRTQLAPACMPGGRWCPGANICLPLDASCHPQACANGCTSGPGLPGAPYALWREFLFSVPAGPPAQYSVTLHGQDVLMLPGDLVGLQHDAGPGALLHCSPAPGHPGPRAPYLSANASSWLPHLPAQLEGTWACPACALRLLAATEQLTVLLGLRPNPGLRLPGRYEVRAEVGNGVSRHNLSCSFDVVSPVAGLRVIYPAPRDGRLYVPTNGSALVLQVDSGANATATARWPGGSVSARFENVCPALVATFVPGCPWETNDTLFSVVALPWLSEGEHVVDVVVENSASRANLSLRVTAEEPICGLRATPSPEARVLQGVLVRYSPVVEAGSDMVFRWTINDKQSLTFQNVVFNVIYQSAAVFKLSLTASNHVSNVTVNYNVTVERMNRMQGLQVSTVPAVLSPNATLALTAGVLVDSAVEVAFLWTFGDGEQALHQFQPPYNESFPVPDPSVAQVLVEHNVMHTYAAPGEYLLTVLASNAFENLTQQVPVSVRASLPSVAVGVSDGVLVAGRPVTFYPHPLPSPGGVLYTWDFGDGSPVLTQSQPAANHTYASRGTYHVRLEVNNTVSGAAAQADVRVFEELRGLSVDMSLAVEQGAPVVVSAAVQTGDNITWTFDMGDGTVLSGPEATVEHVYLRAQNCTVTVGAASPAGHLARSLHVLVFVLEVLRVEPAACIPTQPDARLTAYVTGNPAHYLFDWTFGDGSSNTTVRGCPTVTHNFTRSGTFPLALVLSSRVNRAHYFTSICVEPEVGNVTLQPERQFVQLGDEAWLVACAWPPFPYRYTWDFGTEEAAPTRARGPEVTFIYRDPGSYLVTVTASNNISAANDSALVEVQEPVLVTSIKVNGSLGLELQQPYLFSAVGRGRPASYLWDLGDGGWLEGPEVTHAYNSTGDFTVRVAGWNEVSRSEAWLNVTVKRRVRGLVVNASRTVVPLNGSVSFSTSLEAGSDVRYSWVLCDRCTPIPGGPTISYTFRSVGTFNIIVTAENEVGSAQDSIFVYVLQLIEGLQVVGGGRYFPTNHTVQLQAVVRDGTNVSYSWTAWRDRGPALAGSGKGFSLTVLEAGTYHVQLRATNMLGSAWADCTMDFVEPVGWLMVAASPNPAAVNTSVTLSAELAGGSGVVYTWSLEEGLSWETSEPFTTHSFPTPGLHLVTMTAGNPLGSANATVEVDVQVPVSGLSIRASEPGGSFVAAGSSVPFWGQLATGTNVSWCWAVPGGSSKRGPHVTMVFPDAGTFSIRLNASNAVSWVSATYNLTAEEPIVGLVLWASSKVVAPGQLVHFQILLAAGSAVTFRLQVGGANPEVLPGPRFSHSFPRVGDHVVSVRGKNHVSWAQAQVRIVVLEAVSGLQVPNCCEPGIATGTERNFTARVQRGSRVAYAWYFSLQKVQGDSLVILSGRDVTYTPVAAGLLEIQVRAFNALGSENRTLVLEVQDAVQYVALQSGPCFTNRSAQFEAATSPSPRRVAYHWDFGDGSPGQDTDEPRAEHSYLRPGDYRVQVNASNLVSFFVAQATVTVQVLACREPEVDVVLPLQVLMRRSQRNYLEAHVDLRDCVTYQTEYRWEVYRTASCQRPGRPARVALPGVDVSRPRLVLPRLALPVGHYCFVFVVSFGDTPLTQSIQANVTVAPERLVPIIEGGSYRVWSDTRDLVLDGSESYDPNLEDGDQTPLSFHWACVASTQREAGGCALNFGPRGSSTVTIPRERLAAGVEYTFSLTVWKAGRKEEATNQTVLIRSGRVPIVSLECVSCKAQAVYEVSRSSYVYLEGRCLNCSSGSKRGRWAARTFSNKTLVLDETTTSTGSAGMRLVLRRGVLRDGEGYTFTLTVLGRSGEEEGCASIRLSPNRPPLGGSCRLFPLGAVHALTTKVHFECTGWHDAEDAGAPLVYALLLRRCRQGHCEEFCVYKGSLSSYGAVLPPGFRPHFEVGLAVVVQDQLGAAVVALNRSLAITLPEPNGSATGLTVWLHGLTASVLPGLLRQADPQHVIEYSLALVTVLNEYERALDVAAEPKHERQHRAQIRKNITETLVSLRVHTVDDIQQIAAALAQCMGPSRELVCRSCLKQTLHKLEAMMLILQAETTAGTVTPTAIGDSILNITGDLIHLASSDVRAPQPSELGAESPSRMVASQAYNLTSALMRILMRSRVLNEEPLTLAGEEIVAQGKRSDPRSLLCYGGAPGPGCHFSIPEAFSGALANLSDVVQLIFLVDSNPFPFGYISNYTVSTKVASMAFQTQAGAQIPIERLASERAITVKVPNNSDWAARGHRSSANSANSVVVQPQASVGAVVTLDSSNPAAGLHLQLNYTLLDGHYLSEEPEPYLAVYLHSEPRPNEHNCSASRRIRPESLQGADHRPYTFFISPGSRDPAGSYHLNLSSHFRWSALQVSVGLYTSLCQYFSEEDMVWRTEGLLPLEETSPRQAVCLTRHLTAFGASLFVPPSHVRFVFPEPTADVNYIVMLTCAVCLVTYMVMAAILHKLDQLDASRGRAIPFCGQRGRFKYEILVKTGWGRGSGTTAHVGIMLYGVDSRSGHRHLDGDRAFHRNSLDIFRIATPHSLGSVWKIRVWHDNKGLSPAWFLQHVIVRDLQTARSAFFLVNDWLSVETEANGGLVEKEVLAASDAALLRFRRLLVAELQRGFFDKHIWLSIWDRPPRSRFTRIQRATCCVLLICLFLGANAVWYGAVGDSAYSTGHVSRLSPLSVDTVAVGLVSSVVVYPVYLAILFLFRMSRSKVAGSPSPTPAGQQVLDIDSCLDSSVLDSSFLTFSGLHAEAFVGQMKSDLFLDDSKSLVCWPSGEGTLSWPDLLSDPSIVGSNLRQLARGQAGHGLGPEEDGFSLASPYSPAKSFSASDEDLIQQVLAEGVSSPAPTQDTHMETDLLSSLSSTPGEKTETLALQRLGELGPPSPGLNWEQPQAARLSRTGLVEGLRKRLLPAWCASLAHGLSLLLVAVAVAVSGWVGASFPPGVSVAWLLSSSASFLASFLGWEPLKVLLEALYFSLVAKRLHPDEDDTLVESPAVTPVSARVPRVRPPHGFALFLAKEEARKVKRLHGMLRSLLVYMLFLLVTLLASYGDASCHGHAYRLQSAIKQELHSRAFLAITRSEELWPWMAHVLLPYVHGNQSSPELGPPRLRQVRLQEALYPDPPGPRVHTCSAAGGFSTSDYDVGWESPHNGSGTWAYSAPDLLGAWSWGSCAVYDSGGYVQELGLSLEESRDRLRFLQLHNWLDNRSRAVFLELTRYSPAVGLHAAVTLRLEFPAAGRALAALSVRPFALRRLSAGLSLPLLTSVCLLLFAVHFAVAEARTWHREGRWRVLRLGAWARWLLVALTAATALVRLAQLGAADRQWTRFVRGRPRRFTSFDQVAQLSSAARGLAASLLFLLLVKAAQQLRFVRQWSVFGKTLCRALPELLGVTLGLVVLGVAYAQLAILLVSSCVDSLWSVAQALLVLCPGTGLSTLCPAESWHLSPLLCVGLWALRLWGALRLGAVILRWRYHALRGELYRPAWEPQDYEMVELFLRRLRLWMGLSKVKEFRHKVRFEGMEPLPSRSSRGSKVSPDVPPPSAGSDASHPSTSSSQLDGLSVSLGRLGTRCEPEPSRLQAVFEALLTQFDRLNQATEDVYQLEQQLHSLQGRRSSRAPAGSSRGPSPGLRPALPSRLARASRGVDLATGPSRTPLRAKNKVHPSST

SEQ ID NO: 2199 - protein, 256 aa, Homo sapiens
HKVNTLALKYGLRGHVPITKSTASLQKQILGFTQRLHAAEVERRSLRLEVTEFKRSVNEMKKELDKAQGLQMQLNEFKQSKLITHEKFESACEELNNALLREEQAQMLLNEQAQQLQELNYKLELHSSEEADKNQTLGEAVKSLSEAKMELRRKDQSLRQLNRHLTQLEQDKRRLEENIHDAESALRMAAKDKECVANHMRAVENTLHKVRDQISLSWSAASRNDFTLQLPKLHLETFAMEGLKGGPEVVACQVRV

SEQ ID NO: 2200 - protein, 2267 aa, Homo sapiens
MLRGPGPGLLLLAVQCLGTAVPSTGASKSKRQAQQMVQPQSPVAVSQSKPGCYDNGKHYQINQQWERTYLGNALVCTCYGGSRGFNCESKPEAEETCFDKYTGNTYRVGDTYERPKDSMIWDCTCIGAGRGRISCTIANRCHEGGQSYKIGDTWRRPHETGGYMLECVCLGNGKGEWTCKPIAEKCFDHAAGTSYVVGETWEKPYQGWMMVDCTCLGEGSGRITCTSRNRCNDQDTRTSYRIGDTWSKKDNRGNLLQCICTGNGRGEWKCERHTSVQTTSSGSGPFTDVRAAVYQPQPHPQPPPYGHCVTDSGVVYSVGMQWLKTQGNKQMLCTCLGNGVSCQETAVTQTYGGNSNGEPCVLPFTYNGRTFYSCTTEGRQDGHLWCSTTSNYEQDQKYSFCTDHTVLVQTRGGNSNGALCHFPFLYNNHNYTDCTSEGRRDNMKWCGTTQNYDADQKFGFCPMAAHEEICTTNEGVMYRIGDQWDKQHDMGHMMRCTCVGNGRGEWTCIAYSQLRDQCIVDDITYNVNDTFHKRHEEGHMLNCTCFGQGRGRWKCDPVDQCQDSETGTFYQIGDSWEKYVHGVRYQCYCYGRGIGEWHCQPLQTYPSSSGPVEVFITETPSQPNSHPIQWNAPQPSHISKYILRWRPKNSVGRWKEATIPGHLNSYTIKGLKPGVVYEGQLISIQQYGHQEVTRFDFTTTSTSTPVTSNTVTGETTPFSPLVATSESVTEITASSFVVSWVSASDTVSGFRVEYELSEEGDEPQYLDLPSTATSVNIPDLLPGRKYIVNVYQISEDGEQSLILSTSQTTAPDAPPDTTVDQVDDTSIVVRWSRPQAPITGYRIVYSPSVEGSSTELNLPETANSVTLSDLQPGVQYNITIYAVEENQESTPVVIQQETTGTPRSDTVPSPRDLQFVEVTDVKVTIMWTPPESAVTGYRVDVIPVNLPGEHGQRLPISRNTFAEVTGLSPGVTYYFKVFAVSHGRESKPLTAQQTTKLDAPTNLQFVNETDSTVLVRWTPPRAQITGYRLTVGLTRRGQPRQYNVGPSVSKYPLRNLQPASEYTVSLVAIKGNQESPKATGVFTTLQPGSSIPPYNTEVTETTIVITWTPAPRIGFKLGVRPSQGGEAPREVTSDSGSIVVSGLTPGVEYVYTIQVLRDGQERDAPIVNKVVTPLSPPTNLHLEANPDTGVLTVSWERSTTPDITGYRITTTPTNGQQGNSLEEVVHADQSSCTFDNLSPGLEYNVSVYTVKDDKESVPISDTIIPEVPQLTDLSFVDITDSSIGLRWTPLNSSTIIGYRITVVAAGEGIPIFEDFVDSSVGYYTVTGLEPGIDYDISVITLINGGESAPTTLTQQTAVPPPTDLRFTNIGPDTMRVTWAPPPSIDLTNFLVRYSPVKNEEDVAELSISPSDNAVVLTNLLPGTEYVVSVSSVYEQHESTPLRGRQKTGLDSPTGIDFSDITANSFTVHWIAPRATITGYRIRHHPEHFSGRPREDRVPHSRNSITLTNLTPGTEYVVSIVALNGREESPLLIGQQSTVSDVPRDLEVVAATPTSLLISWDAPAVTVRYYRITYGETGGNSPVQEFTVPGSKSTATISGLKPGVDYTITVYAVTGRGDSPASSKPISINYRTEIDKPSQMQVTDVQDNSISVKWLPSSSPVTGYRVTTTPKNGPGPTKTKTAGPDQTEMTIEGLQPTVEYVVSVYAQNPSGESQPLVQTAVTTIPAPTDLKFTQVTPTSLSAQWTPPNVQLTGYRVRVTPKEKTGPMKEINLAPDSSSVVVSGLMVATKYEVSVYALKDTLTSRPAQGVVTTLENVSPPRRARVTDATETTITISWRTKTETITGFQVDAVPANGQTPIQRTIKPDVRSYTITGLQPGTDYKIYLYTLNDNARSSPVVIDASTAIDAPSNLRFLATTPNSLLVSWQPPRARITGYIIKYEKPGSPPREVVPRPRPGVTEATITGLEPGTEYTIYVIALKNNQKSEPLIGRKKTGQEALSQTTISWAPFQDTSEYIISCHPVGTDEEPLQFRVPGTSTSATLTGLTRGATYNVIVEALKDQQRHKVREEVVTVGNSVNEGLNQPTDDSCFDPYTVSHYAVGDEWERMSESGFKLLCQCLGFGSGHFRCDSSRWCHDNGVNYKIGEKWDRQGENGQMMSCTCLGNGKGEFKCDPHEATCYDDGKTYHVGEQWQKEYLGAICSCTCFGGQRGWRCDNCRRPGGEPSPEGTTGQSYNQYSQRYHQRTNTNVNCPIECFMPLDVQADREDSRE

SEQ ID NO: 2201 - protein, 75 aa, Homo sapiens
MLPPQKKPWESMAKGLVLGALFTSFLLLVYSYAVPPLHAGLASTTPEAAASCSPPALEPEAVIRANGSAGECQPR

SEQ ID NO: 2202 - protein, 530 aa, Homo sapiens
MHHPAPAWPRCGWCASHTWQISLGPRSTSFILCPLSSCGPRGEVRSDGWRQLPERLGVGGAGRNMPLGRGLTLWRGSTPTVCLSWSQARCLPGLSQDVAPGAVGVPPLPGVMSVLRRVSFLKKAVDQRNKALTSLNEAMNVSCALLSSGTGPRPISCTTSTTWSRLQTQDVLMATCVLENSSSFSLDQGWTLCIQVLTSSCALDLDSACSAITYTIPVDQLGPGARREVTLPLGPGENGGLDLPVTVSCTLFYSLREVVGGALAPSDSEDPFLDECPSDVLPEQEGVCLPLSRHTVDMLQCLRFPGLAPPHTRAPSPLGPTRDPVATFLETCREPGSQPAGPASLRAEYLPPSVASIKVSAELLRAALKDGHSGVPLCCATLQWLLAENAAVDVVRARALSSIQGVAPDGANVHLIVREVAMTDLCPAGPIQAVEIQVESSSLADICRAHHAVVGRMQTMVTEQATQGSSAPDLRVQYLRQIHANHETLLREVQTLRDRLCTEDEASSCATAQRLLQVYRQLRHPSLILL

SEQ ID NO: 2203 - protein, 88 aa, Homo sapiens
VPAAPPPPQGFKQEYHDPLYEHGVPGMPGPPAHGFQSPMGIKQEPRDYCVDSEVPNCQSSYMRGGYFSSSHEGCSALGHPEEPASHEL

SEQ ID NO: 2204 - protein, 434 aa, Homo sapiens
MRPPQCLLHTPSLASPLLLLLLWLLGGGVGAEGREDAELLVTVRGGRLRGIRLKTPGGPVSAFLGIPFAEPPMGPRRFLPPEPKQPWSGVVDATTFQSVCYQYVDTLYPGFEGTEMWNPNRELSEDCLYLNVWTPYPRPTSPTPVLVWIYGGGFYSGASSLDVYDGRFLVQAERTVLVSMNYRVGAFGFLALPGSREAPGNVGLLDQRLALQWVQENVAAFGGDPTSVTLFGESAGAASVGMHLLSPPSRGLFHRAVLQSGAPNGPWATVGMGEARRRATQLAHLVGCPPGGTGGNDTELVACLRTRPAQVLVNHEWHVLPQESVFRFSFVPVVDGDFLSDTPEALINAGDFHGLQVLVGVVKDEGSYFLVYGAPGFSKDNESLISRAEFLAGTRSTRRSASGRPSSTAGAPTWCTGRTSSTTTASRIAAQTCD

SEQ ID NO: 2205 - protein, 125 aa, Homo sapiens
CGVSTYAPDMSRMLGGEEARPNSWPWQVSLQYSSNGQWYHTCGGSLIANSWVLTAAHCIRQIIKAHKVLQRCSLILFFVRDLCSSQLELTGVSAGSSGIYRVMLGQHNLYVAESGSLAVSVSKIV

SEQ ID NO: 2206 - protein, 81 aa, Homo sapiens
MMCQSEARQGPELRAAKWLHFPQLALRRRLGQLSCMSRPALKLRSWPLTVLYYLLPFGALRPLSRVGWRPVSRVALYKSVP

SEQ ID NO: 2207 - protein, 234 aa, Homo sapiens
NYLFQGRQECYAFNGTQRFLERYIYNREEFARFDSDVGEFRAVTELGRPAAEYWNSQKDILEEKRAVPDRMCRHNYELGGPMTLQRRVQPRVNVSPSKKGPLQHHNLLVCHVTDFYPGSIQVRWFLNGQEETAGVVSTNLIRNGDWTFQILVMLEMTPQQGDVYTCQVEHTSLDSPVTVEWKAQSDSARSKTLTGAGGFVLGLIICGVGIFMHRRSKKGEKACRFNEDLHKQGS

SEQ ID NO: 2208 - protein, 246 aa, Homo sapiens
NNNSIMSFFKTLVSPNKAETKKDPEDTGAEKSPTTSADLKSDKANFTSQETQGAGKNSKGCNPSGHTQSVTTPEPAKEGTKEKSGPTSLPLGKLFWKKSVKEDSVPTGAEENSVKGDGGITHSEEINGKDSSCQTSDSTEKTITPPEPEPTGAPQKGKEGSSKDKKSAAEMNKQKSNKQEAKEPAQCTEQATVDTNSLQNGDKLQKRPEKRQQSLGGFFKGLGPKRMLDAQVQTDPVSIGPVGKSK

SEQ ID NO: 2209 - protein, 171 aa, Homo sapiens
MSNPSAPPPYEDRNPLYPGPPPPGGYGQPSVLPGGYPAYPGYPQPGYGHPAGYPQPMPPTHPMPMNYGPGHGYDGEERAVSDSFGPGEWDDRKVRHTFIRKVYSIISVQLLITVAIIAIFTFVEPVSAFVRRNVAVYYVSYAVFVVTYLILACCQGPRRRFPWNIILLTLF

SEQ ID NO: 2210 - protein, 440 aa, Homo sapiens
NRAASKYPKTKKYLVTEWLNDKAEKQECPVECPLRITTDPTVLATTLNMLPGLIHSPLICTTPKHYIRFGSPFIPERRRRPLLPDGTFSSCKKRWIKQALEEGMTQTSSVPQETRTQHLYQSNENSSSSSICKDNADLLSPLKKWKSRYLMEQNVTKLLRPLSPVTPPPPNSGSKSPQLATPGSSHPGEEECRNGYSLMFSPVTSLTTASRCNTPLQFENISSPESSPAHRPESLSPELCHRKDLDLAKVGYLDSNTNSCADRPSLLNSGHSDLAPHPSLGPTSETGFPSRSGDGHQTLVRNSDQAFRTEFNLMYAYSPLNAMPRADGLYRGSPLVGDRKPLHLDGGYCSPAEGFSSRYEHGLMKDLSRGSLSPGGERACEGVPSAPQNPPQRKKVSLLEYRKRKQEAKENSAGGGGDSAQSKSKSAGAGQGSSNSVSDT

SEQ ID NO: 2211 - protein, 1337 aa, Homo sapiens
MKPAAREARLPPRSPGLRWALPLLLLLLRLGQILCAGGTPSPIPDPSVATVATGENGITQISSTAESFHKQNGTGTPQVETNTSEDGESSGANDSLRTPEQGSNGTDGASQKTPSSTGPSPVFDIKAVSISPTNVILTWKSNDTAASEYKYVVKHKMENEKTITVVHQPWCNITGLRPATSYVFSITPGIGNETWGDPRVIKVITEPIPVSDLRVALTGVRKAALSWSNGNGTASCRVLLESIGSHEELTQDSRLQVNISGLKPGVQYNINPYLLQSNKTKGDPLGTEGGLDASNTERSRAGSPTAPVHDESLVGPVDPSSGQQSRDTEVLLVGLEPGTRYNATVYSQAANGTEGQPQAIEFRTNAIQVFDVTAVNISATSLTLIWKVSDNESSSNYTYKIHVAGETDSSNLNVSEPRAVIPGLRSSTFYNITVCPVLGDIEGTPGFLQVHTPPVPVSDFRVTVVSTTEIGLAWSSHDAESFQMHITQEGAGNSRVEITTNQSIIIGGLFPGTKYCFEIVPKGPNGTEGASRTVCNRTVPSAVFDIHVVYVTTTEMWLDWKSPDGASEYVYHLVIESKHGSNHTSTYDKAITLQGLIPGTLYNITISPEVDHVWGDPNSTAQYTRPSNVSNIDVSTNTTAATLSWQNFDDASPTYSYCLLIEKAGNSSNATQVVTDIGITDATVTELIPGSSYTVEIFAQVGDGIKSLEPGRKSFCTDPASMASFDCEVVPKEPALVLKWTCPPGANAGFELEVSSGAWNNATHLESCSSENGTEYRTEVTYLNFSTSYNISITTVSCGKMAAPTRNTCTTGITDPPPPDGSPNITSVSHNSVKVKFSGFEASHGPIKAYAVILTTGEAGHPSADVLKYTYEDFKKGASDTYVTYLIRTEEKGRSQSLSEVLKYEIDVGNESTTLGYYNGKLEPLGSYRACVAGFTNITFHPQNKGLIDGAESYVSFSRYSDAVSLPQDPGVICGAVFGCIFGALVIVTVGGFIFWRKKRKDAKNNEVSFSQIKPKKSKLIRVENFEAYFKKQQADSNCGFAEEYEDLKLVGISQPKYAAELAENRGKNRYNNVLPYDISRVKLSVQTHSTDDYINANYMPGYHSKKDFIATQGPLPNTLKDFWRMVWEKNVYAIIMLTKCVEQGRTKCEEYWPSKQAQDYGDITVAMTSEIVLPEWTIRDFTVKNIQTSESHPLRQFHFTSWPDHGVPDTTDLLINFRYLVRDYMKQSPPESPILVHCSAGVGRTGTFIAIDRLIYQIENENTVDVYGIVYDLRMHRPLMVQTEDQYVFLNQCVLDIVRSQKDSKVDLIYQNTTAMTIYENLAPVTTFGKTNGYIA

SEQ ID NO: 2212 - protein, 152 aa, Homo sapiens
GALLEDVAHNPRPRRIAQRGRNTSRMAEDTSPNMNDNILLPVRNNDQALGLTQCMLGCVSWFTCFACSLRTQAQQVLFNTCRCKLLCQKLMEKTGILLLCAFGVSQGPAQSQVEVSLGPGTDYRTLGKTLHCHVTQFPHLPDGCCCENYEMK

SEQ ID NO: 2213 - protein, 222 aa, Homo sapiens
MADDQGCIEEQGVEDSANEDSVDAKPDRSSFVPSLFSKKKKNVTMRSIKTTRDRVPTYQYNMNFEKLGKCIIINNKNFDKVTGMGVRNGTDKDAEALFKCFRSLGFDVIVYNDCSCAKMQDLLKKASEEDHTNAACFACILLSHGEENVIYGKDGVTPIKDLTAHFRGDRCKTLLEKPKLFFIQACRGTELDDGIQADSGPINDTDANPRYKIPVEADFLFA

SEQ ID NO: 2214 - protein, 2504 aa, Homo sapiens
MSGSTQPVAQTWRATEPRYPPHSLSYPVQIARTHTDVGLLEYQHHSRDYASHLSPGSIIQPQRRRPSLLSEFQPGNERSQELHLRPESHSYLPELGKSEMEFIESKRPRLELLPDPLLRPSPLLATGQPAGSEDLTKDRSLTGKLEPVSPPSPPHTDPELELVPPRLSKEELIQNMDRVDREITMVEQQISKLKKKQQQLEEEAAKPPEPEKPVSPPPIESKHRSLVQIIYDENRKKAEAAHRILEGLGPQVELPLYNQPSDTRQYHENIKINQAMRKKLILYFKRRNHARKQWEQKFCQRYDQLMEAWEKKVERIENNPRRRAKESKVREYYEKQFPEIRKQRELQERMQRVGQRGSGLSMSAARSEHEVSEIIDGLSEQENLEKQMRQLAVIPPMLYDADQQRIKFINMNGLMADPMKVYKDRQVMNMWSEQEKETFREKFMQHPKNFGLIASFLERKTVAECVLYYYLTKKNENYKSLVRRSYRRRGKSQQQQQQQQQQQQQQQQQPMPRSSQEEKDEKEKEKEAEKEEEKPEVENDKEDLLKEKTDDTSGEDNDEKEAVASKGRKTANSQGRRKGRITRSMANEANSEEAITPQQSAELASMELNESSRWTEEEMETAKKGLLEHGRNWSAIARMVGSKTVSQCKNFYFNYKKRQNLDEILQQHKLKMEKERNARRKKKKAPAAASEEAAFPPVVEDEEMEASGVSGNEEEMVEEAEATVNNSSDTESIPSPHTEAAKDTGQNGPKPPATLGADGPPPGPPTPPPEDIPAPTEPTPASEATGAPTPPPAPPSPSAPPPVVPKEEKEEETAAAPPVEEGEEQKPPAAEELAVDTGKAEEPVKSECTEEAEEGPAKGKDAEAAEATAEGALKAEKKEGGSGRATTAKSSGAPQDSDSSATCSADEVDEAEGGDKNRLLSPRPSLLTPTGDPRANASPQKPLDLKQLKQRAAAIPPIQVTKVHEPPREDAAPTKPAPPAPPPPQNLQPESDAPQQPGSSPRGKSRSPAPPADKEAEKPVFFPAFAAEAQKLPGDPPCWTSGLPFPVPPREVIKASPHAPDPSAFSYAPPGHPLPLGLHDTARPVLPRPPTISNPPPLISSAKHPSVLERQIGAISQGMSVQLHVPYSEHAKAPVGPVTMGLPLPMDPKKLAPFSGVKQEQLSPRGQAGPPESLGVPTAQEASVLRGTALGSVPGGSITKGIPSTRVPSDSAITYRGSITHGTPADVLYKGTITRIIGEDSPSRLDRGREDSLPKGHVIYEGKKGHVLSYEGGMSVTQCSKEDGRSSSGPPHETAAPKRTYDMMEGRVGRAISSASIEGLMGRAIPPERHSPHHLKEQHHIRGSITQGIPRSYVEAQEDYLRREAKLLKREGTPPPPPPSRDLTEAYKTQALGPLKLKPAHEGLVATVKEAGRSIHEIPREELRHTPELPLAPRPLKEGSITQGTPLKYDTGASTTGSKKHDVRSLIGSPGRTFPPVHPLDVMADARALERACYEESLKSRPGTASSSGGSIARGAPVIVPELGKPRQSPLTYEDHGAPFAGHLPRGSPVTTREPTPRLQEGSLSSSKASQDRKLTSTPREIAKSPHSTVPEHHPHPISPYEHLLRGVSGVDLYRSHIPLAFDPTSIPRGIPLDAAAAYYLPRHLAPNPTYPHLYPPYLIRGYPDTAALENRQTIINDYITSQQMHHNAATAMAQRADMLRGLSPRESSLALNYAAGPRGIIDLSQVPHLPVLVPPTPGTPATAMDRLAYLPTAPQPFSSRHSSSPLSPGGPTHLTKPTTTSSSERERDRDRERDRDREREKSILTSTTTVEHAPIWRPGTEQSSGSSGGGGGSSSRPASHSHAHQHSPISPRTQDALQQRPSVLHNTGMKGIITAVEPSTPTVLRSTSTSSPVRPAATFPPATHCPLGGTLDGVYPTLMEPVLLPKEAPRVARPERPRADTGHAFLAKPPARSGLEPASSPSKGSEPRPLVPPVSGHATIARTPAKNLAPHHASPDPPAPPASASDPHREKTQSKPFSIQELELRSLGYHGSSYSPEGVEPVSPVSSPSLTHDKGLPKHLEELDKSHLEGELRPKQPGPVKLGGEAAHLPHLRPLPESQPSSSPLLQTAPGVKGHQRVVTLAQHISEVITQDYTRHHPQQLSAPLPAPLYSFPGASCPVLDLRRPPSDLYLPPPDHGAPARGSPHSEGGKRSPEPNKTSVLGGGEDGIEPVSPPEGMTEPGHSRSAVYPLLYRDGEQTEPSRMGSKSPGNTSQPPAFFSKLTESNSAMVKSKKQEINKKLNTHNRNEPEYNISQPGTEIFNMPAITGTGLMTYRSQAVQEHASTNMGLEAIIRKALMGKYDQWEESPPLSANAFNPLNASASLPAAMPITAADGRSDHTLTSPGGGGKAKVSGRPSSRKAKSPAPGLASGDRPPSVSSVHSEGDCNRRTPLTNRVWEDRPSSAGSTPFPYNPLIMRLQAGVMASPPPPGLPAGSGPLAGPHHAWDEEPKPLLCSQYETLSDSE

SEQ ID NO: 2215 - protein, 280 aa, Homo sapiens
MAQPPPDVEGDDCLPAYRHLFCPDLLRDKVAFITGGGSGIGFRIAEIFMRHGCHTAARKLAGATGRRCLPLSMDVRAPPAVMAAVDQALKEFGRIDILINCAAGNFLCPAGALSFNAFKTVMDIDTSGTFNVSRVLYEKFFRDHGGVIVNITATLGNRGQALQVHAGSAKAAVDAMTRHLAVEWGPQNIRVNSLAPGPISGTEGLRRLGGPQASLSTKVTASPLQRLGNKTEIAHSVLYLASPLASYVTGAVLVADGGAWLTFPNGVKGLPDFASFSAKL

SEQ ID NO: 2216 - protein, 260 aa, Homo sapiens
RVMAPRALLLLLSGGLALTETWACSHSMRYFDTAVSRPGRGEPRFISVGYVDDTQFVRFDSDAASPRGEPRAPWVEQEGPEYWDRETQKYKRQAQADRVSLRNLRGYYNQSEDGSHTLQRMSGCDLGPDGRLLRGYDQSAYDGKDYIALNEDLRSWTAADTAAQITQRKLEAARAAEQLRAYLEGTCVEWLRRYLENGKETLQRAEPPKTHVTHHPLSDHEASRRWNLPEVGSCGGAFWTRAEIHVPYAARGAARAPHPE

SEQ ID NO: 2217 - protein, 264 aa, Homo sapiens
MQKASHKNKKERGVSNKVKTSVHNLSKTQQTKLTVGSLGLGLIIIQHGPYLQITHLIRKGAAANDGKLQPGDVLISVGHANVLGYTLREFLQLLQHITIGTVLQIKVYRDFINIPEEWQEIYDLIPEAKFPVTSTPKKIELAKDESFTSSDDNENVDLDKRLQYYRYPWSTVHHPARRPISISRDWHGYKKKNHTISVGKDINCDVMIHRDDKKEVRAPSPYWIMVKQDNESSSSSTSSTSDAFWLEDCAQVEEGKAQLVSKVG

SEQ ID NO: 2218 - protein, 1679 aa, Homo sapiens
YHHMETEEEDDTNDEDFNVEIRQFSSCSHRFSKVFSSIDRITQNSAEEKEDSVDKTKSTTLPSTETLSWSSEYSEMQQLSTSNSSDTESNRHKLSSGLLPKLAISTEGEQDEAASCPGDPHEEPGKPALPPEECAQEEPEVTTPASTISSSTLSDMFAVSPLGSPMSPHSLSSDPSSSRDSSPSRDSSAASASPHQPIVIHSSGKNYGFTIRAIRVYVGDSDIYTVHHIVWNVEEGSPACQAGLKAGDLITHINGEPVHGLVHTEVIELLLKSGNKVSITTTPFENTSIKTGPARRNSYKSRMVRRSKKSKKKESLERRRSLFKKLAKQPSPLLHTSRSFSCLNRSLSSGESLPGSPTHSLSPRSPTPSYRSTPDFPSGTNSSQSSSPSSSAPNSPAGSGHIRPSTLHGLAPKLGGQRYRSGRRKSAGNIPLSPLARTPSPTPQPTSPQRSPSPLLGHSLGNSKIAQAFPSKMHSPPTIVRHIVRPKSAEPPRSPLLKRVQSEEKLSPSYGSDKKHLCSRKHSLEVTQEEVQREQSQREAPLQSLDENVCDVPPLSRARPVEQGCLKRPVSRKVGRQESVDDLDRDKLKAKVVVKKADGFPEKQESHQKSHGPGSDLENFALFKLEEREKKVYPKAVERSSTFENKASMQEAPPLGSLLKDALHKQASVRASEGAMSDGRVPAEHRQGGGDFRRAPAPGTLQDGLCHSLDRGISGKGEGTEKSSQAKELLRCEKLDSKLANIDYLRKKMSLEDKEDNLCPVLKPKMTAGSHECLPGNPVRPTGGQQEPPPASESRAFVSSTHAAQMSAVSFVPLKALTGRVDSGTEKPGLVAPESPVRKSPSEYKLEGRSVSCLKPIEGTLDIALLSGPQASKTELPSPESAQSPSPSGDVRASVPPVLPSSSGKKNDTTSARELSPSSLKMNKSYLLEPWFLPPSRGLQNSPAVSLPDPEFKRDRKGPHPTARSPGTVMESNPQQREGSSPKHQDHTTDPKLLTCLGQNLHSPDLARPRCPLPPEASPSREKPGLRESSERGPPTARSERSAARADTCREPSMELCFPETAKTSDNSKNLLSVGRTHPDFYTQTQAMEKAWAPGGKTNHKDGPGEARPPPRDNSSLHSAGIPCEKELGKVRRGVEPKPEALLARRSLQPPGIESEKSEKLSSFPSLQKDGAKEPERKEQPLQRHPSSIPPPPLTAKDLSSPAARQHCSSPSHASGREPGAKPSTAEPSSSPQDPPKPVAAHSESSSHKPRPGPDPGPPKTKHPDRSLSSQKPSVGATKGKEPATQSLGGSSREGKGHSKSGPDVFPATPGSQNKASDGIGQGEGGPSVPLHTDRAPLDAKPQPTSGGRPLEVLEKPVHLPRPGHPGPSEPADQKLSAVGEKQTLSPKHPKPSTVKDCPTLCKQTDNRQTDKSPSQPAANTDRRAEGKKCTEALYAPAEGDKLEAGLSFVHSENRLKGAERPAAGVGKGFPEARGKGPGPQKPPTEADKPNGMKRSPSATGQSSFRSTALPEKSLSCSSSFPETRAGVREASAASSDTSSAKAAGGMLELPAPSNRDHRKAQPAGEGRTHMTKSDSLPSFRVSTLPLESHHPDPNTMGGASHRDRALSVTATVGETKGKDPAPAQPPPARKQNVGRDVTKPSPAPNTDRPISLSNEKDFVVRQRRGKESLRSSPHKKAL

SEQ ID NO: 2219 - protein, 126 aa, Homo sapiens
MKKKLVVLGLLAVVLVLVIVGLCLWLPSASKEPDNHVYTRAAVAADAKQCSKIGRDALRDGGSAVDAAIAALLCVGLMNAHSMGIGGGLFLTIYNSTTRKAEVINAREVAPRLAFATMFNSSEQSQ

SEQ ID NO: 2220 - protein, 1400 aa, Homo sapiens
MAGIIKKQILKHLSRFTKNLSPDKINLSTLKGEGQLTNLELDEEVLQNVLELPTWLAITRVYCNRASIRIQWTKLKTHPICLCLDKVEVEMKTCEDPRPPNGQSPIALASGQSEYGFAEKVVEGMFIIVNSITIKIHSKAFHASFELWQLQGYSVNPNWQQSDLRLTRITDPCRGEVLTFKEITWQTLRIEADATDNGDQDPVTTPLRLITNQGRIQIALKRRTKDCNVISSKLMFLLDDLLWVLTDSQLKAMMKYAESLSEAMEKSAHQRKSLAPEPVQITPPAPSAQQSWAQAFGGSQGNSNSSSSRLSQYFEKFDVKESSYHLLISRLDLHICDDSQSREPGVSANRLMGGAMQLTFRKMAFDYYPFHWAGDSCKHWVRHCEAMETRGQWAQKLVMEFQSKMEKWHEETGLKPPWHLGVDSLFRRKADSLSSPRKNPLERSPSQGRQPAFQPPAWNRLRSSCMVVRVDDLDIHQVSTAGQPSKKPSTLLSCSRKLHNLPTQVSAIHIEFTEYYFPDNQELPVPCPNLYIQLNGLTFTMDPVSLLWGNLFCLDLYRSLEQFKAIYKLEDSSQKDEHLDIRLDAFWLKVSFPLEKRERAELHRPQALVFSASGMIATNTRHAPHCSCSDLQSLFRGFAAAEFFHSNYDHFPKVPGGFSLLHMLFLHHAFQMDSCLPQPNTLPPQRPKASWDLWSVHFTQISLDFEGTENFKGHTLNFVAPFPLSIWACLPLRWQQAQARKLLLASEGRLKPSASFGSPVQSEALAPDSMSHPRSKTEHDLKSLSGLTEVMEILKEGSSGMDNKGPLTELEDVADVHMLVHSPAHVRVRLDHYQYLALLRLKEVLQRLQEQLTKDTESMTGSPLQNQTACIGVLFPSAEVALLMHPAPGAVDADSAGSDSTSLVDSELSPSEDRELKSDASSDQGPASPEKVLEESSIENQDVSQERPHSNGELQDSGPLAQQLAGKGHEAVESLQAKKLSRTQASSSPAALKPPAGRETAVNGQGELIPLKNIEGELSSAIHMTKDATKEALHATMDLTKEAVSLTKDAFSLGRDRMTSTMHKMLSLPPAKEPMAKTDEGVAAPVSGGAARLRFFSMKRTVSQQSFDGVSLDSSGPEDRISVDSDGSDSFVMLLESESGPESVPPGSLSNVSDNAGVQGSPLVNNYGQGSPAANSSVSPSGEDLIFHPVSVLVLKVNEVSFGIEVRGEDLTVALQAEELTLQQLGTVGLWQFLHGQCPGTCFQESSTLKTGHIRPAVGLRFEVGPGAAVHSPLASQNGFLHLLLHGCDLELLTSVLSGLGPFLEDEEIPVVVPMQIELLNSSITLKDDIPPIYPTSPGPIPITLAMEHVVLKRSDDGVFHIGAAAQDKPSAEVLKSEKRQPPKEQVFLVPTGEVFEQQT

SEQ ID NO: 2221 - protein, 224 aa, Homo sapiens
RHLAPNPTYPHLYPPYLIRGYPDTAALENRQTIINDYITSQQMHHNAATAMAQRADMLRGLSPRESSLALNYAAGPRGTPATAMDRLAYLPTAPQPFSSRHSSSPLSPGGPTHLTKPTTTSSSERERDRDRERDRDREREKSILTSTTTVEHAPIWRPGTEQSSGSSGGGGGSSSRPASHSHAHQHSPISPRTQDALQQRPSVLHNTGMKGIITAVEPSTPTVL

(The sequence listing continues in the following parts.)

1. An agent that comprises and/or modulates the expression or activity of a target protein comprising an amino acid sequence identified in the Sequence Listing, in Table A, or a variant thereof.

2. The agent of claim 1, wherein the agent comprises the target protein or a polynucleotide encoding the target protein.

3. The agent of claim 1, wherein the agent modulates the expression or activity of the target protein.

4. The agent of claim 2, wherein the agent modulates the expression of a gene or gene transcript encoding the target protein.

5. (canceled)

6. The agent of claim 1, comprising a polypeptide, a polynucleotide, or a small molecule.

7. The agent of claim 1, wherein the agent decreases the expression or activity of the target protein.

8. The agent of claim 7, wherein the agent comprises an inhibitor of the target protein.

9. The agent of claim 8, wherein the inhibitor is a polypeptide.

10. (canceled)

11. The agent of claim 8, wherein the inhibitor is a polynucleotide.

12.-15. (canceled)

16. The agent of claim 8, wherein the inhibitor is a small molecule.

17. (canceled)

18. The agent of claim 1, wherein the agent increases the expression or activity of the target protein.

19. The agent of claim 18, wherein the agent is an isolated polypeptide comprising the amino acid sequence of the target protein, or a variant thereof comprising an amino acid sequence having at least 80% sequence identity to the amino acid sequence of the target protein.

20. (canceled)

21. The agent of claim 18, wherein the agent is a polynucleotide encoding the target protein or a variant thereof having at least 80% sequence identity to the amino acid sequence of the target protein.

22.-30. (canceled)

31. The agent of claim 1, comprising a gene editing system.

32.-38. (canceled)

39. A pharmaceutical composition comprising the agent of claim 1, and a pharmaceutically acceptable carrier.

40. (canceled)

41. A method for modulating the expression or activity of a target protein identified in the Sequence Listing, in Table A, or a variant thereof in a cell, comprising contacting the cell with the agent of claim 1.

42.-47. (canceled)

48. A method of predicting a likelihood of developing a disease or condition in a subject, comprising quantifying an expression or activity of a target protein identified in the Sequence Listing, Table A, or a variant of the foregoing, in a sample from the subject, wherein the level of expression or activity of the target protein in the sample is indicative of the likelihood of developing cancer in the subject, wherein the disease or condition is associated with the Genome-Wide Association Study (GWAS), the Cancer Genome Atlas (TCGA), whole genome sequencing, phenome-wide association study (PheWAS), expression quantitative trait locus (eQTL) studies, or a combination thereof.

49. A method of preparing a sample that is useful for detecting a likelihood of developing a disease or condition in a subject, comprising:
a) obtaining or having obtained a sample from the subject;
b) adding a protease inhibitor, a control peptide, a standard peptide, or a combination thereof to the sample to prepare a sample that is useful for detecting a likelihood of developing cancer; and
c) quantifying an expression or activity of a target protein identified in the Sequence Listing, Table A, or a variant of the foregoing, in the sample prepared in step b,
wherein the disease or condition is associated with the Genome-Wide Association Study (GW AS), the Cancer Genome Atlas (TCGA), whole genome sequencing, phenome-wide association study (PheW AS), expression quantitative trait locus (eQTL) studies, or a combination thereof.

50. (canceled)

51. A method of treating a disease or condition in a subject in need thereof, comprising administering to the subject an effective amount of the agent of claim 1, wherein the disease or condition is associated with the Genome-Wide Association Study (GWAS), the Cancer Genome Atlas (TCGA), whole genome sequencing, phenome-wide association study (PheWAS), expression quantitative trait locus (eQTL) studies, or a combination thereof.

52. A method for identifying an agent that modulates the expression or activity of a target protein identified in the Sequence Listing, in Table A, or a variant thereof, comprising:
a) contacting a protein identified in the Sequence Listing, in Table A, or a variant thereof with an agent; and
b) determining whether the agent modulates the expression or activity of the target protein, wherein a difference in the expression or activity of the target protein that has been contacted with the agent compared to a reference for the expression or activity of the target protein indicates that the agent modulates the expression or activity of the target protein.

53.-55. (canceled)
